United States Patent Application Publication US 2006/0134663 A1 - sequence listing, part 43

SEQ ID NO: 81528 - DNA, 1065 bp, Homo Sapiens
  misc_feature (269)..(329): n is a, c, g, or t
  misc_feature (983)..(1005): n is a, c, g, or t
ctcaccggaaccttgccgatagattatggtcttgggattgctcgagcagatcgcaggcccccctgtcaattcttttgcctatatgaataaaccaggtcggtgctcccgcgagttctgtcgtttcgcttctcctcttcttttgttaagccaataatctcccttcacgtcatgagccacaagaaattatcgtccaagttggggttacaaaaatgccaagtcttaagttgcagagagagcaagaaccactatctgggttacgcatgtctacnnnnnnnnnnnnnnnnnnnnnnnnnnnnnnnnnnnnnnnnnnnnnnnnnnnnnnnnnnnnncatggatgctatgtgattcaccatgagcagcatgtgtgtacactgagagtgtatgtggctagcaggtgtgtgtactctgtgtacctgagcactgtgcgtacctgtgcactgagcctatatatgggcatgtgtttatagcatgtatgcatgtgtgctatgtgtatataccatgcacttgcacacatatactgtgtgtgcagcacaccagatgccacagatatggtggcgggagggtcaatgacagggaactggggggaggcaggtgtgaggcaggcctgcttgggaacaggtaaatcacttaaggatgcagtgcttttcatctgctttgctgctcttttcctcttaagcagcatgcgctgagattgcagaaacctgaaagatagggaaagtgtgtatcccatctccccttcctgcctgactctcaagtaagttttctttaagtatcttttttcttcagcttcaggaaaaagaggaccttagaactgaaggagcaagattccaacatcacactgtttttgttagctgtgtgtgtgtgtttcctgtgtatccaaaagacagaggagatgaaaaagcaaaagaaaagaaacgaggaatcagattggaaagagtatgagtttgtacttatgaaataaaacttttatctctctacacagnnnnnnnnnnnnnnnnnnnnnnncctgagcaggcggccgcaagcttattccctttagttgagggttaattttagcttggcact

SEQ ID NO: 81529 - DNA, 1607 bp, Homo Sapiens
  misc_feature (57)..(67): n is a, c, g, or t
  misc_feature (95)..(108): n is a, c, g, or t
ttcaaggcgggggccacatggggccagtttattgcagttaaatacctctctctctannnnnnnnnnngtcaatttttccataaagaaaattaaannnnnnnnnnnnnnccccaaaggggagcagggacccagaaacaagaggtggggtgggacgtggcctccctgcataggtccaggccccgggtggccccccaaaggctcccctccttcccatcagcaccctgtctcagtacctccagagagcaggaggcagcgggacgtggcagggcctctgtcccctccctcttgcctccaggtgagaccactagaagtgccggggcttagtgagggccgggagaagggcgacagacagacggatgggcagggaggataccgtttccaagtggaggagggcggtgggcactgtatccacagaaatgcattatttctccccgttttttgttaaaaatctactataaaaaaacgcagctgggggaggggcatgtgtccctctctgtgctaagggctggggaagggggcagcagaggccggcgtgggcggcggcggctgcgtggtggtggcgggcgtcactgccgggtgccctcgcccaccatctccaggttgtgctgctgcagctgggctcgaagcagggcgttctcattcttcagctcctcgatctgctgcctcaggagctcgttgtccatctgcagccgctcggcctctttgaaggtctcctgcatgcgctggttggtctggcgcaactcccggatgtaatcgcaggccttggacaggatccctcctttactcgctcccgtcttgctgttgtctgcgttacagtctggaatgattttcgaaagctggacgatccagttgttgatcttgtccctccgcctccgctccacttcgttgtgctgggctcttctcctctcatctcggggtgttctggttccatcaatttttggagagtaagggtgtgtccggggggcgatcgtcctctgtgttcctgtctgaagcacatcctggggcgtcatcatgacgtagaactggcctccagcctgcaagctctggtctgtggtctgtacggacacagccgtagtatctcccacactggacgctgggaaataggcaaatcgtgcctccccgctgacagcctcggccgccggactgccaccattgctgaagggattttggatcacagccagcgggaagggcgctgcaggacctgggggcacagaggcagcggcggggcccgggcgctgggctgccccgtccacacccacctgggtcacagcctgctgcccccccgcgaaggcagcggtggacacgacgctgacggcgccagctgtgtcgccctggccgtccagctgaccatcagtcacctggactacgcggtatgtcacctgtcctccatttgtctctgtgcggaactggtactggatgttgtggtcgccgaacgccgcctgctggacgctggtgatggccaccgctgtctgctcctccgctcctgggccgtccccgccttcctgcagctcgacgccctcctccgcctcgggtcccttgtcgtggctggcggcggcagcagcggtggccgaggcagcgggatccagacccgggtccagcatgtccat

SEQ ID NO: 81530 - DNA, 768 bp, Homo Sapiens
gatttagtgtttctaggaagaaaacaatcttttttatctagaaggaaagatactttgtgttttcatttttagccatttgaagtttttaatttattgcccccagtgtgttagctgctctaatttcaaactaatacttttctaatttttttcaaattaaataagtaaaaaatacaaaaacagaaccattcaaacagattcagtggtgtaactcaatacatggtcatttttattctcatattttcaggtaagtgaaagggaaatgcgaccatttagagggtaagaaatagggttttgtttttgttcattgttttgttttaagtctatgaactagctaattataaaggaggtagtataaaaactcttcattagtaattaatttatcaataactcatatccgttacttgctcagtgacattcagaactattgcgtctagtactgaaatggggaaagaaatctcttcactaaaggagttggctttaagttagtcttggtgataataaatgttgaaatacaagtatcagtataaaaactggattactggtatcactgtttaggcattgtaatactttaaatgttatctttttttctaaatcagagggaaaaaaatgttgtgaaataacagtccttcccaagggaaacactgtgtacttggagaaatgattgatttattattggcatgcttagttttaaacctgagtttgccaactgtatgttttttaattagaaataaaataaatcttctgatggtgggggaaaaagtaagctac

SEQ ID NO: 81531 - DNA, 573 bp, Homo Sapiens
  misc_feature (90)..(115): n is a, c, g, or t
cctggaatttttcccctttgattcacagtggtcccatttatatctgcttctagcttagtgctatgtgtgagatatgtgtgtgtttggtgnnnnnnnnnnnnnnnnnnnnnnnnnnaaggtttgcaaattaaaaagggccagaaaaatttggcaccaggcaaacgaataaagataggattgggaaagaagttgctaagtgtgcttagttttaataagtaattccttctcttttttcagagaaggccttacagaaaattgttgtgcttagaattgctggatgcatttttaccctccacacaaacctaaaaattttgtgacccctttcacttacctgaaaagtagagaaatggattcagtataaggataaggagggaaggtggaccagaatgaaaactgtaaatatttttttaacctaatatcacttaaatcgaggcagaaagatatagacattcaatgaattatattcaatgcatttaaaataccactgtaattgacagagtaaaagtatagatacaaaaccttgtgtaagaggctgacttttccaaataaacattttttaagaaaacaaaaaaa

SEQ ID NO: 81532 - DNA, 916 bp, Homo Sapiens
  misc_feature (695)..(706): n is a, c, g, or t
catcagtaaaccttgttaacattttgtactggtgacccacctcttaggactttggtcttatccacgtgtatgttgttttcatttggtccaaataatattttatttgtatgggtatcttctaagactaaataggtagttgtgttctttatttttaaaatttctttttagagcaaatgttatgggttcttacccaaagagtcaaaaactatttcttaagaaagagcagagttattcatgactgttctttatacactaaaagcatgcatctaatctaatagtcctcttattatgcttttagttgtatgagtctctttctatgaactgaacacaaaactcaggaattggtggcttaattttagatcagtgcttgtactaggcttagttatatgaatctttataacacataattactaactttgtagccatatatgtaattgactttgaatgttatttacctgaaattaatcttccttcacacatggaccgtaaacggttcccagttgtctgagagcctcatgagggtttctaggatttatgaccttatgaccagtttttttcatttaccaagattttattttcctacatgaaaatttaattgagtaataattattcacatgtgcattttctttttagctgttaaatgtactatgccatcatccaccatttagtaaaatgtagctggcccaggacatgtnnnnnnnnnnnncaacaacaacaataaatagggcatgtgaaatgttaagttacagcaatagatattttatttgtatttcatgttagtacttttttgttttatatcacttataaaggtacagtgtactctttgtcacagctcagttggtaaccgcattccattgaaaagttggccttgtaaaatacaactctcatttaatattcatgcttttgtgcctttaag

SEQ ID NO: 81533 - DNA, 932 bp, Homo Sapiens
gtggaccggtccggaattcccgggatatcgtcgacccacgcgtccgaattgacaatgcagatgagttactagaaagcttcctggagggttttcacgatgaaagcacccaggtgcagctcactctgcttactgccatagtgaagctgtttctcaagaaaccatcagaaacacaggagctagtccagcaggtcttgagtttggcaacacaggattctgataatcctgaccttcgagaccggggctatattgattggcgccttctctcaactgaccctgttacagctaaagaagtagtcttgtctgagaagccactgatctctgaggagacggaccttattgagccaactctgctggatgagctaatctgccacattggttctttggcctctgtgtatcataagcctcccaatgcttttgtggaaggaagtcatggaattcatcgtaaacacttgccaattcatcatgggagcactgatgcaggtgacagccctgttggcactaccactgcaacgaacctggaacagcctcaggttatcccctctcaaggtgatcttctaggggatcttttaaaccttgacctcggtcccccagtcaatgtgccacaggtgtcctccatgcagatgggagcagtggatctcctaggaggaggactagatagtctgccccagaaattgtttacagtgcagttttcttcagcttattctgagattgaaagatatcccagaaatcaagatgagaagaaattaaagcccttatttttgctttggatccgtatgtggttaaatatatattcactcagagaatcaaggttcctttttcgagaacatcacaaggaagacctaaatttgcctgtgtggaagaagatgagtttctaaggcggcagtggacttttaaaatgcttttattgttcttatgcaaattacctaagacaa

SEQ ID NO: 81534 - DNA, 1081 bp, Homo Sapiens
  misc_feature (62)..(79): n is a, c, g, or t
  misc_feature (156)..(164): n is a, c, g, or t
  misc_feature (754)..(754): n is a, c, g, or t
gtgccatagctaaaattaaccctcactataagggaataagcttgcggccgcggctgtaggcnnnnnnnnnnnnnnnnnngatttaaaaatagttactaactttatttgtattcgttttaaaaacagaacttgttacaggtaatcacgaagcttccnnnnnnnnnttacattctgcttttgtcatcttgataggacaaggaatgtttagatgtccttaaaacacagggtaaagttgacaaataacaaactactacaaactatggattgtcacttcaagcacactaaaatgtggaatacatgtacataaattactgaccagttttttgcaatacaaagagtatgcactacagcttatataccataaaggtaacatgccccaaaatataacagaagatcacaaacacgttcggagaaaataataactttgactcttgggttcaattaagattgaagtgaaatgattgggaaagttttctgaaacttgaagggcacgcacattatagcagaaccgtcaatcaacaatcacgtggggttgaaaagcagcaagaagaatatggcacggtaacaggggtaaccacctttctctctcctcagtccccaatttgagttaggaagattgaggactaaacagaaaacagtatttaaaaacatgtattatctgcatagatagaaatcttccattacgatgagagtgaacattcggtcaaagctatgcaggagtgccaagagtctgcagaatatgattctgtttcanaaggaaatatataggtttacatccagacaggacacataacgaatttagtgaaagatccttacgctgttatttaagtgggtagagacgctgactcagccccaggttagttcttgagcttggctaaaaatctactttgagcggatgattttatatcttggtagtgaccaacattgtccttcagtgtctagggattgaatttggtaaaaactcgggcgattctggcccgaggcaatcctaagggatctataaatcgatcagtcaactgtccgtggaatggatcgccaattcaacaaatagcggagaaatggacctggggcgatgatacac

SEQ ID NO: 81535 - DNA, 990 bp, Homo Sapiens
  misc_feature (191)..(191): n is a, c, g, or t
  misc_feature (225)..(225): n is a, c, g, or t
  misc_feature (232)..(232): n is a, c, g, or t
  misc_feature (241)..(644): n is a, c, g, or t
agtgtcgtagacgcgtgtaacggtgtcaacgcactgggagctaacgatggtctcggtggttggagccacgtcgaggagaagcgcagttcgtaacgcagtcgacagagaccacgggagtccagggaacgctgttcttatgtcttcggttcgcacattgactggcgtgatttgtgtgctgtcaggggcgagcntatgaaaaacccagcacgcgccctttacggttcntgccatntgctgccannnnnnnnnnnnnnnnnnnnnnnnnnnnnnnnnnnnnnnnnnnnnnnnnnnnnnnnnnnnnnnnnnnnnnnnnnnnnnnnnnnnnnnnnnnnnnnnnnnnnnnnnnnnnnnnnnnnnnnnnnnnnnnnnnnnnnnnnnnnnnnnnnnnnnnnnnnnnnnnnnnnnnnnnnnnnnnnnnnnnnnnnnnnnnnnnnnnnnnnnnnnnnnnnnnnnnnnnnnnnnnnnnnnnnnnnnnnnnnnnnnnnnnnnnnnnnnnnnnnnnnnnnnnnnnnnnnnnnnnnnnnnnnnnnnnnnnnnnnnnnnnnnnnnnnnnnnnnnnnnnnnnnnnnnnnnnnnnnnnnnnnnnnnnnnnnnnnnnnnnnnnnnnnnnnnnnnnnnnnnnnnnnnnnnnnnnnnnnnnnnnnaagaattcggcacgaggggcaagttcagacttgagctgctgtgacagtgtcagtctgtaaacctggagctaataaaaagtcaggttctcaaagaacctatatggttcaattctgaattatacatcagttgcatgatcttcatgcaggtatgtggctgacattaacatattacagataacactggtcatatacttgaatcttacttttaaagctgcctgataatatatcccagagaaaaggccaattgccacagagatcattggccctctactgcagttgtgttacaatttgcaaatgtttggatgataccatgttttttatccaaaattaaaaaccttcagtcttt

SEQ ID NO: 81536 - DNA, 656 bp, Homo Sapiens
  misc_feature (45)..(79): n is a, c, g, or t
aaacgaccgagcgcagcagagtcttgtgagcgaggaagcggccgnnnnnnnnnnnnnnnnnnnnnnnnnnnnnnnnnnncagtcgacggtaccggacatatgcccgggaattcggccattacggccgggggactctgctagggttagcagagcagccggtaacgttgctggaccgggacgcacgctcagctgaggaggacccccaaagatttttattgttaggtatatcgaccaaagtttaacgagaagaactgtgatcagctgggaggattgctgcaaggaatggaattagctcatagcttactgctgaatgaagaagcatacaatcaactaggtgaagttcagaaggcagagtttatttttgagtggttgagatacttggagaagctcttgtaggcaaccagcaggaatgatgtaagggagaaacagaagactcttgttgaacagctcctgtctttgttgaacagctccccagggcctcctacccgcaaactgcttgctaagaatctagccatactttatagtattggagacacattctccgttcatgaagcaatcgataaatgtaatgatcttattcgtagcaaagatgattctccaagttatcttcccactaagctgtaagtgaaacattaaaacagaacagaaaacaaaac

SEQ ID NO: 81537 - DNA, 1038 bp, Homo Sapiens
  misc_feature (651)..(700): n is a, c, g, or t
  misc_feature (787)..(787): n is a, c, g, or t
  misc_feature (971)..(971): n is a, c, g, or t
  misc_feature (1015)..(1015): n is a, c, g, or t
tttggtatacaggtgccatttaatccattcaaatttggaagctacatcttcaagggtctgagagagctcactccccccatatattccccctttacatgttttcttataagacatacagtttaatcaattaacaaactaaacagcttatatactggcaatatattacagatgggtttatgtcagagtaatagatcacatgaaatggaccatgtggtaccccagtgcattatgtcttggtagagccctgaggacactgacagtagcatctctaagtaagtagtgctgtatgaatacagacacatgcggatctgtatctacatccatctgactaggccaaggagcaggtagatgcaagatagagacacacacatgctggatggggccactgcacaccttgtcatgccatttaaaagggcagttacaggttgccggttttgcagccattaaaattacactttatggaaaaggcttctctaattgtgtctgatttgctttctgtagtaagcatcattggaagaagaccaaagcaagagcaactagaagttaaatatacatttgagcttagctgcaatacagaaccctggggaagaagcaggctgaaagatttatttaattttaggcttggattctctcccttgctgttttcttgannnnnnnnnnnnnnnnnnnnnnnnnnnnnnnnnnnnnnnnnnnnnnnnnntcatcacatcatctcctgaagacgctgggtttcgcaggcaggcggctagtcacctggaacatccaagggtcctggcgaggcttccangctgctgtcagtgtcagatgccagggtcgggtcggggacatggaggagagtccatgacagacgaggatggagggagatctcactgctgtcattgccgcacctggaagagaaggtgtcctttactaaccattttagtgtttcttctgagtcatgactcctgggaagatgtctccatcgtcattgnggtctcttcaccactgctgtcaaactgaggtgagggctcattcngtggtcatcaacttagtgggagg

SEQ ID NO: 81538 - DNA, 868 bp, Homo Sapiens
  misc_feature (228)..(277): n is a, c, g, or t
tgagtcatgttggtcttcattttcttagcacaggtgcagcagtgaacagcagtgagagtctccctccatcctcgtctgtcaatgacatctcctccatgtccaccgaccagaccctggcatctgacactgacagcagcctggaagcctcggcaggacccctgggttgttgcaggtgactagccgcctgcctgcgaaacccagcgttcttcaggagatgatgtgatggannnnnnnnnnnnnnnnnnnnnnnnnnnnnnnnnnnnnnnnnnnnnnnnnntcaagaaaacagcaagggagagaatccaagcctaaaattaaataaatctttcagcctgcttcttccccagggttctgtatggcagctaagctcaaatgtatatttaacttctaggtgctcgtgctgtggtcttcttccagtgattgcttactacagaaagcaaatcagacacaattagagaagccttttccataaagtgtaattttaagtggctgcaaaaccggcaatctgtaactgcccttttaaatggcatgacaaggtgtgcagttggccccatccagcatgtgtgtgtctctatctgtgcatctacctgctccttggcctagtcagatggatgtagatacagatccgcatgtgtctgtattcatacagcactacttacttagagatgctactgtcagggtcctcagggctctaaccaagaccataatgcactggggtaccaccattggtccatttcatgtgatctatactctgacaataaacccatctgtaataatatggcagtatttaacgcgtttagtttggtaattgacttacacgggtatgtctcataagaaaaccttgtaaccgggggacatatttgggggg

SEQ ID NO: 81539 - DNA, 1275 bp, Homo Sapiens
  misc_feature (784)..(792): n is a, c, g, or t
cagtcgacggtaccggacatatgcccgggaattcggccattacggccggggaagggcaaggactttgaccatgtgaattttcagccgagaatggtcagaaagatcagtacaaccccatggattaggctgaaacatatgaaattgctgcatttgtagtttaaaaactgtcagcagtttcatatggttccacctaatattattgaagacaattattttcttagctatcaataggcttaatagttttagttattttagcttttgaaagtgttttaaaagatttcctttatcggacaggaccatctttatgacctgctttctgtttttcaatatcatacattggtgtatgtcaaagaataaattagtaaaattagtaaatgaaaaagactcttccgtacatcattatttccatgctaatgtgtgtctgtgatccagaataacttctcccactcatatcttcagttcacctaatgaaatgaatggatagcaagagccctttgttcccaggactttaaggcaaaatattaaaaattattgccaaaattaagaatataatgtttgtataaatgtccttgaatttgccatttaaattaactcattttcttttcactttgatttgaaagctgataagtatctctgcagcagatagaatattaaaatcaggttgtgtgtacacactgcactatgaggtaccttggtgtcctggtgtgaatagacaagaagcctgtactatattgttgctctctcagtggcaacaatgaagtttttgcaattctagaacttggannnnnnnnnaacaaaagtcccaaaacaccaaaaatgtaaacaagataagagattaatattgtagtgatgtaatttaattaaagttatattttgggttaattttaacaactgaagtcttattgttgaaacttattttcaacaaaactgtgcagttaaatttgtatacgtattcacatactgaaagatgaaccgttaaaatagcacttaattttgtgtttcttcaatatgtcttgatatactttgtgcaattaatattacacatgtaagttgtatggcagtttacagaactcaatgacttgtcatgaggttttcatatgagctacacattgtgtacattgattgttttttatttttacataaatccattctgtcattttcaactttatatataaatctccaatgttatgggaaacaatagattgacacataatttttaaaaattatatttgtaaaatttctctattgtgaataaagtcttttaatatatctcaa

SEQ ID NO: 81540 - DNA, 1067 bp, Homo Sapiens
  misc_feature (174)..(174): n is a, c, g, or t
  misc_feature (216)..(216): n is a, c, g, or t
  misc_feature (270)..(270): n is a, c, g, or t
  misc_feature (275)..(275): n is a, c, g, or t
  misc_feature (290)..(290): n is a, c, g, or t
  misc_feature (341)..(341): n is a, c, g, or t
  misc_feature (982)..(1009): n is a, c, g, or t
ggataaattggattagcattagatgactcttttctctggaattagaatgggttccatgctttagggtgtggagtaaatgaatgttacagaacatggactccgagaaagtctgtgaaatgacctatctatgctgtccgtggcagcataacgtgtgctgagagcagtgtagtgacnccgtgtgaaggccaggacatggctctgagccagctgcctgtncgaatccacctcgactcttgcaagtgtctgaccacagcaatcacccaacctctnttgcntgagttccccctctntaaattggggatgataatagtacccactaaaggatcctggtcttaaaattnggtagcagaaagcaaatgtgcaaagagcaatggaaaacaagtcagaagctgctgtctgattccagaggaactcgtattttatgttaaaaaaaatgctctcaccacacacttgttcatgggcgcagcaaagaagagggatccacagagctggagccatgagggctgacacattggaatgaaagctggcagaattcgtagggagagctttcccatcctgccagccccatgtctggctttaagacagttctattagtgaattaactgttctcaaaaccccaaattaatttgaaccgaatgttactaaaaatgaaatagaataaagtgacctactcttgcctcatccggagttattacgaaggagctccgcagcctgactgagctctggagagcagggctctgtgcacacgcctcctggtccagaggcctccgtgaccatccatgatgccactctgtcccctcagcaagctgcctttttcttcctagcacctgccccagcggtggtatgttttccagtcagttaccacctgtctcatcagaatggaagctccatgagagcagggcctttgtcttgtccccttgtatctccagtgcataggacagtgctgacacagtgcagagtctaaataaacgctgttgaacgnnnnnnnnnnnnnnnnnnnnnnnnnnnncctgagcagcggccgcaagcttattcccttgtagtgagggttaattttagcttggcac

SEQ ID NO: 81541 - DNA, 489 bp, Homo Sapiens
ctgactggaaaacataccaccgctggggcaggtgctaggaagaaaaaggcagcttgctgaggggacagagtggcatcatggatggtcacggaggcctctggaccaggaggcgtgtgcacagagccctgctctccagagctcagtcaggctgcggagctccttcgtaataactccggatgaggcaagagtaggtcactttattctatttcatttttagtaacattcggttcaaattaatttggggttttgagaacagttaattcactaatagaactgtcttaaagccagacatggggctggcaggatgggaaagctctccctacgaattctgccagctttcattccaatgtgtcagccctcatggctccagctctgtggatccctcttctttgctgcgcccatgaacaagtgtgtggtgagagccaaggtaatgcaggtcaggggatcaaaggtgaagggtcacacattattaaaaagttggcggccgca

SEQ ID NO: 81542 - DNA, 586 bp, Homo Sapiens
  misc_feature (62)..(62): n is a, c, g, or t
  misc_feature (105)..(105): n is a, c, g, or t
atgaggcaagagtaggtcactttattctatttcatttttagtacattcggttcaaattaatntggggttttgagaacagttaattcactaatagaactgtcttanagccagacatggggctggcaggatgggaaagctctccctacgaattctgccagctttcattccaatgtgtcagccctcatggctccagctctgtggatccctcttctttgctgcgcccatgaacaagtgtgtggtgagagcctgaaataaataggtgtaaaatgggtcaaaaccgtcgcttctatttctgtttttaactgaagaaaaatttgccccatttccagaggcagagagaggaggagacatctgggtaaaggcaaactaaagtatatattaaacacacacatacgtatacagatgaacaggtatgtatctacccccacccacatactatacacatgtacatacaaccatatatgtctgacttcttcgcctatgataatccaaaactgggtctcatacaatggtctttttgcaatcgttacagcatgacttttattgggttgtaggttttatctttaagaggccacaaaaaattttt

SEQ ID NO: 81543 - DNA, 799 bp, Homo Sapiens
gggacgccggaccggagagcgcggaggcagccatggtgcggttcaagcacaggtacctgctctgcgaactggtgtctgacgacccccgctgccgcctaagcctcgatgaccgagttctgagcagcctcgtacgggacacgatcgccagggtgcacggaactttcggcgcagccgcctgctccatcggcttcgcggttcgatatctcaatgcctatactggaatagtgctacttcgatgcagaaaagaattctatcagcttgtgtggtcagctcttcccttcatcacatacttggagaacaaaggacaccgttacccatgctttttcaacacattacatgtgggaggtacaataagaacatgtcagaagttcctaattcagtacaacaggagacagctgttgatcttgttgcagaactgcactgatgaaggagagcgggaagctatccagaagtctgtgacaagaagctgcttactagaggaggaggaggagtcaggtgaggaggctgcagaagcaatggagtgaacctctgctccccacacagctggctacactgctcaggcttcaggcccacttgttgaacagaacaatctgggtagcaacagcatcttccacagttttccaaactggatagctgccaaccagcagacattacccacttgaaatggagtactcagttaaactgaagttgcctttacctagcattccctggtgaagtgttgcaggttgtgaactctgtagacatctttattgcttggctaagagtagatttaataaatgtatctggtttccgtggaaaa

SEQ ID NO: 81544 - DNA, 643 bp, Homo Sapiens
gtctgacgacccccgctgccgcctaagcctcgatgaccgagttctgagcagcctcgtacgggacacgatcgccaggtgcacggaactttcggcgcagccgcctgctccatcggcttcgcgggtgcaagggcgctgggggaagaggggaacccgggaggatggcgggatgtggagggggcaggcgccggaggaagaaagaaggggcacgagtggccaagcccgtgcacccttttttgtaaggtatctctttaagcgcctgggaccccaagcgagagtccgaaattagcagagcgctaaaaggaggggcccgaaggcagtggggctttgagctagaagcctctttttacctgcttgacaggtaatttctgtaattggttgtgattgaatttgatagggtagagaattaaatgagggaagctgtgtatacttcctagtaagagctatcatatgaccgattacatgaacatcatatggaacaaaaattgtcaaaagtactccgggaaagcccttaaatagttggtaaaggacagaacacatgatcgtcaatatatgtaaatacaggatgagactaggacagagggccccttctttcacaccacttaaattagttcccactttaaccttgtttgagattgacttctgg

SEQ ID NO: 81545 - DNA, 1009 bp, Homo Sapiens
  misc_feature (130)..(130): n is a, c, g, or t
  misc_feature (236)..(236): n is a, c, g, or t
cgcttcccgggtgcgatcatatcactcagacgttccgatgaagcgcatgcgcagcataattgatagtcatcatagcacccagcttacattatgctccggctctatgtgttggattgtgacgataacattncacacagaaacagctatacatgatacgaattatagactcactataggaattgcccctcgagcccagaattcgcacgaggtcacaatagccaaaatatgaatcaacntaagtgcacatcagtgatgaatgataaagaaaatgtaattatattcacaacgaaatataattcacacaaaaatgaatgaaatactgtcagtgccacaagatggatggaattggaggtcattatgttaagtaaaataagtcaagcacagaaagacaaatattatatgttttcattcatatgtgggagctaaaatacgctggtctcatgaagatagagagtagattgattggcgattaccaaaggccagaagggtagcacggagagagcaagaacagaagttgattaatggatataaatatacaattgagtagaagaaataagatctagtgtttgacagatcagtagggtgattatagttaaccataatctattgtgtatttaaaaataactagaaaaaaataattcaaatgttcctagtataaaagaaatatttaagggatggctaccccaattaccttgatttgatctttatacattatcaaatttgatacaaatgaatgtatcaaattatcacatgtacaccaaaaatatgtacatttatcaataaaaaataattttatgagagcgatttgaacacaagcagtctagacctaaggccacattctttcttaacatctatattattataaatactctacctggttataaataaaataatcatacatgtttaaagaaacaattggattttttaatgaccagacaagaccaacaaaaatgatcaagtatatttgataaaggacaatacaaaaataaaaaagcctacagccgcggcc

SEQ ID NO: 81546 - DNA, 1403 bp, Homo Sapiens
  misc_feature (909)..(944): n is a, c, g, or t
  misc_feature (964)..(1312): n is a, c, g, or t
  misc_feature (1353)..(1353): n is a, c, g, or t
ggggcggaaaagcgggctgtctcggaaactcagagccgggttcctcccgggtttctgccgggtttctccctgcggctcctgggttgttgagactcttgtgaagatggcttgcgctgccgcgcggtccccggccgaccaggacaggtttatttgtatctatcctgcttatttaaataataagaagaccatcgcagagggaaggcgaatccccataagtaaggctgttgaaaatcctacagctacagagattcaagatgtatgttcagcagttggacttaacgtatttcttgagaaaaataaaatgtactctagagaatggaatcgtgatgtccaatacagaggcagagtccgggtccagctcaaacaggaagatacttccctctgccttgtacagttcccatcacgtaagtcagtaatgttgtatgcagcagaaatgatacctaaactaaaaacaaggacacaaaaaacaggaggtgctgaccaaagtcttcaacaaggagagggaagtaaaaaagggaaaggaaagaaaaagaagtaacctagtatcagcatcaagtatgtggtactactgtaagagacatgaatggagacttctaatttgtatcggagggaaacagaagctttttgtttgcatcatttaactgaactgtgaacccttgtgcctctcatctttatcatcggagttgacagtgaaacaaatttacatcagaagtttgcatctcgcgtatatgccgtataaaagaatttttttgtctttcaatgcagttttttggaagaaaatatttttaaatggacaatggactgtacaataagttacttgaaataagttgtttcagataaatttcaattagatttaaaataaacattatgtccaccttttaagttaatgaaataaaatttgaaactgannnnnnnnnnnnnnnnnnnnnnnnnnnnnnnnnnnnccctcgtgcccgaattcttnnnnnnnnnnnnnnnnnnnnnnnnnnnnnnnnnnnnnnnnnnnnnnnnnnnnnnnnnnnnnnnnnnnnnnnnnnnnnnnnnnnnnnnnnnnnnnnnnnnnnnnnnnnnnnnnnnnnnnnnnnnnnnnnnnnnnnnnnnnnnnnnnnnnnnnnnnnnnnnnnnnnnnnnnnnnnnnnnnnnnnnnnnnnnnnnnnnnnnnnnnnnnnnnnnnnnnnnnnnnnnnnnnnnnnnnnnnnnnnnnnnnnnnnnnnnnnnnnnnnnnnnnnnnnnnnnnnnnnnnnnnnnnnnnnnnnnnnnnnnnnnnnnnnnnnnnnnnnnnnnnnnnnnnnnnnnnnnnnnnnnnnnnnnntacggttaccacagatcaggggatacgcaggaagacatgtnagcaaaggcagcaaaagcaaggacgtaaaaagcgcgtgctgggtttttca

SEQ ID NO: 81547 - DNA, 734 bp, Homo Sapiens
ggggggctgtctcggaaactcagagccgggttcctcccgggtttctgccgggtttctccctgcggctcctgggttgttgagactcttgtgaagatggcttgcgctgccgcgcggtccccggccgaccaggacaggtttatttgtatctatcctgcttatttaaataataagaagaccatcgcagagggaaggcgaatccccataagtaaggctgttgaaaatcctacagctacagagattcaagatgtatgttcagcacttggacttaacgtatttcttgagaaaaataaaatgtactctagagaatggaatcgtgatgcccaatacagaggcagagtcccggggtccagctcaaacagggaagatgggagcctccgcccttgcacaggtcccatcacattatacactaagcctaacttctggttcctaggtaagtcagtaatgttgtatgcagcagaaatgatacctaaactaaaaacaaggacacaaaaaacaggaggtgctgaccaaagtcttcaacaaggagagggaagtaaaaaagggaaaggaaagaaaaagaagtaacctagtatcagcatcaagtatgtggtactactgtaagagacatgaatggagacttctaattttgtattggagggaaaccgaaagttttttggtttgcatcatttaacctgaactgtggaaccccttgttgccctctccttcttttatccatcgggaggttggacagttgg

SEQ ID NO: 81548 - DNA, 1054 bp, Homo Sapiens
  misc_feature (64)..(64): n is a, c, g, or t
  misc_feature (80)..(81): n is a, c, g, or t
  misc_feature (141)..(541): n is a, c, g, or t
cgcgactcacagggaacactgtatcttatgtctgtcggtttcccactctgactgacgtcgattnttgatctcgtcagggnncgagcctatggaaaacgccagcaaccgcctttttacggtcctggcctatgctgactttgnnnnnnnnnnnnnnnnnnnnnnnnnnnnnnnnnnnnnnnnnnnnnnnnnnnnnnnnnnnnnnnnnnnnnnnnnnnnnnnnnnnnnnnnnnnnnnnnnnnnnnnnnnnnnnnnnnnnnnnnnnnnnnnnnnnnnnnnnnnnnnnnnnnnnnnnnnnnnnnnnnnnnnnnnnnnnnnnnnnnnnnnnnnnnnnnnnnnnnnnnnnnnnnnnnnnnnnnnnnnnnnnnnnnnnnnnnnnnnnnnnnnnnnnnnnnnnnnnnnnnnnnnnnnnnnnnnnnnnnnnnnnnnnnnnnnnnnnnnnnnnnnnnnnnnnnnnnnnnnnnnnnnnnnnnnnnnnnnnnnnnnnnnnnnnnnnnnnnnnnnnnnnnnnnnnnnnnnnnnnnnnnnnnnnnnnnnnnnnnnnaagaattcggcaagaggagaattccttggcagcctgaagcgccagaagcggcagctgtgggaccggactcggcccgaggtgcagcagtggtaccagcagtttctctacatgggctttgatgaagcgaaatttgaagatgacatcacctattggcttaacagagatcgaaatggacatgaatactatggcgattactaccaacgtcactatgatgaagactctgcaattggtccccggagcccctacggctttaggcatggagccagcgtcaactacgatgactactaaccatgacttgccacacgctgtacaagaagcaaatagcgattctcttcatgtatctcctaatgccttacactacttggtttctgatttgctctatttcagcagatcttttctacctactttgtgtgatcaaaaaagaagagttaaaacaacacatgtaaatgccttttgatatttcatgggaatgcctctcatttaaaaatagaaataaagcattttgttaaaaag

SEQ ID NO: 81549 - DNA, 623 bp, Homo Sapiens
tgcggccgcgcctgcccgctcgcacccctctcccgcgcccggttctccctcgcagcacctcgaagtgcgcccctcgccctcctgctcgcgccccgccgccatggctgcctcccccgcgcggcctgctgtcctggccctgaccgggctggcgctgctcctgctcctgtgctggggcccaggtggcataagtggaaataaactcaagctgatgcttcaaaaacgagaagcacctgttccaactaagactaaagtggccgttgatgagaataaagccaaagaattccttggcagcctgaagcgccagaagcggcagctgtgggaccggactcggcccgaggtgcagaagtggtaccagcagtttctctacatgggctttgacgaagcgaaatttgaagatgacatcacctattggcttaacagagatcgaaatggacatgaatactatggcgattactaccaacgtcactatgatgaagactctgcaattggtccccggagcccctacggctttaggcatggagccagcgtcaactacgatgactactaaccatgacttgccacacgctgtacaagaagcaaatagcgattctcttcatgtatctcctaatgccttacactacttg

SEQ ID NO: 81550 - DNA, 955 bp, Homo Sapiens
aaaaaaacggttgtggttccctttcttccctacccttgccactcccactttctggcaccgagtttatttttcacttacttacttccccagaccccgggctcgcctccacaaaggagaagagactgccctggcggtcctggtggcttttcttagcatgtgtggcactgttgcccagtgtgggagttggtttaaattctcctgactccagtttataacatccttttaaaaaatttaaaaacaaacagccacacccctcctccagtccttctcctcagttcttgtgtgaaactccagctgatgttaccacagtaacatcagttaattgggcaagccctgatgtcagtgtgtgtaactgacctctggcctggcctgcacagagaagccctataatcacaggtctgtggtggccccgaaatggggggcctgctagtcaggaggatgctgtgcacactgtgtgtgatgaatctcgccagaaaggctcctgaggtcccaggttggcacttctccctgcagccattgtagaagatctgctggtccttgcaggcaaagctacagccagaatgtccgtttgaaactcctagctcatctgtcaccgagcttcatccgaatgtgccacggagcttgctctccacttcctccgtgcagtggccctgccacagccctccctcggcacactttgaccctttgtaggattggaattagcaggactcggctatttaaagcaccagtctggggtcgcctgggcccctgctgaccccctcctccagagcagccagcccagcccgggaacaagacggacttcctctcccttcggactcacagcctttgcagagtcaagctccacttgaagctcactcagtaatatcctttcaatgtgttttatattgttttgactgcctttttttgtagaaataaaaattgaccttagaatttatcgtcagataaacttgtaaaa

SEQ ID NO: 81551 - DNA, 393 bp, Homo Sapiens
agtaacaattggtagagagccacaggtagaaaagatactcccagctgacagggtgataaaaggcagggaagaattgggcctgtgctgatccaggaaggttttattgtttgcttgttttttgtatttactcgtgactaaattttattcatttaagtcagaattttgatatttgaaataagactactttcccttttcttactatctataaaaaagacgaggcagggatgctgtgttctttctgtcaaattctaaatgtgatctttgccattgcttatttgaattcaagaaagctatactttttcatcacatataactcacagtttcatttttgcattgttggattagacttaataaaacctaaatggaaaataaattcctaaatctgagcctaaa

SEQ ID NO: 81552 - DNA, 201 bp, Homo Sapiens
gcggccgcctactactactatacggctgcgagaagacgacagaagggaagtagacattgtatgcttatggtttctcattatgaaggtgcagcttgtaggaggtttgtacggatgtgctttgaagttatgtatattacatataacaggaaaaaatattaaaataaacagtgctggtaagtatgaagctgacattctaaaagc

SEQ ID NO: 81553 - DNA, 1171 bp, Homo Sapiens
  misc_feature (287)..(323): n is a, c, g, or t
  misc_feature (858)..(897): n is a, c, g, or t
gtcgatcaagaccaggcactggatgtgcccatcaagaaggccaacctgcagcatcttgatatgctggtatccaaagctgtcgtattcagagaaacagacccatccccagaggagagggacaagaagccacaggaatcctgacctctgtgaagagatcctggcatttctggtccaacccaagccagagaaccattaagaaggggccttcattctggattctccgacgcaacactgacgtcccagctgcgacgtactgtcactgatgagagactgggaagggaaaagcnnnnnnnnnnnnnnnnnnnnnnnnnnnnnnnnnnnnncaggaaacaccgcatccttgcactgctgctggggctggcagagcagttggctgacagcaacaaccgacatctgaacacctacatttcctttgcagacaaattgaagaactggtgggatttttttcaagaaaaaaaattatataataactataatcccttgctcacccctttcccccgccaaataagaaacgcaagccagaccacgatgattgtagaagtccctcccgccctggttctgcacgttacagttagcagacgagcaattccatttgttcttctccagcatctctaaggcccacttgaatgcaaaggaaaacacttgcacagcaaagcaagagaagtcacagcagcaagacacgcacagtcaaccattttccgagaaaaaaagaaaattccccacttggaaagaaagaggaggaacactggattcttactttctggatcttgacactgggctgcaaaacctaccttcctctatcccgcctcacctaaccatcaactctcaatgtcttgctgtcattttctgtctcggctnnnnnnnnnnnnnnnnnnnnnnnnnnnnnnnnnnnnnnnnaccctctgtgtcctggtccttctgagggccactgcagatgactctcctttgaaatgagaaaaagaaaagaaagcaagaacagaaaacgaagccacaggaagggaagtagacattgtatgcttatggtttctcattatgaaggtgcagcttgtaggaggtttgtacggatgtgctttgaagttatgtatattacatataacaggaaaaaatattaaaataaacagtgctggtaagtatgaagctgacattctaaaattataattatctgactata

SEQ ID NO: 81554 - DNA, 1085 bp, Homo Sapiens
  misc_feature (59)..(80): n is a, c, g, or t
  misc_feature (572)..(641): n is a, c, g, or t
  misc_feature (916)..(916): n is a, c, g, or t
  misc_feature (940)..(940): n is a, c, g, or t
  misc_feature (969)..(969): n is a, c, g, or t
  misc_feature (1029)..(1029): n is a, c, g, or t
gtgccaagctaaaattaaccctcaactaaagggaataagcttgcggccgcctgtcaggnnnnnnnnnnnnnnnnnnnnnnaccttacacaaatactgtcatgaacctggcctcttatgtccccactcagtgcctcagattccttcactgctataaaataaggggttaaacagatgaccttcaggaccccctacctgtgccattttataatttctaagttgattccatgaggcagccgctgatacctgggccagagatatgggcttaggtcaaggacaagacccagtctttccagatttcatctctccaagctgacacccaattcaaaaaaaggagaaaaccaacagagaaggaggagacagggaatagcagaagaaatcagggcagccaaaaaagatattacaaattccatatattttatacgctgcgaagctttactcacgctacttactatttattttatatacaagcttagttatctggtatccaaatcatagaagataaaagctgcaaataagaacagagaccaaggagccagctagtacagaaacaccaaacaaagatgtgacagcnnnnnnnnnnnnnnnnnnnnnnnnnnnnnnnnnnnnnnnnnnnnnnnnnnnnnnnnnnnnnnnnnnnnnngcttattagtctggggtcatttagaatcggtggagtcatttcaagtaggggcaaatatacaacacatctatatttcaacaggttttgaaaacacagctatgcttaatacaccatatgaacacgttcatctaaaatgacaatactgagtcatcacgattaaattatattccagatattcagcttaataaagcaagaagtatgtatccattttacatattcccagccagagttttaagtgtttgtttgtctgcttcaatggtcctgagacatcaganacgtactatcagatgctcatctangagggccaaatggtgtttcctgatgacangacacttgatcatgtaatagagcagagcagaataatatgatactacggatcacagctcangtacagcatgttattcaaaacagaaatcgttggctgcatcaataggaagcaaaatt

SEQ ID NO: 81555 - DNA, 1826 bp, Homo Sapiens
  misc_feature (81)..(115): n is a, c, g, or t
agaattaagatcatatagggcgctactcggtctagccgaacgaacgagcgcagcgaaggtagtgagcgaggaagcggccgnnnnnnnnnnnnnnnnnnnnnnnnnnnnnnnnnnncagtcgacggtaccggacatatgcccgggaattcggccattacggccgggggggacccgggagcctggacgagtccgagcgcgtcacctcctcacgctgcggctgtcgcccgtgtcccgccggcccgttccgtgtcgccccgcagtgctgcggccgccgcggcaccatggctgtgtttgtcgtgctcctggcgttggtggcgggtgttttggggaacgagtttagtatattaaaatcaccagggtctgttgttttccgaaatggaaattggcctataccaggagagcggatcccagacgtggctgcattgtccatgggcttctctgtgaaagaagacctttcttggccaggactcgcagtgggtaacctgtttcatcgtcctcgggctaccgtcatggtgatggtgaagggagtgaacaaactggctctacccccaggcagtgtcatttcgtaccctttggagaatgcagttccttttagtcttgacagtgttgcaaattccattcactccttattttctgaggaaactcctgttgttttgcagttggctcccagtgaggaaagagtgtatatggtagggaaggcaaactcagtgtttgaagacctttcagtcaccttgcgccagctccgtaatcgcctgtttcaagaaaactctgttctcagttcactccccctcaattctctgagtaggaacaatgaagttgacctgctctttctttctgaactgcaagtgctacatgatatttcaagcttgctgtctcgtcataagcatctagccaaggatcattctcctgatttatattcactggagctggcaggtttggatgaaattgggaagcgttatggggaagactctgaacaattcagagatgcttctaagatccttgttgacgctctgcaaaagtttgcagatgacatgtacagtctttatggtgggaatgcagtggtagagttagtcactgtcaagtcatttgacacctccctcattaggaagacaaggactatccttgaggcaaaacaagcgaagaacccagcaagtccctataaccttgcatataagtataattttgaatattccgtggttttcaacatggtactttggataatgatcgccttggccttggctgtgattatcacctcttacaatatttggaacatggatcctggatatgatagcatcatttataggatgacaaaccagaagattcgaatggattgaatgttacctgtgccagaattagaaaagggggttggaaattggctgttttgttaaaatatatcttttagtgtgctttaaagtagatagtatactttacatttataaaaagaaaatcaaatttggttctttatttggtgtgtgcctgtgatgttttctagagtgaattatagtattgacggtgaatcccatgtggtatagattccataatatgcttgaatattatgatatagccagttaattagcattgatttcattctgttaatgaattggaaatatggcactgaaagagtggtaaaccattagaatagctcggttatggaaaacaagtggcacggcatttattagaacaagtttacgaatggttaatatttttacacaggatagggtgaaaattatattagggatatgggtaccgatggaaacattggtcagaggtctaattgatggtatgaatgttaacgagaaacaggtgttaatagaagtggcctaact

SEQ ID NO: 81556 - DNA, 1100 bp, Homo Sapiens
  misc_feature (42)..(62): n is a, c, g, or t
  misc_feature (416)..(426): n is a, c, g, or t
  misc_feature (482)..(493): n is a, c, g, or t
  misc_feature (909)..(909): n is a, c, g, or t
  misc_feature (927)..(927): n is a, c, g, or t
  misc_feature (945)..(946): n is a, c, g, or t
  misc_feature (968)..(968): n is a, c, g, or t
  misc_feature (994)..(994): n is a, c, g, or t
  misc_feature (1016)..(1016): n is a, c, g, or t
  misc_feature (1044)..(1044): n is a, c, g, or t
  misc_feature (1052)..(1052): n is a, c, g, or t
  misc_feature (1058)..(1058): n is a, c, g, or t
ccctcaactaaagggaataagcttgcggccgcctgctcaggnnnnnnnnnnnnnnnnnnnnnatttgtgaaacgatacaaattttattaatatacaacgggaaatttgacagtttagggaatcaggtactcaatcttttgattctcttctgcacttatggtatatgagaagccagattataatcacatagttatttgataacacaaatatacaaagaacaaggagtgctgattttataatgcagtgttcagggacatgaagacttgactgtgtactcattgggccatgtttcttaaaatgaagttcaagagtccctcaaaccagaggtacataaagcccaggataaatatgacacatctgcctagggtaccaaagatttggggaataaaaagctaaataactgaattggtaatttnnnnnnnnnnntttacactaaaacacacagatatattattaattaggatgcaaaaaattgcatggannnnnnnnnnnnaaagcatgaagcctccaagaggatttgagcttgaagtgggcagctttaggcttagggtaagcagaatagtggagtcaggagcacaggcttgtagttggacagaccagggttttgagaataagactcttgacacttattagctatgtgatcttcgaaaagtcatgtaacttgtccaagctctataacctcatcaatataatgaaaataaacaggcttgttgcagggactgaaggagccagaccacaaaactagctaggacagacacctgaaggatacagtaaagtatggtggttagtgtagctgtgatggtagctatgcctccagattcctctcagctattaggggtgctttggggagaaaagctgggaagtcactatcttggtgtatctcatctctacaatggagcaagcctgcanagtcatctcctgtctttnctctgagctggcactttnnctctgatggacatgcactgtanaacatctggggaagtacggtgaatgnggtgggccaggttcactctganatcagagactgtgtaaactcatcttccntgcgtgangcgtangagcagtcatgccaggtcttgggaaatcttgcggtgccacca

SEQ ID NO: 81557 - DNA, 926 bp, Homo Sapiens
taccgggagcgcggggagcgcgggtcccgccgacgccgcgcacgccatgggagccgtgactgacgacgaagttatacggaagcgtctcctcattgatggagatggtgctggagatgatcggagaattaatctgctagtgaagagtttcattaaatggtgcaactctgggtcccaggaagagggatatagccagtaccaacgtatgctgagcacgctgtctcaatgtgaattttcaatgggcaaaactttactagtatatgatatgaatctcagagaaatggaaaattatgaaaaaatttacaaggaaatagaatgtagcatagctggagcacatgaaaaaattgctgagtgcaaaaagcaaattcttcaagcaaaacgaatacgaaaaaatcgccaagaatatgatgctttggcaaaagtgattcagcaccatccagacaggcatgagacattaaaggaactagaggctctgggaaaagaattagagcatctttcacacattaaagaaagtgttgaagataagctggaattgagacggaaacagtttcatgttcttcttagtaccatccatgaacttcagcaaacattggaaaatgatgaaaaactctcagaggtagaagaagctcaggaagcaagcatggaaacagatcctaagccatagacaggctaattgcccaccactcccaggaatattgaaatagctacatgaccataatgtgtttaaaatgtggtatgctcttgagatatttaaagttttggcagtaaaatactctgtttttaagtatgaatgtatttcattcatatttcctctcacaaaggaaaatgacttcagtatagatttgtttttattaaaatgcattttttattcttaagtggtaggaagcaacatccaaaaatgcttaataaaatgcttttaagcagcaaaa

SEQ ID NO: 81558 - DNA, 942 bp, Homo Sapiens
  misc_feature (61)..(104): n is a, c, g, or t
gtgccaagctaaaattaaccctcaactaaagggaataagcttgcggccgcggctgtaggcnnnnnnnnnnnnnnnnnnnnnnnnnnnnnnnnnnnnnnnnnnnnaatgttttgaatggaatttagttgcctccaagaattgtgccttatagcatttggggaccagggggtaactgcccctcctgaatatccctcagcctcttcccttttccccagtgctctgttcaaacccgcctgggaaagggatcctgcccttagccctggctcgttgtgcattgcagtgaggcaaagaagaaagcaggtagattccttccgacagggcatcaagttcttcccgcccacgtcctctagcccacccctggtctgctccccagctgtttgaaggatagcacaagcccctcgtccctagagcttctctcccttttatttattctcttaacatccctttccccctggccttcctgcccccgcccccttctcagagcctcctagacaataggccctttggaccgagtttctcagggatgcccaggccacccctcagctcttcttagcgctggtctccagtcctgccctgggagctggagcctgggtatttggggacatcttgcctcagttgtatggttctttcctgtgggctcaattttgccctacatagttggataaaactctgtgctgtcctggagagtaaagctgttcacccacacagctgggcccggcttgtgccccgtggagcctggcacattccaggctcctaggaggaggcatcagagaaagacaccctgagttttactggcctgacacccttctccagagaagacctgtgaacctgagcccaagggcaagtgtacacttgtttactgtgtaagcaagagtagaagaatgtctaatgtacagtggaaccttgtacagaataaataatagctttgagaaatcaaaaaaa

SEQ ID NO: 81559 - DNA, 1656 bp, Homo Sapiens
taactataggctagtacgagctgggtgttgaattcggcacgaggcagggactgcggcgcctgagggagtcgctgacgggcacgctgactggaggctggcggacaggcgacagcgacctgcggcaggaccagaggagcgagagcagcaagaaccacacccagcagcaatgtcagcggaagtggaaacctcagagggggtagacgagtcagaaaaaaagaactctggggccctagaaaaggagaaccaaatgagaatggctgacctctcggagctcctgaaggaagggaccaaggaagcacacgaccgggcagaaaacacccagtttgtcaaggacttcttgaaaggcaacattaagaaggagctgtttaagctggccaccacggcactttacttcacatactcagccctcgaggaggaaatggagcgcaacaaggaccatccagcctttgcccctttgtacttccccatggagctgcaccggaaggaggcgctgaccaaggacatggagtatttctttggtgaaaactgggaggagcaggtgcagtgccccaaggctgcccagaagtacgtggagcggatccactacatagggcagaacgagccggagctactggtggcccatgcatacacccgctacatgggggatctctcggggggccaggtgctgaagaaggtggcccagcgagcactgaaactccccagcacaggggaagggacccagttctacctgtttgagaatgtggacaatgcccagcagttcaagcagctctaccgggccaggatgaacgccctggacctgaacatgaagaccaaagagaggatcgtggaggaggccaacaaggcttttgagtataacatgcagatattcaatgaactggaccaggccggctccacactggccagagagaccttggaggatgggttccctgtacacgatgggaaaggagacatgcgtaaatgccctttctacgctgctgaacaagacaaaggtgccctggagggcagcagctgtcccttccgaacagctatggctgtgctgaggaagcccagcctccagttcatcctggccgctggtgtggccctagctgctggactcttggcctggtactacatgtgaagcacccatcatgccacaccggtaccctcctcccgactgaccactggcctacccctttctccagccctgactaaactaccacctcaggtgactttttaaaaaatgctgggtttaagaaaggcaaccaataaaagccagatgctagagcctctgcctgacagcatcctctctatgggccatattccgcactgggcacaggccgtcaccctgggagcagtcggcacagtgcagcaagcctggcccctcgacccagctctactccaggcttccacacttctgggccctaggcatgcttccggtagtccctgtttttgcagtacatgggtgactatctcccctgttggaggtgagtggcctgtaagtccaagcctgtgcgagggggccttgctggatgctgctgtacaacttctgggcctctcttggaccctgggagtgagggtgggtgtgggtggaagcctcagaggccttgggagctcatcccatctcacccagaatccctctaaccccttgggtgcggtttgctcataacccagcggatc

SEQ ID NO: 81560 - DNA, 1033 bp, Homo Sapiens
ctggctttcccatagcacgctcggcaggaaagcaagtgatgcccctggctcccatctcacacaggtgacactgcaccgagaggtaacgtggccctcacagcccaccacgcctggccttcgcccaattctgaaacttcgtaggatagagctggaaagtggcacatggtgaagcgagatccagctgtctgggtggatgtcggagctccataggctgagcagagatggttcttagtgaggttctcgctgccagttgacggtgaaatcatagctgccatttacattttgtgagattatgaaaaacataagactaaagaaactaaatgtgctattcctgtggacacaaaaatgtgtgtttttcagatggggaggcgaccaaaaaggaaaaacatttcatcttaaaactttcctaagacaaaggaaaacaaaaaaccatgctctacaacttcaaatttttcttacaaagaaaaatttaatattcgatgagaggttgaaccaggcttaaagcagacatactaggaaatggtgcagcctgtaagaatgccagtttgtaagtactgactttggaaaagatcatcgcctctatcagacacttagggtcctggtctggcaattttggcctgatgtgatgccacaagacccaacagagagagacacagagtccaggataatgttgacagtggtgtagccctttaggagaaatggcgctccctgcggctggtattaggttaccattggcaccgaaggaaccaggaggataagaatatccataatttcagagctgccctggcacagtacctgccccgtcggaggctctcactggcaaatgacagctctgtgcaaggagcactcccaagtataaaaattattacacagttttattctgaagaacattttgcattttaataaaaaaggatttatgtcaggaaagagtcatttacaaaccttgaagtgtttttgcctggatcagagtaagaatgtcttaagaagaggtttgtaaggtcttcataacaaagtggtgtttgttatttacaaa

SEQ ID NO: 81561 - DNA, 643 bp, Homo Sapiens
  misc_feature (78)..(78): n is a, c, g, or t
tggataatgcacattttgtagagatattggaaagccagaagttgaatatgattgtgataatttgcaacatagtaaganggggaaaactgcgcaggggttaagccccgtggaccaaaggaaatgtgaacgtcttctgctttacctctattgccatgaattaagtattgaattccaggagcctgttcctgcttcgataccaaactactataaaattataaagaaaccaatggatttatcccaccgtgaaaaagaagcttcagaaaaaacattcccaacactaccaaatcccggatgactttgtggccgatgtccgtttgatcttcaagaactgtggaaaggtttaatgaaatgatgaaagttgttcaagtttatgcagacacacaagagattaatttgaaggctgattcagaagtagctcaggcagggaagcagttgcattgtactttgaagataaactcacagagatctactcagacaggaccttcgcacctttgccagagtttgagcaggaagaggatgatggtgaggtaactgaggctctgatgaagactttatacagccccgcagaaaacgcctaaagtcagatgagagaccagtacatataaagtaaaatgacatggatttaaatcaattgtttaaaaaa

SEQ ID NO: 81562 - DNA, 633 bp, Homo Sapiens
aggctaacttgtcatgttccaacactacttagctttccaagtgaggactggatatgcacatttcgtagagatattggaaagccagaagttgaatatgattgtgataatttgcaacatagtaagaaggggaaaactgcgcaggggttaagccccgtggaccaaaggaaatgtgaacgtcttctgctttacctctattgccatgaattaagtattgaatcccagcagcctgttcctgcttcgacaccaaactactataaaattataaagaaaccaatggatttatccaccgtgaaaaagaagcttcagaaaaaacattcccaacactaccaaatcccggatgactttgtggccgatgtccgtttgatcttcaagaactgtgaaaggtttaatgaagctgattcagaagtagctcaggcagggaaagcagttgcattgtactttgaagataaactcacagagatctactcagacaggaccttcgcacctttgccagagtttgagcaggaagaggatgatggtgaggtaactgaggactctgatgaagactttatacagccccgcagaaaacgcctaaagtcagatgagagaccagtacatataaagtaaaatgacatggatttaaatcaattgttt

SEQ ID NO: 81563 - DNA, 1088 bp, Homo Sapiens
  misc_feature (1009)..(1027): n is a, c, g, or t
tgaaccttcccctgagatgacctccgcccgagacggcaaggtcatgagggagcgaggcccataccacgccttcccgggtggcgatcatatcagtgccgcagttccgatggaagcggcatggcgcacgcaatatgtgagtgctcatcataggcacccaagcttacacttatcttccgctcgttgttgtgtgactgtgacggataacaattcacacaggaacagctatgacatgatcacgaatttaatcgaactcactatagggaatttgcccctcgagcccaagaattcggcacgagagtctcactactttggacctatatggcttcagattaagtcatcccaagaaacatacatacattctaaatggtatatattgcgaatatatgcccctctaaaagaatcaggtcagaaatgcaataacaattagactagactgttgcccgtgttaggagaatgtgtggtcatcctagttactaattactctcactcaagatggagatgttgtccagtttaacatagtcttaagttttcttaaacccaaataatttatgagtagcttattacatctgcagagctaccttattataatagtacatttacatattgtctcttttagagtaaggaccacatgattgctttgctttaatttaccactttttgtattgcatccatataagagtgtcttactagccagatgattccatggcaaatgattctctgggtccaaagatcggaaagtgaaaagcacacagctggaataagcaacaactccactgctagttacagctctccgtaggaccaccaaaacgtattcaagagctctaggattccataagacccagagcaaaatggtgcctctctgtatattattcttaagagtgtgctgggaagtcaatggtccatgggtaggcagggcagctgtaactgggctttttaaaacaaattatgagtttctctctgttgccagtagttaaggaagctgaacttaaaaggtatacttttttccttnnnnnnnnnnnnnnnnnnngcctacagccgcggccgcaagcttattccctttagttgagggttaattttgagcatggcac

SEQ ID NO: 81564 - DNA, 1052 bp, Homo Sapiens
  misc_feature (61)..(61): n is a, c, g, or t
  misc_feature (112)..(402): n is a, c, g, or t
ctttacgtcgtgcgtatatgctttgctactgtcttctgcgtatcccggatttgtgataccntataccgccttgatgagtgtacgctcccgcagcgaacgaccggcgcagcgnnnnnnnnnnnnnnnnnnnnnnnnnnnnnnnnnnnnnnnnnnnnnnnnnnnnnnnnnnnnnnnnnnnnnnnnnnnnnnnnnnnnnnnnnnnnnnnnnnnnnnnnnnnnnnnnnnnnnnnnnnnnnnnnnnnnnnnnnnnnnnnnnnnnnnnnnnnnnnnnnnnnnnnnnnnnnnnnnnnnnnnnnnnnnnnnnnnnnnnnnnnnnnnnnnnnnnnnnnnnnnnnnnnnnnnnnnnnnnnnnnnnnnnnnnnnnnnnnnnnnnnnnnnnnnnnnnnnnnnnnnnnnnnnnnnaagaattcggcacgaggttcttttcaaatgttgactgaaatttaggtttcagtacaatacctcccacaaatctgatgcatgacttgttgaacacattgtatactttcagatgccaagtcaaaaccatttcagtcacattttagcaaggcagaaattattcatgttcttaagtatgaataaatgttagccactgttctactattacacagttcatagtcttatcaacctaacagtcaaaaaacaagaaaaactaaaccccaacatgaagtaacaataaacaatatttaaccaagataatgcaatgaacaaccaaattaattagtttaaattaaaaacccagcaataccatcttgttagtcagtgcaaacactacatacagggttttctcaagaaagctgaaagcacctgattcttttgccaagtcatcagattcaataatgtacaggcttaaatctgcattttaaaaaactgccattacattagtgcataatttatcaaaattgtaaaaacgattctgcataacttaggagaatttaatatctagtacatcagctgaaagacttaggcacttggttatatttttaattaattacttcaacaagtagcctgtgtataaatattaacaaagcagaaactactcttgaaaaatg

SEQ ID NO: 81565 - DNA, 1164 bp, Homo Sapiens
  misc_feature (1006)..(1015): n is a, c, g, or t
cagtcgacggtaccggacatatgcccgggaattcggccattacggccgggctctcttttttttcatgcttgctgtacaatgagaactcaaataaaaataaaccaaagtttacaatcaactgtagaagtagtttagtgtaactggcttcacagatggctgccacagagtgtgaagatgtttgttagttttaagcattcttttaatggctcctaagacatgcagatggactgaggagcattggttaatcatgcacctttgtgccatgtttaactcttttatttctttttacttaatctaatgttagtgaatttgtcttatgtaaaaggatatttcagggaaatattttcagaaatctatttagagtctctttaacacagtgtcccattgaaattttaatttttagagaatttatgaatcactgtttcaagaaccagattggaaagacaatgaagcctttattgagccactacattaaaagtatatattgctttactgccttcaataccagtattacatcaatgcatgtatcagaaacttcacagaaattacatggcaactcttgtagctaagaaagtaattctgaggtgtacatttgtcttgcctttttaaatttataaacttgccctaaaaggagatgcatatctgggaaactgaactgtctttttgcagtttagccttcatgtatataaaatatgccattaattttattggggaagaaattccatccaaaaatgttgcctacagctatgagttaagagtgtctgtacagtgtgtagcttttattttctaaaatcacagatagggcatgtatatgacttataaatatataaatacgattttgtattaaaagttttgtagtttatggcaaaatctggtcctgtggtaggctaaataagtacagtccctgtgaaaggaatgtttgtggctcatgtcagtgtgtgaatgcatagacaatttgaagtttttgatatatttgtgatatttatcttgagcactgcaatctcannnnnnnnnngcccaccaagggaattcaatgggaatgtttattgtgactttgtcctctgttgcattttaaagttatttcctgtaatttattttcagtacataattaaaaatttgttgtatatatccttcccccatatttccgggttacgccatccttgt

SEQ ID NO: 81566 - DNA, 1843 bp, Homo Sapiens
tggaccggtccggaattcccgggatatcgtcgacccacgcgtccgccggaatcgcggaaaccgccggtgcacgttggagtcataagacggcgtcggtgttgcagtctgtgtccttggaggtgaccagggccactgcaggcatggtgctagcagagctgtacgtctctgaccgagagggaagcgatgccacgggagatggaaccaaggagaaaccatttaaaacaggtctaaaggctttgatgacagtagggaaagaaccatttcctaccatttacgtagattcacaaaaagaaaatgagaggtggaatgttatttctaaatcacagttgaagaacattaaaaagatgtggcatagggaacaaatgaagagtgaatcccgggaaaagaaagaggcagaagatagtttacgaagagaaaagaacctggaagaagcaaagaagattaccattaaaaatgatccaagtctcccagagccaaaatgtgtgaagattggtgcgttagaaggatatagaggccaaagagtaaaggtgtttggctgggtccacaggctgcgcaggcaaggaaagaatttaatgtttctggtgttgcgagatggtacaggttatcttcagtgtgtcttggcggatgagttgtgtcagtgctacaatggagttctcttgtccacggagagcagtgttgcagtgtatggaatgctaaatcttaccccaaagggcaagcaggctccaggtggccatgagctgagttgtgacttctgggaactaattggggttggcccctgctggaggagctgacaacctgatcaatgaggagtctgacgttgatgtccagctcaacaacagacacatgatgatccgaggagaaaacatgtccaaaatcctaaaagcacgatccatggtcaccaggtgctttagagatcacttctttgatagggggtactatgaagttactcctccaacattagtgcaaacacaagtagaaggtggtgccacactcttcaagcttgactattttggggaagaggcatttttgactcaatcctctcagttgtacttggagacctgcctcccagccctgggagatgttttttgtattgctcagtcataccgggcagagcagtccagaacacgaaggcacctggctgagtacactcacgtggaagctgagtgtcctttcctgacttttgacgacctcctgaaccggttggaggacttggtttgtgatgtggtagatcgaatattgaagtcacctgcagggagcatagtgcatgagctcaacccgaactttcagccccccaaacggcctttcaaacggatgaactattcagatgctatcgtttggctaaaagaacatgatgtaaagaaagaagatggaactttctatgaatttggagaagatatcccagaagctcctgagagactgatgacagacaccattaatgaaccaatcttgctgtgtcgatttcctgtggagatcaagtccttctacatgcagcgatgtcctgaggattcccgtcttactgaatctgtcgacgtgttgatgcccaatggttggtgagattgtgggaggctcaatgcgtatctttgatagtgaagaaatactggcaggttataaaagggaagggattgaccccactccctattactggtatacggatcagagaaaatacggtacatgtccccatggaggatatggcttgggcttggaacgattcttaacgtggattctgaataggtatcacatccgagacgtgtgcttataccctcgatttgtccaccccttgcacgccagtaaccattttctccagaaagcctggaggaaagattatgaaaggaacaggctcttt

SEQ ID NO: 81567 - DNA, 891 bp, Homo Sapiens
  misc_feature (73)..(107): n is a, c, g, or t
aaatgataatcatatagggctactcgttgaacgaacgacgagcgcagcgagtctgtgagcgaggaagcggcgnnnnnnnnnnnnnnnnnnnnnnnnnnnnnnnnnnncagtcgacggtaccggacatatgcccgggaattcggccattacggccgggcatttttttccactgtaatcgttctgtatatattgaaatttttaaaaggggagaattcagggtagtacttggtatttgaatgagctatattcagtttgcaggttataatgtggtgtgtgaatattgccagcttgttttggccaagttatatgttaatttcatttgaaaacctgtttaacggccggcttgttgattgcaactgagttttaaaaaattgatcctaccagtatctagtacccttcttcattttcctcttataaatagacattgacttattttaaaagtttttaaaaatctcttctttccagggtagtacttattccctggttgattttttcataccaaattatttctttatgcatggttcatgaaggcatagagattaagtgctgggattacaggcacgagccactgaatctggccataggtgaattccttaaccacagggagctaactcctttcatggtggaaaattttaactgtcttagatgaaagttttaacttaagtatttactcctctttctttctttctttttttaaacagagaaaatacggtacatgtccccatggaggatatggcttgggcttggaacgattcttaacgtggattctgaataggtatcacattccgagacgtgtgcttataccctcgattttgtccagcgttgcacgccataacccatttctccagaagcgtggaggcacagcatacttgcacggcaccaggctccttt

SEQ ID NO: 81568 - DNA, 1507 bp, Homo Sapiens
  misc_feature (48)..(48): n is a, c, g, or t
  misc_feature (163)..(376): n is a, c, g, or t
  misc_feature (389)..(389): n is a, c, g, or t
  misc_feature (395)..(417): n is a, c, g, or t
  misc_feature (812)..(824): n is a, c, g, or t
cgctttacgtctgctttgtgcttgctactttctctggtatccccgatnttgatacgtatacgcttgatgagtgtacgtcccgcaccgaagacgagccagcgatcatggcgagagcggagacgcccatacgcaacgccttccccggcggtgcgattcataatgnnnnnnnnnnnnnnnnnnnnnnnnnnnnnnnnnnnnnnnnnnnnnnnnnnnnnnnnnnnnnnnnnnnnnnnnnnnnnnnnnnnnnnnnnnnnnnnnnnnnnnnnnnnnnnnnnnnnnnnnnnnnnnnnnnnnnnnnnnnnnnnnnnnnnnnnnnnnnnnnnnnnnnnnnnnnnnnnnnnnnnnnnnnnnnnnnnnnnnnnnnnnnnnnnnnnnnaagaattcggcancgaggnnnnnnnnnnnnnnnnnnnnnnnattgaaaaatggtttaataaatataattattaaataaatgttaagactttaaatactaacccaagaaaaatttaaaaatacaaattcagtaagacttttgctctaacaacaatttttcaaaacgaatcaacaacaaaaaagtatccagtgtttcttttcttatgaagattattaataaaacacagtattggtaagcacattttaacagtatgcttttcttttgtagggaaaggagatatggctatgtctaacatcgtgggatccaatgtgtttgatatgttgtgccttggtattccatggtttattaaaactgcatttataaatggatcagctcctgcagaagtaaacagcagaggactaacttacataaccatctctctcaacatttcaattannnnnnnnnnnnnagcagttcacttcaatggctggaaactagacagaaagttgggaatagtctgcctattatcatacttggggcttgctacattatcagttctatatgaacttggaattattggaaataataaaataaggggctgtggaggttgatattattaatagtgttatgcagaaaatatgaatggcagggaggggcagagagaaaaatccatttcttcatttaaatcaaattttaaaaatcttgaaccttagaatctaaaacttacagtaatttaaaaccaaccaaaatcacatcctaatttttctgagccctttcttttcatgaaaaattacatattataaaacagaagtttggggggaaaaaatctatgttttaccatacaataagttgacaaaaactggagaaactagaacaaacaaatccaactatgtagtactgaaaacaacaagaaaatggcttatttcattaaaaacagtataaccattcatttaaactgaatgaccagacttgctgtctttaaaaacccaaacttgagattaacaaaaattacagtatatttttaacattatactgttaaaagctggtgggagttttaaaagttcatttttacagcttttgtaagcatacaatattactttaaaaaaatgacttttactaggagattcagcaaaacagatgtaggaatgttcc

SEQ ID NO: 81569 - DNA, 1063 bp, Homo Sapiens
  misc_feature (567)..(973): n is a, c, g, or t
  misc_feature (984)..(984): n is a, c, g, or t
  misc_feature (990)..(990): n is a, c, g, or t
  misc_feature (993)..(993): n is a, c, g, or t
  misc_feature (997)..(997): n is a, c, g, or t
  misc_feature (1027)..(1027): n is a, c, g, or t
  misc_feature (1031)..(1031): n is a, c, g, or t
aagaaagtgcagattgaattcgaattaattttattttataaggaatttagaaaacatgagcaaatattcatattgcattaaaaaaacaaagtctatatatcattcaaattttaaaagtcagtgtgacactaaaaaatgtactaacaaagtaatatgtttcattttagaacaaaattttatcagtggctcatcacaactgatatacaaacaaaatgctaaaatgatgtaaaactgaatctcaaagtgatccagttggatgaagggagcaccaattatcatcgatgtgggactgccatatactctaccaaagaaaacaaactaccattaggtgataaagatgagcaaataaataaactagagggagggaatgagcccacaatttctgaaattttacagtaagtggtttatttgtttctgttgttacatgtcttttgtctgttttcttccttcaagaaattaagtggatgtgtgaaggatccaagaatatttcccaggtatatcttactttttcaggaagaataactttatactgaagaaataatgattaatcctcgttccgaattcttnnnnnnnnnnnnnnnnnnnnnnnnnnnnnnnnnnnnnnnnnnnnnnnnnnnnnnnnnnnnnnnnnnnnnnnnnnnnnnnnnnnnnnnnnnnnnnnnnnnnnnnnnnnnnnnnnnnnnnnnnnnnnnnnnnnnnnnnnnnnnnnnnnnnnnnnnnnnnnnnnnnnnnnnnnnnnnnnnnnnnnnnnnnnnnnnnnnnnnnnnnnnnnnnnnnnnnnnnnnnnnnnnnnnnnnnnnnnnnnnnnnnnnnnnnnnnnnnnnnnnnnnnnnnnnnnnnnnnnnnnnnnnnnnnnnnnnnnnnnnnnnnnnnnnnnnnnnnnnnnnnnnnnnnnnnnnnnnnnnnnnnnnnnnnnnnnnnnnnnnnnnnnnnnnnnnnnnnnnnnnnnnnnnnnnnnnnnnnnnnnnnnnnngggcaacaaanggcaangancgtnaaaaggcgcgttgctggcgtttttcatagntccngccccttgacgagatcaaaaaatcgagctcag

SEQ ID NO: 81570 - DNA, 1044 bp, Homo Sapiens
  misc_feature (151)..(151): n is a, c, g, or t
  misc_feature (164)..(164): n is a, c, g, or t
  misc_feature (191)..(191): n is a, c, g, or t
  misc_feature (214)..(214): n is a, c, g, or t
tttctgcactattttttgtgtagagaccatttgtgatgtatactcagagatatcttctcagactattgtctattcctatctcactctaactccttttgatcttcttatttacaatgttcatgcaacagcaagcagttagccacatcagcantagccccagtccncagactgagatgattgggagctgggangttgtgagagaagttgagatagngattctgcttcccagtactctatcagtagagaaaaggaggggtaatattagctaagaagaagaaaaaagctattcttcaggaccccagtagattggacgtaagcaagtaaatattgcacaggcatcatgatgtaatagttgatggaccccagagatacccctcacccatgcagagaacaaagctgtgtggaagagcaactaccataagatggtgtttccttccagcggctgttaaagccatcctgaataacaaatcagctattcctacctacagacccattccaatatgctgtgatacacgacacggtgcaccgcagaggagacagacatcttcagcacaaacacagatgcctgcaggagcttggcaagtcactaaattgcatgaaattgtgaggtgcacaccaaatgcagggatgggggaggccgtgggaagctctgtattctcaaaatttgacagctaattccggtttttagaaaatgcctgaggccagtagaggccctctagtcactcactgctgctgtttctgatataattattgagaaagctatctcacttaatagaagaaaacacgcactatcaaaaccagatagcctaacgtgcatgtgaaaattgagaaagctgaaaacaaatccaggtacccttctctgaactggagtgtttccacagacttgaataatttatgaaattatcacaccagtatttctcatatcaccaagaagactttctctcctgcagtagaggattgttatatttgcctaaaaaacacgattccaatatatgacaagggcagataatttataagtgaatgttaataaaattggatgtgtat

SEQ ID NO: 81571 - DNA, 1089 bp, Homo Sapiens
  misc_feature (991)..(1017): n is a, c, g, or t
caaacatacaagcaaagtgacaaatgagtggacagacagggcgaatagaaaaggataaaaaagagtaagaacatgaagccaaaaataaaaaggggaaacaagacatgtcatgctgaacaaaggaaatggaaatgggagaacataacggtgaacgtgagtgcacataaggagaaaaaggaacggagagaacaactaaagaaagcatgagcaaacaggtcggacaaggctggactatagatgagaagcaaagggcaggtgatcaaatccatagcaggtgaatagcagaatgaaataggcccacaaatgaagccctgaagtagtggaatggtaacagagcatggcaacattagcatacggagtagataaactgaatgaccaagagacaacagagtgtaatgaatcttgtctatgagattctgactaatgtgtaacaaatgagaccaaagattttccctcatatatcccactgacacccctccccgtaaatctcatctgacgagatccagtgtattcataaggtgggacaaagcatctgttttcccagtgggagccaggggtgagtgtggaaataacagtgactgattattatcagcttctatggttgaaagcaagctggcgaagtaagaggaggtagagttgagaaggtgtggaagatagggacagctgcccccagaactcccttcaagggaggacttccccagctatgggaagtgccatcagggtggccgcagctgcagagagccacttcacctgagaccacgcccttcctggggcagcctgtatctggtgtctgagtgaggcatggtataaacacctggtcatttcaatccaacatgggacggacactgacagacagtactcccagcaggcccaggccagccagggcttcgtcaggcctgcagcacaatttgacttcctatgcccaggcctgcttcctcttcttcctcttcttttcacaggtgcttattcctaataaacatcttgcaacccnnnnnnnnnnnnnnnnnnnnnnnnnnncctgagcaggcggccgcaagctttttccctttagtgagggttaatttcggctatggcacttggccggtcgtt

SEQ ID NO: 81572 - DNA, 1037 bp, Homo Sapiens
  misc_feature (694)..(694): n is a, c, g, or t
  misc_feature (718)..(718): n is a, c, g, or t
  misc_feature (754)..(754): n is a, c, g, or t
  misc_feature (777)..(777): n is a, c, g, or t
  misc_feature (779)..(779): n is a, c, g, or t
  misc_feature (790)..(790): n is a, c, g, or t
  misc_feature (798)..(799): n is a, c, g, or t
  misc_feature (855)..(855): n is a, c, g, or t
  misc_feature (857)..(857): n is a, c, g, or t
  misc_feature (882)..(882): n is a, c, g, or t
  misc_feature (890)..(890): n is a, c, g, or t
  misc_feature (974)..(974): n is a, c, g, or t
  misc_feature (976)..(976): n is a, c, g, or t
  misc_feature (1000)..(1000): n is a, c, g, or t
  misc_feature (1010)..(1010): n is a, c, g, or t
  misc_feature (1014)..(1014): n is a, c, g, or t
ttccataaacacgagtttaattagcccctggggctctacagggaagaaataatcagacttcaagggtgccccattccccagagtccattcctggtatttgaaagagcaacatgccccggagtgttgtgagtcctctggaggctcaaggagacctagggccaaaagcgaggactcaatccttttctgccagtatcgggggacagtgccccgacgtcccaggagcccagggcgacaccagcccaggggcggggatcgggcaggattctcggtctactcacgcccgggcagccgccggctcttcccactggatctccgccgggaccaactcccaccctcgccggacaagctcagacctgctgctccgcaaaaccagaattggaaatgctccagatgggacgaggaacaaggacagaaagtcaaaagcatcaacaggtggcttcgccggagggcgtccgagaacctctgcctgctgaaccgcttcacgcctaatccccgccacccaccggctgaaatgttaccacacaagacataaattctagaatcctgtctgcggaattccccgccccccgcgcagttgaaacttgcacagggccactcgcgtgtctctgggtggtaaattctccatgcgtggtcaaacggcttatgcatagctcaggaccgttacgtgcgacccaccaggactgagtggggacangcgctgcgcccccacacctactangagctgcggtaggacctccaatgcccagggggctangcattttcgcttcagcttcctgnanggtcccagccnaggctcannaactgcacactatccggccacccgggtcgcgcagactttcgggggaggggggaacnancgacctgcaatggctcactttggancggtatanggagcagtatacgtgttaaagaggcaatgtcagtacaacagaaacgtaacataatcgtagagaagcatttacgaggacatgacnanagcttagtaagcagtatacaacangaatggtgtnagcncagtacataaactcgttcagcag

SEQ ID NO: 81573 - DNA, 310 bp, Homo Sapiens
ttccataaacacgagtttaattagcccctggcgtctacagggaagaaataatcagacttcaagggtgccccattccccagagtccattcctggtatttgaaagagcaacatgccccggagtgttgtgagtcctctggaggctcaaggagacgcccgggcagccgccggctcttcccactggatctccgccgggaccaactcccaccctcgccggacaagctcagacctgctgctccgcaaaaccagaattggaaatgctccagatgggacgaggaacaaggacagaaagtcaaaagcatcaacaggtggc

SEQ ID NO: 81574 - DNA, 567 bp, Homo Sapiens
aagaattcggcacgaggtctaggttcctcccttatggagtctcacaagactgtctagccagcaagatctcttttccaaccaggccaggagcacctctccacccactgctgctggtctgaccgccttcctggaagtccctcttgaggcaggccctggagttagaagctgggcagaggcacccacagccttatcctttgccaatctctgactcaatgccacggccactgtagtgagctgaaccacctccagcagtcccctggcagaagcacctggaaaacatgcaatgggaaccttcaccctgaggccaggcccttcccatgctacccaacagtagacaggacaccctgtgttgttggctgcaccggggtgctgggatctgtggatccctggggcctggaagccactctcagcacatacagccactgtgttccgaggtccagtcagctggccgggaaggaattcaacacagccaaggacagaggtccatatgatgacgggtggatgctcgtgtgactttgctgaccttttatgttttctatgggcaataaaggccaagagagctcaaaa

SEQ ID NO: 81575 - DNA, 1117 bp, Homo Sapiens
  misc_feature (70)..(87): n is a, c, g, or t
  misc_feature (545)..(804): n is a, c, g, or t
acgacggccagtgccatactcgaattaaccctcactaaagggaatacgcttgcggccgcggctgtatgcnnnnnnnnnnnnnnnnnngaggtttctggatggtcgtgtgaaccgaggggacgggtactggactgacaagaaatgagccttgaaggtcaatctgggtgacacccgagtctcctggtgagtcggactccggagaattatctcaagtccagcatagacagcgcacatagacagaaaaggaaacggacaatcccaagtgccaagggaaccttcccaggtttctttagggcagctaaactgctctgtcaaagcctaagtccatttatgacaggccgagcaccctgagccctcgcaggagacacgagcgccttcatggccctcctgccccgcacccacctctccgccacccctgctgtctgtcccttccctgaaacctttatttcgagtgtctttgtggcttccctctttaccatccttgagttgaaatatcacctcttaagggaagccttccctctcctccctagttaaaatgatactcnnnnnnnnnnnnnnnnnnnnnnnnnnnnnnnnnnnnnnnnnnnnnnnnnnnnnnnnnnnnnnnnnnnnnnnnnnnnnnnnnnnnnnnnnnnnnnnnnnnnnnnnnnnnnnnnnnnnnnnnnnnnnnnnnnnnnnnnnnnnnnnnnnnnnnnnnnnnnnnnnnnnnnnnnnnnnnnnnnnnnnnnnnnnnnnnnnnnnnnnnnnnnnnnnnnnnnnnnnnnnnnnnnnnnnnnnnnnnnnnnnnnnnnnnnnnnnnnnnnncgatacatagattgcgcatctgaatttatacagtacacttattttatcattcccccagtgtcgcgagtacatgggctcgtgttgaattcttggcgcaaggccaatttcctaaatgagtctatgatttcgagccattcatactggttctgggtgaatggttttttcatattcacaacatgtgatctgataaagctgtaatctgtgttgtatgactggttctcactattggtgggctatgcgcttcattggatctgttgcactgtttattcttaactcgtgatagtttcggtttggttcgcgttctcaatccgcg

SEQ ID NO: 81576 - DNA, 1046 bp, Homo Sapiens
  misc_feature (16)..(16): n is a, c, g, or t
  misc_feature (154)..(154): n is a, c, g, or t
  misc_feature (158)..(158): n is a, c, g, or t
  misc_feature (167)..(167): n is a, c, g, or t
  misc_feature (178)..(178): n is a, c, g, or t
  misc_feature (235)..(235): n is a, c, g, or t
ggtgagttgattccangtatatgtcctgcatgtccagctgatcatccagttgattacagatggacatatcttataaacgggacaaagatccatattaacaagctgattctagatgtggcaatttgacgtattcatgctgatgtgcagagactgntgantccaccacntcatctccccntggtgccatacagaggattcgtgtcatatgaaaaggctctgaaagatgagttctaantgagctcactatctcaggtggtgttctactgtgtgtcccaagcctgtaccatatcataaaagtggagcctgtactcctccagttatctggccagtgtagactcctccatctgaatatgaacctccagggtaagaattttcagacatgtctatactgaacagtaggatcctgcactttccaaatgtctgcctccttttgttcttcattgacccattctaattcctgttaggtgtgagaagaattgtcttcagttctctctccattctcattcatgatggaatcattgatccattgaccagttgagaaatgattgatgctgaagaagtggtattctattggtaaggcttattaccaaacttccgataatgaagcaggctaccaaaaacttatccagcccaccctaggagtgtttggatttgatcatggatgtagcatacaccaaaatccaccgagacctttgcaaaattaggctacttgttttattttgccagattatcatgggagagtctttaactagttctgaatatttgtaagtctgagtacttcatagaattataaagaaagtacagctgaccccttctcaccatgttgtaaatatttactgagactgggtgcagtactgagggataataatcttctgatttatcaaatcctgactgtctagagcaaattgtacactctctttgtgaatggtcctgtaacgtgtatgaacacatttctgggtgccttagaagttgtatttttcatgtgtgctaatatgcagtatttatacattgtgagaagctgctttgaataaaaaggttgaaacttc

SEQ ID NO: 81577 - DNA, 459 bp, Homo Sapiens; identical to SEQ ID NO: 7608

SEQ ID NO: 81578 - DNA, 976 bp, Homo Sapiens
  misc_feature (118)..(545): n is a, c, g, or t
  misc_feature (566)..(583): n is a, c, g, or t
cgagtcgacagagagcagaggactccagggaacgctgttttatgtctgtcggttcgcactctgactgaggtcatttttgtgctgtcaggggcgagctatgaaaacgcagcacgcgccnnnnnnnnnnnnnnnnnnnnnnnnnnnnnnnnnnnnnnnnnnnnnnnnnnnnnnnnnnnnnnnnnnnnnnnnnnnnnnnnnnnnnnnnnnnnnnnnnnnnnnnnnnnnnnnnnnnnnnnnnnnnnnnnnnnnnnnnnnnnnnnnnnnnnnnnnnnnnnnnnnnnnnnnnnnnnnnnnnnnnnnnnnnnnnnnnnnnnnnnnnnnnnnnnnnnnnnnnnnnnnnnnnnnnnnnnnnnnnnnnnnnnnnnnnnnnnnnnnnnnnnnnnnnnnnnnnnnnnnnnnnnnnnnnnnnnnnnnnnnnnnnnnnnnnnnnnnnnnnnnnnnnnnnnnnnnnnnnnnnnnnnnnnnnnnnnnnnnnnnnnnnnnnnnnnnnnnnnnnnnnnnnnnnnnnnnnnnnnnnnnnnnnnnnnnnnnnnnnnnnnnnnnnnaagaattcggcacgagggtcnnnnnnnnnnnnnnnnnngctcctcaggggagcattgcttccttctctcgcagtgaccatgacgaaattagcgcagtggctttggggactagcgatcctgggctccacctgggtggccctgaccacgggagccttgggcctggagctgcccttgtcctgccaggaagtcctgtggccactgcccgcctacttgctggtgtccgccggctgctatgccctgggcactgtgggctatcgtgtggccacttttcatgactgcgaggacgccgcacgcgagctgcagagccagatacaggaggcccgagccgacttagcccgcagggggctgcgcttctgacagcctaaccccattcctgtgcggacagcccttcctcccatttcccattaaagagccagtttattttctaaaaa

SEQ ID NO: 81579 - DNA, 1050 bp, Homo Sapiens
  misc_feature (118)..(118): n is a, c, g, or t
  misc_feature (166)..(166): n is a, c, g, or t
  misc_feature (176)..(176): n is a, c, g, or t
  misc_feature (301)..(301): n is a, c, g, or t
  misc_feature (369)..(369): n is a, c, g, or t
cctttttttcccccttgcatgaattgcttcctacatcccccgataagtctgagctcccccgaccaagagtacgctcatgctcttgtgcacaaagatgcgagtagtaactctttctttnaatacctgttcagtattatgcatgtgggatgactatccagggggagcncagcaagacngagggaatcacccggtgttgtgatgtttcacatttgtgtgcattgcgggtctacaagagtcatgtgaccaggagtgggagtctgagatgaccagaaaagatcattgcccagttgagaatatattngaggagtcacagaagtattttaagtgagagtgagatcgcatgccacgttcgtcgccaggttctaactntggatggcatctttcaccacgcaggactcaatggggaggaagcaggggtatgggttgaggattctgatgagactgtcactactactctttcttgcttcattagtgttgtttgtgacacccagaagagctgaagggggcatctttgtggggaaggagtagaagggtagccctcacgaaagggggttcctgggatagtcagaatgtgtttaccaggaagagaggcagaattaaggggctggcaacatagctgggaagttgactgcatgggttgtcatatctaaaagagatttcaaagatggaaacaggagcatgggcgaagttgagatctcagccccctcattttactgttcccctacttgtgaaattcattttagttcttcagggcccatctgaaatgccagcttctctctgaaggttttcctttagaccttggctggaagatatctctttctctttggaaactctataacttgtggtttgcaagtattttatggctttgtattcccccttatgtgtaagatccttgaagattgttttgcatatctttgtatctcctccaccacctgagactctctgctgtgtgtaggatctctgctgaagaaatcataatggaactgaatctgtactttcacaggaaaaggacatgctacaggatttaataaatatgaatcttacataagg

SEQ ID NO: 81580 - DNA, 876 bp, Homo Sapiens
  misc_feature (342)..(364): n is a, c, g, or t
ccatgttttacacctttatttgtcactttaccaacttgacacacaatgttaacgacagcagacacaggagcagtgtgcacacagacacgagctgtttcactacaggtttgcaagccaggctcaacagcaagtccaacaggcaacaccacacctctcacctgcaggaggaacagcagggccaccccaccccgcggacgtccgcggtgagtgcggtttagacatcagcagaagtggctttcagagtcagaacagccatgacgtggacatcacccgtcacactgataaagtgatgcactcagtactccctaatgttaatcacacagtgtaaaaatatattgcacnnnnnnnnnnnnnnnnnnnnnnnaatttgtttccctttcttgaaaaaaacttagtacaaactagtagttacacgatccctttcaagtttctcttaagttgtgcagatttcctttgtggtttggcttggtttagttttttaagaggtcgaaagaaagaagtaaagcatctcgatgtgcccaggactccccatcacatgcccagggacaaacgctgcaccctggaccaccagagctcacaaagtgttcagtagtaagaggaggaaagatgcaggttcagtgtttgaaggacgttctagcctattgataacatcacggtccagcctcatcttccccctgtgccatcccctcgtggtgtgtgctgtggggtgggagggtggccagtgcacgcgtgattgcccacaggaggagatgagctgggccagtagagggacaggtaagtgtccagggccaaggcatctccatctcaactcctccccactccacttgtacagcaggagccacaggcctgtgtgaaaacacaggacaggccctgtgc

SEQ ID NO: 81581 - DNA, 1097 bp, Homo Sapiens
  misc_feature (44)..(44): n is a, c, g, or t
  misc_feature (46)..(369): n is a, c, g, or t
  misc_feature (428)..(478): n is a, c, g, or t
cgcgtatccctgatcgtgggtaccgtataccgcctttgatgaantnnnnnnnnnnnnnnnnnnnnnnnnnnnnnnnnnnnnnnnnnnnnnnnnnnnnnnnnnnnnnnnnnnnnnnnnnnnnnnnnnnnnnnnnnnnnnnnnnnnnnnnnnnnnnnnnnnnnnnnnnnnnnnnnnnnnnnnnnnnnnnnnnnnnnnnnnnnnnnnnnnnnnnnnnnnnnnnnnnnnnnnnnnnnnnnnnnnnnnnnnnnnnnnnnnnnnnnnnnnnnnnnnnnnnnnnnnnnnnnnnnnnnnnnnnnnnnnnnnnnnnnnnnnnnnnnnnnnnnnnnnnnnnnnnnnnnnnnnnnnnnnnnnnnnnnnnnnnnnnnnnnnccaaagaattcggaacgaggaaaaaattggtgaacttgaagacagagcaatggaaactnnnnnnnnnnnnnnnnnnnnnnnnnnnnnnnnnnnnnnnnnnnnnnnnnnngcatcagtgacctgtgggacaactttatgcagccttattatctatggtgattggcgtccctgaaagagaggagtggggagggagatggaataggaaaaatacttgaagacataatggccaaagattttctgaatataataaaaactaagtccacagatccaagatgctcaacaaaccctgagtatgagaaatatgaagaaaaatatgccaaggctcatcataacttgctggaaaccagtgttaaaaagaaaatcttaaatgcaaccaggggagaggatagttacttgcagtggaacaaagacgaagttgacattacacttctcattggaaacaatgccagtaagcaaactctttaaagtcctgaaagaaaaaaactgttaacctagagttctagaactggcaaaaaatatccttcaaaaacaaaggtgaaataaataagtttggaggtaaactaaagcttaaaagaaagagtttacagcagactgaaacttcaagaaaggaagtcttaaaggaagtccttcagacagaaggaaaatgccagatggaaatctctctacacaaaggaataaaagagcaccagaaatggtaatgacacgaataaatatatattattgtcatt

SEQ ID NO: 81582 - DNA, 1069 bp, Homo Sapiens
  misc_feature (148)..(345): n is a, c, g, or t
  misc_feature (376)..(512): n is a, c, g, or t
tgctttgcaactttctctgcgttcccgatctggatacgtataccccttgatgagtatacgttcccccacgaacgacgagccaggatcagtgacgagaagcgagagcgccatacgcaaaccgctttcccgcggttgccgatcattatgnnnnnnnnnnnnnnnnnnnnnnnnnnnnnnnnnnnnnnnnnnnnnnnnnnnnnnnnnnnnnnnnnnnnnnnnnnnnnnnnnnnnnnnnnnnnnnnnnnnnnnnnnnnnnnnnnnnnnnnnnnnnnnnnnnnnnnnnnnnnnnnnnnnnnnnnnnnnnnnnnnnnnnnnnnnnnnnnnnnnnnnnnnnnnnnnnnnnnngcccctcgagcccaagaattcggcacgaggnnnnnnnnnnnnnnnnnnnnnnnnnnnnnnnnnnnnnnnnnnnnnnnnnnnnnnnnnnnnnnnnnnnnnnnnnnnnnnnnnnnnnnnnnnnnnnnnnnnnnnnnnnnnnnnnnnnnnnnnnnnnnnnnnnnnnnnnngcctttttctctaaggcatgatgttgcagtagcatccttgtacatgtagctaggagaacttgtactaagcccagataaatagttgaagtacaagggcaaggagtgtgtctttgatattttaatagaaatcacctattgccctctagaaaagctgtacccttttccagtggcagagaaccttcctgaaaggcagtcctgtgtaatggtgtccatttcatcacacccttaaaacactcagctttaacaaacatgcagatttttgctgatgtgggagaaaatattaattattaatgatattaaggtgattatcttttcgtatgtttatagatatttgtatttctttttaaatgaactgctcatgacctttgtctacttttatttgggtttacttctttctcatttattcctataaactctttataaaaggaaattaaccatttgattgtcatatgttgtgaatatttttaccattttgacttttgaatttatgtctttttaatgaattgtagaagtttaaaatctttatggaataaatttatttagttttttgtttatgg

SEQ ID NO: 81583 - DNA, 501 bp, Homo Sapiens
tctgtagtgaaagtggggggtagtttaagaatttattaaccttctaccttgagcaatccctcagaagtaagaggtgtcaggcctctgagccgaagctcagccattgtaacccctgtgacctgcacatatatgtccagatggcctgcaggagccaagaagtctggggcagctgaaaaaccacacaagaagtaaaacagccagttcctgccttaactgattaaccaacattacaacattccaccattgtgacctgtccctgtcctaccttaactgatcaatcgaccttgtgacagtcttcttctggacaatgggtcttatcatctccccaccatgtaccttgtgaccccctcctctgctaacaatagataaccaccttttactgtaattttccattacctacccaactcctataaagcaaccccttccccatctcccttcactgactctgttttcagactcagcccacttgcactcaagtgaataaacagccttgttgctcac

SEQ ID NO: 81584 - DNA, 1298 bp, Homo Sapiens
  misc_feature (138)..(306): n is a, c, g, or t
  misc_feature (433)..(604): n is a, c, g, or t
ctggaccggtccggaattcccgggatatcgtcgacccacgcgtccggaactgtactcttaatctctgtagtgaaagtggggggtagtttaagaatttattaaccttctaccttgagcaatccctcagaagtaagaggnnnnnnnnnnnnnnnnnnnnnnnnnnnnnnnnnnnnnnnnnnnnnnnnnnnnnnnnnnnnnnnnnnnnnnnnnnnnnnnnnnnnnnnnnnnnnnnnnnnnnnnnnnnnnnnnnnnnnnnnnnnnnnnnnnnnnnnnnnnnnnnnnnnnnnnnnnnnnnnnnnnnnnnnnttgtgacctgtccctgtcctaccttaactgatcaatcgaccttgtgacagtcttcttctggacaatgggtcttatcatctccccaccatgtaccttgtgaccccctcctctgctaacaatagataannnnnnnnnnnnnnnnnnnnnnnnnnnnnnnnnnnnnnnnnnnnnnnnnnnnnnnnnnnnnnnnnnnnnnnnnnnnnnnnnnnnnnnnnnnnnnnnnnnnnnnnnnnnnnnnnnnnnnnnnnnnnnnnnnnnnnnnnnnnnnnnnnnnnnnnnnnnnnnnnnnnnnnnnnnncaaaagggaagggtggatttgtccttctggttacatatgttctgctcactcattttgaatttaattaaacaaggattgcccttaccttttcatactttgtaagaaaccataaatacttatgcaccatgatttttttaaagaaacactttttattttgaagtaattatagtctcataggaagttgcaaaagtagtacatagagtccctgagtactcttcccccagtggtgacaactgtagtataatatcaattctgggaaattgacattggtacaataccaaatatactatgcctttttctctaaggcatgatgttgcagtagcatccttgtacatgtagctaggagaacttgtactaagcccagataaatagttgaagtacaagggcaaggagtgtgtctttgatattttaatagaaatcacctattgccctctagaaaagctgtacccttttccagtggcagagaaccttcctgaaaggcagtcctgtgtaatggtgtccatttcatcacacccttaaaacactcagctttaacaaacatgcagatttttgctgatgtgggagaaaatattaattattaatgatattaaggtgattatcttttcgtatgtttatagatatttgtatttctttttaaatgaactgctcatgacctttgtctacttttatttgggtttacttctttctcatttat

SEQ ID NO: 81585 - DNA, 1038 bp, Homo Sapiens
  misc_feature (142)..(142): n is a, c, g, or t
  misc_feature (154)..(154): n is a, c, g, or t
  misc_feature (183)..(396): n is a, c, g, or t
cgaaacccgcacggccttacgtctgctttgtgctttgtacatgtttccgcgtatcccgatcttggtaccgttaccgcttgatgagtgtacgctccgcacccgacgaccggcgcaggggtcatgagcgagagcgggagagcgnccatacgcaacngccttccccgcggttgccgatcattatgnnnnnnnnnnnnnnnnnnnnnnnnnnnnnnnnnnnnnnnnnnnnnnnnnnnnnnnnnnnnnnnnnnnnnnnnnnnnnnnnnnnnnnnnnnnnnnnnnnnnnnnnnnnnnnnnnnnnnnnnnnnnnnnnnnnnnnnnnnnnnnnnnnnnnnnnnnnnnnnnnnnnnnnnnnnnnnnnnnnnnnnnnnnnnnnnnnnnnnnnnnnnnnnnnnnnnnaagaattcggcacgaggcctaaacttttctaaatcctagtgatgaggatgtgctgatatccaacatagtccttaaagtgaaaactgagttgttgctgacctccacaaaagaatatggaaaaaagccttgctgtacacctagttgtacagccactctggccaattccatttcctgtccctctgtggttctgactggagaccccagtgtgggggaggtcttaccatttaatatagaaatgatatcaataactaatgctatgtacttggaaaatccaaataaggaagttttaggttggtgcataactttgtttctcaaattttcgttgtcagaacaaatggaaggagaatattatttagactaatccagatttgctttctatgaaaatctaatgtctggattatcttccttttctcatggcctaagaaataaggatcaataaggaatgatttgaatgtaattttgtgaatgtgtggaaaatataaagcagggatttagccttaataaaggtaaccttctgacatctgttgttaatccccctttgtactcttttcctgtatctgcactgttattttgagatgtcatactgtacactgtattgtaaaaataaaaagtaaaattatatttcaaattttaaaagccaaa

SEQ ID NO: 81586 - DNA, 393 bp, Homo Sapiens
gggcagatcttgtatcaaggcagaggtgatgccatgccatacttttaggaagtctgagatgataaatatttcaaggtcagtgaagtctatcaatcattctccccttcctcatcagcaatggtagatagaaatgtcctaaacttttctaaatcctagtgatgaggatgtgctgatattcaacatagtccttaaagtgaaaactgagttgttgctgacctccacaaaagaatatggaaaaaagccttgctgtacacctagttgtacagccactctggccaattccatttcctgtccctctgtggttctgactggagaccccagtgtgggggaggtcttaccatttaatatagaaatgatatcaataactaatgctatgtacttgggaaatcccaa

SEQ ID NO: 81587 - DNA, 700 bp, Homo Sapiens
agaattcggcacgagggtcataaccaataatccatgggtgagactagctacagtgatgctaaccagatgtacgatggagaacaaggaaggattggggaatgaagttttgaaaatgtgtcgctctttgtataacaccaagcagatgctgcctgcagagggtgtgaaggagctgtgtctgctgctgcttaaccagtccctcctgcttccatctctgaaacttctcctcgagagccgagatgagcatctgcacgagatggcactggagcaaatcacggcagtcactacggtgaatgattccaattgtgaccaagaacttctttccctgctcctggatgccaagctgctggtgaagtgtgtctccactcccttctatccacgtattgttgaccacctcttggctagcctccagcaagggcgctgggatgcagaggagctgggcagacacctgcgggaggccggccatgaagccgaagccgggtctctccttctggccgtgagggggactcaccaggccttcagaaccttcagtacagccctccgcgcagcacagcactgggtgtgagggccacctgtggccctgctccttagcagaaaaagcatctggagttgaatgctgttcccagaagcaacatgtgtatctgccgattgttctccatggttccaacaaattgcaaataaaactgtatggaaacgatgaaaa

SEQ ID NO: 81588 - DNA, 1653 bp, Homo Sapiens
agcatggacatataacagcgttaaaaaagcaggctggtacggtcggatatcccgggatatcgtcgacccacgcgtccgtgcagattggggaactgtgccattaaaccagaaacccacattcgactgctgaagaagtttaaggttgtgcatcaggtcttaattacaaaaagctgacagatgaaaacatgagtcctcttggaagcattggagccagttctttcaagtcaaaatatctgtctatttccaaacttgttcccaaaatccctgaaaaggatggacagatgctttccccaagctctctgtacaccatctggttacagaagttgttctggactggagaccctcatctcattaaacaagtcccaggctcttcaccggagtggcttcatgcctatgatgtctgcatgaagtactttgatcgtctccacccaggtgacctcatcactgtggtagatgcagttacattttctccaaaagctgtgaccaagctgtctgtggaagcccgtaaagagatgactagaaaggctattaagacagtcaaacattttattgagaagccaaggaaaagaaactcagaagacgaagctcaagaagctaaggattctaaagttacctatgcagatactttgaatcatctggagaaatcacttgcccacctggaaaccctgagccacagcttcatcctttctctgaagaatagtgagcaggaaacactgcaaaaataccagtcacctctatgatctgtcccgatcagaaaaagagaaacttcatgatgaagctgtggctatttgtttagatggtcagcctctagcaatgattcagcagctgctagaggtggcagttggccctcttgacatctcacccaaggatatagtgcagagtgcaatcatgaaaataatttctgcattgagtggtggcagtgctgaccttggtgggccaagggacccactgaaggtcctggaaggtgttgttgcagcagtccacgccagtgtggacaagggtgaggagctggtttcacctgaggacctgctggagtggctgcggcctttctgtgctgatgacgcctggccggtgcggccccgcattcacgtgctgcagattttggggcaatcatttcacctgactgaggaggacagcaagctcctcgtgttctttagaactgaagccattctcaaagcctcctggccccagagacaggtagacatagctgacattgagaatgaagagaaccgctactgtctattcatggaactcctggaatctagtcaccacgaggctgaatttcagcacttggttttacttttgcaagcttggccacctatgaaaagtgaatatgtcataaccaataatccatgggtgagactagctacagtgatgctaaccagatgtaccatggagaacaaggaaggattgggggaatgaagttttgaaaatgtgtcgctctttgtataacaccaagcagatgctgcctgcagaggtgaatgatttccaatttggtgaccaaaaacttcttttccctggctccctggatgccaacctggctggtggaatgtgtctcccctccctttctatcccacgtaattgttggaccacctcttgggctagcctccaaccaagggccgcttgggatccaaaaggacctggggcagaccc

SEQ ID NO: 81589 - DNA, 1054 bp, Homo Sapiens
  misc_feature (79)..(79): n is a, c, g, or t
  misc_feature (144)..(144): n is a, c, g, or t
  misc_feature (153)..(153): n is a, c, g, or t
  misc_feature (167)..(167): n is a, c, g, or t
  misc_feature (183)..(183): n is a, c, g, or t
  misc_feature (217)..(217): n is a, c, g, or t
  misc_feature (261)..(263): n is a, c, g, or t
  misc_feature (387)..(387): n is a, c, g, or t
gcattgtattgccagcagctctgttggctgtggttctcctccatgcagtcttaatctgtcactgttcatgtgtaccctntgcttctcagcatctggttatctcatagtcatgatgatgagcctgctgacattgaggcatctgtnggcacaccncagaaacggaagtntgagcctggggcgttngtcatgagcctccagagtgggtaggggtggcacntacaaggccagtgaggggagagtgcaggattgctgaggagactnnntgagaatgatgtcaggcccgggaagctggtgtggaagaactgagctgtcagaaggagataccaatatcccctttgcagggtggtgatgggcatcaaacatgacgtggaacatgtccccttcatnggagggtttccatctaaatgcatctgtgtgccttagggatcagtagttcaggggtggtggacttttttgagtgtctcctaatttctctgaggtgtctttggctctgtgtcaccaaatgtgcctgacctctgcatcccagtggttgctgaaagggaaacagtatattgcgtagtcagatgtcaggagtagagatcttaatgagaaaggccctggcagctggagagatgagaggacctagtggtcagcttatacccagactatctctccactcctccaagagtttgagtcccatagctgatgaaagaatttacatatgggctcccccctgctttcccactgaaaatctattctcatattttgggaaggagcatatgtcctttaactttcaatggtaaacaatctaggatagtgtttaaaggcatggattttggagtcacatatagttggtttgaatttctagcttcactacttaccagctgggtttgaccttggttgatttacttaacctctctgagcctcagtttcctcaactataataacatgggtggagggaggcatgttgaaaatatctacctcagggttgttggaataactgaaacaatgtttgtaaagctttagcacagtgcctggcaagcacttaataaatggctgtggtggtggtgaaaaa

SEQ ID NO: 81590 - DNA, 1096 bp, Homo Sapiens
  misc_feature (740)..(740): n is a, c, g, or t
  misc_feature (747)..(795): n is a, c, g, or t
tgtcactacacctgcagcaccacgctcggaggacagctcctgcctgcagcttccagacccaggaagcctgaggggaaggaaggaagtacgggcgaaatcatcagattggcttcccagatttgggaatctgaagcgggcccacatcttccggccaacttccattgaacttcccagcactcgaaagggaccgaaatggagagcaaagaaccccagctcaaagggattgtgacaaggttattcagccagcagggatacttcctgcagatgcacccagatggtaccattgatgggaccaaggacgaaaacagcgactacactctcttcaatctaattcccgtgggcctgcgtgtagtggccatccaaggagtgaaggctagcctctatgtggccatgaatggtgaaggctatctctacagttcagatgttttcactccagaatgcaaattcaaggaatctgtgtttgaaaactactatgtgatctattcttccacactgtaccgccagcaagaatcaggccgagcttggtttctgggactcaataaagaaggtcaaattatgaaggggaacagagtgaagaaaaccaagccctcatcacattttgtaccgaaacctattgaagtgtgtatgtacagagaaccatcgctacatgaaattggagaaaaacaagggcgttcaaggaaaagttctggaacaccaaccatgaatggaggcaaaagttgtgaatcaagattcaacatagntgagacnnnnnnnnnnnnnnnnnnnnnnnnnnnnnnnnnnnnnnnnnnnnnnnnntttacccatttccttccagtaaatccacccaaggagaggaaaataaaatgacaacgcaagacctagtggctaagattctgcactcaaaatcttcctttgtgtaggacaagaaaattgaaccaaagcttgcttgttgcaatgtggtagaaaattcacgtgcacaaagattagcacacttaaaagcaaaggaaaaaataaatcagaactccataaatattaaactaaactgtattgttattagtagaaggctaattgtaatgaagacattaataaagatgaaataaacttattactttaaagg

SEQ ID NO: 81591 - DNA, 1085 bp, Homo Sapiens
  misc_feature (51)..(51): n is a, c, g, or t
  misc_feature (57)..(57): n is a, c, g, or t
  misc_feature (79)..(80): n is a, c, g, or t
  misc_feature (122)..(122): n is a, c, g, or t
  misc_feature (132)..(132): n is a, c, g, or t
  misc_feature (141)..(141): n is a, c, g, or t
  misc_feature (164)..(164): n is a, c, g, or t
  misc_feature (184)..(184): n is a, c, g, or t
gtcctcttcccagaataattcatccataccgattaaaatcagtcatagtgncgtacntgatgcccgagatacctgtcgnntgaagtttggacctcaacatggagagcagccggtggaagacncaccaggtcnacgagtacntgcgcagcaagctttgctctctntatgagaacgactgcatctntgacaagttgagtgtgctgggaacggtcggatagcgccatcatgaccggtcctataacaacttcttcaggatgttgatagagacacgcggagggatgtgaccctggagccctcgagagagagcagcaaaccgcgcgccagcctcaaaccccggaaggtgtgtacggggggtaagcggaggaaagacgagatcagtgtggacagtctggacttcaacaagaagatcctgcacacagcctggcaccccgtggacaatgtcattgccgtggctgccaccaataacttgtacatattccaggacaaaatcaactagagacgcgaacgtgacgaccaagtcttgtcttgcatagttaagccggacatttttctgtcagagaaaaggcatcattgtccgctccattaagaacagtgacgcacctgctacttcccttcacagacacaggagaaagccgcctccgctggaggcccggtgtggttccgcctcggcgaggcgcgagacaggcgctgctgctcacgtggagacgctctcgaagcagagttgacggacactgctcccaaaaggtcattactcagaataaatgtatttatttcagtccgagccttcctttccaatttatagaccaaaaaattaacatccaagagaaaagttattgtcagataccgctctttctccaactttccctctttctctgcgatcacacttgggccttcactgcagcgtggtgtggccaccgtccgtgtcctctcggccttcctccgagtccaggtggactctgtggatgtgtggatgtggcccgagcaggctcaggcggccccactcacccacagcatccgccgccaccccttcgggtgtgagcgctcaataaaaacaacacactataaagtgtttttaaatccaaaaa

SEQ ID NO: 81592 - DNA, 1308 bp, Homo Sapiens
  misc_feature (557)..(557): n is a, c, g, or t
cggaccgcgcacctctgagctgccaggtggggacgctgccctagcgggatctgaagggattttgaaaggaatcatgtcttcagcctggaagactccccgtggatcagatgcaatgcctgagatcatggtgaaaatcattggaagtaaacactttcaatacctcgtggagaagccaaagatcaaggagaatgacagcttgaaaacagaaacccaaacaatgcaccagaaaccaatgactgataatgcaaggcagatgagcagagacaccccagttcccattaacttcactgatcagcaaaccactgataatccagatgatgtgaaagagaaaaagcacccagagaacaaccagaaatcagaaaacaaccagaaactactaacaggggcaaacagtagcagattcctggatggcaatgtcagggctatatgtgggaagcatggattatatctgaccctgagcctgctggaaacattgcttaaccatcaagatttgggttaccaaaatgaacataaaatggcagaatttgttgagatgctgaccagagcttcttctgatntgtatctgatttgcctacagggaagaatgacaaagaaagcccctgcccctccaatggagcctgaagtccccgagatgtctcaaagcaaaactgaacatatgaaaaactccagaagaggagctgcagccagaaagctctcctgctgaaacttcagcctgcaaaagatcctctgaaacctttaaagatcaggccagtctcccagcccttcgtgaatccagctgtgaagaacaaggctgaggaatgtgagacgtggatagacaggttcaggaagctggaaaatgccctctacctgtgtgatctgagtaacacaggagttctggagaaggaacgagccagacgcctcattcacaactacaatctcatttacaacctgtccctgagccctcagaaaatcgaccaggccttgcgcagattccgttcgggagaaaatatgctcttggagccagcactgcggtacttaaaggagctatgataacaagcccatattgtgagaacagatgtttcccttatctccctttttacccagacacatgtttctccccagcctaagtgtagtggcggaggcattgtcagagtggaggccgatgcagctattgtagatgcttttgatttggacttagtttctggctatgatgctcactcataagcagttcaaagtgatcagaggaaacctagttttatcttttgatgtggcaagaacccagctacttagaatctccttctgttttaataaaacttattaataattatt

SEQ ID NO: 81593 - DNA, 530 bp, Homo Sapiens
tcagattcctaaggttagaaatagggagatgaagccaagtatatcaaactcctcaagtactgagtgggaatgagatgtttggtgaagtagaaatagatagctttagtggctctgactcagatatactgatgtagaaggaaggattctttcacttttattatttatttgggtaattaaatttacattaatttaatatgttaaatattttagtaccttttgctttttcacatttcatttgaaccattaacatgcatctttggacatcaatgtccttgtctttttggcccaattgttttagtcaccagaaactttttcaggacatgctatcttctatttgtttgacatacagaatcatatgtacctgaatttattactaactctgggattttcattttaagtaacaactacctattatgtgaggacagttgtttatgtgattggttgttctaacttgccctataaatgtgcattcatcaaaggagaagtttttaaatccaaaaacaaataaaacccgattcatattagacaaa

SEQ ID NO: 81594 - DNA, 1288 bp, Homo Sapiens
  misc_feature (48)..(48): n is a, c, g, or t
  misc_feature (74)..(74): n is a, c, g, or t
  misc_feature (110)..(110): n is a, c, g, or t
  misc_feature (122)..(672): n is a, c, g, or t
  misc_feature (728)..(745): n is a, c, g, or t
tcacacgccaggtgacgacgactacacgaatgggtctacgcgtgagtntggaaagcccacgttcccgaaggagnaagcgaccagtatccgtaagcgcaggtcgggaccanagagcgcacgannnnnnnnnnnnnnnnnnnnnnnnnnnnnnnnnnnnnnnnnnnnnnnnnnnnnnnnnnnnnnnnnnnnnnnnnnnnnnnnnnnnnnnnnnnnnnnnnnnnnnnnnnnnnnnnnnnnnnnnnnnnnnnnnnnnnnnnnnnnnnnnnnnnnnnnnnnnnnnnnnnnnnnnnnnnnnnnnnnnnnnnnnnnnnnnnnnnnnnnnnnnnnnnnnnnnnnnnnnnnnnnnnnnnnnnnnnnnnnnnnnnnnnnnnnnnnnnnnnnnnnnnnnnnnnnnnnnnnnnnnnnnnnnnnnnnnnnnnnnnnnnnnnnnnnnnnnnnnnnnnnnnnnnnnnnnnnnnnnnnnnnnnnnnnnnnnnnnnnnnnnnnnnnnnnnnnnnnnnnnnnnnnnnnnnnnnnnnnnnnnnnnnnnnnnnnnnnnnnnnnnnnnnnnnnnnnnnnnnnnnnnnnnnnnnnnnnnnnnnnnnnnnnnnnnnnnnnnnnnnnnnnnnnnnnnnnnnnnnnnnnnnnnnnnnnnnnnnnnnnnnnnnnnnnnnnnnnnnnnnnnnnnnnnnnaagaattcggaacgagggttaccattctgatgttggagcggccgcggctgtaggcnnnnnnnnnnnnnnnnnnaaagagtctatcctaggcttggtacagatggcgcctgtggtaaatctgtgttaacatggtggtagaccatggagaatgggtagatggagcttctagactccaaaacaacaaaaccacagtgtgagtacactgtcccattaggttgactgaagtctgagtacattttctggcctgcgtgccgtgacttatccaacctgtgaactgattgtgatctgcttggtaacttggtttggtgtaaactgctcttaaccctttgctgatgaagaaaataatcatataagtggaactatttgcatctatgtgtgcttctttttttatgttgtcatcactcattccttcccctgtcctattttggaggctctcaatggatcttctaacttataaatgtcaaatatatttttgtattagattgtgcctatgatgagagaaatctttaatgtatattttatgtatgctgaacacatttttataatttgacacacttggaggcatggtctagtaataataatgtaatatgtaccttgctggttaatataactaaga

SEQ ID NO: 81595 - DNA, 1007 bp, Homo Sapiens
  misc_feature (842)..(842): n is a, c, g, or t
  misc_feature (849)..(849): n is a, c, g, or t
  misc_feature (886)..(887): n is a, c, g, or t
  misc_feature (897)..(897): n is a, c, g, or t
  misc_feature (908)..(909): n is a, c, g, or t
  misc_feature (931)..(931): n is a, c, g, or t
  misc_feature (939)..(940): n is a, c, g, or t
  misc_feature (974)..(974): n is a, c, g, or t
  misc_feature (980)..(980): n is a, c, g, or t
ttttcactgtgtgattaacttaactttaattcagacctgaatataacgagaaaatgagtgattatcttgaagttgacacagaatataccacatcccacgaattacttaaatttactttccaatgaaaaaaatcagccattggcgatataactacaacaactatggcagaaatgctttcaggctgaatattgctgcttcataaataagacaattttagcaactaaatccagacacaattagttggagatgacttccaaaatagatgaaactttagagatggaaaagtgatttggctgagggatgatactccctatgccatctgcatattggcaccctgctttggggtttgctgcagaaatggtgcaatcagatggatgtgaggaagcagttatggactggctcacaacttctcagagaagctacactggaatctttacagcttaccagtttctcaattatgtcagatacagaataatcaccaaaaaaggctttagaggggaaaaatactctaatattttgaattttaaaaatagatttaatttacctttcctacttaccttcctagatggcataatctacacttaaatgacatttaaaattagaaattatattaacttcagcattgttttgtgtcctaaagagatattgacaggtaaattcacaagttgtatttgtgacttaatcttatttttacatggctaaaagtggcctatgctcttctgtggagttttcctcttaatttcttctattcttgatattaaacgggaggacatatagattgaatctcttttcctgaagaattttatattccttatgaacttgacagagttgtcttctttcanaggtccntatcttttctaactatctatcttcagttgtttagtannaagagagaanatgtttcacanntgagctttgctcctttttacanggtatctnntatcgataattcacacagtgacagacatcactangttcanaatatacatcataggactcaagatggg

SEQ ID NO: 81596 - DNA, 1033 bp, Homo Sapiens
  misc_feature (271)..(271): n is a, c, g, or t
  misc_feature (306)..(306): n is a, c, g, or t
  misc_feature (313)..(314): n is a, c, g, or t
  misc_feature (324)..(324): n is a, c, g, or t
  misc_feature (326)..(326): n is a, c, g, or t
  misc_feature (778)..(841): n is a, c, g, or t
cgcgtctatcatgcgacgtccgatgagcgctgaccaccatatggatgccatctgcaccccgttacatttgtccgctgatgtgttgatgtggcgatacattcacacagaacgttgactgatacgattatacgatcatttagggattgccctcgagccagaatcggcacgagggcggagtacgcacagcagaaatgccggcgctcttgtctgcaggtggagaccgcgccggcggaccgagcccggggtcgttgcgcccgccgccctcccagcntcggctccgagcggggctgggcgggcagactcganttccccnngacgccgccntntccacccttaccccgcaaaaaggggcaaatctgctttccgggccggggcagccgtggtcggcacgcctgcagcggtctcagcggcccaaattctgcggggcggtggtggtgggaggaagggttggagccccagcaggttgtctgggcttcgtttgattttcggcaaggtcctggcccaggccccagtccctcttggagcggaagcctctggacctgttgctcctaagaaagcaagcggcccctgacgcgttgctgtggcctggtttgaccctcgtagccagcccatgttctgtgaggcatgaagcgccacgcagacaccacgacaaagtgagatgaactaagacctcttcttgattctaagcagggaacgcacagctcaccctgtcacatgcagcgatcataagctgagaattaccctcttccttcccacagcgtctaatctttttttatgnnnnnnnnnnnnnnnnnnnnnnnnnnnnnnnnnnnnnnnnnnnnnnnnnnnnnnnnnnnnnnnnggcctcgacctcctgggctccagcgtgcgtctaatctagaaccaaatcctccttccttagatcatcccccaaatcacccaactacaggtgaaatcctgtaatagtttcctccgaacaccctgttgctgagacacctcaacgtctcaacctggtgtgtttgtacgtagagtaaaagacccaacttgtttaact

SEQ ID NO: 81597 - DNA, 1021 bp, Homo Sapiens
  misc_feature (107)..(107): n is a, c, g, or t
  misc_feature (171)..(171): n is a, c, g, or t
  misc_feature (287)..(287): n is a, c, g, or t
  misc_feature (333)..(333): n is a, c, g, or t
  misc_feature (344)..(344): n is a, c, g, or t
  misc_feature (353)..(353): n is a, c, g, or t
  misc_feature (365)..(365): n is a, c, g, or t
ttcctcatgtcagccccaagttcctgcaaggactcggggagccacatggttgcgcaggtttttgactcgtgggagcaaatgtctccgtcactcacagactccttatntgacagcaaataacatcgttgagatcctggcctcagactgtagatatgcttgtgagtagttccncacaggatcagtgagaggatgccgaggcccagtgagagaaatgcctgtgatagaaagagcgcatcgtgatatgtcatggcatagacatgagtgtttccttgtatctgaaacaatgngaatgttggcgcaagttttctttgcagagtctttctatgacagccnaagagtctgtntgccattcnaagaccaaaatngaggccatgtgcctgctacctgccaaggcttctgacgtggcagtgccagggagcagagtggcatcccaccacagaggactctgaccaaagcaaagcttcgccgggaggggaggttactttccacccagcactgggagacagagccaggtattagatgagagaagactgagagcctctaggtttgcaggaatgcacttggctgttcttaggtttttgtgtatctttaactgttactctaatttattgatgcttaacttggggcctgtgtacttcttgtagtttggaggcccatgaatagtctttatcgaccctgggaaattgtacagaaaattgtgggtgagtcattcttgggagggaaccccagctcctcacaaaggttcctcgctcaccctgccaaggataaggaccattgctctaaattacatattattctgaatgtaatgagagcattgatactagttgaactatttcatcttgtagaacaatttacagttgtctagctcatgtgctgccctgtactgcgacatattcacttctgttggaggcctgcaggtgaccatggcttgcctcttgatgaccatgctcatgtgaaagcttggtgcccaaaagaaaaataaaaagcatctctaaagaatgagaattgtcaaaaaggaaaa

SEQ ID NO: 81598 - DNA, 603 bp, Homo Sapiens
gaactacatctttcctgtaaaaattattggtttctttttatttgtttttaccttagaaatcaattatatacagtcaaaaatatttgatatgctcacacgttgtatctgcagcaatttcagataagtagctaaaatggccaaagccccaaactaagcctccttttctggccctcaatatgactttaaatttgacttttcagtgcctcagtttgcacatctgtaatacagcaatgctaagtagtcaaggcctttgataattggcactatggaaatcctgcaagatcccactacatatgtgtggagcagaagggtaactcggctacagtaacagcttaattttgttaaatttgttctttatactggagccatgaagctcagagcattagctgacccttgaactattcaaatgggcacattagctagtataacagacttacataggtgggcctaaagcaagctccttaactgagcaaaatttggggcttatgagaatgaaagggtgtgaaattgactaacagacaaatcatacatctcagtttctcaattctcatgtaaatcagagaatgcctttaaagaataaaactcaattgttattcttcaaaa

SEQ ID NO: 81599 - DNA, 1126 bp, Homo Sapiens
  misc_feature (12)..(12): n is a, c, g, or t
  misc_feature (451)..(467): n is a, c, g, or t
gagggccctggnggggtgttgttaaatcggcccgagggtcatccttaattggtctcaagaggaagaactgtctgtcatttcggtaagtaggatactgtgaggaagaccaaaaagagatatggatgcttcctcgctcaggaggcctgagcttggtccttttcctctctgcttggattctggaccaccacctgggaccaaccttcagctctggaaccttcataaagcaggtcagcgtggcctgattgtcccaggacctgaagggagcaaggatggcctcagggcctggtgaagtctgctactctgtccttactgctgaacatcctgcttgtatcaggaaactcagaagcagtttgccttgtcaaattcaatctcaatggccattgtccacataactgatcacccatggctgcctctcctattatctattatcactgaaacttagtagcctgcnnnnnnnnnnnnnnnnnagagctattgcgtatcttccctgtttgggatccttgtacctggtttgggttttcccttccttgtgacaattataatccagatgcctcttctttctgtttgaattacggtagtgcattgccttagtggcttgcctgtgcctctgggtggattacatatgatagtaaagcccacctgtttggatgggagtagaggaagttggtgtagaccagctgtggagctgaaggcacagtctgccccacccccacctccccactgtggttagtcagaggcatcctgctccaagctctgcttttccttcctctgaaacaatgccattcttgcttctattgctacacatctccttctggctcaggtgaaatccatgcccttctgcttatagacctaaagttcaggtacttattattggccattgatcttgaatttgccctctcctagtgctgcagtcccacttcaaagccattttctgaggaggatggtttaggtctggcaattgtccttgaaaaatcccacccatgttgtaccaccttggtgagtcatatgccactcatcagcttgggaatgatggctgccaactcccaatctcccaggaaggcagggggcagaatctttttttcacttggcctgctacctccattaaaaaaccattctcttacagttt

SEQ ID NO: 81600 - DNA, 554 bp, Homo Sapiens
  misc_feature (348)..(383): n is a, c, g, or t
tcccggtcgcgaggaggaggaggatgtggcgcgcggaggggaaatggctgccgaaaacaagccggaagagcgtttcccaaagtgtattctgcggaactagcacctactgtgttctcaacaccgtgccacctatagaagatgatcatgggaacagcaatagtagtcatgtaaaaatctttttaccgaaaaagctgcttgaatgtctgccgaaatgttcaagtttaccaaaagagaggcaccgctggaacactaatgagagatcatgatgcagccgtccttttggatttctttttaataatgtgtgacccttcacctttgatcccctgacctgcattaccttggtaaccnnnnnnnnnnnnnnnnnnnnnnnnnnnnnnnnnnnnggtgtacaagctgtaacatttcatctttcaaagtgtaacacgctgatttcctcaaatagagatacccctttgagtgataaatttgcaaaatgctgtcttcattttctgtattaaaattcatttcagttttaaaataaagtgtaatctgtgttttcatccttttaaaaaaaa

SEQ ID NO: 81601 - DNA, 998 bp, Homo Sapiens
  misc_feature (258)..(258): n is a, c, g, or t
ggattgattgtctattacagtacgtacaccatgcatgctgtgtacccgagatatgcagatagtgcgaatttcatcgtgtgtatggatctgtcgacacagcaagactgtgcaagtgctcattgacctctcgagatgatgtgtctgtctcaacatcctgatgccactggaccactccacatactactaacagacagatcaccacatctgtaaaggtgccatgcagctacatatctgcttgaaccgtatcagtcaccagtntggaaccagtagccgctctactcttgctcagcggagaggtataaaaaatcacctcaacagccctgtgaagtgacctcagtgagatatttggtaccatggtgtaagctgatagcacaagttctggcgacaggtagcacgtatctgagagacacctgcaagcacacactgtcccagctggtacccataatgctgctgttcctgctgctgctcctgctttcctctcttctcgctttaaatgattgttagcaagttagattttcctggagcttcggaagaaatgaaaatggaaacatgatgaagatatagtcactgaatcaatgagaaaaataatgaacatatgaataccacctaaaaatacactgaataaagtacaccatatagcattatttttataggaaatatttcatgtcccttaaatattctttgttagttatagggatggacagtttatgttaagcacttagcttaaacaatccgtttatattagcactgtatcccttgtgccatccaacattttgtatgtttttgtaaacagttcatatacagtacatttctgtactgctttctttaatgtatacatgccttgtttaacttggaatctattattattaatcaattgactattaaatctggttaaatagttcacctggattaacagtattgttggacagtcctaaaaatggccagattgtggaacagctgttgaatgtaatacttccaaaatgtacatatctttcccc

SEQ ID NO: 81602 - DNA, 1356 bp, Homo Sapiens
  misc_feature (71)..(71): n is a, c, g, or t
  misc_feature (141)..(141): n is a, c, g, or t
  misc_feature (171)..(171): n is a, c, g, or t
  misc_feature (237)..(237): n is a, c, g, or t
  misc_feature (1025)..(1047): n is a, c, g, or t
gcaggtccgatgaagcggcgtggccaccaatagtgagtgtcactcatggcccccagcttaccttttgttcnggtcgtatttgttgaatgtgacggatacattcacacagaacagtttgacagatacgatttatcgactcanttaggaattgccctcgagccagaaatcgcnacgaggagaagctgtccaaaatatatcagtagtttagaatatatagataaaaactgaaatgctgangaagttaaaataaggtccatggaagtaatatagataatacatttcaaacagtgtttataactaacattaaaaggtagaaaataatcaatccatcctattaattgaatatatattcattcaatgtaaactgaagtcatggtactgagactataactgacacttctaattctatcagaatcctattaagaggagactgggagaattcactcaaaaagcttcataggaacagtgcttcccccaaaagctacttgcatcttcagttattttgtttccataaaggagcagctccaatacgaatgagtgatgtaagaagacttaaatgtgggcaaatgtctaggaatcagtggcccaacaatatacaatgaaaaggtcttaaccatgaaggaatgacattaaaaattagctaaagtaaactcgttcagagatagcaagttttaggattattttctgatttgttctcctaagtaacttacattcatttgtcccctggtatttactctccaattttcctttttcactggatgtctgaatatctagttccaacaaattgttaagtaaagaagctggcaaagtcacagcttataccaagacatggcaagtgttaagaatatagctaatattcttgatatggattttaaacaccttgttaaaaatttgtttagccattgatttattcaacaaacatttcagtgaggatcccttatatacttgaacctatgctggaccctgagggaatgaagatgcgttaaagtcaatctctgtactcaaagctgcagagctgagtgggnnnnnnnnnnnnnnnnnnnnnnntctctggaatcagaccaacttggaattgcatcctggccttgttactttatagatgtgtgatattgaataaatgatgttatctccaagcctttgctttcttattttaaaatggggataattacaggaaatatcctatacatcactggaaggactgaaatgagacatgcttttcagtgtctacaacaaaataagaaatgagtaaatattagctcttatgctctgaagggaagaacaataaataaaaataaattcaacaaaaccatagaggtctctaaagggggagtgctaggcatctgttgtcaccttatg

SEQ ID NO: 81603 - DNA, 1885 bp, Homo Sapiens
  misc_feature (27)..(28): n is a, c, g, or t
  misc_feature (78)..(78): n is a, c, g, or t
  misc_feature (111)..(111): n is a, c, g, or t
  misc_feature (113)..(113): n is a, c, g, or t
  misc_feature (142)..(143): n is a, c, g, or t
  misc_feature (186)..(186): n is a, c, g, or t
  misc_feature (209)..(209): n is a, c, g, or t
  misc_feature (229)..(229): n is a, c, g, or t
  misc_feature (268)..(268): n is a, c, g, or t
  misc_feature (276)..(276): n is a, c, g, or t
  misc_feature (326)..(326): n is a, c, g, or t
  misc_feature (336)..(336): n is a, c, g, or t
  misc_feature (342)..(342): n is a, c, g, or t
  misc_feature (959)..(967): n is a, c, g, or t
cagagtcaaagtgtctcagctgatgtnntggcagtattttgcaagagcagacacgtggcagaggttcgttaatgtcanggagctcccccatgccacgtcagtcatgaattntncgggcagcaatggatgtcaggtgtagaanntatggtcaaacagaatgcacaggtgctgtacattacatttacntggagactgacatcaggtcacgntgggtgcccatgcatgcaantacgtgaagctggaagatgtgctggacatgaactacttnacagtgantaatgaaggagaggtctgcatcaagggtacaaacgtgttcaaaggatacntgaaggaccntgagangacacaggaagccctggacagtgatggctgcttcacacaggagacattggtcgctggctcccgaatggaactctgaagatcatcgaccgtaaaaagaacattttcaagctggcccaaggagaatacattgcaccagagaagatagaaaatatctacaacaggagtcaaccagtgttacaaatttttgtacacggggagagcttacggtcatccttagtaggagtggtggttcctgacacagatgtacttccctcatttgcagccaagcttggggtgaagggctcctttgaggaactgtgccaaaaccaagttgtaagggaagccattttagaagacttgcagaaaattgggaaagaaagtggccttaaaacttttgaacaggtcaaagccatttttcttcatccagagccattttccattgaaaatgggctcttgacaccaacattgaaagcaaagcgaggagagctttccaaatactttcggacccaaattgacagcctgtatgagcacatccaggattaggataaggtacttaagtacctgccggcccactgtgcactgcttgtgagaaaatggattaaaaactattcttacatttgttttgcctttcctcctannnnnnnnnaacctgttaaactctaaagccatagcttttgttttatattgagacatataatgtgtaaacttagttcccaaataaatcaatcctgtctttcccatcttcgatgttgctaatattaaggcttcagggctacttttatcaacatgcctgtcttcaagatcccagtttatgttctgtgtccttcctcatgatttccaaccttaatactattagtaaccacaagttcaagggtcaaagggaccctctgtgccttcttctttgtatcgtgataaacataacttgccaacagtctctatgcttatttacatcttctactgttcaaactaagagatttttaaattctgaaaaactgcttacaattcatgttttctagccactccacaaaccactaaaattttagttttagcctatcactcatgtcaatcatatctatgagacaaatgtctccgatgctcttctgcgtaaattaaattgtgtactgaagggaaaagtttgatcataccaaacatttcctaaactctctagttagatatctgacttgggagtattaaaaattgggtctatgacatattgtccaaaaggaatgctgttcttaaagcattatttacagtaggaactggggagtaaatctgttccctacagtttgctgctgagctggaagctgtgggggaaggagttgacaggtgggcccagtgaacttttccagtaaatgaagcaagcactgaataaaaacctcctgaactgggaacaaagatctacaggcaagcaagatgcccacacaacaggcttattttctgtgaaggaaccaactgatctcccccacccttggattagagttcctgctctaccttacccacagataacacatgttgtttctacttgtaaatgtaaagtctttaaaataaactattacagataaaa

SEQ ID NO: 81604 - DNA, 501 bp, Homo Sapiens
cggcggcgcgaggcagtatggtttgaagtggtgaacatggatttttctcggcttcacatgtacagtcctccccagtgtgtgccggagaacacgggctacacgtatgcgctcagttccagctattcttcagatgctctggattttgagacggagcacaaattggaccctgtatttgattctccacggatgtcccgccgtagtttgcgcctggccacgacagcatgcaccctgggggatggtgaggctgtgggtgccgacagcggcaccagcagcgctgtctccctgaagaaccgagcggccaggtgagcaccgctgcacttcctctccatctgatctctaacaccagttaaaaccaagcttccatactttttggtctgtaaagccgcaccctgtctcgagcttaaggatatgtgtgtgtatgtgcgtgtacagacacacaaacctgccatataaagtggtagtttgctgcaaataaagactgaaaggaactctggaaaaaaa

SEQ ID NO: 81605 - DNA, 1009 bp, Homo Sapiens
cgcagacgaggcctgaggcggcggcgcgaggcagtatggtttgaagtggtgaacatggatttttctcggcttcacatgtacagtcctccccagtgtgtgccggagaacacgggctacacgtatgcgctcagttccagctattcttcagatgctctggattttgagacggagcacaaattggaccctgtatttgattctccacggatgtcccgccgtagtttgcgcctggccacgacagcatgcaccctgggggatggtgaggctgtgggtgccgacagcgccaccagcagcgctgtctccctgaagaaccgagcggccagaacaacaaaacagcgcagaagcacaaacaaatcagcttttagtatcaaccacgtgtcaaggcaggtcacgtcctctggcgtcagccacggcggcactgtcagcctgcaggatgctgtgactcgacggcctcctgtattggacgagtcttggattcgtgaacagaccacagtggaccacttctggggtcttgatgatgatggtgatcttaaaggtggaaataaagctgccattcagggaaacggggatgtgggagccgccgccgccaccgcgcacaacggcttctcctgcagcaactgcagcatgctgtccgagcgcaaggacgtgctcacggcgcaccccgcggcccacgggcccgtgtcgagagtttattctagggacaggaatcaaaaatgtaagtctcagtcctttaaaactcagaaaaaggtgtgttttccaaatttaatatttcctttctgtaagtctcagtgtctgcactatttgtcttggagacttaaaattatcccttgaaagcataagaagtacaccccaaaccagctttgtccttcctgtcctcttctagtttacattttatgtggttagtaattttgtacctaaaagtatttgaaattctataaatttggacttgacgtgagcaaaagaaaatttctacgtaagcgaaactaataaaactacagtcactttcagatgc

SEQ ID NO: 81606 - DNA, 1019 bp, Homo Sapiens
  misc_feature (76)..(76): n is a, c, g, or t
  misc_feature (91)..(91): n is a, c, g, or t
  misc_feature (103)..(282): n is a, c, g, or t
  misc_feature (420)..(420): n is a, c, g, or t
  misc_feature (608)..(632): n is a, c, g, or t
gacggccagggatcatgaccgagagcggagacgccatagcaaacgcctttcccggcgttgccgatcattatgcagntgcacgacagtttcncgactggaagcnnnnnnnnnnnnnnnnnnnnnnnnnnnnnnnnnnnnnnnnnnnnnnnnnnnnnnnnnnnnnnnnnnnnnnnnnnnnnnnnnnnnnnnnnnnnnnnnnnnnnnnnnnnnnnnnnnnnnnnnnnnnnnnnnnnnnnnnnnnnnnnnnnnnnnnnnnnnnnnnnnnnnnnnnnnnnnnnnnnnaagaattcggcacgaggagctccagcctgatatggaggcacattatcctggagcccacgaagagctgaagttaatggaaacattaatgtactcacgtccaaggaaggtattagtggaacagacaaaaaatgagtattntgaacttaaagctaatttacatgctgaacctgactatttagaagtcctggagcagcaaacatagatggagagtttgagggctttcgcagaaatgctgtgattctgttttaagtccataccttgtaaataagtgccttacgtgagtgtgtcatcaatcagaacctaagcacagcagtaaactatggggnnnnnnnnnnnnnnnnnnnnnnnnnctcagggatcactgggagaagccatggcattatcttcaggcaatttagtctgtcccaaataaaataaatccttgcatgtaaatcattcaagggttatagtaatatttcatatactgaaaagtgtctcataggagtcctcttgcacatctaaaaaggctgaacatttaagtatcccgaattttcttgaattgctttccctatagattaattacaattggatttcatcatttaaaaaccatacttgtatatgtagttataatatgtaaggaatacattgtttataaccagtatgtacttcaaaaatgtgtattgtcaaacatacctaactttcttgcaataaatgcaaaagaaactggaacttgacaattataaatagtaatagtgaaa

SEQ ID NO: 81607 - DNA, 760 bp, Homo Sapiens
ttgctttacttcccttgaatcagatataggtttggatgcctttctgcctttaattttaaattcatgagatgttccttcaggttctttctctgctttgaaagccacatttggtcgacaggaggaacacgaattcgcaacccaaacaaatgcttcttcttctttatttctttcccagacataaacatggtcttgtaatcatgtaatgcctccagaacatgctcatatctttcagattttgggtgtgtctgccagctctccaggggtgcaatctatcccagttttcattaatgtatggtcataaggctcaaggttcaggaatcaaaggtatttcttcttatggaataacacttaggttgtaaaggcataggtgtgctatatctacccactgtaatggtagacgtttgaggtattctggtccagaactgcaagacagagcatataaacgtaataaaatctgtctcccaaatagcattggcttttgaaggcattgcacacaagcctcatgaaaccactgcttacatttgcagcactgtagcatcttcaaataccagtctcccagggcctccacaatagcagtaacactgctggacattggttttatgacctgcatcccattcaaggtctgccacactatagggtaatgtctgcttcatgacttgcaatgctttggcatttggtcctttcttaagtgcaccacccctctttgttgttgttgcaaaaacacactgccgacagagccatttttcatctgaatcaatcc

SEQ ID NO: 81608 - DNA, 919 bp, Homo Sapiens
  misc_feature (82)..(82): n is a, c, g, or t
gggactatagggaataccatacagataccactgtgaaatttgtcgtgaagatgactgaagaaaaactggccagaggcagagnagagttggactacacaaagtcttcaaactccaaactagtctcacatgcaactctatggtgctttttgacccacgtaggctgtttaaagaaatatgacacggtgttggatattctaagagacttttctgaactcagacttaaatattatggattaagaaaagaatggctcctaggaatgcttggtgctgaatctgctaaactgaataatcaggctcgctttatcttagagaaaatagatggcaaaataatcattgaaaataagcctaagaaagaattaattaaagttctgattcagaggggatatgattcggatcctgtgaaggcctggaaagaagcccagcaaaaggttccagatgaagaagaaaatgaagagagtgacaacgaaaaggaaactgaaaagagtgactccgtaacagattctggaccaaccttcaactatcttcttgatatgcccctttggtatttaaccaaggaaaagaaagatgaactctgcaggctaagaaatgaaaaagaacaagagctggacacattaaaaagaaagagtccatcagatttgtggaaagaagacttggctacatttattgaagaattggaggctgttgaagccaaggaaaaacaagatgaacaagtcggacttcctgggaaaggggggaaggccaaggggaaaaaaacacaaatggctgaagttttgccttctccgcgtggtcaaagagtcattccacgaataaccatagaaatgaaagcagaggcagaaaagaaaataccaagaacattagaatgagaatactgaaggaagcctcagaagatggtgtggaactagaagggctaaacaagata

SEQ ID NO: 81609 - DNA, 1047 bp, Homo Sapiens
  misc_feature (81)..(82): n is a, c, g, or t
  misc_feature (91)..(92): n is a, c, g, or t
  misc_feature (94)..(503): n is a, c, g, or t
tccccctttgattgagctcgattttgtgttctctcagggggccggacctttgaaaaccccagcacggggcctttaacgtcnntgcctttgnntnnnnnnnnnnnnnnnnnnnnnnnnnnnnnnnnnnnnnnnnnnnnnnnnnnnnnnnnnnnnnnnnnnnnnnnnnnnnnnnnnnnnnnnnnnnnnnnnnnnnnnnnnnnnnnnnnnnnnnnnnnnnnnnnnnnnnnnnnnnnnnnnnnnnnnnnnnnnnnnnnnnnnnnnnnnnnnnnnnnnnnnnnnnnnnnnnnnnnnnnnnnnnnnnnnnnnnnnnnnnnnnnnnnnnnnnnnnnnnnnnnnnnnnnnnnnnnnnnnnnnnnnnnnnnnnnnnnnnnnnnnnnnnnnnnnnnnnnnnnnnnnnnnnnnnnnnnnnnnnnnnnnnnnnnnnnnnnnnnnnnnnnnnnnnnnnnnnnnnnnnnnnnnnnnnnnnnnnnnnnnnnnnnnnnnnnnnnnnnnnnnnnnnnnnnaagaattcggcacgaggtgccagacaggaagtctttagactgcccacattcatgaagaagatgatgtgtggctggatcagtaggagaagctgagtgcaaatgccatgtgggctagagtatgggaaggttgaaaattccaagtaactgggagagtgggcaagtcctcagctgaacaatcttggatgtagtctagcagcaacccacctacaatggcgttatgtttggagttatgaggggaagtgaaagataagaattacctacagctttgtactcagataatttatatccaaaatttgtgttttaaatttcatactccagaactttcatgtttatgagtattagccttttaagttatgggaggtgatatacttagtccattgatgttgtcacttgtcatctaaacttatgagaccttgtcttagagaatctaaaatatattgtcatatgttttctgtgctgagtttggtttgttacactgtgaagcttttggtgaaacaaaataagacttatgaagtaaaaagaccaatcatgtcgttgacaaaaa

SEQ ID NO: 81610 - DNA, 1001 bp, Homo Sapiens
  misc_feature (100)..(100): n is a, c, g, or t
  misc_feature (126)..(127): n is a, c, g, or t
  misc_feature (135)..(135): n is a, c, g, or t
  misc_feature (146)..(146): n is a, c, g, or t
  misc_feature (261)..(261): n is a, c, g, or t
  misc_feature (408)..(408): n is a, c, g, or t
tgcctgatagcagttgtgacgatgacagttgttatattagacagagtcgatagttttgtgttatcccacccaccacacctactacaacacctgttatctntacgagtattctagatcaaagatatnntgagattntatcccctctntgactttcctggatgctagtcatcactatagcattatcacagtggatcatccaaaggaacattctagagatcgtctgtcaaaatatatcctatatatttttagcatagtaaactntaaaaaggacaagtgttgcctgactgagcctgtgaagaaaatgtgtccgtatagcacgacaggagttgctgatgtgaccttaatgaaacagaaataaacaggggtgagtgctcggaaaggaagggcgggccaaggcactcagccttntagtgcagtagcatcagtgacacgcaccccaccagacctcgtccactttcaccacccctgaaggcagaccatgtatgaaaaggttctctacacagctgctgcagaggacagcagcttatcctgatttcagagaaactgaggcaccagagatgcttctcttccgtgcaccttgataagcatgaaggacattccaaaaggtaataactctatcatgacagtccagcaattcattaaattatctgttcatgctcccacctgcaactgctgaataatacactcagtttgtcttctagtactcagctcagtttgatctagatattgagatacctatcttgaattcaaagaatgttttcatctttaagatgctataaagactgataaaatgctctcttctatgaattgtgttagagaattacctgctagaaaaataatttttcattataaaatacacatttattatataacaaattcaagtagtccataaatgcatatggtaaaatgagaaagtcctgtgcagtcctgagatgattactcttatttggtgtgctgaaaatttgagttgacaaaataaaattctgtggttttttaagtgg

SEQ ID NO: 81611 - DNA, 1610 bp, Homo Sapiens
  misc_feature (793)..(984): n is a, c, g, or t
  misc_feature (996)..(1007): n is a, c, g, or t
  misc_feature (1312)..(1312): n is a, c, g, or t
gcggccgccgccgcctcggcggggaacgggaccggcgcgggcaccggggctgaggtgccgggcgcgggggcggtctcagcggctgggcccccgggggcggccgggccgggccccgggcaactgtgctgcctgcgggaggatggtgagcggtgcggccgggcggcaggcaacgccagcttcagcaagaggatccagaagagcatctcccagaagaaggtgaagatcgagctggataagagcgcaaggcatctttacatatgtgattatcataaaaacttaattcagagtgttcgaaacagaagaaagagaaaagggagtgatgatgatggaggtgattcacctgttcaagatattgataccccagaggttgatttataccaattacaagtaaatacacttaggagatacaaaagacacttcaagctaccaaccagaccaggacttaataaagcacaacttgttgagatagttggttgccactttaggtctattccagtgaatgaaaaagacaccttaacatatttcatctactcagtgaagaatgacaagaacaaatcagatctcaaggttgatagtggtgttcactaggagacgtggaattgagactaataacttggatgttaacactgtttactgttttttcacatgtagaaatgttctttgtgtattttttctacagaggattttctctgattttattttctttgtttctgactctaataattagttggaaactcatataaaatgagctttcctaaattaaatctattttaaataaaggttattactattnnnnnnnnnnnnnnnnnnnnnnnnnnnnnnnnnnnnnnnnnnnnnnnnnnnnnnnnnnnnnnnnnnnnnnnnnnnnnnnnnnnnnnnnnnnnnnnnnnnnnnnnnnnnnnnnnnnnnnnnnnnnnnnnnnnnnnnnnnnnnnnnnnnnnnnnnnnnnnnnnnnnnnnnnnnnnnnnnnnnnnnnnnnnnnnnctattctggcgnnnnnnnnnnnntttggaattccttcatttaaaaaaccttttttccaacagcggcccgcccctgaaaaaaaataaggagaagtttccataaggagaattaaccgcgcattctaccaacaacaatctctgggagaaccttctctcattacaaaataaaaaccccccgccccgggcgcgattcctgtaatttggggaggcgccctctcccgaatagacgtttgtttgcaattttccctcgccaccactctatacatacccccgagcaacagaaggggcccttttaattttatctaaaagctgtcccctccccccgcccntacagcacccctccctccgcaacaaaatagtggcttccccaaaatatgaacaaacgcccgggcgccgccgcaaaaacaagcgactatatcatatgcgcgccggagggttataaacttcttccccgcgcggtgaaaaacaaacccgcccgacgcccaaaatactcgtttgtttattaatcataaaaaacactctctctctctcctccatacaaacacgcccccgtggtggggcgaccaatcgaggcgcacgttatttgtgtcttcttccccgccacccacacaccctctactattctcg

SEQ ID NO: 81612 - DNA, 878 bp, Homo Sapiens
gcggccgccttgaatactggaacccagacaacaagtgctgcagcagctgcctgcaacgcttcgggccgcccccctgcccgggtgagaatccgagaccgagccttgcttgggcggagcttggcagaggccggtccctgccaaggggcactgccccctcacacctggaaacccaggcgcccctagctcccaggagcgcagctcaccagcaagttccattgcctggaggacccctgagcctgtccctcagcaggcctggccgaatttccttccgctcgtggtgctggtcctgctcctgaccttggcggtgatagcgatcctcctgtttattctgctctggcatctctgctggcccaaggagaaagccgacccctatccctatcctggcttggtctgcggagtccccaacacccacaccccttcctcctcgcatctgtcctccccaggcgccctggagacaggggacacatggaaggaggcctcactacttccactcctgagcagggaactgtccagtctggcgtcacaacccctgtctcgcctcctggatgagctggaggtgctggaagagctgattgtactgctggaccctgagcctgggccaggtgggggtatggcccatggcactactcgacacctggccgcaagatatgggctgcctgctgcctggtccacctttgcctattcgctgaggccgagtcgctcgccgctgcgggctctgattgagatggtggtggcaagggagccctctgcctccctgggccagcttggcacacacctcgcccagctagggcgggcagatgcattgcgggtgctgtccaagcttggctcatctggggtttgttgggcttaacacccaataaagaactttgctgactact

SEQ ID NO: 81613 - DNA, 525 bp, Homo Sapiens
gacaacaagtgctgcagcagctgcctgcaacgcttcgggccgcccccctgcccggaactgtccagtctggcgtcacaacccctgtctcgcctcctggatgagctggaggtgctggaagagctgattgtactgctggaccctgagcctgggccaggtgggggtatggcccatggcactactcgacacctggccgcaagatatgggctgcctgctgcctggtccacctttgcctattcgctgaggccgagtcgctcgccgctgcgggctctgattgagatggtggtggcaagggagccctctgcctccctgggccagcttggcacacacctcgcccagctagggcgggcagatgcattgcgggtgctgtccaagcttggctcatctggggtttgctgggcttaacacccaataaagaactttgctgactactaagcccagtatacaattagcactgaagtacttcttgaagtacaatcctaattgggcaaagacccaacagatagcctcactgctcttcgccctaga

SEQ ID NO: 81614 - DNA, 583 bp, Homo Sapiens
aacgatagtgcaggagggcccgggtgtttaatcggcacgaggcaatgaccacggcgatttcgtaacgcccccgttccgaaagtgttcttctgggcagtgcaaccccgacggcgcggagctatgtagcccctgcggcggcggagccgtgacccctactcccgccgcgggcgggggcagaaccccgtggcgctgcagagagaactgtccagtctggcgtcacaacccctgtctcgcctcctggatgagctggaggtgctggaagagctgattgtactgctggaccctgagcctgggccaggtgggggtatggcccatggcactactcgacacctggccgcaagatatgggctgcctgctgcctggtccacctttgcctattcgctgaggccgagtcgctcgccgctgcgggctctgattgagatggtggtggcaagggagccctctgcctccctgggccagcttggcacacacctcgcccagctagggcgggcagatgcattgcgggtgctgtccaagcttggctcatctggggtttgctgggcttaacacccaataaagaactttgctgactactaagcccagt

SEQ ID NO: 81615 - DNA, 992 bp, Homo Sapiens
  misc_feature (117)..(117): n is a, c, g, or t
  misc_feature (166)..(166): n is a, c, g, or t
  misc_feature (212)..(212): n is a, c, g, or t
  misc_feature (255)..(255): n is a, c, g, or t
  misc_feature (294)..(294): n is a, c, g, or t
ccatatgttgcatcccagaccttatggcagatcgtcttagtattatctcttcctgtgtcgggcatttgtcccagccagccttccgatcaacatattcgcatgtgtcactcacgtatntgactcgttcccggtcctttgtgtccgtcctggacacattctggtggtntggctgtcgtcccccagccccgcccatggatcagtagttcagagcnggagagatcgtgggtaccccacgtcctcatgaccttcgctgcntgctgagcgacgagctcagcaacatcgctatgcagtgcnggaagctgggggcactcagcaccctttgcttaccacagccagggggttgtacatgacagctggaaagcctccagttgagggcttggtgggctccttatctctaaagcagctgggcccagcagcgtgaacacttcatgtcagaactatgacatggtcagtgggatctactcatgtcaaagaagtttggcagagatcacggagctaattcatattgctctccttgtacatcgtgggatagtaaatttaaatgagttgcaatcatctgatggtccactgaaagacatgcaatttggaaataaaattgctatcctgagtggagactttcttctagcaaatgcctgcaatggactagctctgctacagaacaccaagtcattttcatttaatggacctattgctatatatcagatgggagactgtgagtcagcctggatcttgtctaaacacccaagagcattgtcatgatgtcactcctggaggttgttctattaagcattagtgatttatacttccggataaccagtggcacagatgtactctttacatagctgatgtatttccttatgttaactttgttttcctaaaggcgtaaatatgttgtttaaaatgaagtattttgtttgtacaaatatgctcaatttatgcatataaatctccctttacaccatctatatagtttaataaagatgctattgtct

SEQ ID NO: 81616 - DNA, 748 bp, Homo Sapiens
ggccgcagccccccatgatcctcttgcagcagctgctggcctcggccacccagccgtctcctgtgaaggccatatttgataaacaggaacttgaggtacagccatgcagccttgacagtttttaatccacagcactaaattgtgaacactttttttctagatgtatattttcttaaggatctattctgaatgttaaatgatagtacgcaaataattctaatgattcattggggtttaaccatgtttgtgcatagtctgcagaacattataatactaaagactgagagggttgaagtttaaccttattttgggtttgtgtaaattgtgaaaacaatattaactagatgcagcatgggttaaacgctcacatcttcatgaagggatctttttccaggaagtagaattattcaaagaggctcgtcaggactctggcagccgtttgtctgtttcattcactcaggagcctcttgggggtgctctggtgccgccagcctctccgctctctccatgctgtggagcaggtgagggcagcagcgaggcacagggtcagggctacgggacgttcgcatagaggaggcgacgtgattgagtgtacagagggatgggagctttcatggctggcaacatagaggattagagcatgttcattccaaaatctttcttgctgtgtaatacatttaaaaatctgggacaaatatcagagaccaaaataaaactatcagtactcaaaaaaacctaccataagcag

SEQ ID NO: 81617 - DNA, 1149 bp, Homo Sapiens
agatcctggaggtaacccatggatcggagggctagctgtatatgtttattgctgtggaaacatgaaaacaatgatggagcagtggtatcacctgaccttggggacatgtctcctgaagggccgcagccccccatgatcctcttgcagcagctgctggcctcggccacccagccgtctcctgtgaaggccatatttgataaacaggaacttgagactgctgcactgggcgttgtggagtccactcacccttcgagcccaggatttgaagactgcagctccagtgaggccaccacgcctgtcaacgtgcagcacatccgccctgccagagtgaagaggcgcaagcagtcacccgttcccgctctgccgatcgtggtgcagctcatggagatgggatttcccagaaggaacatcgagtttgccctgaagtctctcactggtgcttccgggaatgcgtccggcttgcctggtgtggaagccttggtcgggtggctgctggaccactccgacatacaggtcacggagctctcagatgcagacacggtgtccgacgagtattctgacgaggaggtggtggaggacatggatgatgccgcctactccatgtctactggtgctgttgtgacggagagccagacgtacaaaaaccgagctggtttcttgggtaatgatgattatgctgtatatgtgagagagaatattcaggtgggaatgatggttagatgctgccgaacatacgaagaagtgtgcgaaggtgatgtgatgttggcaaagtcatcaagctggacagagatggattgcatgatctcaatgtgcagtgtgactggcagcagaaagggggcatctactggtttaggtacattcatgtggaacttataggctatcctccaccaagaagttcttctcacatcaagattggtgataaagtgcgggtcaaagcctctgtcaccacaccaaaatacaaatggggatctgtgactcatcagagtgtgggggttgtgaaaggtgtgatggatgtcagatgtttcctatcaatggatccagattcaaatgcagaaactgtgatgactttgatttttgtgaaacgtgtttcaagaccaaaaaacacaataccaggcatacatttggcagaataaatgaaccaggtgaagc

SEQ ID NO: 81618 - DNA, 1436 bp, Homo Sapiens
cagtcgacggtaccggacatatgcccgggaattcggccattacggccgggtttcttagagatttcaattgcttttaaaagtttgggaagccctctctttggttctttaatgtcttaattttgagaacctgacttttattttactttgaaaggctactactttctagaatattttacttccatgagctctgccgagcttccccacctgtgctcagtggcacagtatgggtttgtagattacaggcgtgagccactgcgcccagccttgaggtagcatactttctgaaataaaaaagctagattatgtccgaagacagttgacctaaaaactgccttggactgacatatgttagcgtggtctaagatgttctcttcacgctttgcaaacaaaatgagctatatcggagtttcaaattaacgcataccctctggtgtgtaaggtatatatagccaccaaacaatttaacaaatttgataacctgtcacgtgtaagttcagaaagcacttcggtcttaacttggtgactctgggggtaattcggtataacatataggttctatatctaaaaattattgacagtatcctccaaataattgccccttcaaatgtatcatctaaacggtgacagcttgtgggcagaaccatgcacaggaagtgcctgccagtgggtgttaggagatgtaggtggagtctgtgatagccaaccaaaagctatccccttctcgcccagaaaagccacgtgctttgctggacgctacttgaaatctgaactctgcacctacatatgtagtaaaattagagacttttgtcactttaatttttagattatctcaagttttcactagatttcaatgtgccacttgtgctatgagtctttaagaagctttaaaaaataaatgcacacctgtagccttttaccattcagacaggtagattatatttacctgtcatgagggaccatgtatggttgacagttgcaggtttgattaaatccactatattgcacaaattttgctggaaataatttcctgccctgccaagagctctatggtagtttgataataaactactaccccagtattcttaggaactgtgttactaagtcttttctgcctgatttgtactttatttccatagacccctcagatatgtgaggaatcaagccataaatgtgcatttgctggacattatgtaccatgtcatctctatgactacagatttcaaggataatttttacatctaacaatttcactgtaacagtgaccgataatgtgagaaatgtgctttttacagtgctgctggtgggtagacaagtgcttgctgcagttgtttctgaatctagccagatgctggagtcgtgaagctgtaagctccgcgggagcagggaccatctctctttcttgcactacaggcactcaataaatacttgtggctgtg

SEQ ID NO: 81619 - DNA, 1008 bp, Homo Sapiens
  misc_feature (20)..(20): n is a, c, g, or t
  misc_feature (151)..(151): n is a, c, g, or t
  misc_feature (174)..(174): n is a, c, g, or t
  misc_feature (226)..(226): n is a, c, g, or t
  misc_feature (234)..(234): n is a, c, g, or t
  misc_feature (245)..(245): n is a, c, g, or t
  misc_feature (251)..(251): n is a, c, g, or t
  misc_feature (265)..(265): n is a, c, g, or t
  misc_feature (408)..(408): n is a, c, g, or t
tactgtcgaattatcgctcnttaggattgcctcgagccaagatcgcgggaggatgctcacgggccttgatgataggcaggaagagcagttgttccattgatgaaatagagatcccatgtccaggtcaggcaagacacaaagtttagttacntagtatcccttaggttggacatnacaggagacatggggtgccatagcaattagctgataaattatcagaactctntcatcatntctgtccctcntatctnagctgaccgttccntgatgtgtacctgctctgctactgatccaaactgcagaattctcattcatccccaaggcctccaggcagtatccaatggggaatcagctctaaaaggaaccagaccaacgttttccagccccttcattctgtgactgaggggnaggaaagaatgggaggggtattcttgtctagtggatggaaaggaaacacactgtcaaattactatatctccttggttttctattacagtagaattctccagccatatttttattgtctatgggggaagttggagatggtgaccttgattagaagtgtctggagggggataaatggaggggataagattcagttggttttggaaaatgttaaagtcttaaaataatgcgtccatctgaagaattttttctaaaaccagagtttataaaaatatcactgatacagcctgccccctcatttccctgccacaggagatgtcttggactagagacacttgtttaataatagcttgtctctgatattcccagtagcttccctctgtgtgaggaaaggatagaaatgttcaggacatcatcatacaggctcctcatctacaaagttccagtagcagtgacgcctacacggaagacttggaactgcaaacaggctggggtcacctcagtgacatctgacgctgtccaaccagaagttcgatttttgttctgggggtgaaggaggaaacagactgtactaaaggactaaaataatttgtctatactaaa

SEQ ID NO: 81620 - DNA, 1170 bp, Homo Sapiens
  misc_feature (187)..(195): n is a, c, g, or t
attttctgtcctaaaagtagaaatagccccttctaggtaaggatggagcatttgatcatactggtttcattatattcctctaacagttggaaccgattgtttttgagtacttgtttcaaacttctgagtattttccttctggaaaatagctcagtgtttaaaatttacatgaacttaaaaggttaannnnnnnnnaaagaatgtttgaggagcaatcaattctgattttgtcttatggatagaaatagaattagccattttcctcaagaaaagtgattcttctgaatcttagcttttcagtaatgagaactggactgtttccacttgacctctatttcctgttagtgggaaaccgcttcccagaggtgctgtgtgaaagattgctggggaaagggtttctagatcccagcataacaagttcaagagtccagcgatattgtcattagaataatggtcttcattaagtactagttttcataatcctgaagcttcattttcaccaatttgaaaggcagctagggaggagaagactatgcagggaaggaggaaaactctggagtgcatcacagagaccttgagtgagttaaggcagggaagaagcagatttgctatccactgaatgaaaataagaagaattccattgtccaaggtcagagcaagaacacaaaggttttagtttacttagttaattccttaggtttggacattacaggagacatgggggtgaccatagcaatttagctgataaatgtatcagaaactctttcatcattttctgtcccctcctatcttaggctgaccggttccctgatgtgttacctgcttctgctactgatccaaactgcagaacttctcattcatccccaaggcctccaggcagtatccaatggggaatcagctctaaaaggaaccagaccaacgttttccagccccttcattctgtagcttccctctgtgtgaggaaaggatagaaatgttcaggacatcatcatacaggctcctcatctacaaagttccagtagcagtgacgcctacacggaagacttggaactgcaaacaggctggggtcacctcagtgacatctgacgctgtccaaccagaagttcgatttttgttctgggggtgaaggaggaaacagactgtactaaaggactaaaataatttgtcaaa

SEQ ID NO: 81621 - DNA, 266 bp, Homo Sapiens
agtgatctagaggatccggtgatgaggaagtcactgggtaactgctactggaactttgtagatgaggagctgtatgatgatgtcctgaacatttctatcctttcctcacacagagggaagctacagaatgaaggggctggaaaacgttggtctggttccttttagagctgattccccattggatactgcctggaggccttggggatgaatgagaagttctgcagtttggatcagtagcagaagcaggtaacatatcagggaaccgg

SEQ ID NO: 81622 - DNA, 978 bp, Homo Sapiens
  misc_feature (124)..(124): n is a, c, g, or t
  misc_feature (226)..(226): n is a, c, g, or t
  misc_feature (272)..(272): n is a, c, g, or t
gggtcatttcacagacgtgtactgtagattaaccctcttagggatgcctcggccaagatcgccgaggaatgatgaatcgtacatatttactggcatcccatttatcagagttgtaatcttacangatatactgcctaagcaccttgacatagtgtattgcccatttgtagatgaacagttcagggagtagttcacctccagtctacatgctagaatctgtgttcgntgatgtggcgctgcttgttagttattctacaaacatgcatgcttcntgtgcgtccagctcaggcccattatcatgcatctccccatcctgtctcccccaacttcccttacttggtcacaattcgccaaagccaaagggatgtcctaagccaatgttgattatcactcttcctgctcaaaagcccccaagatcacctatcaatcacctacttgagtgcaagctttgactctgtcacctgacattcaagtccccctctgcccccatgccagtcttatcccctcccctacctatgccctatcctgcagccaaattggactctgttcttcctgacaagacctggtattggcatctctatgcctcagtttgccttccctccactttaaaaagcctcttcagtctcgatacaaaaaacatcccacacatgttctaaaaccatgctttccttgatttctcctcatgtcaagacatttcttacttctctagtctcctagcattttgtgcctcacaaccctcaggacaggccagctagtgtatggctgtgggtttttatctcacctcccctgcctgaccctgagcccttgtggggagtatactcaccctactcctacagtgccttgcattccgtagctgctcagtacattaacccattcaatgtctttaagatttttacaagttagttttcctgtaattactaatcatttatctttaattctgagtaaaattcacaacaacaaataaaaggaaatagtagt

SEQ ID NO: 81623 - DNA, 996 bp, Homo Sapiens
  misc_feature (77)..(77): n is a, c, g, or t
  misc_feature (95)..(95): n is a, c, g, or t
  misc_feature (136)..(136): n is a, c, g, or t
  misc_feature (168)..(168): n is a, c, g, or t
  misc_feature (230)..(230): n is a, c, g, or t
  misc_feature (232)..(232): n is a, c, g, or t
ttccagaaattcagtcttgtgcccgttggagtcaccgagccacttctgaccattgtgtgcactccccaactccgtcnagaaccggagacccactnagcacaacaggacgtttatccaccctgggcccactgcggtnccagtaggattctcccagacccgagcttgttnacagccccaccgcccgtgcatgtgtctctggggactccgcagctgtcccaccatggagggcntntgagagaaaaaccctgctcaaggaaggcggaagcctgcgctgtcctcgtggaccaggtactggtcatactctcaggatccaccctcctgtactacggagccaagtccttgcggggcacagacagaaaacactataaatccacacctggcaaaaagtttccatcgtgggctggatggtgcagctgcccgatgaccccgagcacccagatatcttccagctgaacaaccctgacaaaggcaatgtttacaagtttcagactggttcccgatttcatgcaatactgtggcacaagcatttggatgatgcatgtaaaagcaacaggcctcaggaagccggagcagctccaggtccaacaggaactgacagccacgaggtggaccacctggagggcggtgcggggaaggaggcagggccctgtgcctgaagcctgggcaccatggtggccccagtcaggagcaacagtggtagccctgagtaaaacccattgtccctctttggaggagcggccagaggatgacagcagccccagcaggcagcagtgcctgggcaggctgatccagcagagcactaatgggtcagtttcatgtattggcagatgtggtgtagcatggcaaggctacaagttttaaggatttttgtctgattttcagacctggaggaggggatttttcttcctactttcccccttttttatttctaatttactttcaaccaaatattcccactatgtgctatatgtaataataaaaagttgacaacaactg

SEQ ID NO: 81624 - DNA, 915 bp, Homo Sapiens
  misc_feature (115)..(115): n is a, c, g, or t
  misc_feature (163)..(163): n is a, c, g, or t
gatgaacagtttccccagctgatcagtgtactctagtcattactctccatcttaccatctctgctcagcatcagactacttgatacagttgcacaccacaccagctacatttttnttgtagagacaggtctcactatgtacccagtctgtctcaactcccgcntcaagcatcctcccactgcctcacaatgttggatacagggtataagccactgcacacggccttactatgctatcaattccatatatggaaaggtgttttccctttcagagctctttaaagctctgcagaagatttacatgtgtttatagagctaagagaaatcagggcatggaaattgagtgtgtaataaaaattaaactcttcatgttatataatcatgcataacttctatcttcattctctgaagttgcctagagcaccatcacagctaggaagcttccatcatgaattaccttatttccaaaagcaagtactcaaataattgtctcaagagaggaaggacaaaactgttacaagctgaaatatttggggatttgtttgacttgactagggaaccacaagttttcatataatgcctgatttagccctgtgcctaacagtttaaatcttaatgctaatgttaattgcttcccagttggttgaccttataagaaaacactgtgtggtattttaatgtggtaaacatgtgaatgaaggcctgtggctcagttaatcactcccacaactttgagctgtgagttttactggtggaaggaactttaacaggtcttcgctcttgtcattagatatcaaagaactgaaattagttggaattgtaagcagtgaatagatgtgttgttagaatgattccatcacttatacattgtttaaaatgctaataaagtaacttgctttgtaagaattaaaaaaaa

SEQ ID NO: 81625 - DNA, 1034 bp, Homo Sapiens
  misc_feature (62)..(62): n is a, c, g, or t
  misc_feature (73)..(73): n is a, c, g, or t
  misc_feature (107)..(161): n is a, c, g, or t
  misc_feature (165)..(166): n is a, c, g, or t
  misc_feature (174)..(175): n is a, c, g, or t
  misc_feature (215)..(215): n is a, c, g, or t
  misc_feature (222)..(222): n is a, c, g, or t
  misc_feature (226)..(226): n is a, c, g, or t
  misc_feature (228)..(228): n is a, c, g, or t
  misc_feature (356)..(356): n is a, c, g, or t
  misc_feature (388)..(388): n is a, c, g, or t
  misc_feature (405)..(405): n is a, c, g, or t
agcgcatgagcgcacgcaatatgtgagtagtcactcatagcaccccagcttacattatgctnccgctcgtatntgtgtgaatgtgacgaatacaattcacacagaannnnnnnnnnnnnnnnnnnnnnnnnnnnnnnnnnnnnnnnnnnnnnnnnnnnnnnccanngaatcgcnnacgagggatttggtatgttttcagcttttgtatcatgttnaatgttnaatngnttgaaaaactgcagttggaaatcagatagcaatatagacattcacagcagctctgtggataccatgtaattgtcaggtaatttcagaatgttgaaaattattcagtgcagccctcatagtatcatacntgaagaaattgattacagttccactaaattgntgaagataaattatttntaaaggttatgaaaactaagttatattaattcatatgtttgatttttaaatcccacctcctcaagctatccaattttctgactgtgaaaataaccatgagagatgccacatttctctctgggaaactaccactcaaagaataattgttaaaaattaagcttttaggtattagaagctgttataaagtataaaattaagatataagcagatcacatgtaaatcattcctaaagcacaagaaaagaatgtgccttgatgtacatatattactaagttgcctctcccagtttactttaaaaatggctttaaggataaagaataaatgtgatagctgtgcatgcattatatatttgcatttgcaaatttcccattgttttaacagctgtgtggctgactttcaattttaagacgtgaattgacatacagcccataactttataatggctgctcatttatcttatctttcagttagtggaaaaacatttcaacctgactaaaatttggaattgtgtcttttatgttccatcctctgttgttactagatttagtttaaaaattgtgtatgaccattaatgtatgtcataaacatgtaaataaaagatgttgaatcttgttgaaaagcatgaaaaa

SEQ ID NO: 81626 - DNA, 1036 bp, Homo Sapiens
  misc_feature (72)..(89): n is a, c, g, or t
  misc_feature (713)..(713): n is a, c, g, or t
  misc_feature (742)..(742): n is a, c, g, or t
  misc_feature (819)..(819): n is a, c, g, or t
  misc_feature (829)..(829): n is a, c, g, or t
  misc_feature (942)..(943): n is a, c, g, or t
ggtaacgacggccagtgcctagccgaaattaaccctcactaaagggaaaaagcttgcggccgcctctcaggnnnnnnnnnnnnnnnnnnagtctaaaaacataatttaatgcatcgcggtgagtctgagtcaggagggaatgcggtgtggagaggtgaattttctgtttgctggaattctgctgtgggtggggttttggctgatggacagggaaatctgcacaagtatttcgggtcacaaagaaggacgccccaggaagcccgcgctccctctggcctacctccctggccagggcccggagccctccgcttctaggcactgggaggaggctgtctgaggagggcaggctcccggccctgcctgtccaggctaatcaggtttgcaaagtctgtgccgccgcctcaagggctcgggcgtcccttcctcccttgccgggatggggatggagaccaggagcacagccctgagcgtggtgggtcgcagacgcactgaggccaggagcggggcagggaggacgcagggatttgtcttttccaaaggagatgtcaggaagtgttatgaatcgagagtggcctttgccaaggagccgcgcccgggcggagaccgggcggcctgcagccaccccgcctcgcaccccccgcgcccctaatccgggtacagaagaaagcccgagaacgtgctgtacttgttattattgcctccgtgagccttcncgccatccagcttcacatacacttcgtcncctgaatccaagtgcagcaccacgctgttactggcgtagtcgtagttctggtcggcgtcctgtgcaatggcgctggnccggacctgnggacaagcggtgggagcaggtgagccggggcacctcttccgcgcctttgctcagccaacacaagcgcgcactcacggggctccgcctgctgcttcaggggtcacactccaccnnagctcatgtctctctccacttagtcactccttcaagtcccctcctctcgcgcgacgatctgggaataggagaggggagctcatgacactgaca

SEQ ID NO: 81627 - DNA, 1161 bp, Homo Sapiens
  misc_feature (112)..(647): n is a, c, g, or t
  misc_feature (708)..(738): n is a, c, g, or t
  misc_feature (984)..(1064): n is a, c, g, or t
actagtactacggtgagtttggaagcccacgctccgaaggagaaggcggacagtatccgtaagcgcagggtcgaacagagagcgcagagagagcttccaggggaaacgcttnnnnnnnnnnnnnnnnnnnnnnnnnnnnnnnnnnnnnnnnnnnnnnnnnnnnnnnnnnnnnnnnnnnnnnnnnnnnnnnnnnnnnnnnnnnnnnnnnnnnnnnnnnnnnnnnnnnnnnnnnnnnnnnnnnnnnnnnnnnnnnnnnnnnnnnnnnnnnnnnnnnnnnnnnnnnnnnnnnnnnnnnnnnnnnnnnnnnnnnnnnnnnnnnnnnnnnnnnnnnnnnnnnnnnnnnnnnnnnnnnnnnnnnnnnnnnnnnnnnnnnnnnnnnnnnnnnnnnnnnnnnnnnnnnnnnnnnnnnnnnnnnnnnnnnnnnnnnnnnnnnnnnnnnnnnnnnnnnnnnnnnnnnnnnnnnnnnnnnnnnnnnnnnnnnnnnnnnnnnnnnnnnnnnnnnnnnnnnnnnnnnnnnnnnnnnnnnnnnnnnnnnnnnnnnnnnnnnnnnnnnnnnnnnnnnnnnnnnnnnnnnnnnnnnnnnnnnnnnnnnnnnnnnnnnnnnnnnnnnnnnnnnnnnnnnnnnnnnnnnnnnnnnnnnnnnnnnnaagaattcggcacgaggtgttaccattctgatgttggagcggccgcggctgtaggcttgannnnnnnnnnnnnnnnnnnnnnnnnnnnnnnctttgaatatcatcagcttacttgtctggcaagggcagaagcctggggttggcctgaactctgccaaacaaatatcaaagtgtatttaatagttaaatttgtgccctttcccttcttgctgcacccatgttgtcacttaacccccaggagttatttattatctttttgttaaagtcaggctcatttggggtaatgtgatgactgtttaggtttacatgaccctcctctcctttccctacccccaannnnnnnnnnnnnnnnnnnnnnnnnnnnnnnnnnnnnnnnnnnnnnnnnnnnnnnnnnnnnnnnnnnnnnnnnnnnnnnnntcctttgtttctttgcctgcttatactggccataaaagagggagctgccttcaatgtataaagtataagaagagtgccagggaatgccataatggag

SEQ ID NO: 81628 - DNA, 1264 bp, Homo Sapiens
agtaaattgtatttttttaatgacatcattgatttgaagatctagatggcataaattacgacgtctgccatcgcatattagaaaggggacagtcatatttgtaacgtggagagaacacggagcaccagtcaccacgtgcacttaggatgcagagcttaccgcacaccgctgatggggacctccggaaagagcagtgccttgtggttggcctggaagttctctcccaaggtgaaattcctttaaaacctcaggctctgacctatgtctttgaagcagctgctttgtagagtccctctctttactgtcctcgttaggactgttttgtggttccatgaaaatgtttagcatccttgcagaattacttgagaaggggctggtaccagtgtaaagaatctattttctgtaaaactacgaacttttgcatagggaatttattctaagcaggtcatagccgtgatccagagctgctgctgctcactgccagtccttgcggctggcggcgattgccggacagactctctgtggcctggctctcatccttggcgtgtcagcctgcggcaggctgccagccatccatgacaatcatgtgagctcagccacagacctcagctggcggtttgatccctggcaggtccctcgagcagtactggtaagaggcttcacacattttcccactcttacagttcatttttcatagtaggaagggcccttggcctcccccagtgcctcttccagaggcctccaccagcactaagctcagaggaaagaagaaaaggcgcaaggaagtcagaccgtcacacccgggggctcccctttcccatgtagaagtgttggcatgcgtcaaatctcctttacagaggggtggatgtatcccgtggaaggaagggccttctctctttctaattgcactatacttgttctagcttcagtctggagatacttaagacctccatggggtcgtgatccatagacttagcaagtcttgccttatctatggagctcgatggtgagaattgtgaccattgtctgatgtccatagttccttccccctagattgtttctttccacggattgtgttcatctgaaccattttattttttatttaccaaagtactgtacttggctatttgcagtgttttcaaaaccaaatgtttctttttttgtgtttttaatcttcgatacttggtgcaatagaagctgcaaagatgtgccactttatctatgaaatggagttttgtataccaataaattctagtttaaaaac

SEQ ID NO: 81629 - DNA, 425 bp, Homo Sapiens
ggcacgagagaacaacaaaaaaacccagcacaaaaccgacgatggagtttgtttctttgatttctttgccaatggcaagaagatgagatgccctcagcactgaggattcttgcccccttgtggtgcccgctgcccccaaccttcaggctgccagatgctcccctgacaacaccaggctacaggagccagacgccagggcctgcccggcctcctgttcctgcccccacccaccacctgcctggagaggaacgggtcgggtccgtgtcggagaagtgacaggtcccagagccaaagccggccctcaagcatcatcagggagtggtgtagtcagtttgaagggcagttcccaccgcattccagcccacatttgttcttattttgtatttttcatggaaaagcagtttttgaatgaggagttaaatttt

SEQ ID NO: 81630 - DNA, 1254 bp, Homo Sapiens
  misc_feature (99)..(99): n is a, c, g, or t
  misc_feature (115)..(547): n is a, c, g, or t
  misc_feature (802)..(811): n is a, c, g, or t
  misc_feature (835)..(865): n is a, c, g, or t
ggacgcacgaggagttccaggggaacgctgtatcttatatctgtcggttcgcacctctgattgacgtcgatttttgatctcgtcaggggcggactatgnaaaacgccagcacgcnnnnnnnnnnnnnnnnnnnnnnnnnnnnnnnnnnnnnnnnnnnnnnnnnnnnnnnnnnnnnnnnnnnnnnnnnnnnnnnnnnnnnnnnnnnnnnnnnnnnnnnnnnnnnnnnnnnnnnnnnnnnnnnnnnnnnnnnnnnnnnnnnnnnnnnnnnnnnnnnnnnnnnnnnnnnnnnnnnnnnnnnnnnnnnnnnnnnnnnnnnnnnnnnnnnnnnnnnnnnnnnnnnnnnnnnnnnnnnnnnnnnnnnnnnnnnnnnnnnnnnnnnnnnnnnnnnnnnnnnnnnnnnnnnnnnnnnnnnnnnnnnnnnnnnnnnnnnnnnnnnnnnnnnnnnnnnnnnnnnnnnnnnnnnnnnnnnnnnnnnnnnnnnnnnnnnnnnnnnnnnnnnnnnnnnnnnnnnnnnnnnnnnnnnnnnnnnnnnnnnnnnnnnnnnnnnaagaattcggcacgagggctggtggcagcagcggggccgatcttgctggcgcttcattgtgggggcccccaaactattcttctagcttatggggagtcccaacggtggaagatccccataggatgggcagccctgctcctttactacctggtgaccttctgggaggagggtcggattcaatctgaacttagaactttcaactctgacctcgtgaccttttttggaacagcagcagcactaacttgaccttttcgnnnnnnnnnncaacttgcaataaatacatttttnnnnnnnnnnnnnnnnnnnnnnnnnnnnnnnggtgggtcattgacagactgtctgagcacatagttgcctcccttataacttcagttttttcgtttggaatatgaatccaaaaagagaacatatcactcttgaaatacttgaatcatgaacgccaacctagaaagacaatgtgaagcaagtacacataccatttaaatttaaacacaaaaaaattaaaaacattagtttctagtttttcacttttttcatgttatatggaagttgttgctaagaaacatatatactgaaaaaaaatagctttttaactttgtttgcactgggtgtgtttccgtccttaggtctaccatgtttgggagggagggaaattcaaaagaattgttgggggaggggggagggaagacttgacggagcctcacttt

SEQ ID NO: 81631 - DNA, 1035 bp, Homo Sapiens
  misc_feature (32)..(32): n is a, c, g, or t
  misc_feature (61)..(61): n is a, c, g, or t
  misc_feature (73)..(73): n is a, c, g, or t
  misc_feature (150)..(733): n is a, c, g, or t
  misc_feature (783)..(801): n is a, c, g, or t
tgtaccgataggccagcgtcggctaacggggntctcacacagccagttgagcgacgactancaccgaatgagnacctacagcgtgagtatgagaagccccacgcttcccgagggagaaagccggacagtatccgtaaagcgcaggtcggnnnnnnnnnnnnnnnnnnnnnnnnnnnnnnnnnnnnnnnnnnnnnnnnnnnnnnnnnnnnnnnnnnnnnnnnnnnnnnnnnnnnnnnnnnnnnnnnnnnnnnnnnnnnnnnnnnnnnnnnnnnnnnnnnnnnnnnnnnnnnnnnnnnnnnnnnnnnnnnnnnnnnnnnnnnnnnnnnnnnnnnnnnnnnnnnnnnnnnnnnnnnnnnnnnnnnnnnnnnnnnnnnnnnnnnnnnnnnnnnnnnnnnnnnnnnnnnnnnnnnnnnnnnnnnnnnnnnnnnnnnnnnnnnnnnnnnnnnnnnnnnnnnnnnnnnnnnnnnnnnnnnnnnnnnnnnnnnnnnnnnnnnnnnnnnnnnnnnnnnnnnnnnnnnnnnnnnnnnnnnnnnnnnnnnnnnnnnnnnnnnnnnnnnnnnnnnnnnnnnnnnnnnnnnnnnnnnnnnnnnnnnnnnnnnnnnnnnnnnnnnnnnnnnnnnnnnnnnnnnnnnnnnnnnnnnnnnnnnnnnnnnnnnnnnnnnnnnnnnnnnnnnnnnnnnnnnnnnnnnnnnnnnnnnnnnnnnnnnnnnnnnnnnnnnnnnnnnnnnnnnnnaagaattcggcacgaggattctgatgttggagcggccgcggctgtaggcnnnnnnnnnnnnnnnnnnngtagagatggggactgtttgacccagcagttccagaccagccagggcaacatagcagaccccatctctacaaaaataaacaaaattagccaggcatagtggtgtatgcctgtagctctagctagttgggaagttgaagtggaaggcttgcttgagcacagaaggtctaggctgcagttagctatgattgcaccactgcgctccaacctgagcaacaggacaaagacccgtctct

SEQ ID NO: 81632 - DNA, 1035 bp, Homo Sapiens
  misc_feature (787)..(788): n is a, c, g, or t
  misc_feature (809)..(809): n is a, c, g, or t
  misc_feature (812)..(812): n is a, c, g, or t
  misc_feature (817)..(992): n is a, c, g, or t
aatttaatcagtaactttattataacaaaacctgtatattacccatttaaactcatgtgtaacattcagtgatgtgtagttatttggcaagttatacataatcagcagcagccaggctcaagaaaataaaagttgattagttgatcagaaataaaatctgtagagtgaattagatttctgagttgttgttgttaatggaacattctatttgagacctttttcaggtgtgtagcaattctaccatgtccatttttttaagcattaaaaaggaacttaccagttgtaaattaagacaagatccaaatagtcatatttttgtgtttcctctaaaaaaatgtaagatttccatttttggcactgactaactgagcctacatctagattttaaataccatcttgaatcctaataattaaactgatgaaagtgcatatcattgttcctaacatttatgaacccccataaagatgttcctgatctttaaaactcattaatctgagtattaagtagaaacagaattttccaaagcattagacatcactttctcagtttatctgaggtgacttcgtgtacatctgtttctaatatatttgactaattttcatgatctcagattgtgaggtaaatgtaatctggaataataagtgtcttttacctagattacatctctcatttggagtttggcaatgaaactgctatgaagaatgactgtactctcctatctgtccctggatgacataaatatcatttgctttgttgtttaaactgaaataaagttttcacctcgtnngcgattcttgggctcgagggncanatttnnnnnnnnnnnnnnnnnnnnnnnnnnnnnnnnnnnnnnnnnnnnnnnnnnnnnnnnnnnnnnnnnnnnnnnnnnnnnnnnnnnnnnnnnnnnnnnnnnnnnnnnnnnnnnnnnnnnnnnnnnnnnnnnnnnnnnnnnnnnnnnnnnnnnnnnnnnnnnnnnnnnnnnnnnnnnnnnctgtcgtgcagctgcattatgatctggcacgcgcggggagagg

SEQ ID NO: 81633 - DNA, 378 bp, Homo Sapiens
  misc_feature (66)..(101): n is a, c, g, or t
ggagcccgggagtggtgtagtgactgcatccactgcgagctctgagaacggggcggggaagccctnnnnnnnnnnnnnnnnnnnnnnnnnnnnnnnnnnnngtcgtagactctacaagcacctggatatgtgaggttgggctgcaacagaaatgtcatctgcattgtgcagatggaaaagagcagaagctgcctgttgcctgtggaactgtcccaagacactagcactgtagaacgggccctgctcttgcagagcacggctgcacccaacagtctccatgtcaagaccaagggcctcctggaaacaccaactctgacaaaaaggagtcatctgggagcccgagaatcctactcctggccgggcacagtggctcacgca

SEQ ID NO: 81634 - DNA, 1031 bp, Homo Sapiens
  misc_feature (16)..(16): n is a, c, g, or t
  misc_feature (54)..(55): n is a, c, g, or t
  misc_feature (94)..(94): n is a, c, g, or t
  misc_feature (100)..(100): n is a, c, g, or t
  misc_feature (125)..(125): n is a, c, g, or t
  misc_feature (140)..(140): n is a, c, g, or t
  misc_feature (152)..(152): n is a, c, g, or t
  misc_feature (158)..(158): n is a, c, g, or t
  misc_feature (205)..(205): n is a, c, g, or t
  misc_feature (250)..(250): n is a, c, g, or t
  misc_feature (395)..(395): n is a, c, g, or t
gcatttcatattcgtntagaatacaagtagtctttttgtacaaaaggatacatnntgattgtcaaaaaacatataaaaagacagctgctctccntcaatnacatgagctagtgataaaagacttnttcatggtaatgtcnccaagttcgtcnttttancataaaaagaaacatatgtggggcaaatgtgaatatccgtttaatantgaacatagtatctggtaaatccatccagatcaaatgcataaatnttctgttaactcaacaactgatgctaccaaacgtggactcaatatacttgttaaaacgtgtaaagcgtgtctctagtcttcaaagctttcaggtgaagagaggtgctttttcttgatgcaaatctcaaggcagagaaaatcattntaaagcttataaaaagtggacagagaaatattaaaaacttctctgaaatatacaaatatgtgtaattattaaaattgaagacagtaacatcagttgcaagtgcttggaagtctgtcctgaccttttgagtttccacattttcttcagttgcatggtgagcacccagtgctagtaaaacattcagtgctgggaaaggagatatagtcttcattactgttttttaagaaagaaaattcctatgtatttggcagtcttcagtatcaaagtataggtatttcatttactagaaattccatgaatacccaagtttggcgacaactgcatgtccaaatattaagaaagttaagaggaggaaaatcccaaacttttgagatggacttattcaggaatatcgcacagagtgagttattatcaaaagtactattactttgggctaagcagtgactgcaaaggcacagcagatcgttatccctccaaattcaggctgtaaaacatcagaaagctcttgataccagaccactgctgagtttagttcatcttctgaacagtgtctctgtgtctgtctccagtgtaaaggaccataataaagctgtggttcaaagagcaaaacttcataaacctcccccccgcccaaaa

SEQ ID NO: 81635 - DNA, 970 bp, Homo Sapiens
  misc_feature (60)..(60): n is a, c, g, or t
  misc_feature (82)..(116): n is a, c, g, or t
aaagactatatacctaatatggcgcatcctgcttttgtcgaacgaccgagcgcagcgagntagctagcgaggaagcggccgnnnnnnnnnnnnnnnnnnnnnnnnnnnnnnnnnnncagtcgacggtaccggacatatgcccgggaattcggccattacggccgggggtttgaggccgggttgggggtgtgcgattgtgtgggacggtctggggcagcccagcagcggctgaccctctgcctgcggggaagggagtcgccaggcggccgtcatggcggtgtcggagagccagctcaagaaaatggtgtccaagttatagaagacatatgggaagccatagaagattgtgacccagtacaaatacagagacctaactgtacgtgaaactgtcaatgttattactctatacaaagatctcaaacctgttttggattcatatgtttttaacgatggcagttccagggaactaatgaacctcactggaacaatccctgtgccttatagaggtaatacatacaatattccaatatgcctatggctactggacacatacccatataatccccctatctgttttgttaagcctactagttcaatgactattaaaacaggaaagcatgttgatgcaaatgggaacgatatatcttccttatctacatgaatggaaacaccccacaagtcagacttgttggggcttattcaggtcatgattgtggtatttggagatgaaccttccagtcttctctcgtcctatttcggcatcctatccgccataccaggcaacggggccaccaaaatacttcctacatgccaggcatgccaggtggaatctctccataccatccggatacctcccaatcccagtggttaccaggcttgtcttacccacttggtggtccatatcctgcacaacaagttctcagtaccttctcagcttctgtggacactgttggcccaggagggatggaca

SEQ ID NO: 81636 - DNA, 1512 bp, Homo Sapiens
ggccgggttgggggtgtgcgattgtgtgggacggtctggggcagcccagcagcggctgaccctctgcctgcggggaagggagtcgccaggcggccgtcatggcggtgtcggagagccagctcaagaaaatggtgtccaagtacaaatacagagacctaactgtacgtgaaactgtcaatgttattactctatacaaagatctcaaacctgttttggattcatatgtttttaacgatggcagttccagggaactaatgaacctcactggaacaatccctgtgccttatagaggtaatacatacaatattccaatatgcctatggctactggacacatacccatataatccccctatctgttttgttaagcctactagttcaatgactattaaaacaggaaagcatgttgatgcaaatgggaagatatatcttccttatctacatgaatggaaacacccacagtcagacttgttggggcttattcaggtcatgattgtggtatttggagatgaacctccagtcttctctcgtcctatttcggcatcctatccgccataccaggcaacggggccaccaaatacttcctacatgccaggcatgccaggtggaatctctccatacccatccggataccctcccaatcccagtggttacccaggctgtccttacccacctggtggtccatatcctgccacaacaagttctcagtacccttctcagcctcctgtgaccactgttggtcccagtagggatggcacaatcagcgaggacaccatccgagcctctctcatctctgcggtcagtgacaaactgagatggcggatgaaggaggaaatggatcgtgcccaggcagagctcaatgccttgaaacgaacagaagaagacctgaaaaagggtcaccagaaactggaagagatggttacccgtttagatcaagaagtagccgaggttgataaaaacatagaacttttgaaaaagaaggatgaagaactcagttctgctctggaaaaaatggaaaatcagtctgaaaacaatgatatcgatgaagttatcattcccacagctcccttatacaaacagatcctgaatctgtatgcagaagaaaacgctattgaagacactatcttttacttgggagaagccttgagaaggggcgtgatagacctggatgtcttcctgaagcatgtacgtcttctgtcccgtaaacagttccagctgagggcactaatgcaaaaagcaagaaagactgccggtctcagtgacctctactgacttctctgataccagctggaggttgagctcttcttaaagtattcttctcttccttttatcagtaggtgcccagaataagttattgcagtttatcattcaagtgtaaaatattttgaatcaataatatattttctgttttcttttggtaaagactggcttttattaatgcactttctatcctctgtaaactttttgtgctgaatgttgggactgctaaataaaatttgttgcataaaaaaaa

SEQ ID NO: 81637 - DNA, 1044 bp, Homo Sapiens
  misc_feature (30)..(30): n is a, c, g, or t
  misc_feature (41)..(41): n is a, c, g, or t
  misc_feature (53)..(53): n is a, c, g, or t
  misc_feature (57)..(57): n is a, c, g, or t
  misc_feature (120)..(120): n is a, c, g, or t
  misc_feature (143)..(143): n is a, c, g, or t
  misc_feature (165)..(165): n is a, c, g, or t
  misc_feature (179)..(179): n is a, c, g, or t
  misc_feature (187)..(187): n is a, c, g, or t
  misc_feature (231)..(231): n is a, c, g, or t
  misc_feature (240)..(240): n is a, c, g, or t
  misc_feature (279)..(279): n is a, c, g, or t
tggagccttagtatctgcacctttgtcacntaaaagatacntacagggagagncctntaatgtcaaaagttggcaagccttcagttctcatcagccttacagtacacatgagactcacantgtgaacgccctttgaatgtcangaatgtgggaaacctttactcngtccacatatctantcgacatntagaagtcatagttggagaaccatataggaatgtggcaaccctntagtattcntcatgcctactgaaatgtgtgtgaattggggctgatacntggaaagaatgtgtaaagccactacgtcctcacacttactgaacatgtactcattcatagtggcaatgtacacagtcataaggaatgtgggaagccttccttggtgtctcagatcttaacaattccaatagaagagaagacatatgaatgtaaggaatgtgggaaaatcttggctccttccataggccttactattcatgtgtctgtgcatcctaggaaacaaactgaacgtaggaaacctgtcgatgcttacatcttactgagtctgtttgaactcatgctggagagaaatgctatgaatgtgaggaaggtggaaaagctttcattattttcctcgggccttactgagcttgtgagcacattggatataaatgcacgtcctctggctgtaaggaatgtgttgaaacctttcgctctgccttataccttaatattcagctgtgatctcacaagtgtgaaaaatcttatgaatgtaaaatgtgtggagattcttctttgtttttagcttccactttgggaacatgtcaaagcacacattgagaagtcccatgagtgaaagagatgttggaaagcccttgaacttggtcgttaggaaacatccacactgaagaggaacctgactgtatggaaggtcaaaaaggctgtattaatttacatgcaaaaagtcacactagaggaatgccatatcagaatgcttttggtaaatatacatgttttaaagaggttatatatcattaataaaaatatctagctggtctgaaaaaa

SEQ ID NO: 81638 - DNA, 1298 bp, Homo Sapiens
tgccaactcagatataatttccactgggcaccttcacagtaatgccatgattggggcagagatcctgaaagagcttcttataagatggcaaatgtgcctggcaagagcattgtatttgtcaggtggaggcatgtgctgagagttattcaactatctgaaatgttgaatttggaggtgtgaaaatattgaattatgctattagtttaataatatctgaggcagtaaaatagtacctgaggaatggtgcctcattctgcccccttgccagttgtctcctcaatcctgagcttcctgctgaggttaattcaagtctactagtttattgagcacctgctatgtgctaggcattgaggtagacctggtcattgccctcccagagttaagggctaataggatatgcatatatactaaacagtaattacagtaaagtgtggtaagtgctttggtaggaaaaatgcgggtttccatcaaagtacatggcagggatacctaaatctggtctatgagtcactaaagacttcctggatatgatggtatctcagacgtaaaggtgggtagaaaggtagcaagggcaggggagaagagaacagaatctggagacactccatgaagactcgtctctactgcagaaattgtcatagacctaatttgtaaaaaaatgaatctgaaggagtaattcaacaaatatttattgccctcaagtataatagctcagggcctgcaagcctggtaaggagggggtgtgggcagggaatgcggaatagcagagcctgggaaggcagatcaccgtgttcctttatacttcccactgcatgagtcccagagtcatgggacacaaacactccagtccccactgtctctctagcctctgatatgcattctttccctgtgtatatacatgccttttcccataaaatgcaccagtctctcaccacactaattctgagtacttcagagtctcacaggtcattctgggtctagaataggctccccaactcagtgattataagtaggaagaggaaaagcaacacatggggattctgagccaggctttatgacaactaattcctgctggagagaagagtcctgatgatgggctgtctccagatcctatcttatcttcatgccattgtatgggctataacctctgcctgtaactctctctgctaatttttattttggcagttttaattaacccacaattgctgagggcaattaatacctaaaagaaagtttgattcctcttctaagatatcctaggtagtgtcatttctaaagaagacttggtgatcactgct

SEQ ID NO: 81639 - DNA, 1017 bp, Homo Sapiens
  misc_feature (47)..(47): n is a, c, g, or t
  misc_feature (60)..(60): n is a, c, g, or t
  misc_feature (101)..(101): n is a, c, g, or t
  misc_feature (108)..(108): n is a, c, g, or t
  misc_feature (135)..(135): n is a, c, g, or t
  misc_feature (159)..(159): n is a, c, g, or t
  misc_feature (176)..(176): n is a, c, g, or t
  misc_feature (189)..(189): n is a, c, g, or t
  misc_feature (200)..(200): n is a, c, g, or t
  misc_feature (222)..(223): n is a, c, g, or t
  misc_feature (325)..(325): n is a, c, g, or t
  misc_feature (363)..(363): n is a, c, g, or t
cagatcgcagagtgtggaagatcctgacgtatgattttcagctcagntgagggaggggtngattacacttgtctcaggtgggtagcttggatgggatagancaggacncaaaagattgcatgactactgactccntcgtactacctgagagtcttattntgaccatgagaaaccanggatgagaaaggngagtgactgcncaggtcacctgccagatctganngggtagtccagctgacccaagcccactgtgttcccttggagcatggaggcacagagtcaggtccaccccaggtggaagacattttctttcagagctctcgtntgagacttagaaacgggtccacccctgcggccctgacntactccctaaagccccattggcctggatttccactctcctcacaaaatcctctctcttctccactaggaaaacgccaaagaaaagcaagaaaatgcgctttaaggagtttgaggaatttaccaggaagctgaaggtgaagaggtccagtggtctgcagcaaacacaccccaattccttctggccgggtcatcttctggataagctgcagctctacctgcccactgtggccacagaccggagcctggcgctcttcagttgtgttcaacaccagccccatgtctacccagccacctaccaccctgaccactggtggccccttaggaacaagaactacatgacccacgcccattatgatgccgccaaggtgtactacatcaactagagctagccaggtgttgccggacccagccttcctgggccaggggccagtgcagccagcggcccagagcccagacacaagaggagtgtcaaagagtcaaactaaagaaatcctttcaaagagggatggaccgggggccagttccctctggactcaaagtgtccagtgtctcagagggtagatgtgtccaaggaatgacgtgcagtttttgactatttccctcccctgacctctgccctttctacataaagcaggttggagtttttctcatttc

SEQ ID NO: 81640 - DNA, 725 bp, Homo Sapiens
  misc_feature (52)..(112): n is a, c, g, or t
agaaaaatgaggtctcacttgttgctcaggctgagctcgagctcctgccctnnnnnnnnnnnnnnnnnnnnnnnnnnnnnnnnnnnnnnnnnnnnnnnnnnnnnnnnnnnnnttaaactcttagatttgactgctacaaaggtataaatgtggaactccatatatcagtgggttctgccccacttcttcctcccaggaattctccatcccagcctgctgctcctgtcttgcaccggggaacaaacatgtatcctggatgaaaataaaccaactcttgaaactgcaacccaagacattcagaagagataaggctacagtgaatgtggaaactttgcacgtgtttggatgtattgattgccttaactggcagctctttgcactgccagcttccctcaattacatgaggaaccacgagggggcaatgtcttcccgagcaataatagctgagtggtggtcttaggaccccgtggtggcccatgatgctagcactgtgtctttggccattcttgcctgtcatggagcatactccacagaagggcatggtcttcttggatcccggcatgggcccaacaaaaatgacaatgtagtcaatagttccactcagacctcacttaggagcaggtgaactatgttgtgtgatatcaggatgcccggagaacctctcctatccccacccagggaagcatggcttaattccaaataaagaatctgatttctttgtcttt

SEQ ID NO: 81641 - DNA, 1093 bp, Homo Sapiens
  misc_feature (121)..(367): n is a, c, g, or t
  misc_feature (378)..(378): n is a, c, g, or t
  misc_feature (414)..(422): n is a, c, g, or t
cccatgatctgtgataaccgtatcccgccttgaatgactgatcccatcaccgcaaccgaagacggagcgcagcgagtcagtgaggaagaaccgaaggacgcgcatacggcaaaccccttgnnnnnnnnnnnnnnnnnnnnnnnnnnnnnnnnnnnnnnnnnnnnnnnnnnnnnnnnnnnnnnnnnnnnnnnnnnnnnnnnnnnnnnnnnnnnnnnnnnnnnnnnnnnnnnnnnnnnnnnnnnnnnnnnnnnnnnnnnnnnnnnnnnnnnnnnnnnnnnnnnnnnnnnnnnnnnnnnnnnnnnnnnnnnnnnnnnnnnnnnnnnnnnnnnnnnnnnnnnnnnnnnnnnnnnnnnnnnnnnnnnnnnnnaagaattcgcnacgaggcacattttatttgtgaaaagttgctgcttnnnnnnnnntctaactataaccacatgtaaactgaaaaacaaattacaactgctgcttctgtttagcagcagcacataacaacacattcttcttccccactgtgctcatggggtatgctataacctcagtaaaattcctcctagggtacacattaaaaagaagagaactggtggaaattcattccacaatctgaacaaagtaaaagtaaatttggtgtatgttaatgagtacaccatatcaacttagaaaaattgtgttaatgagaaaaggggagattcaactccttgagtagctctatatacttaaaatataaagccaccattgtatctaaaattgagtctgaaatatggataacaaaattgaccacagctattttccatcacatattgcagcttttaaaaagtacacaattgttaagtttgcattagaaatataagcagattacctactagttgaaaccatatagtattgttactaagctgatttttttaaaaaagtacaaagaaacatacattttcattcatttggaaaatgtaaaaatttaagtactaatatataatctcttcactttctctgatctacaaatggatagaatgcctagttatcgtcatgcagataaattcttcagaattcaattaccaaagcaagcaacaaacaaaaaaaacctacagccgcggcc

SEQ ID NO: 81642 - DNA, 656 bp, Homo Sapiens
aagaattcggcacgaggactgctggtactgatggcatcagaagaaaacaggttaacaatcaagtagtgaaagcactatattctagtcattaactcaacggagccagtctcaactctgctgggagcacccacaggtctctgtgggggagacagggactataacagggaggcagaattcaggttggcttgacaacacaccttaggaacatgtgctaaggggctaaggaggcatcagctgtcttccttattctaccagggctgaaaatcggagtcacttaggaggcagcatgagaacagtggcacaccaccagtgaggcacatgttgcctttttgtctttaagcaacaccttagacagggcctgaaccctgggtgggggcactggatgcctgaagtaagtaagttttctcagtggggcagtctcataaaatcaccaggacattgaccacctgacctcccctaactagtgctggccaaggcctgagagttcacagaacctgctaggtcttaagagccaaaggaaggaagtggttgagggccaggaaagagaaggaatgtcatgccagggtgttactcctcaccaaaacttggcagttctttttggggccatgggacacctttctctgaagaggcccctctcaataaacgtggttaagagc

SEQ ID NO: 81643 - DNA, 1027 bp, Homo Sapiens
  misc_feature (43)..(61): n is a, c, g, or t
  misc_feature (606)..(606): n is a, c, g, or t
  misc_feature (667)..(779): n is a, c, g, or t
  misc_feature (786)..(786): n is a, c, g, or t
  misc_feature (791)..(791): n is a, c, g, or t
  misc_feature (981)..(981): n is a, c, g, or t
acctcaactaaagggaataagcttgcggccgcggctgtaggcnnnnnnnnnnnnnnnnnnngacgaaaagcagatttttattgaacagaggtataaatgtgtttcattttctaataaatctctttcacaaatcaccttgctgtttcgctcttcttgaatgatcatttttagacaacactgtctgactgttttggcttctgccaaggttagcgtctgttcacaggctgagtctgacttcttcctcccacctcctcctagtctggccttccaaaataatgctcaccattctatcacattgacttcagttttgaaaagaaaagttatcttacaaagtagtatgtataactctgtaatatataaagtgaggcaatgatagaaccagttttaaaaataaccttccatgatgattttcatttgcatccacctgcttattagtaagaatctttttacatgtttactgcacgccccaatttctcttcagtgaaaaacttttgagtatcatcacaccctccaacttctcctctcacctatattgaaaagggtctgctctttatcctaacatctatactaggtaattttcagaatattccttcaatcatcaaacanaatttttgagatcctttgcgctagatttcactatcttaatcctcgtgccgaattccttggnnnnnnnnnnnnnnnnnnnnnnnnnnnnnnnnnnnnnnnnnnnnnnnnnnnnnnnnnnnnnnnnnnnnnnnnnnnnnnnnnnnnnnnnnnnnnnnnnnnnnnnnnnnnnnnnngtgtaancctgnggtgctaatgagtgagctactcacattatgcgttgcccactgccgcttccagtcgggaactgtcgtgcaactgattatgatcggcacgccgggaaaggcgttgcgtatgggtctccctctcctcatgaccctggccgtcttggtgcggacgatatcatcaagggaacgttccaacacgaaccagaaattncaagccaaagcgactaagggtggggttatagcccccgaaaaaatac

SEQ ID NO: 81644 - DNA, 1086 bp, Homo Sapiens
  misc_feature (36)..(36): n is a, c, g, or t
  misc_feature (126)..(126): n is a, c, g, or t
  misc_feature (141)..(141): n is a, c, g, or t
  misc_feature (166)..(166): n is a, c, g, or t
  misc_feature (231)..(231): n is a, c, g, or t
  misc_feature (234)..(234): n is a, c, g, or t
  misc_feature (237)..(237): n is a, c, g, or t
  misc_feature (245)..(245): n is a, c, g, or t
  misc_feature (251)..(251): n is a, c, g, or t
  misc_feature (257)..(258): n is a, c, g, or t
  misc_feature (329)..(329): n is a, c, g, or t
  misc_feature (336)..(336): n is a, c, g, or t
  misc_feature (345)..(345): n is a, c, g, or t
  misc_feature (546)..(546): n is a, c, g, or t
  misc_feature (782)..(797): n is a, c, g, or t
tttttggatgcctggcaagatcgcaggcccggtccngattgacagcagttcccaggaacgcaggtgaagtcacggacctgcaggccatgacagatctgactcagcagccccgccggagccgcgccntgtaccccagtgctncgccgcacccgattcccgcgccctnacagcccgggctacccactccgtcacacggtgctcggcgccaggacgtgaccagatacaccggcngcntcnccttcccngtcccntcttcnngaggacgccgggacagtcggtgtccgccctcagcctcttggggactcgagccggggatcccctgacggttntcttgcntaagttatntgagtcacaaaggcctccttccctgccgcctgcttcagctgggttgctgggggggtgggcgtggatttaggggagggggctgtgatgtaaaacgtctcccctgccaaagggaggggcaaagtgctgtgtcagttcctgtttcttcccatttcctggcacactctgcccctctgtccgggggacacgcgcatgtgtttgccnagggatggggccaccgggttgatgccaacgctccgggtgcctgtcttgtctgtgtggcttctcagatggtggagggtgctgggagctggcagggtccttccagacagtctcagcctctccccgccgcccccaacaggctgtcaaacaaaaccggagagggggtgggggagccagcctcccagcgtgctgtgcccgcaggcacccgtgtgacatccgcacgtccagctccgtgaccnnnnnnnnnnnnnnnncacaagtgagtgagagatttcgaacgcccacccctcgactttgaaatctgagcaaaacaagaaactggggtcttcctctcccccgaacctctccccagctagtcttccctctgttcttcctgcctccagccgcccgcgccagattttgaaatctcggagacataactagtactgtaagataaatttttttgtactgtatttattgtgtataacgatttttttaaaggagaattctgtacatttagaactcttgtaaattaaaaaccgatcctttttttaaaactgtaaa

SEQ ID NO: 81645 - DNA, 1022 bp, Homo Sapiens
  misc_feature (55)..(55): n is a, c, g, or t
  misc_feature (126)..(126): n is a, c, g, or t
  misc_feature (138)..(216): n is a, c, g, or t
  misc_feature (220)..(220): n is a, c, g, or t
  misc_feature (226)..(226): n is a, c, g, or t
  misc_feature (232)..(232): n is a, c, g, or t
  misc_feature (289)..(289): n is a, c, g, or t
gcggagcgagcgcatcgcaacgcttcccgggtgcgatcatatcagtgcagacagnttccgctgaagcgcagtggcgcacgcattatgtggtagctcatcatagcaccccagcttacacttatgctnccgctcgtatgnnnnnnnnnnnnnnnnnnnnnnnnnnnnnnnnnnnnnnnnnnnnnnnnnnnnnnnnnnnnnnnnnnnnnnnnnnnnnnnaatntgcccntcgagnccaggaattcggcacgagggatttttcccaaattgagatacagaagaaaatatagtntgaatctgaaatttaacacttatttatgtaaaacattttatttaagatattttctaatgattttaattttagagagtaccttttcattctgtgtgttacagagaagtactgaaaagttaaggacacttgggggctacttttttccctctaaactaaaaaagacattggctgaattataactagttagttatcacctcgtcccttaaagtcagtgacctcctgtgtttgatgtatattacatagagtcttaagtcagtgtacagttccactggaatttgacagttgtctctacagtcatgcaactcgaagtagaaaagagtgctggacataggaagggggtgcttggtttaaggggttaatgtgaggcctttttgaaaaatgaatattttgataaaaagaattcttgttttagcacagttgatgcacataagtgattctcatatttgttgtataaactggtttaatacatttggaacatagttggattacattcatttcctgggaaagctagcttaccatacattcaagtttataaaacaatttgccataggcaaagccatttaaaaagttcattctgaaattatttcatttacctacagtgaaataattgtgaactaagtagtctttctgaaaactgttgggttctaggcattcctgagaaattgaaagtggctacctttcatgtcaaaaatgttgatctattataaataaaatgtttttgcatatgtttcaa

SEQ ID NO: 81646 - DNA, 1259 bp, Homo Sapiens
ggggcagctggcttggaggctccgcgctctggaggctcaggcgccgcgtggggcccgcacctctgggcagcagcggcagccgagactcacggtcaagctaaggcgaagagtgggtggctgaagccatactattttatagaattaatggaaagcagaaaagacatcacaaaccaagaagaactttggaaaatgaagcctaggagaaatttagaagaagacgattatttgcataaggacacgggagagaccagcatgctaaaaagacctgtgcttttgcatttgcaccaaacagcccatgctgatgaatttgactgcccttcagaacttcagcacacacaggaactctttccacagtggcacttgccaattaaaatagctgctattatagcatctctgacttttctttacactcttctgagggaagtaattcaccctttagcaacttcccatcaacaatatttttataaaattccaatcctggtcatcaacaaagtcttgccaatggtttccatcactctcttggcattggtttacctgccaggtgtgatagcagcaattgtccaacttcataatggaaccaagtataagaagtttccacattggttggataagtggatgttaacaagaaagcagtttgggcttctcagtttcttttttgctgtactgcatgcaatttatagtctgtcttacccaatgaggcgatcctacagatacaagttgctaaactgggcatatcaacaggtccaacaaaataaagaagatgcctggattgagcatgatgtttggagaatggagatttatgtgtctctgggaattgtgggattggcaatactggctctgttggctgtgacatctattccatctgtgagtgactctttgacatggagagaatttcactatattcagagcaagctaggaattgtttcccttctactgggcacaatacacgcattgatttttgcctggaataagtggatagatataaaacaatttgtatggtatacacctccaacttttatgatagctgttttccttccaattgttgtcctgatatttaaaagcatactattcctgccatgcttgaggaagaagatactgaagattagacatggttgggaagacgtcaccaaaattaacaaaactgagatatgttcccagttgtagaattactgtttacacacatttttgttcaatattgatatattttatcaccaacatttcaagtttgtatttgttaataaaatgattattcaaggaaa

SEQ ID NO: 81647 - DNA, 1421 bp, Homo Sapiens
  misc_feature (69)..(182): n is a, c, g, or t
atggccttaagtgatcttccttccccagcctcctgagtagctgggactacaggcatgtgtcaccacatnnnnnnnnnnnnnnnnnnnnnnnnnnnnnnnnnnnnnnnnnnnnnnnnnnnnnnnnnnnnnnnnnnnnnnnnnnnnnnnnnnnnnnnnnnnnnnnnnnnnnnnnnnnnnnnnnnagatgagaggatctctgcagcagatagtacttgtgggtgcgagacctgtccagggcttgatttgaggagaggagcctgaggcccctgcctgctccctggtgctcaggagctgttcttgggcccctgttgtttcctccgctgccggcccagctggcggaagtgcagccgtttggggttgaggccaaaggcctgcagtctctggcggctgaactcgcatccaccaagcatcacagtggggcccagcagccgtgccttcttggccctcctccgcttctggggggctggcttcttgtggggtgatacaggggcttcctcttcctgtgctgggggactctccggccccatcaagctgccatcaagggctggcagctgcctctgtgggccggcttcatctctctgtggcttccctgtggcttccgcaggtgtctctgcctcttctcggcagagtgacttgaagacctgccgctttttccatgagttctgggccttctggctgtacgcccgcttgtcccgcagctcctcctgctctgacctgtacatgcaggtcttctttagggagcaccaccggttcagctccttatcgtcagcagcgaggatctcctcagtgctgaggccaaagtcacagggcaccactgtgcggtacttgaagcgacagggcaggtcgtcgatgatgtcctcgtagtccagccggtaatactcatccaggtactcctcgaacgtcttgtccccgggttcgaacacgggcttctcctggagtctgtgattggaagtctccctgtctgagttctcctcatcaacatatttgcctgccttctccaagataaccttcctctcgtagtccttcaggtacatgggccgcactttcttctgcttctccaaggcttctgggtcctcctcactgtctgatgacgatgctgttctgttatagaaggtggcatctttctgataaatgcgggggtccttcttcttcaacaaggagagcgttttgtaaaagtcccgctcctgctggggatcaaattccacgcgctcgtcgcttgagtccgactcggaactggagtcgctgctgctgtctcggtccccgtagcgatccttcagccgctgcagttcctcgcgctcccggtagcggttgtaccgcgcggcaacgccgcgttcacccgcagctgcgacgacccgcgcggttccggcatggcggctctgcctcgtgccgaattcaccacccagcctcgtacctagccgtaa

SEQ ID NO: 81648 - DNA, 1607 bp, Homo Sapiens
ccgccttcctttgccgcttctctcgtgttggtgctcggcctctgtgttacccgcgcggttttcttgctcgctgtttccctcgctctagtactttcccgtcgaccgtgttttccctccccgccctgatatggcacctgcgttctttttcgcataatgggccctcccctttttctcctcggctgcctggttcttatccgcttccatgtcgaattgggtcctcacagtcaggtccctctggctccagtctccctcctgctcaggcccgtcccacgtgtcccagtccatcgtcttcaacccttttcttcctcaattgtggcttctcctcctccacggccccgtagtactcgtccccaaagcactttctgcatgacctgttcgtgctgggcagggtcgaagtcgtcttcaaggtccccctcctcgaggcccagcatctcgttgcctgttactttccgcagcttctccagcttggccagaatctccttcctcttcaggttcttcagctgctttgagctcttcctgcttctttgctttctccctcttctttcgctcccgagtctcttccctcttctcctttctgcgcttcatccttacggcgcacggaggacgcgatgctgcgtgggtaggtcttgaccgatgctgagtccggctcctcgaaacggaaattgtacttctgttcaaagtcctcctgtttcttcagaaacagctccccttcgtctgaggagtcgtccacagccagctggactgggggaccgtggacccccttctcttcctccatttcctcttcatcttcctcctcctcttcctcctcctcatagcgtttgttgaggatgtaatcccgcaggaaccgctccccttcatccaactcagggtcgttccagtattccttgagatgcgtcagttccttcagggaatctgggttccgaatctctttctgtcccttcagccactcgatgtagtcggcctcctcctgggccttctcctgcctggttttggcacgtttctgcagcaaactggagccgccctccccagcgccgtcctcgtcctcactgtcctccacaaatgcccggaagctttccttgagctgtttctgttcctccacataactttgcgacgatgtctcctggagtctgtgattggaagtctccctgtctgagttctcctcatcaacatatttgcctgccttctccaagataaccttcctctcgtagtccttcaggtacatgggccgcactttcttctgcttctccaaggcttctgggtcctcctcactgtctgatgacgatgctgttctgttatagaaggtggcatctttctgataaatgcgggggtccttcttcttcaacaaggagagcgttttgtaaaagtcccgctcctgctggggatcaaattccacgcgctcgtcgcttgagtccgactcggaactggagtcgctgctgctgtctcggtccccgtagcgatccttcagccgctgcagttcctcgcgctcccggtagcggttgtaccgcgcggcaaacgccgcgttcacccgcagctgcgacgacccgcgcggttccggcatggcggctctcctcgtgccgaattcggcgcgccgtcgacttcatactctc

SEQ ID NO: 81649 - DNA, 274 bp, Homo Sapiens
gtgggttgaccgtggcttgtgggttgaccgtggcttgtgggttgaccgtggcttgtgggttgaccgtggcttgtgggttgaccgtggcttgtgggttgaccgtggcttgtgggttgaccgtggcttgtgggttgaccgtggcttgtgggttgaccgtggcttgtgggttgaccgtggcttgtgggttgaccgtggcttgtgagttgaccgtggcttgtgggttgaccgtggcttacgtcacaccacgcatagaccgggatcctctagatcacca

SEQ ID NO: 81650 - DNA, 989 bp, Homo Sapiens
  misc_feature (715)..(715): n is a, c, g, or t
  misc_feature (720)..(720): n is a, c, g, or t
  misc_feature (728)..(728): n is a, c, g, or t
  misc_feature (773)..(773): n is a, c, g, or t
  misc_feature (786)..(786): n is a, c, g, or t
  misc_feature (789)..(789): n is a, c, g, or t
  misc_feature (845)..(845): n is a, c, g, or t
  misc_feature (848)..(848): n is a, c, g, or t
  misc_feature (874)..(874): n is a, c, g, or t
  misc_feature (902)..(902): n is a, c, g, or t
  misc_feature (933)..(933): n is a, c, g, or t
gcctaaatactccatttactataaaaataaagcctccgctaatgtttcagtaaggagagggactacaaatcagacaatgatcttcatattaaccacaggatgattagaagaatctcccagtacactaagattcactcattcacaaatatgtcctgagtgtctgatatgtggcaggcactgttctaggtactggagacagggaagtcaacaaaatggataaatacaggtatctctgactccagagccccaactcaaccactgtactccactccttcagggcatatacgatgatgatctcagcagtactgatgaatttaccctccagccagccagtctcttagctcaaatgctcctgcaggaaaatcttctccaagggtcctggataggactgtgaattcagtttatgtgctgagtatggccacttcgctttgttagcttcactctagtttggtccaggcagggtacatccccataacggtttttctctaggtttcctggagacatggaacagtggaaagtgccaacagggttctcacgacgaatgtcttcatattcctcatagattccttgcttttgcctggcattaacatagtccaccaactcttggatggtcatagcatggggacctggaacatgtactgagtcccagtctaaggcaagagggagggagaacaggatgatctcatcgaagggattctgggtggcgttcacctgnggtangaactggnaattcaagtggcgagatcaatttgacgtaccacccagttttctgngagacactcctgngcnatgctgcgtgactcagatgtctttatatttgatcctctcccggactttgtcttcangangagctgatgatggatagggcatcggnacatatgggtgccccacatagcacttcntcaacgagtgggatgctccttcacaggttangactttctgcactcgtgcgaattctggctcgaggcaatcctatatgatcgataatc

SEQ ID NO: 81651 - DNA, 1152 bp, Homo Sapiens
tcaactttacggctaggtacgagggctgggtgtttaattcggcacgaggcagatgaatggtgcgacagcggcctgggctccctgggtccggacgcagcggcccccggaggacctgggttgggcgcggagttgggcccggggctgtcgtgggctcccctcgtcttcggctacgtcactgaggatggggacacggcactgcacttggctgtgattcatcagcatgaacccttcctggattttcttctaggcttctcggccggcactgagtacatggacctgcagaatgacctaggccagacagccctgcacctggcagccatcctgggggagacatccacggtggagaagctgtacgcagcaggcgccgggctgtgtgtggcggagcgtaggggccacacggcgctgcacctggcctgccgtgtgggggcacacgcctgtgcccgtgccctgcttcagccccgcccccggcgccccagggaagcccccgacacctacctcgctcagggccctgaccgtactcccgacaccaaccatacccctgtcgccttgtaccccgattccgacttggagaaggaagaagaggagagtgaggaggactggaagctgcagctggaggctgaaaactacgagggccacaccccactccacgtggccgttatccacaaagatgtggagatggtccggctgctccgagatgctggagctgaccttgacaaaccggagcccacgtgcggccggagcccccttcatttggcagtggaggcccaggcagccgatgtgctggagcttctcctgagggcaggcgcgaaccctgctgcccgcatgtacggtggccgcaccccactcggcagtgccatgctccggcccaaccccatcctcgcccgcctcctccgtgcacacggagcccctgagcccgagggcgaggacgagaaatccggcccctgcagcagcagtagcgacagcgacagcggagacgagggcgatgaatacgacgacattgtggttcacagcagccgcagccaaacccggctgcctcccaccccagcctcaaaacctcttcctgacgacccccgccccgtgtgatttgtttcattgttaatataatttccagtttaataaacaaaaccctagttctgacaaccagaaaaaaaa

SEQ ID NO: 81652 - DNA, 1129 bp, Homo Sapiens
  misc_feature (106)..(106): n is a, c, g, or t
  misc_feature (203)..(266): n is a, c, g, or t
  misc_feature (270)..(271): n is a, c, g, or t
  misc_feature (280)..(281): n is a, c, g, or t
  misc_feature (289)..(289): n is a, c, g, or t
  misc_feature (294)..(294): n is a, c, g, or t
  misc_feature (417)..(417): n is a, c, g, or t
  misc_feature (1057)..(1086): n is a, c, g, or t
accttgatgatgaacgtccgcaccgacgccgaccaggatcatgacgagagcggagacccatacgcaacgctttcccggcgtgccgatcatatgcagtgcagacagnttccgatgaaagcgcatgagcgcacgcatatgtgagtagtcatcatagcaccccagcttacattatgctccggctcgtatgtgtgtgaatgtgagcnnnnnnnnnnnnnnnnnnnnnnnnnnnnnnnnnnnnnnnnnnnnnnnnnnnnnnnnnnnnnnnngccnntcgagccanngaatcgcnacganggttggaagcacaggggtaactgtacccttgagctagctgcacagccaaggatagttcatgcctgtttcattgacacgtgctgggataggggctgcagaatccctggggctcccagggtttgnttaagaatggatcattcttccagctaagggtccaatcagtgcctattcttccaccagctcaaagggccttcgtatgtatgtccctggcttcagctttggtcatgccaaagaggcagagttcaggattccctcagaatgccctgcacacagtaggtttccaaaccatttgactcggtttgcctccctgcccgttgtttaaaccttacaaaccctggataaccccatcttctagcagctggctgtcccctctgggagctctgcctatcagaaccctaccttaaggtgggtttccttccgagaagagttcttgagcaagctctcccaggagggcccacctgactgctaatacacagccctccccaaggcccgtgtgtgcatgtgtctgtcttttgtgagggttagacagcctcagggcaccatttttaatcccagaacacatttcaaagagcacgtatctagacctgctggactctgcagggggtgagggggaacagcgagagcttgggtaatgattaacacccatgctggggatgcatggaggtgaagggggccaggaaccagtggagatttccatccttgccagcacgtctgtacttctgttcattaaagtgctccctttctagtcctttttctgcccagnnnnnnnnnnnnnnnnnnnnnnnnnnnnnnacctgagcaggcggccgcaagcttattccctttagtgaggtta

SEQ ID NO: 81653 - DNA, 1147 bp, Homo Sapiens
gcctggagcaagatagtcatgcctgtttcattgacacgtgcatgggataggggctgcagaatccctggggctcccagggttgttaagaatggatcattcttccagctaagggtccaatcagtgcctaggactttcttccaccagctcaaagggccttcgtatgtatgtccctggcttcagcttgggtcatgccaaagaggcagagttcaggattccctcagaatgccctgcacacagtaggtttccaaaccatttgactcggtttgcctccctgcccagcaccacctcctgcactgaacttctgccgtccacatcccagcacactggcgacctgactagcagccctctctctcagcttagcagttcgctctccagccaccagagcagcctctctgcacatgcagccctctcctcgaagcacgtcacacacacatgccagtgtggagagcgcctcttcccaccagtcctcagccaccttctccacggcagcgacctccgtctcaagttccgcatcctcaggcgtcagcctgtccagtagcatgaacaccgcgaacagcctctgtctgggtgggacccccgcgagtgcatccagcagcagtagcagggccgcgcccttggtgacctcaggcaaagcacccccaaacttacctcagggggtgcctcccctgctgcacaaccagtacctcgtaggtcccggaggactgcttcctgcctacccgatctatggctatgacgagctccagatgctgcagtcacggctgccagtggactactatggaattccctttgctgcacccacagcgcttgccagccgagatgggagcctagctaataatccatatccaggtgatgtcacaaagctttggccgtggggactctgcatcccctgcacccgctaccacaccagctcagccacagcagagccaatcacagacccaccacacagcccagcagcccttcgtgaatcctgcactgccacctggctatagctacactggtcttccctactacacaggcatgcccaggtgccttccagtatggccccacatgtttggtccctccagcctcagcaagcaaatggggtgaactcagctccaaactccttccagagcaggggttatggccgagggtcgaagtttgagacggc

SEQ ID NO: 81654 - DNA, 1478 bp, Homo Sapiens
  misc_feature (222)..(287): n is a, c, g, or t
  misc_feature (964)..(964): n is a, c, g, or t
aatgtatcaagccatatattaccaggaagtatgcaaagtgcttcacatatattatttgacttaaatctcacaacaactctatgaggtaggcattcttattatccccattttataaacgaaggaaccaaggcacagagtttaggaaactagcccaatgtctcagagctcacttgggattgagctcatttgactctaaaccatgttctctattacctctcctcnnnnnnnnnnnnnnnnnnnnnnnnnnnnnnnnnnnnnnnnnnnnnnnnnnnnnnnnnnnnnnnnnncaggtgtcctcttcccttgaccagacttccaaaccccaagtctgctatgtggctgtaccctttcctttctctgtggtgtgtgggtagtgactgaccttgctgtgcagttccttgggcagattcacactttgggtcctttcaaactgctccatgagggctcttgtcacctggctgtcagagccagagagcagccagaacaccctctccatgttgtagggcacctgaatgtccatagctgatgccaaggttgatttaacagcctcagagagagagaagtctccctgctggacagtcctgtggatgatgtcattgcggttcactgccacgaccagacggatgggcaggcctatcttttgagcaatgtacccagctgcaaggttaccggcagcccctgttggcacaccacctccacaggggtaggggatgtgtgtccaaggatggcgtacacgggaagtaagcaaagaagtgatgggccatctgcaccaaggacccgggaccagttgatcgaattcaggctcatcagattgtgcttcttgacaaaagccaccatcgggcaaacacagtcttgatcggctcatcgagctcatcgctggttccctccactccaaacacatgtacgttctgctttcagcaccgttgtcatctggagctcctgaatctttgtgcagtgacctttngggcagaagaacgataatgtccatgttctttgcccctggaacactctcaatggcagcacttcctgtgtccccagatgttcctacaaccacagtgacgtgcttctccctcctctccaggaagtactgcaggaactgtgttgtgcaggacagggacaggtccttaaatgcatatgtgacgccatgccacagctccaacacgttcagcccattcctcaacctggacagatggaccacttctctgtgacggaatctgctgaaggctcggtcgatcagatcatttaattcatcttttggaaggagctcagagccaatgaagagggcacacagctccttcaccaggccaggataggagagtgtgctccactggcacagggtctctctgtccaactgtgggagctcttcaggcataaagaggcccccgtcaggtgcatagccagagaagagggccccctcaaagttgacccgtggggctacgcccctggtgctgacataccacatgatcctggaggccggt

SEQ ID NO: 81655 - DNA, 1194 bp, Homo Sapiens
  misc_feature (238)..(251): n is a, c, g, or t
  misc_feature (584)..(584): n is a, c, g, or t
atcacaaaaaaaatcatcatcctcataattaatcatcctagccacgcaggtggttttgctgccaaaagatgggacgacaaataacgttgactaggcagaacccctagacaccctcggcccacccacagcctctccggctgccgaaggacgagggacgagggcaaggcagagttctctgaggtccccaggccttcaccccatctgtcagtctgtgtcttctaggacagaaggtagttgnnnnnnnnnnnnnnaaaacgtctgttcaaaataaaaaacaaaagcacacgcgcaagagagcgggaggaacggaggctgcctgcgaggcagccaagtccttggtttatgcagagggctgtagccttttccatttcgtgttgtcgttttccggacaagcagaggttgctggcaattggagccggtggcttcaggcgggggatgggtgcaggacaggggagaggagagccggggcctcccgggtcaagggcagccggctgtgtgtggatgcggaagaaggctgggtggacgcacggggttggtgtcagggctgaggtggcctcatggcacagaaggaggtgagtggttcncaggcatccagctccagcctgggactataccagcccgtcgtagagggacagcgcctgcacaatggacgggtctgcattggaaccctcatggaactcctgcagggtcagcttccagtcggcattcttatccatcatggcaaagatccggtccaccctcttctcaggagtgttctcctcctctgggagctccacggtattccccaccatctggtaaatggcatccacaatgtccagcatctcattcctggtgatgtagccatcattgtccaagtcgtagagcttgaaggcccaccgtagcttctcatccagggttccccgtgaggtcaccgacagcgcctgaatgaactcggagaactcaattcgcccgtccttgttttcatcaaagacgttgaaaacaaatgtggcaaacttggtggggtctccgaacgggaagaattgcttgtagatcttctggaagcctgccgcatccagctgcccactggggcagtccttgatgaagcctttgtaccactgctggacctccttctcggtaaagtaggtcttcctggtcagctcctccacaacttcgggcttcaacttgctgttggatttccccatcctcggcggccgc

SEQ ID NO: 81656 - DNA, 1806 bp, Homo Sapiens
ggagcgaggcctgggtggcgaattcggcacgaggaggaagtacagggcctggggaagaggccctgtctaggtagctggcaccaggagccgtgggcaagggaagaggccacaccctgccctgctctgctgcagccagaatgggtgtgaaggcgtctcaaacaggctttgtggtcctggtgctgctccagtgctgctctgcatacaaactggtctgctactacaccagctggtcccagtaccgggaaggcgatgggagctgcttcccagatgcccttgaccgcttcctctgtacccacatcatctacagctttgccaatataagcaacgatcacatcgacacctgggagtggaatgatgtgacgctctacggcatgctcaacacactcaagaacaggaaccccaacctgaagactctcttgtctgtcggaggatggaactttgggtctcaaagattttccaagatagcctccaacacccagagtcgccggactttcatcaagtcagtaccgccatttctgcgcacccatggctttgatgggctggaccttgcctggctctaccctggacggagagacaaacagcattttaccaccctaatcaaggaaatgaaggccgaatttataaaggaagcccagccagggaaaaagcagctcctgctcagcgcagcactgtctgcggggaaggtcaccattgacagcagctatgacattgccaagatatcccaacacctggatttcattagcatcatgacctacgattttcatgggagcctggcgtgggaccacaggccatcacagtcccctgttccgaggtcaggaggatgcaagtcctgacagattcagcaacactgactatgctgtggggtacatgtttgaggctgggggctcctgcccagtaagctggtgatgggcatccccaccttcgggaggagcttcactctggcttcttctgagactggtgttggagccccaatctcaggaccgggaattccaggccggttcaccaaggaggcagggacccttgcctactatgagatctgtgacttcctccgcggagccacagtccatagaatcctcggccagcaggtcccctatgccaccaagggcaaccagtgggtaggatacgacgaccaggaaagcgtcaaaagcaaggtgcagtacctgaaggacaggcagctggcgggcgccatggtatgggccctggacctggatgacttccagggctccttctgcggccaggatctgcgcttccctctcaccaatgccatcaaggatgcactcgctgcaacgtagccctctgttctgcacacagcacgggggccaaggatgccccgtccccctctggctccagctggccgggagcctgatcacctgccctgctgagtcccaggctgagcctcagtctccctcccttggggcctatgcagaggtccacaacacacagatttgagctcagccctggtgggcagagaggtagggatggggctgtggggatagtgaggcatcgcaatgtaagactcgggattagtacacacttgttgattaatggaaatgtttacagatccccaagcctggcaagggaatttcttcaactccctgccccccagccctccttatcaaaggacaccattttggcaagctctatcaccaaggagccaaacatcctacaagacacagtgaccatactaattataccccctgcaaagcccagcttgaaaccttcacttaggaacgtaatcgtgtcccctatcctacttccccttcctaattccacagctgctcaataaagtacaagagcttaacagtg

SEQ ID NO: 81657 - DNA, 1107 bp, Homo Sapiens
ggtccggaattcccgggatgtagctggcaccaggagccgtgggcaagggaagaggcacaccctgccctgctctgctgcagccagaatgggtgtgaaggcgtctcaaacaggctttgtggtcctggtgctgctccagtgctgctctgcatacaaactggtctgctactacaccagctggtcccagtaccgggaaggcgatgggagctgcttcccagatgcccttgaccgcttcctctgtacccacatcatctacagctttgccaatataagcaacgatcacatcgacacctgggagtggaatgatgtgacgctctacggcatgctcaacacactcaagaacaggaaccccaacctgaagactctcttgtctgtcggaggatggaactttgggtctcaaagattttccaagatagcctccaacacccagagtcgccggactttcatcaagtcagtaccgccatttctgcgcacccatggctttgatgggctggaccttgcctggctctaccctggacggagagacaaacagcattttaccaccctaatcaaggaaatgaaggccgaatttataaaggaagcccagccagggaaaaagcagctcctgctcagcgcagcactgtctgcggggaaggtcaccattgacagcagctatgacattgccaagatatcccaacacctggatttcattagcatcatgacctacgattttcatggagcctggcgtgggaacacaggccatcacagtcccctgttccgaagtcaggaagatgcaagtcctgacagattcagcaacactgactatgctggggggtacatggttgaagctggggggctcctgccagtaagctgggtgatgggcatcccccacccttcgggaaggaagcttcactccgggctttcttctgaaaaatgggggttggaagccccaaatctcaggaaccgggaaattccaaggccgggttccccaaaggaggccagggaacccctggcctacatatgaaaatctggggactttccttcccggggaacccaaggtcccaaaaaattcctcgggcccagcaaggtccccctatgcccacccagggggcaaccccaggggggtaagaa

SEQ ID NO: 81658 - DNA, 784 bp, Homo Sapiens
taattattgtacaatgagagatattgtctattaaatacattattttgaacagatgagaaatctgattctgttcatgagtgggaggcaaaactggtttgaccgtgatcatttttgtggttttgaaaacaaatatacttgacccagtttccttagtttttttcttcaactgtccataggaacgataagtatttgaaagcaacatcaaatctatacgtttaaagcagggcagttagcacaaatttgcaagtagaacttctattagcttatgccatagacatcacccaaccacttgtatgtgtgtgtgtatatataatatgcatatattagttaccgtgctaaaatggttaccagcaggttttgagagagaatgctgcatcagaaaagtgtcagttgccacctcattctccctgatttaggttcctgacactgattcctttctctctcgtttttgacccccattgggtgtatcttgtctatgtacagatattttgtaatatattaaatttttttctttcagtttataaaaatggaaagtggagattggaaaattaaatatttcctgttactataccacttttgctccattgcatttacttcttaatctgtaccccctgagcatatctaatcatgtataaaggacgtttttcctccactttatcttaggggttctctgtctcagaatcattatagactcattaactccccctcccagcaaaaggttatcaggatttgaagaggtgcttgaaaacgctagactaggaactagagaataaaaaagttggga

SEQ ID NO: 81659 - DNA, 1017 bp, Homo Sapiens
  misc_feature (155)..(155): n is a, c, g, or t
  misc_feature (174)..(174): n is a, c, g, or t
  misc_feature (187)..(313): n is a, c, g, or t
  misc_feature (318)..(318): n is a, c, g, or t
  misc_feature (321)..(321): n is a, c, g, or t
  misc_feature (333)..(333): n is a, c, g, or t
gcctgttttgatacctatacgctttgatgagtgtaccgtcccgcaccgacgaccggccaggaatcatgaggaggagcgaagacgcccatagcaaaccgctctcccggcgttgccgatcataatgcagctgcacgacagtttcccgattgaaagcnggcatgagcgcacgcaaantatgtgagtagcnnnnnnnnnnnnnnnnnnnnnnnnnnnnnnnnnnnnnnnnnnnnnnnnnnnnnnnnnnnnnnnnnnnnnnnnnnnnnnnnnnnnnnnnnnnnnnnnnnnnnnnnnnnnnnnnnnnnnnnnnnnnnnnaaatntgnccctcgagccanggaatcgggcacgaggggagcgcccgcggctgtaggttcttttttctttgtgactccaggcttgaatgacctagtgtggagagtgtaaactatgtacaagggaggaaagaaaaaaaggaaaggaaccttaagtaagcctcagccaaaggttttatgcattggacttcctgtgcctgcccccaggggcaagactgatccccatgcctgtgcccatgacatctccctgaaagaggacaccatgacagcccggctttgccttgactgacccactgctaccccagaaataagaatcaagagcagctattgttatccttagagtgttttccgtctagggccggctcgtgaacagccacatatccttgcacctgacactgtccccacacaaatagctggctttcgttgcttgttgaatgaatgagtgagttggctctatatccccttggagctggccggtaagatattagtgcctcattttacaagaagagaataggaaggaattaagcaatttggccaacagatacaagatagattccagagttttatctcccactttagggtggcagccagtaggccaaactccaaagaccgttgctgatgtctttttctgcctcccctctttgggttagtgtggtatgtacaagctcactcttgttgaaaattagaaaatagttgaaaaccaaaagg

SEQ ID NO: 81660 - DNA, 1430 bp, Homo Sapiens
  misc_feature (86)..(126): n is a, c, g, or t
  misc_feature (129)..(163): n is a, c, g, or t
aaaaaccctttgggaaactataccggaaactttccaaccctttaaatttaaagtggggggcccggcctttaagggtcgtgaagcannnnnnnnnnnnnnnnnnnnnnnnnnnnnnnnnnnnnnnnncgnnnnnnnnnnnnnnnnnnnnnnnnnnnnnnnnnnncagtcgacggtaccggacatatgcccgggaattcggccattacggccggggattgacagatgagggtgcagtacatgttaatgacaggattgtaccacagccacctcttcaaaaattgtctgcagagaagctgacaagagaaggtgctttccttatggactgtggctctgttttttacatttgggttgggaaaggctgtgacaataacttcatagaggatgtgcttggatatactaattttgcatcaataccacagaaaatgacacatcttccagagctagatacactttcatcagaaagagccagatccttcataacttggcttagagacagcagaccattaagtccaatccttcacatagtaaaagatgagagtcctgccaaagcagaattttttcagcatttgattgaagaccggacagaggctgcattttcttactatgaatttttgcttcatgttcagcagcagatttgtaagtgaagtagaataaaattgaataagaaaaagatctataacctaggtaaagcataatctgtcagagaagcgcgtgagaaatttgaaatgaaggcattgttaatacaagatgcaacgcacagcactctgtctgaggctttggtaaaaagtaaaggggaagaaagaacttgacagatctttttcaactcaaattaatggtaacgatgatgctgtttcaccaagtatattttgaattggtttctacacatttccagtagtatggcagtacagtgctctgttcattgcaagctggcaaatttatgtagctatgtggaatgatatgtcataatgtaaaattagataaattcttttttcttataattaatataacatttctggacttgaactctggcaagagatgccaaaaggcattggtaccgtgttatttgtttatatgaattactttttaacaaggaatgtttcttattcattaaatgaattcaacattttctctgtaaaaacaatagagtttcagtacatgaactatagaaaaaaatctatatataatgtacataaatgttacatttgtaaagaaaatgtaaaaatgtaactatagcatatgaattgcttaaactgtgctgcattgttggatgacaactctttttgtcacagttagagaatgaggttgactaatgcatattatgaattgagtccacaaaggaacacaaaactctttgtaattctgttaaatcttttatgtagatttatttatgatcagcctactaattaaaactatttcgcttgacagtaaaa

SEQ ID NO: 81661 - DNA, 2076 bp, Homo Sapiens
  misc_feature (71)..(71): n is a, c, g, or t
  misc_feature (116)..(117): n is a, c, g, or t
  misc_feature (121)..(121): n is a, c, g, or t
  misc_feature (129)..(129): n is a, c, g, or t
  misc_feature (1056)..(1166): n is a, c, g, or t
  misc_feature (1171)..(1171): n is a, c, g, or t
  misc_feature (1578)..(1586): n is a, c, g, or t
  misc_feature (1677)..(1677): n is a, c, g, or t
  misc_feature (1707)..(1707): n is a, c, g, or t
tgcctgagccagaatcgcacgagcgattgaagcgtcagtcccaccccttgcccctttgtcacagagagtcntgtgaaactatgagagagttgcctgtgccagtaccagcagcagannattnccgtgacntgaaaggaagatgcacggctggggatcaacatgctcctgaagatgatatttgtggataacttgtccatgcagaccttcaccctggaaacatcctggttcagggtgccaacggcctgtcctcgagtcaggaggcgcagctgcagcaggcggacatctgtgacactctggtggtgcccgtgccatcttccctctgcccgctgcgactggtgctgctggatgctggcattgtggcggagctgcaggcccctgacctgaggaatttccgggcagttttcatggctgtggtgatggggcagggccagagagtggctgagctgatcctgcatcatgcccgggccagcgagtgcagggacgtggaggggttcaaaaccgagatggccatgctggtgacccaggccaggaagaacaccatcaccctggagaagcttcatgtgtccagccttctctctagtgtctttaagttgctgatgactcacaaggtaaagcttgagagcaactttgcctccattgtgtttgccatcatggtgttggaggggcttggccgctcactggaccccaaactggacatcctggaggcagcgaggcccttcctcctcacgggcccagtgtgccccccgtgatggggcagtggcctctgtgggcccttgtcaagagctggaggccactcccaagagcctctcctatggcagctgggacgttttaaaattgggacaccaatttcaaatgtaaccctccagtggtggaaggcacaccatggcttcctctgcttggtttgagggtctgttcaaaagctttgggccaattagggagtaaaaggagggaaggggcctatccattccattgtggaagctgggccaggtgccagggacactctccttcagggaaaatgttatgtggaggaggacgaataaatttattttgttttcnnnnnnnnnnnnnnnnnnnnnnnnnnnnnnnnnnnnnnnnnnnnnnnnnnnnnnnnnnnnnnnnnnnnnnnnnnnnnnnnnnnnnnnnnnnnnnnnnnnnnnnnnnnnnnnccaancgccacacgaaccaagaaaaaaaaccgaaccccggcacccccacgatagcataggaaaacacgtccggcggcaggcgcttgggattgctcgcagtacaaacaccacttcggggtgttcgccaccgctctttatttagtccagaaccccccgcccggaatgcccatcaacgggaaagaattcggcctccaaaaaaaacagccggtttgccattaaaaattgaagggcaccacccccggccgcgaaaaatgaagtggcgtgggaaatccccaattttagactcaccccgtcgaccatgtgattgtctccccccctccgctataggtctaacaacccagcctgggagaaacgagcgctggcccccgcctagccctgcgacccccccagaacattctatagaccaatgggnnnnnnnnngagtgtcccctaacaaagcgtggagatttctatcatgaccccttgggctaggtatacccacaaacccgaggtgcgaatgttcaaactcctntcaaacaccacgtcgagcgtcagcatccanaacaatacataatatgtagcccgcccacacggagagatatacaggtgcggcacggggaggaaacaaccactacgcacacatctggatacaaaacaagcaattctcatcattagtcgctgcgcggctactagtataccacgcgccacctgatgtgggggtgtgatgaccacctaacgggtgtaagtttgtattgtctgcctagaacagagacacacttaatgtcttggtctgatacaacaactcgccgtcgtgtgatagatgcgacacactgtgagagcacgtactgcatgttgtcgagtgccagaggacaccaaccgtctccagtatgtatcatacatatatagacgatgcagtctaattccaaccgcg

SEQ ID NO: 81662 - DNA, 1014 bp, Homo Sapiens
  misc_feature (97)..(97): n is a, c, g, or t
  misc_feature (103)..(103): n is a, c, g, or t
gccggtcggcagccgggccagaggggaaagaatggccacgggccacccaacccagagggtgtcacagatgtccgccctgctgcagcttgcgcctccntgactnggaggacagggccgtgggcacccctgaaccagggatgtttccagggtgaaggtctgcatggacaaaagttatccacaaatatcatcttcaggagcatgttgatccccagcccgtgcaatcttccttttcaaggtccacggaaattcctgcctgctggtaactggacacaggcacactctcttcatacgtttccaccaagacttctctggtgacaaaggggcgcagaggggtggggaacttgacggctttcacattccggaagttgacctggaagtgttctagattctgagcttcgtaacgcaggtcaatctgttggaccatcagcttctcaaattcctccacaatctcaggcaagctaagccacttgatgcctggcaaaactcccaggactcggctgccaatcttcatcagcagcaggtccatatgcacctgagcgagcaggccagggtgcaacactttcactgccacggagatgaggttggtggcctcaggttggtggccagggacctgagcccgagacacccctgcatttgatccaaccaggtcagctttagggaggagcagcctttctagaaacgactggtctgcgagattttctggaggtttccggccatttccaaggtatccaaagagctctctcagcccaccgactgccccagtatgtgagaagggcggcagacaggaggccctgccaagtctctggacgctgtcagtctccaggaaggcagtgttggcgtatgctttgtacacctgggccacgcagcctgagcccacaggttcccggttctcaaaagagaggatgctcccccagtcatccccaaaagcctgccgaaggaagcgctcagtgtgagtccacgggtggggcgtcactcggcctcgtgccgaattcgccacccaggcctcgctacctt

SEQ ID NO: 81663 - DNA, 1025 bp, Homo Sapiens
  misc_feature (201)..(203): n is a, c, g, or t
  misc_feature (214)..(214): n is a, c, g, or t
  misc_feature (239)..(239): n is a, c, g, or t
  misc_feature (249)..(249): n is a, c, g, or t
  misc_feature (817)..(830): n is a, c, g, or t
gcgtggcagcatagtgatgtcatcatgcaccagctacatttgtccgtctatgtttggattgacgatacatcacacggacgttgacatgtacgattatcgacccttagggattgcctcgagccagaatcgcacgagtgaggaatctactagtaagtgatgcggacataggataggaagggcatagactgcttagatagatgnnngaatctcttangggagataaaaatgaactaagaccntgaatacatnggaaaaatgtagtcaaaggaaaagcattccagagagagagcatggtagtgcaaagcctggcagaaagaaccagtgtagaaagtccaaggatgaaagaaagccagtgtagctagagcctgaagaatgaggatgggagtggaagatgtgaaggtaagtttgcaggggccagatcatatcaggcctggaagatgatatagctgtttaaagtttattctaaatgcaatgagaagccagctcctagcaagataataaattgcttttccagaacgttaactgtccattatttagttcctttgcattctccataggctggtcttataaaggttctgtgacagtagggaatccattaaagatctattacataagggaatgtgggacatgcaaaagcagaagacaaatgtagaaaccctctgcttcacttggcatttctgtccttcatctttctgatattttaaagctactgtgttcctacatacatatgctatctgttccttcattctttttgataaattcatcatttgcctttacattttcatcgtttttacccccaaatggttaatgtaggtgnnnnnnnnnnnnnnggaatcattttattctttcgtatttctgtgtcagtcgctaggagaaagaccaggaaaatctgttaaactctaaaccaaaaattcccattcactgcagagtgatgattcgcaacactgctgcaattcaggtagtggggtgtcctgaagtgacaacacatcaccactgcagtcctaataaattaagtctttttgttt

SEQ ID NO: 81664 - DNA, 1046 bp, Homo Sapiens
  misc_feature (89)..(89): n is a, c, g, or t
  misc_feature (107)..(107): n is a, c, g, or t
  misc_feature (189)..(189): n is a, c, g, or t
  misc_feature (192)..(192): n is a, c, g, or t
  misc_feature (239)..(239): n is a, c, g, or t
  misc_feature (255)..(255): n is a, c, g, or t
  misc_feature (272)..(272): n is a, c, g, or t
  misc_feature (303)..(303): n is a, c, g, or t
gcgttgcttgccgctgagtgtaccatccagtgtgaccagctcttgctgcatggacccccgtgttgccacctgacacacggtagcgctgntacgtgagctcctggatntcaggttcccgacgccatgagctcagatcaccccaccccgtgcgctgccactgtgcttctccaccgatgtcagatgtctctntgnagacaggatggctcgtgctgtgaccacccccgcacaggacaacatcncgtgtctgagtgccancagggcgccccaatctntaccatctgtgtcacgtgcaaagagtgtgangacttaggggtggagggcacagacctatgctggctgccagtggggaccagcgggtcagcgtctgggcctccgactggctgcggaaccactgtgagcttgtggactggttgagtttcccaatgcctgccaccacggagactcagggccacctgccaccctccctcgctgccttctgcccttgggatggggcgctcctgatgtacgtgggccccggtgtttacaaggaggtgatcatctacaacctctgccagaagcaggtggtggagaagataccactgcccttttttgccatgtccctgagcctgtcccccgggacccacctcctggctgttggctttgctgagtgcatgctgaggctggtagactgtgccatggggactgcccaagactttgccggccacgacaacgcagtgcacctgtgcaggtttacaccttccgccaggctgctcttcacggccgcccgcaacgagatccttgtgtgggaggtccccggcctctgagatgcagcagggactgtggtggtgggcatcacgcctggtcatgccaggcacctggacacaggcttggcagaggcgccaggttgtcaatggcctcatgctgggacaggccaggattcacgtaaatcgcctggagcaagctgttgtaaatttggcgccctgtgaatactttcatacctgttgcccttttgcctaagaaatctttaatgtttctatcttgtaataaacatgggcatttattgcatt

SEQ ID NO: 81665 - DNA, 1254 bp, Homo Sapiens
  misc_feature (52)..(81): n is a, c, g, or t
  misc_feature (98)..(106): n is a, c, g, or t
  misc_feature (137)..(158): n is a, c, g, or t
  misc_feature (727)..(764): n is a, c, g, or t
  misc_feature (1147)..(1181): n is a, c, g, or t
tgccgaattaacctcactaaagggaataagcttgcggccgcggctgtaggcnnnnnnnnnnnnnnnnnnnnnnnnnnnnnncactttgtaacattaannnnnnnnnattaagaagacagatattttatagtacttcnnnnnnnnnnnnnnnnnnnnnngtaaaaatggtatacatgaaccaatacaaaatgcgaatgggaacatatggatatggagtttcttacactgtaacattgtccatgtacaccttaaaaacagaactggcctaaagggaaaaataagacgtcggtgtgactaaagaacaagcttatttggcatcaattatacatccttcattattttatattcctttaaaaaacacaaaaaacaagtttgttctttcttcactctaaaaaaagtgatcaacctgtacaaagtaatactcaacaatacatttcaaacagtgcactgtatacttaagaaaaaatacataaaccaatatacaactaaaatccataatttcctgtttttgctttgttttattattattttttccaatgtgtggggcctacactttgcaatctacctgagacggaaaacaccaatcgaaacacatgaacctgagacatgtcaacattgtaagccataaagttacatcaggaacactgcactactgtacacttttcaaaacagaaagatgggaggtcccaaaaatgagatgccaattctgtgagcaatggtgtgacannnnnnnnnnnnnnnnnnnnnnnnnnnnnnnnnnnnnntaaaaagaacactgaaaaaaaacctttcaacacatgctaaatgattctcaccctttgatatgattatactatggtcggaatgggtgctaagggctcggaatagagctgcagattataaaattcattgaaaaagggatgttcattgtggctttttgtcttggttaagtgcctagggataggggaggggtaaataaaatgctgctcgataatggattttcttttacataccagtccgttcccaaaggcccccatattgcatggttctatcaaggttaaaataaagacagaaaaataaacatgttttcaataacaagagttgacactttttcccccccggccgtaatggccgaattcccgggcatatgtccggtaccgtcgactgnnnnnnnnnnnnnnnnnnnnnnnnnnnnnnnnnnncggccgcttcctcgctcactgactcctgcgctcgtcgttcgctgcggcgagctacccctataggatcgataca

SEQ ID NO: 81666 - DNA, 1078 bp, Homo Sapiens
  misc_feature (438)..(460): n is a, c, g, or t
tttctaaaaagaacaactgaaaaaaaacctttcaacaacatgctaaatgattctcaccctttgatatgattatactatggtcggaatgggtgctaagggctcggaatagagctgcagattataaaattcattgaaaaagggatgttcattgtggctttttgtcttggttaagtgcctagggataggggaggggtaaataaaatgctgctcgataatggattttcttttacataccagtccgttcccaaaaggcccccatattgcaatggttctatcaaaggttaaaataaagacaagaaaaataaacatgttttcaaataacaaagagttgacactttttcccccttaaataaatcagcataagttttccacataatgtaacaatagtaaaaatgcaccttgcaaaatccaaaattactcactgaaaatgtaatagannnnnnnnnnnnnnnnnnnnnnngatctatcttttttgatgccatctttccatagggactgttagctggagtctggagtcttaccaaacatatggtaagagtttagtttctgtccttcaggactacttctagatttcctagacgtttcagtgaaaatccccacacttctttctttaaaacatgtaaatggtaacgtgactcctctaccttttcccgaggctccccatctaagatatgttcaaggtcactgattttagtagctatgcactatggctgccatcatgcgaggatcagtaatttttggcagatggttcttaaggctgaggaaagaggccaaggctagtgtatgaaaggtaaaaagataaaaacactcacatttgagttttgattaagtaactgaaaatccgtacatgctgtttttccacctctgctctgacctatcgagaactgagagcgacagcagaccagtgtgagaacaataccagcccttcttttgtacctcctgcctttgtcaagccaaatctgaaggaatgaaagtttcacacagattcgagttggaaatcccagcatgacaaatatctgtaatatacagtacatgcaaaccacacactactgccttcctaactaagaaaattagtaaa

SEQ ID NO: 81667 - DNA, 1203 bp, Homo Sapiens
  misc_feature (181)..(181): n is a, c, g, or t
  misc_feature (195)..(195): n is a, c, g, or t
  misc_feature (244)..(244): n is a, c, g, or t
  misc_feature (280)..(280): n is a, c, g, or t
  misc_feature (288)..(288): n is a, c, g, or t
  misc_feature (781)..(795): n is a, c, g, or t
ttcgatgacgctgaccagcatatgatgtctctagccccgctacatttgtccgtcttgtgttgattggcgtacatcacacaggacagttgctgatacgattatcgatcattagggattgcctcgagccagaatcgcacgagttacagaatactattcatggaaagtaagctatgttaaaaantagtggaatatttntcaattatattaacatgcctataaaaatagtcctgcagggaaaatattngataagagcaaactatttttattttataaactattntggagccntctgatccttcaaaccaacccaaactactattagatatgtataataacatgtgttgatattaatcattggcctcattgttgaacatattatttgcaaagaatcttaaactctgtagtgccagaatgattctcatctgtgccatattttgcaattaaaagtaacacacccttagaagaatcaaataagagccatctacatcccaggaggatgcaccaagttgctcacagtggatcttttcctctaaaatgatcttttatgttctaaaaagtgaaatcccctttatctgtgtttatattctctacagcccataaaactgatgtgattgttatgttatactcatcagataatacttttcttacataaatctttcattgttgttctgacatctttcattacaaaatttattttcttaacaaaaaggaacataacccagcattccaagtgtctgtgttggctttaacattctctacatggtggtctagataagctaannnnnnnnnnnnnnngtaaaatgtaatagctagaaaatgttatcttggcgcttgtttttgtaaatcatttagtataggctgttagctttactggtactttacgctttgattccaagaagccttgtgcagttgccttatcaaatggccagctaaattaaagatgctcttttgtgttgtgaatttcatagttctgtacagagcttgtttcaatttacaaaaataagtacattccacagaatgcctaaagtgtgtaattttctttaaataatagtaggtgagggagaaacataatggctctaggtcaatcccttatctaaagaccttgttcaacttcatagtccctttccttttaaagaggagaagagaaaaatcccccctggccaggcatggtgttttaaacaatgtgaaattttacataaaaag

SEQ ID NO: 81668 - DNA, 886 bp, Homo Sapiens
gagtactagcaatgcacagggaccgtgttcttaggttcttagtctgtgaatctagcaataggcagtccagatttctgagtcgtactatggttttgccttgtcactgtgaggccctactaggtgtaagcattctctctgaattttaatttcctctcattaaaataggaacaaaatttgctatcctttagattaggagctgaagattcatttccctgggaatgtttcccatttagcttcaagtttcagctcaaacatcaccttctttctgactcctttcattcattcctccaggcagtaaggggctaccatagtactttgtttatgcctgtattatatgacatcactgtagttgcttgactgtttctcctactgttctgtaaacttattaatgggtgagaatctaattttactcatcttgatggcttcatgatccagcacagtgcctcacacaaagaactattgggtgggtggatggatggatggaggaatggagacagttggcttaaccagatcctatatacagattattactggctccaaaggatgagtagataagaccataagaattggatcaatgtaaatcctcacctgccctttgaagagccaataagggcatctttgtctttaaatacagcaaatgttattcagattttgtacttgtctatctgtttacctcagtgtagatgatatgaggatggtataactatgtaaattgtttttgaaaataatttgtttccccacaacttttgaaggttttatttgttgttgttattactagttcagtcccaaacttaccctttccttttcagagagctaatggccatgcttttcttcaaggaaagaataatttatttgaatgaagtgggatacttgcataacacataaa

SEQ ID NO: 81669 - DNA, 1036 bp, Homo Sapiens
  misc_feature (258)..(466): n is a, c, g, or t
  misc_feature (482)..(591): n is a, c, g, or t
cccttcggtcccccttgaatggctgatttgtatctgtccggggcgagctatgaaaacgcagcacgcgccgtttacggtcatgcgtgtgctgcctgtgctacagtcatactgcgtatccctgatctgtgatacggtataccgcttgagtgagtgatcccctcccgcagccgacgacgagcgcagcgatcagtgagcgagaagcgaaggcgcccatacgcaaaccgcctctcccgcgcgtgccggatcataatgcagctnnnnnnnnnnnnnnnnnnnnnnnnnnnnnnnnnnnnnnnnnnnnnnnnnnnnnnnnnnnnnnnnnnnnnnnnnnnnnnnnnnnnnnnnnnnnnnnnnnnnnnnnnnnnnnnnnnnnnnnnnnnnnnnnnnnnnnnnnnnnnnnnnnnnnnnnnnnnnnnnnnnnnnnnnnnnnnnnnnnnnnnnnnnnnnnnnnnnnnnnnnnnnnnnnaagaattcggcacgannnnnnnnnnnnnnnnnnnnnnnnnnnnnnnnnnnnnnnnnnnnnnnnnnnnnnnnnnnnnnnnnnnnnnnnnnnnnnnnnnnnnnnnnnnnnnnnnnnnnnnnnnnnnnagtgagctgggcgggcatcgggcccacaccacagcctgagtcccaggagtccatgcaatggcagtggcaacagcagctgaatgtcatggtgaaggaggagcaagaacaggacgagaaggagaccatcagaaggctcccggccttcgccaacctgcaggaggcgatgctggagaacatgatccagaacatcctggtggaggcgagccgcggggaggtggtactcacctcgcggccacgcgtcatcgccctgccgccgttctgcgtgcccaggagtctgaccccggacacgctgctgccgacgcagcaagcagaggtactccacccggtggtgccacttcctaccgaccttccgtaaatgcccgcgcccagcctctccgacatgccgctaggggtcacgcctggccccctctccaccgccagtaaaagcatctagtcttttttttgt

SEQ ID NO: 81670 - DNA, 1089 bp, Homo Sapiens
  misc_feature (784)..(784): n is a, c, g, or t
  misc_feature (794)..(794): n is a, c, g, or t
  misc_feature (800)..(800): n is a, c, g, or t
  misc_feature (853)..(853): n is a, c, g, or t
  misc_feature (936)..(936): n is a, c, g, or t
  misc_feature (957)..(957): n is a, c, g, or t
  misc_feature (970)..(971): n is a, c, g, or t
  misc_feature (977)..(977): n is a, c, g, or t
  misc_feature (1005)..(1005): n is a, c, g, or t
tttgagctgcatgggtatttcattgaaagttcacagacacaagggctctgagcggggtcacatcgtggaggaggcagggtcggggagcacagagtgagtcctcccaacctgggacaattttgcataagcccttcctgctaggtgtcaggtccaaggggccccaggagcctgggaaggggcacgtgagggcagggacacagacgctggaagccagggtgcagcagcgaggggagaagcccccaggccccagacacaggcagggtggaggccaggaggcggagggggtggactgagggccaagctcactgcccccttgctgtactcagcttctgatggccttgctgcccagttcacagctcaagggggccccaggacaagaagccctgccctgccccaacctcatgggatcctgcgtttcagggaccatgagaataaacatgtctcagtgcttgtctccgccagcagccgtgcctggcgggccttagtagtcggtgagggggtaccgcaggaagatgaagacgaggatgatgcaggaggctgccagggcagaactggtgatgttgaacagccgggccgtctttgcatcctccacggctccattcaggtcattgagaacttcttgtctcgcactttgagggagtaggccaaggcgatgaagcccaggcagcagaagttgaggtagacgaagttgaagatggacacaggtaatagtcgttcacctcggtggtgtccgggtagactcgatgacggtcgtggggttggtcatcgtcttcttctcggctangtgcttgcangcaggnggcgcgccggcagcccgcacgctgtcggtcttgctgctcttggactccatggngaacagtgtgggcgccatcggggaaacggcggggctcaggggcaggggcgtcggagcctgcagggcagggggctggcacgcangcgaagcacccttgggcgaanctgcgggggctcnngatcanaggcccgtccaggggactcggctcctgngcgccgtcgtgtgctggcggtctccacgggctgggctggcggggcctcgtgcgattctggctccaggcaatcctaaaggatctt

SEQ ID NO: 81671 - DNA, 615 bp, Homo Sapiens
  misc_feature (604)..(604): n is a, c, g, or t
gagaagacgacagaaggggataaagaacgagaacgccaaagggattgggaagacaaagacaaaggacgagatgaccgcagagaaaagcgagaagagatccgagaagataggaatccaagagatggacatgatgaaagaaaatcaaagaagcgctatagaaatgaagggagtcccagccctagacagtccccgaagcgccggcgtgaacattctccggacagtgatgcctacaacagtggagatgataaaaatgaaaaacacagactcttgagccaagttgtacgacctcaagaatctcgttctcttagtccctcgcacctcacagaagacagacagggtagatggaaagaggaggatcgtaaaccagaaaggaaagagagttcaaggcgctacgaagaacaggaactcaaggagaaagtttcttctgtagataaacagagagaacagacagaaatcctggaaagctcaagaatgcgtgcacaggacattataggacaccaccagtctgaagatcgagagacatctgatcgagctcatgatgaatacaagaagaaagcatagattcaaaagataccaattaagataaagatagaggatgattgtnggatagagagg

SEQ ID NO: 81672 - DNA, 942 bp, Homo Sapiens
tctttcaggcttatgcatgatattgtgggtgacttcatgccccagcctttctccccagcatacagtgagctgccttttggggagcaatgccatgataaggagcatacgtgcatgttttccgtactttcagaatagagtgccttagctacgccagaggctcgtattgtgtttctgctgaccaaagttgcatacacctgtaagaagtgtctttttaggttatggtattaaaaaaagtcgtttcaggcttatcagataataattctcctatatttgaggggggcatgggataaaaagatttaataatacctggatagagaatgctaatgctgccttttgtgatcctttaatattatccatgcttttataaagtgcagtacacattttgacattgccacagtttacagtgtcattcttccacgaataggtaattgatagagtttatgggtcttagtcttaagggtaacagagtgaataccttccaaataaaaagctaaatattcctccttgtcattttaatgtcattattgaaatacttttaattctaattttcaaaagaaagctaaatgctgattgtggtttaggatgttacagtactaataccatcatgttatttattctaatatagaggcattgagaggaggggagtgtatgtctagagttaccccaattctaaataggtaccaaaagagtattgattatgacctggagcctgagctttgggagaatatacaaaggaaaaagcaggcatagtttccactttaaagggaagaagggactttaacatcctatgaatttgaaacatcctatgaatttgaaagtttcctaagtgttgttttcaaagaactggtttattttatagtcagtcaaaatgcatttggaatgtaccttgcttccataacagactttgactctatgacctatgaagaataaaaagataatctg

SEQ ID NO: 81673 - DNA, 1078 bp, Homo Sapiens
  misc_feature (28)..(28): n is a, c, g, or t
  misc_feature (52)..(52): n is a, c, g, or t
  misc_feature (75)..(528): n is a, c, g, or t
ttcttatagtctgtcggttccccacctntgacttgacgtcgattttggatgntcgtcaagggggcgagccttttnnnnnnnnnnnnnnnnnnnnnnnnnnnnnnnnnnnnnnnnnnnnnnnnnnnnnnnnnnnnnnnnnnnnnnnnnnnnnnnnnnnnnnnnnnnnnnnnnnnnnnnnnnnnnnnnnnnnnnnnnnnnnnnnnnnnnnnnnnnnnnnnnnnnnnnnnnnnnnnnnnnnnnnnnnnnnnnnnnnnnnnnnnnnnnnnnnnnnnnnnnnnnnnnnnnnnnnnnnnnnnnnnnnnnnnnnnnnnnnnnnnnnnnnnnnnnnnnnnnnnnnnnnnnnnnnnnnnnnnnnnnnnnnnnnnnnnnnnnnnnnnnnnnnnnnnnnnnnnnnnnnnnnnnnnnnnnnnnnnnnnnnnnnnnnnnnnnnnnnnnnnnnnnnnnnnnnnnnnnnnnnnnnnnnnnnnnnnnnnnnnnnnnnnnnnnnnnnnnnnnnnnnnnnnnnnnnnnnnnnnnnnnnnnnnnnnnaagaattcggaacgaggtttaaaatgtatgtaagtaaatggctgcagaaagtttttttagagaatcctgcttccatcagtaatacagcaatattaccccatccactaatggtctttgtttccttaaccactactcattaatccttaatcacctcattcaaactaattcattctgcatttttgagtaccaactcttgtcaggctcagtggcagcttctacgacctgatggatggaaaaaaatcaaactctgtgactctatggttgactgccacctctgcaaccttgactcatctgctgaaaaggcaagaagaagaaagggcagcaagccctgttttagggactacataagatgaggggagataagggggacatagatgagttctttaggattgcgtgtgttttgagtttttgtttctaactgaagaaatctgtcaatattaaatagggtgggaaaatggtttcttagaataactgttcaactgtgtgtaaataaggaaagttttcaatgagtattacttattgtaattaatgcagaaggacttccccagtc

SEQ ID NO: 81674 - DNA, 1124 bp, Homo Sapiens
  misc_feature (67)..(67): n is a, c, g, or t
  misc_feature (72)..(72): n is a, c, g, or t
  misc_feature (77)..(77): n is a, c, g, or t
  misc_feature (116)..(116): n is a, c, g, or t
  misc_feature (131)..(131): n is a, c, g, or t
  misc_feature (155)..(155): n is a, c, g, or t
  misc_feature (159)..(159): n is a, c, g, or t
  misc_feature (252)..(252): n is a, c, g, or t
  misc_feature (298)..(298): n is a, c, g, or t
  misc_feature (317)..(317): n is a, c, g, or t
  misc_feature (320)..(320): n is a, c, g, or t
  misc_feature (411)..(411): n is a, c, g, or t
  misc_feature (907)..(907): n is a, c, g, or t
  misc_feature (921)..(921): n is a, c, g, or t
  misc_feature (1065)..(1083): n is a, c, g, or t
caagctcactgtggtgttgactgtgacatagaataccccagtcactcggcccaggtcctggcacagntgaantggantgcttcctgcggggacactcagcagtcagctcagccctncagtgacgcctctcntggagatacaaagatgagaaagcntgcntgagagaaatgagaaaacatgcttgtactgcagatcaaaaccaccacacacaccacgggctagatgactcacctggctcacaccaacctctgnccaatgcagggaccatgctctgcagacagcagtcctctagcatgcncccagcattcagccagtcngtncacctgtggccatccccatgtgtgaggaagcaggagtcagccaccaagtgtctccacatcggagcttgcgggtcagacctgtgggccaggngatgggagcagggctgagggtaggggctgaatgtgtggctctgtccctgtgttgccttccacagaggagcaaggcctcaggctgaggaaggaggggcacgctggaacagcctagtctcctccccgtggattcccccaaacccataacattcttccataggggctgagaacgcagtgccccgtccctgacagggatgaaaagtgaacccctcaggtcaggagaggcagagttgaggttctgccacttcctgtccctggggagccactcaagttaccagggctaccggctgaaataaatcttttccgggtagggtcaagggcagtgtgttgccaaggcaactgatgtaggccagttgcgtgactccaggtttgtcctggtactcagtgggtccaatcacctggcattgatcacctggcattgatcagcacccaccccacccctgaggcttgcccagcccccaggccctcagatccctgctcttcctgcctttcctgcnccatgtgtcacccnagcaccccaaggttcagtgacaccagggtggtttggagctggtcactgtcatagcagctgtgatttcacaaggaagggtgctgcagggggacctggttgatggggagtgggaaggggaaggaataaagagatcttcctcaggtnnnnnnnnnnnnnnnnnnncctgagaggcggccgcaagcattattcccttgtagtgaggg

SEQ ID NO: 81675 - DNA, 564 bp, Homo Sapiens
catagttacccagcaattccacttctaggcatatacccaaagaactcaaagcagggactcaaacagatacttggacatgaatcttcatagcaacactattcataatagacaaaaagcagaagcaactcaagagtccatcgatagatgaatggataaacaaaatgtggtatatccataaaatagaatatcattcagccataaaaggaattaagttctgatacatactacagcatagatgaaccttgaaaacattgtactaagtgaaagaggccaggcagctaaacttccaaagactaatatacaattccactgaataggcaaattcatagacagaggatagaataaaggctaatgaggggtgggggagaagagaatgggcagttattgctaatggatacaaagtttctgttggggatgatgaaaaaattgtggaactggacagtggtgatggttgtaaaacacggtgaatgtacttaatgccactgaattgtacacttaagaataaacttgtaaattttatattatatatactttgccacaataaaaatttttttaaaaatgaaa

SEQ ID NO: 81676 - DNA, 1297 bp, Homo Sapiens
  misc_feature (34)..(34): n is a, c, g, or t
  misc_feature (97)..(97): n is a, c, g, or t
  misc_feature (148)..(148): n is a, c, g, or t
  misc_feature (157)..(157): n is a, c, g, or t
gtactgatgtaggattcaaggtcatgtatctccntaatgatcgttggattagatctcatgtgaacttaatgctgaaataaaatataaaattttcatntgctttcagccagtataaactgataaagcaagcatgcacaaactacctccntaagaaggntagtcctttcttccccatcattcatatgaacatagtagaaaacagcatattcgtatcaaatttgatgaaaagcgccaacacgtttgaactgaaatacgacttgtcatgtgaactgtaccgaatgtctacgtattccacttttcctgctggggttcctgtctcagaaaggagtcttgctcgtgctggtttctattacactggtgtgaatgacaaggtcaaatgcttctgttgtggcctgatgctggataactggaaaagaggagacagtcctactgaaaagcataaaaagttgtatcctagctgcagattccgtcagagtctaaattccgttaacaacttggaagctacctctcaagcctacttttccttcttcagtaacaaattccacacactcattacttcccgggtacagaaaacagtggatatttccgtggctcttattcaaactctccatcaaatcctgtaaactccagagcaaatcaagatttttctgccttgatgagaagttcctaccactgtgcaatgaataacgaaaatgccagattacttacttttcagacatggccattgacttttctgtcgccaacagatctggcaaaagcaggcttttactacataggacctggagacagagtggcttgctttgcctgtggtggaaaattgagcaattgggaaccgaaggataatgctatgtcagaacacctgagacattttcccaaatgcccatttatagaaaatcagcttcaagacacttcaagatacacagtttctaatctgagcatgcagacacatgcagcccgctttaaaacattctttaactggccctctagtgttctagttaatcctgagcagcttgcaagtgcgggtttttattatgtgggtaacagtgatgatgtcaaatgcttttgctgtgatggtggactcaggtgttgggaatctggagatgatccatgggttcaacatgccaagtggtttccaaggtgtgagtacttgataagaattaaaggacaggagttcatccgtcaagttcaagccagttaccctcatctacttgaacagctgctatccacatcagacagcccaggagatgaaaatgcagagtcatcaattatccattttgaacctggagaagaccattca

SEQ ID NO: 81677 - DNA, 617 bp, Homo Sapiens
  misc_feature (546)..(559): n is a, c, g, or t
tttggggtttcgcagcgttcatgaacctttaattcattatgaacctagaggcagggacattaggcaaaaaatacagcgtatccttcatctcgggtggggaaaaaccagggcactgggttttgccgcgtctttgcacagagtaagacacagagataccttcgtggggagagtgtgcagctccggcctgcccttctgtggcccatctgcgcaggccgcccaggagcccaccaggggatgggtgtgacccccaagggacaagggcagcaggggcacccgcccgcttctttacaatataaatagcattttcaaacaacataagaatacagtgtcagcgccacgccgggcgagggctgcgtgcagagggacacctccacgttttggctgacaccccccaacctccccgaccccggccctctccagggcaaccgcccccctcccccaccaaggaaatgaaaggcttgctcctgcgtaacactctctctgttttccttagtcctctctagcccggggactgttaggacactcttttataatataaacattgcnnnnnnnnnnnnnnggagacagggtctcgctctgttgcccaggctgcagtcagctcagattgcacctcgtgc

SEQ ID NO: 81678 - DNA, 226 bp, Homo Sapiens
gcctactactactatacggctgcgagaagacgacagaagggcaggccggagctgcacactctccccacgaaggtatctctgtgtcttactctgtgcaaagacgcggcaaaacccagtgccctggtttttccccacccgagatgaaggatacgctgtattttttgcctaatgtccctgcctctaggttcataatgaattaaaggttcatgaacgctgcaaaacccca

SEQ ID NO: 81679 - DNA, 898 bp, Homo Sapiens
acagaaccaaaggttcagttgtggatacattaaggttgaggagtctatattagagatgcacatggagatgcagagtagtccattgaataaccaagagtccaggtgagacctcaaggctggagatagagattccatactcaactttcctatatgtttgaagagtttcatgatacactgtagtgggtagagggaagaattgtattttgttattaataacagtcctgaatatcattggctttgacaaaatgaggacttcttttcatgtcaataaatatggatggtggccatcaagggctgatctgagagcttgaaatgtcatacatgccccagcttagttctgtctttattttcttctgtcttagcatgtggcttgcatcttcaatgttgcctcacggtcacaaaagggctgcccagctccaaagtccatattcaaacttagggtggtgagtgggtgctgatggcagcctggtttgaaaatctccactggagagaagacacagcaggattcagatgcaaatgaccagagcactccaagttggaaagaactgctgagcgggtctgtagagcccatcgctctctcctgtctattcatcagctaggctgaagctcctgacagactcacaccagtatcttgctgctccagaaaggtcgaagatggcagttttcccaaactccggcttgcccagatgtctgctcaccctcattcttctccagctgcccaagctggtttcagataggtctctctctctggcctgcagagttaaaacatctcaataaatataaagtataaaaagaagctggagcccaaccacttcggcacatgttcacaggatctcggggctgtgtcacaagccactgggcactcatatctggctgagaataaatctcttgcaatatt

SEQ ID NO: 81680 - DNA, 1091 bp, Homo Sapiens
  misc_feature (142)..(142): n is a, c, g, or t
  misc_feature (197)..(197): n is a, c, g, or t
  misc_feature (305)..(305): n is a, c, g, or t
  misc_feature (389)..(389): n is a, c, g, or t
  misc_feature (784)..(812): n is a, c, g, or t
tacattctccattacgggagaccgagctcgagagtaacgttgcgaggtactgtgtgtgtgtgatcagccttcaccatgtgtcgtaggaccaggtgcttgacagctccagctgtcagtgttgcaccccccagacattgcttcntattcccatgcagtgggtgcctgccagtgccagttctcttggagtccatcttgcntgtcaccccaaggaggcctcgagatcacaccgtgacattcgaaacgtgtatctctacaaccttcattctcattgggatgtaccttgccatttgaacaccatcattttntgaggactgtctagaaaaggtgcctaaccctcacagggaacacacagttccctcagagtccagcatcttctggtcttttctttntcaagatttttttaaatggttgtgctatcatttgtcatcatcagaaaatgcttgctgtaacaagcgtttatctgcacattatgctgcagtgaatgctctactgatcaagttaaacagataagatcccttcccttgtagaaactacaacttaatacagtctaagacttgacaaattacttagtatttattttccaactgctttatctctgtaaaatgataggctgaattattataagctaattgttgtagaaagaactttccccttaacttatgtaaacagtctggttttaaaaaatttgataattgtggcccagtaagctcaacactttgccttccccaagactggggaacctctgtcctgttcaccactgtatattcagcaccaggcagtttcnnnnnnnnnnnnnnnnnnnnnnnnnnnnnaaaaattaatacatatacatggtaagacattccacaatacaaaagggtatacaataaatggtaagcttccccatggaggtcagcctctagtcccctctccagagttaatcactgttatctatatgttgtgtatcctttcatagcaattctatgcatttacaagtttataaatatgtatatttatatatctatttttaatacaaatagtagaattctatacacagtgttctgaagcttgctttcttatatagtattttggagattattccaaattcaaaa

SEQ ID NO: 81681 - DNA, 995 bp, Homo Sapiens
  misc_feature (68)..(68): n is a, c, g, or t
  misc_feature (140)..(140): n is a, c, g, or t
  misc_feature (174)..(174): n is a, c, g, or t
  misc_feature (206)..(354): n is a, c, g, or t
cttgtgctttgacaaattttcctgctatcctgattttgaaacgttacgccttgatgactgtacgtccngcacggacgacgagcgagcgatcatgacgagaagcgaagacgccaatagcaaaccgctgtcccgcgcgtgcngatcattatgcagctgcacgacagttccgactgnaaagcggcagtgggcaacgcaataatgtgagnnnnnnnnnnnnnnnnnnnnnnnnnnnnnnnnnnnnnnnnnnnnnnnnnnnnnnnnnnnnnnnnnnnnnnnnnnnnnnnnnnnnnnnnnnnnnnnnnnnnnnnnnnnnnnnnnnnnnnnnnnnnnnnnnnnnnnnnnnnnnnnnnnnnnaagaattcggcacgaggtcagcttcagcccatgttgttggagatggaaagatggaagcaggacagagaaactggtcgattttcaaggccctgtgagtgcctcgtcgtgcgtgtggccccagacctcggagaaaggatcacgctaagcggtgacaaatccttgatagaagaagtatttccagagatcggcgacgtgatgtgtaactctgtcaatgcaggctggaatcacgactcgacgcacgtcatcaggtttccactaaatggctactgtcacctcaactcagtccaggtcctcgagaggttgcagcaaagaggatttgaaatcgtgggctcctgtgggggaggagtagactcgtcccagttcagtgaatacgtccttcggcgggaactgaggcggacgccccgtgtaccctccgtcatccggataaagcaagagcctctggactaaatggacatatttcttatgcaaaaaggaaaacacacacaaccaataactcaaaaaagggacatttatgtgcagttgggacagcaaaccaagtcctggacgtaaaatcgaataaaagacacatttatatccaatagagaccacacctgtattcatatgggaacaattggaatagtgatatcctcaaggtgttacaa

SEQ ID NO: 81682 - DNA, 1230 bp, Homo Sapiens
  misc_feature (541)..(562): n is a, c, g, or t
  misc_feature (1064)..(1082): n is a, c, g, or t
  misc_feature (1135)..(1166): n is a, c, g, or t
ctagcagcaagggccatagctgtgcagaaaggaagcattggaaacttgataagcttcctagaggatggggtcacgatggcccagtaccagcagagccagcacaacctcatgcacatgcagcccccgcccctggaaccacctagcgtagacatgatgtgcagggcggccaaggctttgctagccatggccagagtggacgaaaaccgctcggaattccttttgcacgagggccggttgctggatatctcgatatcagctgtcctgaactctctggttgcatctgtcatctgtgatgtactgtttcagattgggcagttatgacataagtgagaaggcaagcatgtgtgagtgaagattagagggtcacatataactggctgttttctgttcttgtttatccagcgtaggaagaaggaaaagaaaatctttgctcctctgccccattcactatttaccaattgggaattaaagaaataattaatttgaacagttatgaaattaatatttgctgtctgtgtgtataacgtacatcctttggggnnnnnnnnnnnnnnnnnnnnnnaaccaaagttgctgtctagtgcattcaaaggtcactttttgttcttcacagatctttttaatgttctttcccatgttgtattgcatttttgggggaagcaaattgactttaaagaaaaaagttgtggcaaaagatgctaagatgcgaaaatttcaccacactgagtcaaaaaggtgaaaaattatccatttcctatgcgttttactcctcagagaatgaaaaaaactgcatcccatcacccaaagttctgtgcaatagaaatttctacagatacaggtataggggctcaaggaggtatgtcggtcagtagtcaaaactatgaaatgatactggtttctccacaggaatatggttccattaggctgggagcaaaaacaatgttttttaagattgagaatacatacctgacaacgatccggaaactgctcctcaccactcccgtcatgcctgctgtcggcgtttgaccttccacgtgacagttcttcacaattcctttcatcannnnnnnnnnnnnnnnnnnactgcctatgggctgtgatgtatatagaagttgtacattaaacataccctcannnnnnnnnnnnnnnnnnnnnnnnnnnnnnnnagtacaaagttttagtttctttttcatgatgtggtaactacgaagtgatggtagatttaaataa

SEQ ID NO: 81683 - DNA, 900 bp, Homo Sapiens
  misc_feature (109)..(109): n is a, c, g, or t
  misc_feature (156)..(156): n is a, c, g, or t
  misc_feature (171)..(171): n is a, c, g, or t
  misc_feature (200)..(200): n is a, c, g, or t
  misc_feature (251)..(251): n is a, c, g, or t
  misc_feature (256)..(256): n is a, c, g, or t
  misc_feature (305)..(306): n is a, c, g, or t
  misc_feature (315)..(315): n is a, c, g, or t
  misc_feature (544)..(574): n is a, c, g, or t
  misc_feature (609)..(609): n is a, c, g, or t
  misc_feature (612)..(612): n is a, c, g, or t
  misc_feature (616)..(616): n is a, c, g, or t
ccatgaaggacactagtgatgtacacatgtctgattatgagtatatctcattaatcccataccctcatcagtaggcatccatattctcatttaccagagaagtaaatantaacttgttaggggtcatgtgattagtaagcagcagagctgtacctntataaatcgctttcncttgactacccacattgctgtctttatgntagactttgagggcgacgtgagtttactgcctagctttatcctttcaggtntatgntagaaatcatgtccctatcccctagttgggagagctatgcccttcaatnntaccttgtntgagatggagaaggtaaatcctgaatccttgcctctctcatacctacaggtcacagcaaaccgagatcccagctcaccagcaaacagatgagttgtatcccactggtgggtgtggagagagtgaagaggaaactaaagctaaagagaaggagaaggccatagactgtatgtctcatcccaaagagaaattagcccaatcccagaagaaagtagctcagctgattaaggnnnnnnnnnnnnnnnnnnnnnnnnnnnnnnnttttgtttccatttaaaaatatgttcctgtttagnagnaagnctttgccttcgatgcagattgaagcatatgaaatagaggaaggtgtcatatttctttgtaagtagcagaaaacaaagcagagcctacttaggtagccagcccaccttctggttccatgcatggttcattgtctgttcctccttggggcatttctggtcctagctttaaactaaaaattaggccaggtgcagtggctcatgcgtgtaatcccaacaccttggaaaaccgaggcgggaggatctcttgaggccagcgtgagtaacatagtgagaccctgtctctac

SEQ ID NO: 81684 - DNA, 1237 bp, Homo Sapiens
cagaagttcacaaattaaaagccctttaataatataaaacagttgaacactggaatgtttttttctaggtcatgaaaaaagtgaattccaaatctatgtaataaatctaaaataatacagcatcactgtcttctgttctggtgtttatcaaacctgcacatgagtttttagaaggtgaattggggatgcttcagaatgtattttctccaaacagatggagcctgaaaactgtgtgattttccaaaccaagtggagaaaagcaggaagaaattggtgtttagctggtcagcagacggggatccccgggatgcaaacagccttggccattaggagcctcgcctggaacggggcccccacaaagctcctgagcctgggccacatcactcaggctcctgttccccatctccaggctcgcagcggacagaactccactttctggcttgtttactcgaaacacctcttcccatgtatagtcagcaagattcacaggctgtgttacccacgggtctgtcaccagcttctccaaggtggtgcgtctctcagggactggctgcagcagcccagacacaaggctcatgagttctttggacaccaggtatggcgggtgtatggcagcctccacggtctcctccagctcacagaaggggttctcctcaaagaccagcgtgtacagagtgactcccagagaccacatctccagctccggccctctgtagggaatccccatgagaacttccggtgcacagtactcgatggtccaacaaaaagtataaaataattttcccctttccaagtaggcggccgagccaaagtctatcagcttgattgtgaagtcctcggcgatcacgatgttctcatccttgatgtcacggtggatgatgtccttcaagcgcaggtatcccactgctgacactagttgtcggaagatgtagctcgccaggggctcatccagcctggggtggcggtcgatgaaagcgaagaggtctaggccggagccgtgcttctccatcacaagctggaagaacccttggttttcaaatatatccaataccttgatgatattggcgtgctccaccctggatagaattgcgatctctaaagtaactttcccaagtttgggatcctcaatccaacaatcctccaagaccttctccttcttaataaacttcaccaccacctccttgtttttttccttgtccacagcagtccacacgaagccgaaggccccactgccccc

SEQ ID NO: 81685 - DNA, 1011 bp, Homo Sapiens
  misc_feature (452)..(469): n is a, c, g, or t
aagaatatttggtgatccaaattctcatatgcctttcaaaagcaaattgcttatgataatctctcagaaagatacatttcattccttttttccaacacttcagctacaaccacatgatggagaaaattaagagttatgtgaattatgtgctaagtgaaaaatcatcaacctttctaatgaaggcagcggcaaaagtagtagaaagcaaaaggacaagaacaataacttctcaagataaacctagtggtaatgatgttgaaatggaaactgaagctaatttggatacaagaaaaagtgttagtgacaaacagtctgcggtaactgaatcctcagagggtacagtatccttattgaggtctcacaagaatcttttcttatctaagttgcaacatggaacccagcaacaagaccttaataagaaagaaagaagagtaggaactcctcaaagtacnnnnnnnnnnnnnnnnnncagaagagccactgaaagcagaatacctgtttcaaagagtcagccggtaactcctgaaaaacatcgagctagaaaaagacaggctggctttgggaagaagacaagaatttgagatctggcgtgaggaaatatggagagggaaactggtctaaaatactgttgcattataaattcaacaaccggacaagtgtcatgttaaaagacagatggaggaccatgaagaaactaaaactgatttcctcagacagcgaagactgattgtgtttgtaaaagcttgatgaaaggacagttaagtattttgatcactgcattttgtttgaaacttgtgtcattgatgtaatttaaaacttttgtttaaagcattacagtatttttctgtgaccatcaattaatgagggtttgtgctaccagagttaaagcatatgctatcattgtattctttaagaaccttattttgataaaatgtaaatttgttgaaccctgccacatttagtatccccacccccaaatcctgttccaatgaaaaaattaaaacctgatac

SEQ ID NO: 81686 - DNA, 1206 bp, Homo Sapiens
  misc_feature (1139)..(1139): n is a, c, g, or t
  misc_feature (1165)..(1165): n is a, c, g, or t
  misc_feature (1168)..(1168): n is a, c, g, or t
  misc_feature (1173)..(1173): n is a, c, g, or t
  misc_feature (1190)..(1190): n is a, c, g, or t
ggatttcattccttttttcaacacttcagctacaaccacatgatggagaaaattaagagttatgtgaattatgtgctaagtgaaaaatcatcaacctttctaatgaaggcagcggcaaaagtagtagaaagcaaaaggacaagaacaataacttctcaagataaacctagtggtaatgatgttgaaatggaaactgaagctaatttggatacaagaaaaaggtctcacaagaatcttttcttatctaagttgcaacatggaacccagcaacaagaccttaataagaaagaaagaagagtaggaactcctcaaagtacaaaaaagaaaaaagaaagcagaagagccactgaaagcagaatacctgtttcaaagagtcagccggtaactcctgaaaaacatcgagctagaaaaagacaggcatggctttgggaagaagacaagaatttgagatctggcgtgaggaaatatggagagggaaactggtctaaaatactgttgcattataaattcaacaaccggacaagtgtcatgttaaaagacagatggaggaccatgaagaaactaaaactgatttcctcagacagcgaagactgattgtgtttgtaaaagcttgatgaaaggacagttaagtattttgatcactgcattttgtttgaaacttgtgtcattgatgtaatttaaaacttttgtttaaagcattacagtatttttctgtgaccatcaattaatgagggtttgtgctaccagagttaaagcatatgctatcattgtattctttaagaaccttattttgataaaatgtaaatttgttgaaccctgccacatttagtatccccacccccaaatcctgttccaatgaaaaaattaaaaccttgatacgattcataccacactgcactcctggcccctgcattccccctatccttcccctgctccgctcgcccttcaccaccattcttgtcttcacaggtcgtcccgacccgctttgtttccctgccccgcgttttcccacaaccgcctttccccgcgcgcccccacgtcatgtgcctccccttcgcttaatctctcggcggtggccgcgccttcgcccatctcaaatcgcttatcctttccaccgctagcgtgcgcctcctccggtntgtctcgtcgcgccctacctataccncgncctcnctcgattctctggcatngtttaaaaacagccca

SEQ ID NO: 81687 - DNA, 1097 bp, Homo Sapiens
  misc_feature (169)..(194): n is a, c, g, or t
ctttacatggcggaggatgtttcctcagcggccccgagcccgcggggctgtgcggatggtagggatgccgaccctactgaggagcagatggcagaaacagagagaaacgacgaggagcagttcgaatgccaggaactgctcgagtgccaggtgcaggtgggggcccccnnnnnnnnnnnnnnnnnnnnnnnnnncgcgggcctggtggccgaggccgaggccgtggctgccggctggatgctcgatttcctctgcctctctctttgccgagctttccgcgacggccgctccgaggacttccgcaggacccgcaacagcgcagaggctattattcatggacctatccagtctaacagcttgccagttggagaaccgatatacatatgtcagtttttgacaagaattgcagcaggaaaaacccttgatgcacagtttgcaaaactgatgaacgaattacacccttgggaatcagccctgatgattggggggttcaattggaaaaggaaccatgacaaaattcatgaagaaataccagaatttaattaaaattcaggcctatagctgtttgtatggaaaatggcaactttaaagaagcagaagaagtctttgaaagaatattcggtgatccaaatcctcatatgcctttcaaaagcaaattgcttatgataatctctcagaaaagatacatttcattccttttttcaacacttcagctacaaccacatgatggagaaacattaagagttatgtgaattatgtggctaactgaaaaatcatcaacctttctaatggaaggcagcggcaaaaggtagtagaaagcaaaaggacaagaacaataacttctcaagataaacctagtggtaatgatgttgaaatggaaactgaagctaatttggatacaagaaaaaggtctcacaagaatcttttcttatctaagttgcaacatggaacccagcaacaagaccttaataagaaagaaagaagagtaggaactcctcaaattacatatatttgtcttaccaaactgactatgaataagaaagaaggagtgaggaaaggattatgcttcttagtactcctaaaacattatcgtactg

SEQ ID NO: 81688 - DNA, 1696 bp, Homo Sapiens
  misc_feature (558)..(572): n is a, c, g, or t
  misc_feature (1296)..(1296): n is a, c, g, or t
  misc_feature (1413)..(1413): n is a, c, g, or t
  misc_feature (1430)..(1430): n is a, c, g, or t
  misc_feature (1479)..(1479): n is a, c, g, or t
  misc_feature (1484)..(1485): n is a, c, g, or t
  misc_feature (1492)..(1493): n is a, c, g, or t
  misc_feature (1536)..(1536): n is a, c, g, or t
  misc_feature (1552)..(1552): n is a, c, g, or t
  misc_feature (1574)..(1574): n is a, c, g, or t
  misc_feature (1600)..(1600): n is a, c, g, or t
gattagctagatgatctgcagtgagcagtagagtgggacttgtatgtagatacacggctgtgaaatattgtttcaagaatataaactcgggggggcaatctttctcactcgcggagtaatattaaccgcgggtgtttcaccaccgttaatacaccctgtaaagggtttgaatatatgtccccttgggggcgcgctatatatcttcctcgtggagggtaggtgtggtcccgaataatgtggtggcccccgccccccgatattgtgggggcgttctcctccccacaatggttcctcccagctgtggcgcgtgttttcctccacgttccacaggcggtgtttataaacggcgggcgcccctcggcgctcgtgcggttttttattataaggggccccccttctatggggggccccttctggttacaccaaaacaccgggtgttagtctaatctggggggccccccccgaggggatattctttgtgggcgtgcgccgcgccctctctctttttgttgtgttgtctttctgttattttgctggtttgttttttgtttgccttcnnnnnnnnnnnnnnnaacaaaaaataaagaatttaatgtacagtaaattctctcccatacaaaggtctagtctgatgttttgtgtacaaactcacatctccaattaacagtatttattgagggtgactttgtattgcactaacgtctattgctattacctgttgtgattgataagtaaagccactcattgaaaaacccaattccaaacaccacagtttgtgacacatgaagtaatgaatgactcttggtatgaaaacgtggcatttaagcgtctactgtgacagtatttcatttgtggacaaaagtagctttaaagcaagtatctggaaaatttttagcacacaggtttaaaatggtcctgcacgttgcaatacagcagcacgtgactcagagtcatgacaagggggtgtgatataacgaatgaaataaaatttccaaactgtttttagttaacaatttaacttgttccaattgctaaaggggcatatttaaaaggtaaataagtaaaaagccgtgtactttttaagattaaagaaagtacaaaggatgtcaattttttaagttatcatgttaagaaaacatgatggaatcagagcattgagaaaatgcttactaattattactaattaattattactaattattaagatggcttcatccccaaatggtctaagaggacattcatggataagcatttgcgtctagataaatatttttacaaaatgtgctctcaaagtcnctactggagtcccgtcagcttgagtcacgcccttttcgagtcagactagccgagcagagctccagggttgcagaaggcgtgcacaggtcacgaaggaatggctgttcaccccccganggattcctgttcagtcngatcacttgatctccatcgaggggctgctctgtaaactcccctgtgcangacanngtcacanngagtccggtctggtcagctttagcctcgggcagttttacgcanatagctctcaattccntggtgacagagcatatcactgntcgcagagtatatcacccatccacanagcaggtcgccggtcgcagagtaatcacgagtcacaagatatcaccatccctctgcgattctggctcaggcaatccctaaggatctataattctac

SEQ ID NO: 81689 - DNA, 1486 bp, Homo Sapiens
  misc_feature (1087)..(1087): n is a, c, g, or t
  misc_feature (1097)..(1097): n is a, c, g, or t
  misc_feature (1139)..(1139): n is a, c, g, or t
  misc_feature (1147)..(1147): n is a, c, g, or t
  misc_feature (1174)..(1174): n is a, c, g, or t
  misc_feature (1185)..(1185): n is a, c, g, or t
  misc_feature (1192)..(1192): n is a, c, g, or t
  misc_feature (1207)..(1207): n is a, c, g, or t
  misc_feature (1214)..(1214): n is a, c, g, or t
  misc_feature (1288)..(1288): n is a, c, g, or t
  misc_feature (1390)..(1390): n is a, c, g, or t
  misc_feature (1428)..(1428): n is a, c, g, or t
ttttttctttttacacagaatatatttaattccatcatataagctaggaacaatgttaaccaacagaaaatgtgatcacgagctacatacaatagatcaaatgaagcacacatccatgaaaaaatcatgccaattaaatatactctgcatttccattaatattagtatgctattctttgattttttttgctgataagcagtcaaaacatttaaactcaaaattgacaaatcaactagcttgctttttgtcatttggaagactaccattattcaaatttattatgtaatacactcatccagataatgaaacatctgcgaaaagaagtgtgggaatcacctcatctgtgcataaaatggctattatacatgaatgcagacgtttgaagttagaaaggaatataactcaaatagcaaaaggtcctaattacagagtttacaaataagcagttttattttcaaaagtacatagtaagtccagactgggctattgccaaagaactaatctttagtctacttcaacatgttacatggtattcctgactctacagactatcagcatctgtggaggttagctcctaaaggtcccaaagaacaggaaacatgcaggaataaaggactcctcatgaagagcaggtgggagcgagtgggcaggcctgtatcttctcagcaaagtaaggattgagtatagagagctgtttgtcttaactgggcttccctgaagaatctgagccaaactggaagaaaccagcctcatttccagtgttgagatgttagctgtacagtggctgtacaactgcagagtttatttatagaattagaaataattttttaaaattttaaaaggttttgtgtaatcattaaccagagatgatattcacaaattctggtaaaaatttgactctccaactatcaccatatcaacaggaaacagggccatgccaccagggaggactgtctcagctgccatttagggagttgacccctttgctctctcgagaccagttcctgaaaggagggcctgttttgtacagatgtggccatggagctcatggggcccttgtatcacttataaaaatacatatctttnggcaggcganacgttcattctgatttcactaattttcatgtatccatttcanaggcctantacatacatagtaatttagttttctangtgcatatttngatctangggtgctacagctangagacangatgaatagagctactgtcaggcatcctactttacatggctattttttctgttagtcacatattacagcattantatattttttgagctttgtgaactatccctgtgatgctctccactcagggatacatacataggtgtgtctgaatatcattttctgaatgtcaaggcactccncacatctactctgcgattctggcccaggcaatcctaanagatcgataatcgtacagtcaacgtcctgttgaatgtatcgtcaatccaaacataacg

SEQ ID NO: 81690 - DNA, 1176 bp, Homo Sapiens
  misc_feature (824)..(824): n is a, c, g, or t
  misc_feature (864)..(865): n is a, c, g, or t
  misc_feature (869)..(1041): n is a, c, g, or t
  misc_feature (1081)..(1081): n is a, c, g, or t
tggttttgttctagaattgaaagtgaaaaattctgtttcagcatgttctctgcacctccaaattttcttggctattaccagtagttccttatacgcaaacatatgagaaatctctgaagagcaaattcagtttcgaaaaacagctaatgatatcgaagaaaagtaggcactggtggatactttctagaagacagtattaatacagcaatactttaggaataatgatgaatctgtttaaaggcaaaacatcactaacctaatcagatcacttagagaaataagtgattttctctgtcttatcctgagatcatatagccatttaacctatcttcaaacaaacaaaaatttttaaacattttctatcctttaagaaaatcttctttgcttggctaaatgacaatgttcaagaaatgcctgccacagaagcataaaaaatccttggcaacattccagaagaaattcaccctgcataatgtgttccagcaaacgctcaatagctttctggtgaacctgctggctcagtgtacacttgaacaggatcttcgactggctccttcatcctggtctcctctctctctccaaaggttaaccatgatcatgaattcaatgtgttttcttccagagcccactagtaagaggagttgtaacaagaaccagttctgcatactccaagcccagggctctttctgttgcattctaatgctccagcataatgtgcatattttccggtgcctgtgatactagcaacatcagactcattaacatggccgatatcctgtgagctgaaagaaggcactgatagcatcatggaatgcagcccttanacacacctgagaatcctcgtgccgaattccttggctcgannggcnnnnnnnnnnnnnnnnnnnnnnnnnnnnnnnnnnnnnnnnnnnnnnnnnnnnnnnnnnnnnnnnnnnnnnnnnnnnnnnnnnnnnnnnnnnnnnnnnnnnnnnnnnnnnnnnnnnnnnnnnnnnnnnnnnnnnnnnnnnnnnnnnnnnnnnnnnnnnnnnnnnnnnnnnnnnnaactgtcgtgcagctgcattatgatcggcacgcgcggganaggcgttgctatggcgtcttccgctctcgtcatgaccgctggctcgtcgtcggtgcggaacgtacactcatcaaggggtaacggttcaaagacag

SEQ ID NO: 81691 - DNA, 998 bp, Homo Sapiens
attgtagcaaagtgggctttataggtccctgagggcaggcagcacggctggggcgcgggacgcggggcgctgggcgcgggtggctgcccctagggcctcgcgttctcaggctcctcgcgttcctccttggctgtccccggggaaggctcttgcgccgggtgcctgttgcctgtgcccgactgctccgtgacccggggcctggggctccccatcgtgggcgctgtccaggtcggggccgggcggccggggacgctgcggcaccaagggaggtggcgcaggcctgcgggcgcccggctggtctggggcatgcggcatgggtggcccggaggacttggcctggcgggtgggcaggggcggccagcggcggaggctgcacgagccccccaggtgcggccgcgggtcggcctcaccgttgtgcaggagcacgaagcggcgctgggacagcagaggcaacatcttctggccgcgcaggctcttccggaaggtctcgagcaccaggtccagggtctcgatgaccacacctgggatgacctccttcaggacctcgcagttggtgtgcagggctgggttagaattcatctccagcagccataccttgaagttgtcatcaatcaggaagtcacagccaatgaggtcaaagtaacccagcttgcagtccagcttgggcttggcggccagaaagcagtgggccatgatctgctgcatccgcttcttgagggtggtgaagacccagtccttggcgaggccccgggccttccagaacgtgtcactgatgtagcggttgaggtgttccatgctccacaccgtgtgctccttcagcagcatgtacagagggctcttcttctgcatgaactggttggtcaagtggccgccgaggtcgctggaatgggggtcgtaaaggctaagggtgaggcgagcatagccgtggccaaagaagatcatgtagggtgtggtgcaggcaatgagcaggtaggagcgcacgtcaaactttctcccgt

SEQ ID NO: 81692 - DNA, 903 bp, Homo Sapiens
  misc_feature (527)..(527): n is a, c, g, or t
  misc_feature (675)..(676): n is a, c, g, or t
  misc_feature (682)..(682): n is a, c, g, or t
  misc_feature (685)..(685): n is a, c, g, or t
  misc_feature (687)..(687): n is a, c, g, or t
  misc_feature (702)..(702): n is a, c, g, or t
  misc_feature (710)..(710): n is a, c, g, or t
  misc_feature (735)..(735): n is a, c, g, or t
gtgccctgttaattaatgacccttgttatcaattaagttcccctttgttgtcctgccttgcttagatcagataacagaaaaaccatgactattacaccctttgtaaaaaatgttaaatgtgcccttctcatagagaaacattgcctataagcaacttgctgtaatgatgtgccaaccttttatgaaaaatgttgtaatcctgataaaaacacctctgtctttgcttatatacacgcaaagacagaggagtctaaatgtatgtatttatttagagacagggtctcactccattttctggacaggagtaaaatccactccacttgcacccccagggccgggcaggtgacgctttggcccctacctgggagacactagagctcacactggtgggcacctctggagctgactggggagattctcctgaatcctcggctcccgctgggtctggacaccctgtggctccccgatcacaggatggcttcacacctcttccgctgtcctgggcccttgcactgattcacatctangaaggggaccaggtcatggagcaaccctcagtccgtgtctcgactctagactcacagggtcagctgtaacattgtggctgtgtgagtgtgggagggtgagggacgaccccaagagtgtcctgcaatttctattttgcaagaagctcanntctgangananagggacgagggtggnggagatcngtctctcctggtctcaaaggactgnatcaatcaccagaacatactgtctggactgtccgatcaaggccacagtcctgcaggaggaggatccacaatacactctctaggaaagggcaagagtgtggacctccgcgatcttggtcagggcatctaaaggagcggtatctacacgcaacgtctgtggatgttcgcc

SEQ ID NO: 81693 - DNA, 1052 bp, Homo Sapiens
  misc_feature (483)..(913): n is a, c, g, or t
  misc_feature (972)..(972): n is a, c, g, or t
  misc_feature (983)..(983): n is a, c, g, or t
ttttttaaagcctttatcggtatgaaaggttgaatgctctaggtttgagcactgctttctcggcttgctcttctggtgcagtataggcacacctagagggccacgtcagtctttgcgatcaccaaatctggttctgagaaataggcactggcaatttacacatgccttgctgtgtaatctcactatatttgctcaggcaaagtgggagaagcagccttaggttttcattctagagatgccggctttcccacctgatcggcttagagttcacgattgactgttttgggcttcatttcaccctctacataacaagcgggtggactagatgccttagcaagggtccgtgttgtgtggtgtctccagccacgcactcagctcaatcttagcacagttaaaaaatgcctttctagcaagttatctgcccagtgcctgaaaagtatcatttcttgtgttcaataaaaagcccctcgtgccgaattcttnnnnnnnnnnnnnnnnnnnnnnnnnnnnnnnnnnnnnnnnnnnnnnnnnnnnnnnnnnnnnnnnnnnnnnnnnnnnnnnnnnnnnnnnnnnnnnnnnnnnnnnnnnnnnnnnnnnnnnnnnnnnnnnnnnnnnnnnnnnnnnnnnnnnnnnnnnnnnnnnnnnnnnnnnnnnnnnnnnnnnnnnnnnnnnnnnnnnnnnnnnnnnnnnnnnnnnnnnnnnnnnnnnnnnnnnnnnnnnnnnnnnnnnnnnnnnnnnnnnnnnnnnnnnnnnnnnnnnnnnnnnnnnnnnnnnnnnnnnnnnnnnnnnnnnnnnnnnnnnnnnnnnnnnnnnnnnnnnnnnnnnnnnnnnnnnnnnnnnnnnnnnnnnnnnnnnnnnnnnnnnnnnnnnnnnnnnnnnnnnnnnnnnnnnnnnnnnnnnnnnnnnnnnnnnnggcgcgtgctggcgttttccatagtccgcccctgacagatcacaaatgacctcaatcanaggtgcgaccngacagacatagatacaggttccccgggactcctctggtctccgttcgactgcgctacggtactgtcgct

SEQ ID NO: 81694 - DNA, 1053 bp, Homo Sapiens
  misc_feature (636)..(636): n is a, c, g, or t
  misc_feature (659)..(659): n is a, c, g, or t
  misc_feature (679)..(679): n is a, c, g, or t
  misc_feature (694)..(694): n is a, c, g, or t
  misc_feature (714)..(714): n is a, c, g, or t
  misc_feature (730)..(730): n is a, c, g, or t
  misc_feature (741)..(741): n is a, c, g, or t
  misc_feature (760)..(760): n is a, c, g, or t
  misc_feature (793)..(793): n is a, c, g, or t
  misc_feature (849)..(849): n is a, c, g, or t
  misc_feature (854)..(854): n is a, c, g, or t
  misc_feature (872)..(872): n is a, c, g, or t
  misc_feature (895)..(895): n is a, c, g, or t
  misc_feature (912)..(912): n is a, c, g, or t
  misc_feature (916)..(916): n is a, c, g, or t
  misc_feature (936)..(937): n is a, c, g, or t
  misc_feature (955)..(955): n is a, c, g, or t
  misc_feature (986)..(986): n is a, c, g, or t
  misc_feature (1029)..(1029): n is a, c, g, or t
  misc_feature (1031)..(1031): n is a, c, g, or t
gacagaggacctacagggaactttattctctcgcttctgtcttcactggggcactgaccctcgggaagaccaggttggctcctggcacagggatcctccatcttcttgggcacctgtggcattgccagcaggccagagggggtggctggcggtgttggctccagtctgacccaaggggccagccgggtcccccctctgcccatagtggggacaatggctgcttctccatgcttcatacgtaaggcttccagccctgcccagctggggaacacacgcagaatggcggtcacccagcaggctgggagctgccttctctccaaaagtctggctcctgaacaccctcctccttcctggggagggtttttgcccctctgaggttgtgcaggaaccagaagaacagtttctctgcttcaccatgtctgcaacctggggcttgcctagccccaaatttttctggcaggcgccaagctccagcacagtccacacagtggaaaccaaatgaaacgactttggcttgtggagggggaagaatgtgaaacaaaaacaaaagcaaaatcacccgcccacaagatacaacagaaaccccatccactacccatccccttcccatgtgaggccgaccacccaggcccccanacaacccctaaaataagacgcanaccaaaggcctgacatatangccccaaatcaacanacctctcccgaaacatgcanaggaactgcccgcccnagaatacccanaatagtctgtgcagattangaagagaccggtggctttcgccaccctctctgntaactctggtactgtgtcctccatggggtgcccacggagagcggctctcttctcanggcangacagtgacagttatganagatggtctttgctgggcactgngaactgctttttctcanctancagtgacactggctggccannagcaggctgagctcaganacacccccagcctgaagcagtggtggcttcnatgtaccactgtggaggctggcatgccaggaccagacattcanantcagctaggcatacaggatctg

SEQ ID NO: 81695 - DNA, 1909 bp, Homo Sapiens
  misc_feature (168)..(189): n is a, c, g, or t
  misc_feature (1005)..(1022): n is a, c, g, or t
  misc_feature (1051)..(1051): n is a, c, g, or t
  misc_feature (1058)..(1102): n is a, c, g, or t
  misc_feature (1179)..(1242): n is a, c, g, or t
  misc_feature (1259)..(1267): n is a, c, g, or t
  misc_feature (1275)..(1326): n is a, c, g, or t
  misc_feature (1350)..(1361): n is a, c, g, or t
  misc_feature (1367)..(1369): n is a, c, g, or t
  misc_feature (1382)..(1385): n is a, c, g, or t
  misc_feature (1392)..(1426): n is a, c, g, or t
  misc_feature (1490)..(1491): n is a, c, g, or t
  misc_feature (1494)..(1494): n is a, c, g, or t
  misc_feature (1502)..(1510): n is a, c, g, or t
  misc_feature (1517)..(1517): n is a, c, g, or t
  misc_feature (1521)..(1521): n is a, c, g, or t
  misc_feature (1554)..(1554): n is a, c, g, or t
  misc_feature (1561)..(1561): n is a, c, g, or t
  misc_feature (1600)..(1600): n is a, c, g, or t
  misc_feature (1644)..(1644): n is a, c, g, or t
  misc_feature (1730)..(1730): n is a, c, g, or t
  misc_feature (1820)..(1820): n is a, c, g, or t
  misc_feature (1890)..(1890): n is a, c, g, or t
cctactggtatttaaaatgtactgaggcacaacaagtattatactggaagacttgccaaactggcaaagctttaagttcatcagcattctatgtggttcagagctgtgatttttgcaaagtattttaccaacctcctcgatggctttgataaaggttagatttgatgnnnnnnnnnnnnnnnnnnnnnncttactccactaaactataaagaaaataattacttagaaactccattttaaataatcatttcctagaaattcttaaatatatacagaattttaaagaaaacatttcatctgatttagttagcatccacatatcattgaggaattaaagtgtgggacagtcattattaaaaaaaagagagaaaagccctctattagacattccacaatccatgttttaagcttatccaaaggtccaaatgtcagccattctgtatgttcatgttgatcatttgcgaacaagaaagcaggtttctaggtatcacttaggatgtgaactgcctctcaactttaaaccctgttagctttacttttttaagtccacaagtgatgaaactagtttctcagctaggcttgtactttcctcattatttctagtatttcaaatattctcaaacaaaagagttaccacttttctccatttattttcagttatggaaatgttccctctcttcaccactaagctccaaagcaaatgaaagacgatcacatgtcaggacagtagtaaaggcagcttataaatgggacataaatcagagatgtgttggtattttgagactcaagactgtccttttttaaaataaaaataaaaacattaccaggttcccaagccaatctggcttaaccaacagtgcactgaaatattagtgtttacctccaaggctagggagccaaggggaggaggagaattggaggaaggggagataatgggaagaggatggcgccttcctgagttggctagagggccaacctttgataacagtttgacgaaatcaatcnnnnnnnnnnnnnnnnnngagacagagtctcactctgtcacgccagngcatggnnnnnnnnnnnnnnnnnnnnnnnnnnnnnnnnnnnnnnnnnnnnncaggttcatggcattctcctggccccagcctctcttgagtagctggaactaaaaggggccccgccacccacggccannnnnnnnnnnnnnnnnnnnnnnnnnnnnnnnnnnnnnnnnnnnnnnnnnnnnnnnnnnnnnnntgcgagatttcttaatnnnnnnnnnggggggtnnnnnnnnnnnnnnnnnnnnnnnnnnnnnnnnnnnnnnnnnnnnnnnnnnnnttctgcctcctttttccccccctnnnnnnnnnnnnccagcnnncctacgaacgggnnnncgcgcannnnnnnnnnnnnnnnnnnnnnnnnnnnnnnnnnnttttaccaccggggggcggggaggtagtttaaacaacggccagcggggcggcgcccggcgcccnnccntcataggnnnnnnnnnggagaanaccncgccggaggcgcgtttttctgtgttttggatcnctgtgcnacgaggccaagggaagagatagtttatttttattattancctcccccacacccaccgcgtgcgggtggagagggggagaatgngcgtggctggcctccggctgctgggaaaaacagagaaaaacacgctcggtcgctgccgttcgtgcccgcgccaccccctgtctgtngtgggtttagggagaaggagagggaccgcttcccacccttatgtgtcctcgccctcaagaggagaaagggacataagcatcactgcctcncgcgccccccccactcgaccgaacacgccgcgcggccgacggacgccggcgcgcgggcagggcacgagcnaagacgagggcaaatctca

SEQ ID NO: 81696 - DNA, 1058 bp, Homo Sapiens
  misc_feature (14)..(14): n is a, c, g, or t
  misc_feature (90)..(91): n is a, c, g, or t
  misc_feature (93)..(93): n is a, c, g, or t
  misc_feature (96)..(96): n is a, c, g, or t
  misc_feature (103)..(103): n is a, c, g, or t
  misc_feature (112)..(112): n is a, c, g, or t
  misc_feature (130)..(131): n is a, c, g, or t
  misc_feature (146)..(146): n is a, c, g, or t
  misc_feature (156)..(156): n is a, c, g, or t
  misc_feature (188)..(188): n is a, c, g, or t
  misc_feature (233)..(233): n is a, c, g, or t
  misc_feature (297)..(297): n is a, c, g, or t
  misc_feature (310)..(310): n is a, c, g, or t
  misc_feature (665)..(723): n is a, c, g, or t
  misc_feature (812)..(824): n is a, c, g, or t
cagttacactttgntccgctctatgtgttggaatttgaccgatacaattcacacaggaacagcttgacatgatacgaatttatcgactcnntntanggattgnccctcgagnccaagaatcgcacgaggnnaagatggaaatctgncctctctganggaaaatacaatcagatgagtagtctgcttcnagtataatatgattacatttctataggaggatagtgaatgatacntacagaacgaatctttgcctactgtatcctcctttcatgatagctttagtaatagactaatccntgcatgtgagctntcaataatatgaactgcaactgtcataaatcaggatattattcccccaccccctttagcttgcctacatgtagcctgtgttgtacagcagaaagatgccaggcaatggttagctgagctttctgtggatatgcaaaagattttggaaataatcagggttattttaaaactatatgagcagtggaagaatttcgatgagagaaaagagatggcaaccattcttagtaagatgccaaaaccaaaaccacctccaaacagaaattccctgagtgattctccactagtggcagggcctgaagctgcaagatgatggtggacaagataaggcaataatcctattgccaaagttactggtnnnnnnnnnnnnnnnnnnnnnnnnnnnnnnnnnnnnnnnnnnnnnnnnnnnnnnnnnnntccaggaaattaccatatttcttgctgacttataaaggtttgctgtatttatatatgattttattatgcctttggacaacagttttggnnnnnnnnnnnnngaagaacacttcttgtttttcataaatagtaggaataggattttatatgtaagatttaattttataggaaatttgtttagaagaagctgtaatctctatgttgagtgatacctgtaataacaatgaaatcccataccctaatttaaagtttttgagtatatatggacactaacttccagaatgcttgttatatgtgagggcacaaagttatataagaataaaaacataaaacca

SEQ ID NO: 81697 - DNA, 1052 bp, Homo Sapiens
  misc_feature (58)..(58): n is a, c, g, or t
  misc_feature (122)..(122): n is a, c, g, or t
  misc_feature (228)..(228): n is a, c, g, or t
  misc_feature (262)..(262): n is a, c, g, or t
  misc_feature (277)..(277): n is a, c, g, or t
  misc_feature (299)..(299): n is a, c, g, or t
  misc_feature (334)..(334): n is a, c, g, or t
  misc_feature (408)..(408): n is a, c, g, or t
  misc_feature (690)..(713): n is a, c, g, or t
ccaggacagcttgactgatccgattaatcgattcatataggaattgccctcgagccangattcgcacgagagatttagtacctagccagtgacccagttagagaggctgaaaagggaggacntagaagggcttggaccacactgcagcgtgcttcttttatctggaagtgtccgtgtgcttggagagacagatgcaggtgcgttgggaaccccacagtccccccatangaatgtcgagtgcccaccagcatcatggaattangacacacactgcatntaaagagatcagcaaagtgccncagtggtgttgaaatccttgctgaccgcttgcgcntagtgacagtgctggaaaggccaaacacgaggggattgaattggtcatataggtagatttgcaggagttgtatntcatgcgggtcagaggatgaaggagcacaggggccagagccgtctctgccctctgccaggccctgtgcaagtgtcctcccccttaggggccagaaaatctggggccccccaaaaaggtgggtggtaggtgtggggagagctgctgaaacacccgactccctcccgggagaaccgcccactagtgagcctccgagctgcacggcagcgtctcaggaacacactgttctctttgttggggcagaaatatgttcgatgctgattatgcagaccgatgagtaggcnnnnnnnnnnnnnnnnnnnnnnnnaatctggagtcctcctgctcggcgggcacaattgcatgcaagcgatcccggaaaaagcacagaatgaatttttttgccatccattgttctggaggcattgcgaatgtctgacattccaggtgtagagttgtgtagctgactagacttcagacaacctcccggtctgagccaggagcactacaacctgtgaagaatgtgcacccggcctggctacacagcaacagcacccaatgggcccaggagccagcaggagacctttcttggaggaaggagtcttttttctttggtttgaaaatgcaggtgatgttttaaaattaaaattaaattaagatgcatgtt

SEQ ID NO: 81698 - DNA, 1540 bp, Homo Sapiens
gcggccgctgcggggcggccagctgcccttcacaaacatggcggccgaggggtgcggggagtggcggggtaaggatgggaagccgagcagacggccccagaacaagcggtcatgtgactgggaagatggccgtctttccttggcactccaggaataggaactacaaagctgaatttgcatcatgccgactggaggctgtaccattggagtttgggggactatcaccctctgaaacccataactgtcacagagtcaaagacaaagaaagtgaaccggaaaggaagcacttcttccacgtcctcctcctcctccagctccgtggtggacccgctgagcagcgtcctcgatgggactgaccccctctccatgtttgcagccactgctgaccccgcagccttggcagctgccatggacagctccagaaggaaacgtgatagagatgataactccgttgtaggatcggattttgagccttggaccaacaaacggggagaaatccttgcccggtacaccactaccgaaaagctgtctattaatctgtttatgggatctgaaaaaggcaaagctgggactgccacattggcaatgtcagagaaggtgcggacccggctggaggagctggatgactttgaggagggttcccaaaaggagctgttgaacttgactcagcaggattacgtgaaccgcatagaggagctcaaccaatcgctgaaggatgcctgggcctcagaccagaaagtgaaggctctaaaaatagtcatccagtgttcaaagcttctttcagacaccagtgttattcagttctacccaagcaaatttgtccttatcaccgacatacttgatacatttggaaagctcgtgtacgagcgcatcttttccatgtgtgtggatagccgcagcgtcttaccagatcacttttctccagagaatgcaaatgacacggccaaggaaacatgcctaaattggtttttcaagattgcctccatcagggaactcattccaagattttacgtggaggcatccatcctgaaatgtaacaaattcctctccaaaacgggaatttcagagtgcctgccccggttgacatgcatgatcagagggatcggagacccactagtgtcggtgtatgcccgtgcctacctgtgccgggctctgctgaccgagatgatggaaaggtgtaagaaactaggaaacaatgccttgctgttgaattctgtgatgtctgccttccgggctgagttcatcgccacaaggtctatggatttcattggcatgattaaagagtgtgatgaatctggtttccccaagcatcttctttttcgatcactgggatttaaacttggccttggctgatcctcctgagagtgaccgacttcagatttctcaacgaagctggaaagtcatcactaaagctgaagaaccacaggactacatttatttgtgccgaagtgtgggtgggaattcaccctggagcatttcacgaacgagaagggaatccggtgggggatggttcagcctgatccgaatccggttggaaatc

SEQ ID NO: 81699 - DNA, 1164 bp, Homo Sapiens
  misc_feature (66)..(66): n is a, c, g, or t
  misc_feature (93)..(94): n is a, c, g, or t
gaaaaaaaagccatccaggcttggggagagggcactgggttgggcccaaggcccacttgacccagnaatgcaggtagagattgagacgtgtgnnaagatgcccgccagggagggggatggtgatgaagcagtaggcaacacaggcccgggacaaatgcagctgtctttctggaatgattccctttcattacttttcttgtctccattgccaaccggttcacactatgaatcaactgcacaagaacaggctccagattgcaaaacatcgacctggactcaacataaaaactcagctgttgttcaaaatcacggccaaaggaaaccatttttataaatccattaatcaaatatgacagcattcttttctcatcctcaagagtgagtgcattcacagagtcatgcatggtcttgcaaacatgcaagagggcattcaagatgaccgggtccttggtgggctcttgttgatgcttgataaaggcgtccatgatgcatttgcaaacctccacccgcacactctctttttggaacatgtccagaaacggcagaaatttttccactgagaaaagaactgagaagtcatggaagtgggcaataactttcttaattattaactgaagctgggggtaggaatcttcaaatgcacgatctggagtcatgtgcttgatgacatctgccaaaacggtattcacctctcgtttcgtgaaatgcttgcaggtgtattccacccacacttcggcacaattaatgtagtcctgtgggttcttcagcttagtgatgactttccaagcttcgttgagaatctgaagtcggtcactctcaggaggatcagccaaggccaagtttaatcccagtgatcgaaaaagaagatgcttggggaaaccagattcatcacactctttaatcatgccaatgaaatccatagaccttgtggcgatgaactcagcccggaaggcagacatcacagaattcaacagcaaggcattgtttcctagtttcttacacctttccatcatctcggtcagcagagcctcgggggcatggtaggagatgcactggaagatccagtccatggcaggcgggtacaaggggaggtaagatgggagctccactccttggaccaccagctggttctggaccgtatccccctcgtgccgaattcgccac

SEQ ID NO: 81700 - DNA, 1241 bp, Homo Sapiens
  misc_feature (639)..(656): n is a, c, g, or t
  misc_feature (698)..(985): n is a, c, g, or t
  misc_feature (1087)..(1087): n is a, c, g, or t
ggggcagacacggagacagcgccggggcggagggtacgatggagaatttcacggcactgtttggggctcaggctgacccaccaccgcccccaaccgcactcggcttcggaccaggaaagcctccacccccgccaccgcctcctgcgggcgggggacccggcacggccccgcctcccaccgcggccacggctcctcctggcgcggacaagtcaggagctggctgtggccctttttacctcatgagggaactgccaggtagcacagagctgacaggcagcacgaatctgatcacacactacaacttggaacaagcctataataaattctgtgggaagaaggtgaaggagaagctaagtaacttcctgcctgacctgccagggatgattgatctgcctggttcccatgataacagcagcctccgctctctcattgagaagccccctattctcagtagctctttcaatcctatcacagggaccatgctggccggcttccgcctccacactggcccgttgccggagcagtgtcgtctgatgcatattcagcctcccaagaagaagaataagcacaagcacaaacagagccgtacccaggatcctgtccccccagaaacaccatctgattcagatcacaagaagnnnnnnnnnnnnnnnnnngcctacagccgcgggcgctccaaccctcgtgccgaattcttnnnnnnnnnnnnnnnnnnnnnnnnnnnnnnnnnnnnnnnnnnnnnnnnnnnnnnnnnnnnnnnnnnnnnnnnnnnnnnnnnnnnnnnnnnnnnnnnnnnnnnnnnnnnnnnnnnnnnnnnnnnnnnnnnnnnnnnnnnnnnnnnnnnnnnnnnnnnnnnnnnnnnnnnnnnnnnnnnnnnnnnnnnnnnnnnnnnnnnnnnnnnnnnnnnnnnnnnnnnnnnnnnnnnnnnnnnnnnnnnnnnnnnnnnnnnnnnnnnnnnnnnnnnnnnnnnnnnnnnnnnnnnnnntgaccgctgcctcggtcttcggctgcgggagcggatcactcaccaaggcggtatacgtatcacagaacagggataccaggaagacatgtacacaggcaccanagcagaacctaaaggccgtctgggtttcatagccgccccgagacacaaaattagccagtaaggtggactcaagacatagatcagttcccggacccccgggtctgttactgcgtacgaacgccctcccttggaggggctcacaccgtgacatcgg

SEQ ID NO: 81701 - DNA, 979 bp, Homo Sapiens
  misc_feature (126)..(126): n is a, c, g, or t
  misc_feature (212)..(212): n is a, c, g, or t
  misc_feature (430)..(430): n is a, c, g, or t
ccctccggtcatctacatcaacgtcgatgacgcgtgccaccatattgtaccatctgccccgtacatttctcgctgtttgttgatgtacgaacattcaccagacagttactgtacgattatagatcnttaggattgcctcggcccagatcgcacgagatctaatccatgtacataagacacccggatacgtgccatctaaggagtaatcgagnagcgtcctgcaatgcgctgcagtcggatgagaaggaaatcagtcatgttcttaattttttgataaggaatctttctcacccaagatttgcccctgttttaaccaatgctgctgaaataattattgatatatatctgcctgtaattggccagtcccctgtagttgataaaaagtttttactactcaaaggacttgtagaaaaagagattgattaccaanagagaattgttagaaaccttggggatgatggatatgctttttcccaccatgagaaggaaggaaggcacttctgtgttggaacacacatctgatggatttccagagaataagaagatagaatcatagtgtctgctaaataagacatataagaactctgaagttggaatagatttgactgtattaaatgttggcgagagactctctttgatacattaaaaaaactgtttgcagaagcagttctgtggaagagactggaataattatggccggaaaacaagtacccgttttaagtaagacatggttttccatgtaatattttgaattatagcatcttcacctagaagatctcaattgtcttagtcacagagtaggtttatctgggatggatattaattttaatacaggagtgttctgtatcaacatttgggttggtattcagatgggaattcaaatatgaatcctctctggagagggtccaactgggaatcctgctaaaggagcaaagccttgtattacctctggaagacaacaaaaacaattggcaacaac

SEQ ID NO: 81702 - DNA, 467 bp, Homo Sapiens
taaagtgctgtgagattggggtttagaacattttattttcaggctttatggcctattttccattgtgtcaagtgcaaaactaccctggcccaaaggaagggcagagaacataattacatcttaggccacatttcattctttgcagctttgctaatcccagttgctcaagtttctttacctcaacctgaaggaatgaagcattattacattttgtgaatggtgttcagcctataagacgaagtctcacaagacctataggaaagtttaccatctgccttaaatattaaaatatccatctgttattcacattaatacacagaatgaaaatagaggtctaggaattatcaaaggtactgcaaaaatactgtatagaacttatttgtaaatagcacatacattgatagatggggtgtgggaccaacaaaccaaattaaaagaaattgtttttctcctcgtgccgaattctt

SEQ ID NO: 81703 - DNA, 1008 bp, Homo Sapiens
  misc_feature (281)..(281): n is a, c, g, or t
cagatgcctggccagatgccgagcatgagatctttgtcacgagagaccccacagagcgtgtcgtgccacagattacgcatgctgtgtacatgtagtgctgcagtgtgacttgaggaaaaagattgcccgatataacacatctgagagcagtagcatccgatctactgtgagatatagtctcatctcattctgttatctcccaaaagattgagccccacagatccctacgtgtgggatatgctgagagatgtatcgacatgaccactgccaaaacatcctcnttctaatcaattcagagattctttaagtacgtggagtgtcaacatttgatattgcttcagatgcctttgctactttcaaggatgactaacccagacataaagtgttggtagcagacttcttagaacaaaattacgacactatttttgaagactatgagaaattgcttcagtctgagaattatgttactaagagacagtctttaaagctgctaggggagctgatcctggaccgtcacaactttgccatcatgacaaagtatatcagcaagccggagaacctgaaactcatgatgaacctccttcgggataaaagtcccaacatccagtttgaagcctttcatgtttttaaggtgtttgtggccagtcctcacaaaacacagcctattgtggagatcctgttaaaaaatcagcccaaactcattgagtttctgagcagcttccaaaaagaaaggacggatgatgagcagttcgctgacgagaagaactacttgattaaacagatccgagacttgaagaaaacggccccttgaagagctccccggcccctgtcacagtcagtcgtctcatttgtccagtttgtacagtgtgtcatttcagaaagtcatcattcttgggaagactttggaggtgcctattttttctgctgtaattgttctgggtagatggagtataaacatttgaatggaaaaaaattaacctagaataatatattcattttagtcaaaaa

SEQ ID NO: 81704 - DNA, 997 bp, Homo Sapiens
  misc_feature (215)..(215): n is a, c, g, or t
  misc_feature (224)..(224): n is a, c, g, or t
cggtgcgatctatcatgcagcagtccgatgagcgcgtgcccagcatattgatgtcatctagccccagctacatttgtccgtgtatgttgtgattgagcgatacattacacaggacgttgacatgtacgattatacgatcattagggattgcctcgagccagaatcggcacgagccatctgggtgcgacgctctgccattctcagcaagtcacagncaccatgcntctcagctgcccactggctgagaggaaccagagccggctgaaagcggactgtctgactcggagcctcagcccgcaagaaaacctctcaggcttctccccaaggaagaagcctcgccatcacggccgaattggacgccctccgaagtatcgaaagattccgcaggaagatttccagaccctcacgcccgatgtcgtgcaccagtccctcttcatgtcagccctgtcggcccaccctgaccgctcactctcagtgtgctgggagcagcactgcaagctcctgccaggagtagcgggcatctcagcctcgacagtcgccaagtggaccatcgatgaggtcttcggctttgttcagaccctgacaggttgtgaggaccaagcacgcctcttcaaagacgaggtaaggtgcaagtgcagagtgggagacagagccggggtcactgtccttaagacggcaggaagcaggtgccctccccagcgtcacttctgctaaggagggacccgtgttgccccaccaggcaagaatagtcagagtgacccatgtatctgggaagactctagtctggactgtggcccagcttggggaccttgtgtgctcagatcatcttcaggaaggaaaaggcatcctggagacaggagtccattcactcctctgctctctacccactcatttgcttgccaaacttagctttgccagtgatagtcaatattaaagtgtacttttttcccctttaatccaatatagttgataattaaagtgtattttgaatgacaaa

SEQ ID NO: 81705 - DNA, 1153 bp, Homo Sapiens
  misc_feature (83)..(117): n is a, c, g, or t
aatagtatcgactcactatagggcgctaggtcttttttaccgaacgatcgagcgcacgagtcagtgagcgaggaagcggccgnnnnnnnnnnnnnnnnnnnnnnnnnnnnnnnnnnncagtcgacggtaccggacatatgcccgggaattcggccattacggccggggaccatggcgacgcgcggtggggctggggtggcaatggcggtttggtccctcttatccgcccgggccgtgaccgcgttccttctgttgttcctccctcgcttcttacaggcccagaccttctctttccctttccagcagccggagaagtgcgacaacaaacagttactttggttttctccgccctctcgtgtgtccttgtggagctaaccagaggcaagatgcccgaggaacttcatgtgtatgtctaccaggatttcagatgatctctaataatggaggacctgctattatttgtaaaaagtgcccagaaaacatggtgcgcataatttattttaaaataacttacctgtaaaaagtagtaagttaaatatctttatttttcaaaatataatttaatgtttaatgtttccccacagacttaaaaattactatgctaattttatttttactagagtaagttttgggagatcagcgaaatttcatgcaaacttgggagcaacacaacagaacatgtatttcttttaaaatctgaaatccaaaaaccacaaagctgtaaaaatttaagtttctgtctttactcgtagaataactcggttatgaagaaaattagatgaataaggcatatatagagcagtctgggatgtgtgcaatttgggatgtgtatattcttttgactgatgcaagtggagttgtcttagacctaccatgtcaacagtttatatgattattgatgttcataatgatctaaggtgtaattatttcatgaaataccaattgcattaatagattaaataatgtctgtttctgttttgttagtaatttcattgtatcgtaatttaaaaaaaattagtaaatagttactatatataattctcaacataaatatatttttcaatcatgttggataattaaaagtctgtgtaacagttgtgacatttacagtaatgtttcttctcattgtcatataaaaaatattaattctggg

SEQ ID NO: 81706 - DNA, 1260 bp, Homo Sapiens
  misc_feature (130)..(362): n is a, c, g, or t
  misc_feature (435)..(454): n is a, c, g, or t
  misc_feature (481)..(1063): n is a, c, g, or t
gttcaagagacacttcctgaagattaaagggaagctgattgatattgtgagcagccagaaggtttggcttcctgccacatgatcggaccatcggctctggggaatcctgatggagtttcactcttgtctnnnnnnnnnnnnnnnnnnnnnnnnnnnnnnnnnnnnnnnnnnnnnnnnnnnnnnnnnnnnnnnnnnnnnnnnnnnnnnnnnnnnnnnnnnnnnnnnnnnnnnnnnnnnnnnnnnnnnnnnnnnnnnnnnnnnnnnnnnnnnnnnnnnnnnnnnnnnnnnnnnnnnnnnnnnnnnnnnnnnnnnnnnnnnnnnnnnnnnnnnnnnnnnnnnnnnnnnnnnnnnnnnnnnnnnnnttaggtgtgagccacctcgcctggcaagggattctgttcttagtccttgaaaaaataaagttctgaatcttcnnnnnnnnnnnnnnnnnnnncctgagcagcctcgtgccgaattcttnnnnnnnnnnnnnnnnnnnnnnnnnnnnnnnnnnnnnnnnnnnnnnnnnnnnnnnnnnnnnnnnnnnnnnnnnnnnnnnnnnnnnnnnnnnnnnnnnnnnnnnnnnnnnnnnnnnnnnnnnnnnnnnnnnnnnnnnnnnnnnnnnnnnnnnnnnnnnnnnnnnnnnnnnnnnnnnnnnnnnnnnnnnnnnnnnnnnnnnnnnnnnnnnnnnnnnnnnnnnnnnnnnnnnnnnnnnnnnnnnnnnnnnnnnnnnnnnnnnnnnnnnnnnnnnnnnnnnnnnnnnnnnnnnnnnnnnnnnnnnnnnnnnnnnnnnnnnnnnnnnnnnnnnnnnnnnnnnnnnnnnnnnnnnnnnnnnnnnnnnnnnnnnnnnnnnnnnnnnnnnnnnnnnnnnnnnnnnnnnnnnnnnnnnnnnnnnnnnnnnnnnnnnnnnnnnnnnnnnnnnnnnnnnnnnnnnnnnnnnnnnnnnnnnnnnnnnnnnnnnnnnnnnnnnnnnnnnnnnnnnnnnnnnnnnnnnnnnnnnnnnnnnnnnnnnnnnnnnnnnnnnnnnnnnnnnnnnnnnnnnnnnnnnnnnnnnnnnnnnnnnctgcgctacggaactgtccgctttctcctcgggaagctgcgcttccaagtcaccgtagactcattcgtgtagtcttcgtccagctggcgttgagaccccgtcagcgacgtggctacggtatacgtctatcaccgtaaacatacgcacgacacatgtacagtacaacagattggggccaatctgaagggcacacgaca

SEQ ID NO: 81707 - DNA, 976 bp, Homo Sapiens
  misc_feature (141)..(141): n is a, c, g, or t
  misc_feature (721)..(820): n is a, c, g, or t
  misc_feature (829)..(889): n is a, c, g, or t
  misc_feature (894)..(904): n is a, c, g, or t
tttaacaaattggatgcaggcaaatctgatcaatgcctgaaagagactgtgagaagtggggctatcaatgcaagaaaagttgtatgaatcaggtttactatatcaacaactgataggagaaacaataaactcattttcaanagtgaatttgttagaaatggatgataaaatattggttgacttccggctttctaagggtgatggattggagttcaagagacacttcctgaagattaaagggaagctgattgatattgtgagcagccagaaggtttggcttcctgccacatgatcggaccatcggctctggggaatcctggtgaatatagtgctgctatgttgacattattcttcctagagaagattatcctgtcctgcaaactgcaaatagtagttcctgaagtgttcacttccctgtttatccaaacatcttccaatttattttgtttgttcggcatacaaataatacctatatcttaattgtaagcaaaactttggggaaaggatgaatagaattcatttgattatttcttcatgtgtgtttagtatctgaatttgaaactcatctggtggaaaccaagtttcaggggacatgagttttccagcttttatacacacgtatctcatttttatcaaaacattttgtttaattcaaaaagtacatatttcttccatgttgatttaattctaagatgaaccaataaagacataattcttgtgnnnnnnnnnnnnnnnnnnnnnnnnnnnnnnnnnnnnnnnnnnnnnnnnnnnnnnnnnnnnnnnnnnnnnnnnnnnnnnnnnnnnnnnnnnnnnnnnnnnntttggcggnnnnnnnnnnnnnnnnnnnnnnnnnnnnnnnnnnnnnnnnnnnnnnnnnnnnnnnnnnnnngaacnnnnnnnnnnnctgtgccaaaaaggtttttttccaagagaaaccccggcgccagagaaaaaggggggtgggttttcccccccc

SEQ ID NO: 81708 - DNA, 926 bp, Homo Sapiens
  misc_feature (97)..(97): n is a, c, g, or t
  misc_feature (120)..(120): n is a, c, g, or t
  misc_feature (122)..(122): n is a, c, g, or t
  misc_feature (156)..(156): n is a, c, g, or t
  misc_feature (178)..(178): n is a, c, g, or t
  misc_feature (193)..(193): n is a, c, g, or t
  misc_feature (200)..(200): n is a, c, g, or t
  misc_feature (228)..(228): n is a, c, g, or t
  misc_feature (234)..(234): n is a, c, g, or t
  misc_feature (236)..(236): n is a, c, g, or t
  misc_feature (286)..(286): n is a, c, g, or t
  misc_feature (348)..(574): n is a, c, g, or t
  misc_feature (762)..(774): n is a, c, g, or t
ttccgatgaaggcatggcaaccatattgatgtcattcttgcccccgcttcatttgtccgttgttttgttgatttggcgatacattccacaggacgtntgactgatcgaattatcgactcntntggatttgcctggagcaagaatcgcacgagtgtntgggatcacctggtcatcctcntgctttgttggcatntcaccantcccatgcttgaatacactgtggcttgntgaccntncatccgaaaaccccaaatcgtatccagatcagatataacagtagtatgcntagagatgtccaaaggattgcattgattttcacttaattctcacagcagacccatgaggtgnnnnnnnnnnnnnnnnnnnnnnnnnnnnnnnnnnnnnnnnnnnnnnnnnnnnnnnnnnnnnnnnnnnnnnnnnnnnnnnnnnnnnnnnnnnnnnnnnnnnnnnnnnnnnnnnnnnnnnnnnnnnnnnnnnnnnnnnnnnnnnnnnnnnnnnnnnnnnnnnnnnnnnnnnnnnnnnnnnnnnnnnnnnnnnnnnnnnnnnnnnnnnnnnnnnnnnnnnnnnnnnnnnngaagttcacagaacccccataacccatccagctagccaggtagaaggcctccaggtccgacgttgcattccccagggtctgatgctgtctgcaatcttcatccctagcagaagagctaaaatgccattgtgctggggaacaaaaactgagtaacacttttaggatgttaaaatttcaagtgtttacannnnnnnnnnnnnaactcttagctcattgctcactcccagcttttgctagtctccaatttctttccttagattaaatcaatcaagagccagcccctaatttaaaaggtttcctctccttttgtcatgtcttttaaataattttttggccaggcgcaggggctcat

SEQ ID NO: 81709 - DNA, 1980 bp, Homo Sapiens
  misc_feature (63)..(63): n is a, c, g, or t
  misc_feature (70)..(70): n is a, c, g, or t
  misc_feature (91)..(91): n is a, c, g, or t
  misc_feature (211)..(211): n is a, c, g, or t
  misc_feature (249)..(249): n is a, c, g, or t
  misc_feature (274)..(274): n is a, c, g, or t
  misc_feature (310)..(310): n is a, c, g, or t
  misc_feature (326)..(326): n is a, c, g, or t
  misc_feature (373)..(373): n is a, c, g, or t
  misc_feature (1675)..(1675): n is a, c, g, or t
  misc_feature (1848)..(1848): n is a, c, g, or t
ctcctgataccttgcggatccagacagacatgcctgagcctcgcctatcacacatccagaatntgccctntaaggacatagtgagttcttngagatcgagaaactaaaatgaggattagatccagccagctgcaaaaatgagaccagcctgcactgtgagcctcagaagggcaccagacctgcaaagaccagcaacagaggcagctcaacnccacacagagaacaaagcaagtgcccccagagcagagnagaaggcggctctacctcatgaccnggtccagaccaggctgaagtgagcaggtgagctgcntgatgaaagaagagangaaggtcctgcgctcccctcacaccgagccccaaaatcaggtgcggnacaaaggcaaagtgaagcccgtccatcccaaaaagccaaagccacagataaaccagtggaagcaggagaagcagcaattatcgtccgagcaggtatctaggaaaaaagctaagggaaataagacggaaacccgcttcaaccagctggtcgaacaatataagcagaaattattgggaccttctaaaggagcacctcttgcaaagaggagcaaatggtttgatagttgatgatggcagcaggctgggtaagaagctgggttgtgtactttctggtgacactcctgggctcctccccatcccccgtgtctctcactgagggaaagaaaatccccaagggcactgccactgtgctcggaggtgccctggactgtgtacatctgaactttggtccatcctttgatgtgtggttcgttagccacaaagagaaatatctgaaagtcaacatgatgcttcttgcatattatccagattattgtatgaagttgtgtctataattattaccaatttttattctttatttctcaaatggaaacacctgaaaaagcattctggagtgctgaatttttaagatgtatattttgttaagcatattctctaaatgagatattgtgtggctttttagtaacaacgtcatttctaatacaaaaaaaaccacgaattcgccccatacaaccccattaactgcccttcgctgtccctatatcgccttcatcctcctcctcatatactacacttcccgacacactaaccctttaaccgctcgtctcttcctcctcccataacccgttgcccaccttatccattttacaccgctcacacaccttgtcctttttcccctcacgctacgctctcctagccaacacaacctcctactccttactggtctgtcaccatatcccccactacttcgccctttgaacgtctactcccccttgttttgttttgttttccccccttatacccttcttcccaatacctggttcccccccatttgtcgctttccttcgcctacctcccgttcgctacgtcacctgacctctcccttccgccatttctctgttaccctcatttctttccatactatctttatttttttccctcctttattcgccattatgaccgtcactcatcttgtactttgtgtctcatgcacgaaccttgcgcactccgcacttctacaccctttctctacacaatgtatatccgctccgcccaccccccaccattttcctcatgtcttgtgctgtctcgcccacaaacatcaaccgcccctcgtgtgtgcctcccgcagtcctcccgcctntcatgattcgccgcgtcttcgctttctaccactcactttacctccgtcgccttgttctcgccattcccaatatgcccgcacacggtcttctcattctgcctgttcactcgtctctcgtgaccatccccacctccgctacacaccccatgttgttctcctatgttctatcagtntctacaccacgcacttctccactgattctctcacgcccagttacacctcgcatgtctgaccttgctagtcctcacgatccgccatagtcgattatcagaactatatttgcctatgatctcgtatatttgccc

SEQ ID NO: 81710 - DNA, 418 bp, Homo Sapiens
tggtgagcctcagaaggggcaaccagagcctgcaaaagaccagcaacagaaggcagctcaacaccacacagaggaacaaagcaaggtgcccccagagcagaagagaaaggcgggctctacctcatggaccgggttccagaccaaggctgaagtggagcaggtggagctgcctgatggaaagaagagaagaaaggtcctggcgctcccctcacaccgaggccccaaaatcaggttgcgggacaaaggcaaagtgaagcccgtccatgccccaaagccaaagccacagataaaccagtggaagcaggagaagcagcagttatcgtccgagcaggtgagttctgcaggacatacagctttggtatggcatggttctgccaggtcgtagccatgtttgtaccttggttagttgagcaaaaaa

SEQ ID NO: 81711 - DNA, 1035 bp, Homo Sapiens
  misc_feature (157)..(247): n is a, c, g, or t
gaagcgagagcgccaatcgcaacgcctctcccgcgcgagccgatcataaatgcaagtgcacgacagatcccgactgaaagcggcagtgagcgcaacgcaataatgtgagtagtccatcagtagcaccaccagcatttacacttttgctcccggctcnnnnnnnnnnnnnnnnnnnnnnnnnnnnnnnnnnnnnnnnnnnnnnnnnnnnnnnnnnnnnnnnnnnnnnnnnnnnnnnnnnnnnnnnnnnatgcccctcgagaccaagaattcgtcacgaggaggacaaagcatcgggtggaggagcagggctctctcctccgcaccgcacagagtgagacggccctcagacactcatgattatcaccttctgcaaagaaaacaccagtgccgtggaggctgccttctcttgcttcagattcacagagactaaaaactcccaacatctatagtgacgaagttcttcggggaacaaaactgccgactggcgtggaccacatggcttccccactggttcaaacgtcacggagcaggttccccccgctagtcacggagaccagggggcagaatacagcacttcctggatgccgccttgtttcttacagaggaaggcatctacaaaaccgtgtgttgagtgccatgcctgacggtacagaacgatcgcgtcttcgagaaagaacagccaccctggaacggttgtcaaggcccagcacaacccacacgttccggcagtcggatacgcctcgaaaaagttcattgacacaaatggaatttgctgctcacacatggacaggtcaaagtattttgacaggttcacaatatgtgcctaaatcttttcagaggacaactttgactttcaagaggagattccaagtgacatcttgaaaccacctcaccagaaccattggagcacctgtggcctcggcacactgcttatcacttgaaaaatggaggaacaagtgttatatttatctgtgtgtctgacagtgtgagatgtcagaccgagagaaaagcaaacaaataaatcacttaatcttg

SEQ ID NO: 81712 - DNA, 1580 bp, Homo Sapiens
  misc_feature (58)..(58): n is a, c, g, or t
  misc_feature (92)..(92): n is a, c, g, or t
  misc_feature (134)..(134): n is a, c, g, or t
  misc_feature (312)..(312): n is a, c, g, or t
  misc_feature (321)..(321): n is a, c, g, or t
  misc_feature (337)..(337): n is a, c, g, or t
  misc_feature (386)..(394): n is a, c, g, or t
  misc_feature (401)..(401): n is a, c, g, or t
  misc_feature (807)..(818): n is a, c, g, or t
  misc_feature (1071)..(1082): n is a, c, g, or t
aaatataaaatgactaacgtcgtatgatacttgacatacaaatttgtagcaatcttcnttacaacccgactaaagaccaaaggttgcaggtntacatatctggataatcatcaactccagatctctgacagtcntttacaaattttagaaaactccttagcatttacaacaaatacaaagagtgcaattatgtcatggcctgtaaagttgactatgtaagtatagcaaacaaacatcgttccagttaatttcacccttacatagtaaacccacagtagattgattgcctagtgactcagaattatcccattntgtgtgtgntgatataaacagactntggtgaaactgggaagtcatcctctatcacagggaaaataacatttctnnnnnnnnnttttttntgaaaattaatttgatttaatctttgaagcttctatagaaggacaaattaccaagaggggaatgtttcctggaggtatttatgggtagatagtacagcataatggttgggagggctaagggtaagattagagccatactactggtctcaaatactactaactgtttgaaatttggcagtaagttaatctccccttgcctcagttttcttatctttaagatgaagctcataatgacttaacactatggctgctgtgagggtaaactaaaacataaaagaacttagaacacaggagtactgcatactgtttgctactattctttcaaggatatttttagtctagacaggagactagcttcagggatgtcgaaaggccttctcagtctgttcatgtaccagaacattcnnnnnnnnnnnngctacctcaaattcggtgggcaacgatagttaacactttcctagtttttagtttatttgactgcattcatacatatctgatcttcacgacaacactgtgacaaagggagaggcaagaatgataatcttcattttacagactgaggaactgccgacagacctgccatctgtccaggccaacataactaacaagtagtggagtccaagacctcagcaaaagttttgttcttttacttttgttagagtggagaagnnnnnnnnnnnnggtttacaatgattactgagaaatgaagaaataagccactgtttcttacaagtagatggtcccacatcttaaactttggggaagatatttaaaaatattttttaaatagctggctgctggagctgaaatgtaaaaagaagtacttctttcattctttaatttgctgtgctgataatacagccccagccttataaactgtttcatgctccactcctacacatcccctcaaactgcttaaaataattgactttaaaacactccagatatctgcaaagcccaataggctaggggaaggagaaaaaaggatactgtttgctatacagtaactatagcattaactgaccctgcactggccctgctaaaaagcagaaattactgactgaaccctaggtaaagacaaattgtgtaaagccgagatctgcacctgctgaatgctggaatccagtactggcatcaagatggtgtccggacgcgtggtcgacgatatcccgggaatcc

SEQ ID NO: 81713 - DNA, 998 bp, Homo Sapiens
  misc_feature (142)..(142): n is a, c, g, or t
  misc_feature (153)..(153): n is a, c, g, or t
  misc_feature (166)..(166): n is a, c, g, or t
  misc_feature (180)..(181): n is a, c, g, or t
  misc_feature (198)..(199): n is a, c, g, or t
  misc_feature (283)..(283): n is a, c, g, or t
ctgaggctgccagtcactactgattttgtatatgcaagctgcaaaagagcccagtgcaaacattcagaacctggtcactcattctccctcgaaaagacccgattattgagcatggaatgatgagttcagacatatgctgacntatatccgtangatgagacaatcntctgagttgaagannggcagaaagaattatanntatgtgtaaggagaagagaagctacagaaaaagcccacgagctgaagcgcagcttctcctctctcagaggaagcgggagctgcnagatgtcctggatgcccagatcgagatgctcagccccttcgaggcagtggccacacgcttcaaggagcaatacaggacattcgccacggccctggacactaccaggcacgagctgcccgtgaggtccatccacctggagggagatgggcagcagctcttagacgccctgcagcatgaactggtgaccactcagcgcctcctgggagaacttgatgttggtgattcggaagaaaatgtgcaggtgctggacttactgagcgaactcaaggacgtgacggcgaaaaaggaccttgagctccgaaggagctttgcccaggtgctggaactctccgcagaggcaagcaaagaggcagccttggcaaaccaggaagtctgggaagagacccagggcatggcgccccccagccggtggtatttcaatcaagacagtgcctgcagagaatctgggggagcacccaagaacacgcccctgtctgaggacgacaacccgggtgcctcgtcagcccccgctcaggccacgttcatcagcccaagcgaagatttttcttcaagcagccaggcagaagtcccgccctctctctctcgttcagggagggacttgtcatgactcatggttacattcaggatacttgagcactttatatactaccgtagcactgtagctattttttatgtgataatcttgtttgataaaaaagtaaacctgttttgcaaa

SEQ ID NO: 81714 - DNA, 997 bp, Homo Sapiens
  misc_feature (171)..(380): n is a, c, g, or t
  misc_feature (432)..(455): n is a, c, g, or t
  misc_feature (488)..(511): n is a, c, g, or t
accacaaggctttacgtctgctttgtgcttgccagttgtctggtatccctatcttgatacgtataccccttgggagtataccctccgcaccgacgacgagccggagtcatgacgggaagcgagagccccaatcgcaaccccttccccgcgcgtgccgatcataatacagtnnnnnnnnnnnnnnnnnnnnnnnnnnnnnnnnnnnnnnnnnnnnnnnnnnnnnnnnnnnnnnnnnnnnnnnnnnnnnnnnnnnnnnnnnnnnnnnnnnnnnnnnnnnnnnnnnnnnnnnnnnnnnnnnnnnnnnnnnnnnnnnnnnnnnnnnnnnnnnnnnnnnnnnnnnnnnnnnnnnnnnnnnnnnnnnnnnnnnnnnnnnnnnnnnnaagaattcggcacgaggccattttgatgttggagcgcccgcggctgtaggcnnnnnnnnnnnnnnnnnnnnnnnngagacagagcgagactccgacttcccatctttnnnnnnnnnnnnnnnnnnnnnnnngaagtgtaaagatgtgattatgtggcagggggtaagggttaaaaagaaaacaagaacaagttttcctctgcttagccagcttacttcaaggacagttataacactgaaaagtcgaggccaaaggaatgggctccagacagcctcctccggagcaaagttgaaaagaaaaattcctttactgtctctccttttctgaaccattaaatatgactgtttgccaatggttgtatttagtaagatttgtagactctgtttttcttttgacacagctgcaaggccaacagctgtgcaaagccacaagttatgctaagtcagcagttatgctatagattacatgacctgtgactgtatcattaactgcttttgttttgcttctgtaagtttgcctataaaaaccacactcagtctttgttcaatggtcagcttttcagatacaaatccactgagccggtgtacatctaaataaatcctcctgtttcccgtgtc

SEQ ID NO: 81715 - DNA, 1081 bp, Homo Sapiens
  misc_feature (85)..(119): n is a, c, g, or t
  misc_feature (932)..(952): n is a, c, g, or t
cacaggatgtataaatcactatagggcgctcccgcgttatagtcgaacgacgagcgcagcgagtcattgagcgaggaagcggcgnnnnnnnnnnnnnnnnnnnnnnnnnnnnnnnnnnncagtcgacggtaccggacatatgcccgggaattcggccattacggccgggaacctcaaattctatggcagtatccaatcctgcgtcaagcctgaatcccgggaccagacctaatcccaggaagagcaccaatcccagaatgaaccccaatcctgggataagcccagatctcaaaatgacctcgagtcccaagatgactccaaattccaagacaagtctgaatagagcagtgaccccaaagagccacaactatgaatatgaatactgtgacaaatggtagcaccaatcctgggacaagcccaaatctcaaaatgacctcaaatccctagatgactccaaattccaagacaagtctgaatacagcagtgaccccaaagatagccacaactatgaatatgaacactgtgacaaatggtagcaccatactcaatccaatggacaacatttattttctatgtaatatttttgctgttttgtgtatacttgcactcaggctgaagtgaacttcaactgcctgcattcttatctcagtttcttattattgctgaatgacaagcatgctaggaaaatatcatttatttcaatttactatttaagaaattatcatcttgattttttttggcaaattataattgtgtacgtttaaatattaacttaatatgatgttttccttccatatgaaagaagtatgcactaccttattaaatgctgaaacaagcaaaataccatgtttgccttttaaatgtttgcaaaactgaaccaaaactcagatatttatattaaaggtgtaagagaagaaattatgtaggtgggnnnnnnnnnnnnnnnnnnnnnatgtgagagagagcacacacatgagagtgagagagcgagtgagcaacagtgacaaagagatgaaggataggggataggggatagaggatgggggtgtgggataaggagtggtatgggggaaagttgttt

SEQ ID NO: 81716 - DNA, 1447 bp, Homo Sapiens
  misc_feature (207)..(782): n is a, c, g, or t
  misc_feature (814)..(831): n is a, c, g, or t
  misc_feature (1362)..(1362): n is a, c, g, or t
  misc_feature (1415)..(1415): n is a, c, g, or t
cccactactccttggtatccttaccatgatttccatgcgatagtggtctacgggtgactcagagatagtaccgataagccagcgtcggctaacggggtcgtcaccagcccgctgagcgacgactcaccgaattggatactacgcgtgagttgagaaagcccacgctcccgaaggagaaagcgacagtatccggtaagcgccaggtcnnnnnnnnnnnnnnnnnnnnnnnnnnnnnnnnnnnnnnnnnnnnnnnnnnnnnnnnnnnnnnnnnnnnnnnnnnnnnnnnnnnnnnnnnnnnnnnnnnnnnnnnnnnnnnnnnnnnnnnnnnnnnnnnnnnnnnnnnnnnnnnnnnnnnnnnnnnnnnnnnnnnnnnnnnnnnnnnnnnnnnnnnnnnnnnnnnnnnnnnnnnnnnnnnnnnnnnnnnnnnnnnnnnnnnnnnnnnnnnnnnnnnnnnnnnnnnnnnnnnnnnnnnnnnnnnnnnnnnnnnnnnnnnnnnnnnnnnnnnnnnnnnnnnnnnnnnnnnnnnnnnnnnnnnnnnnnnnnnnnnnnnnnnnnnnnnnnnnnnnnnnnnnnnnnnnnnnnnnnnnnnnnnnnnnnnnnnnnnnnnnnnnnnnnnnnnnnnnnnnnnnnnnnnnnnnnnnnnnnnnnnnnnnnnnnnnnnnnnnnnnnnnnnnnnnnnnnnnnnnnnnnnnnnnnnnnnnnnnnnnnnnnnnnnnnnnnnnnnnnnnnnnnnnnnnnnnnnnnnnnnnnnnnnnnnnnnnnnnnnnnnnnnnnnnnnnnnnaagaattcggcacgaggccgcggctgtaggcnnnnnnnnnnnnnnnnnnaaaggaaagccacccaaagattagggagtaagcctttagtttaaatgttcaatttaagtattgtcaagcctaggctaaatagaggactgcattttcttagagtgtggaatacaacttatttatttcatttttgtttctctttctcttgctcttctttttgtcagcaaaaaggggaaaagctattcaattaagtacaaaggaaattccctgtaaggttaaaataaaaaatgaagctaccattcaagggaacttctctgtattcaaccctaatgtcagtggtttatcactgagttggaattaagtgaatcaaagtctctatcaagcatactccacctagcataccatctgtacctgtaattcatttagagcccagatgtgtgcagttcacactaaatgtacttgttcaagccagtcacttgaggtttgaggtgtttgacttgaaacatctgaaccatctcctctgttggctgcctcgttaccactgtcaccagcttgagatgctgcttcccccgccagaatattttcttccanaggattttcttctatctgggttcctctaccttcactgacactggcatcttcanacattgaatcttctggcagcaccatttccaca

SEQ ID NO: 81717 - DNA, 1014 bp, Homo Sapiens
  misc_feature (160)..(160): n is a, c, g, or t
  misc_feature (166)..(166): n is a, c, g, or t
  misc_feature (223)..(223): n is a, c, g, or t
  misc_feature (263)..(263): n is a, c, g, or t
  misc_feature (273)..(322): n is a, c, g, or t
  misc_feature (666)..(681): n is a, c, g, or t
cgatggtccctgaaactcagccctttaaaaattaatcccgacccttgtccatattggattaagtggaatgctgactgggagtaacacatgacttatctccatctccagctgtaacaggatggatgtccaaaaacaacaaccaaaaatgtttttgtgtgtntgtctnactagacacctgttagagctgataaaatagatgtatgcccggtgcagtgctcacacnttgtcccagcatgtggagctgagttcgaactcctgacctngtaaccaccnnnnnnnnnnnnnnnnnnnnnnnnnnnnnnnnnnnnnnnnnnnnnnnnnncaaattatacattcgtaagacagacacctcttagaatctatatatatgaggttttactcccttttctacactcagtatgttttaattgatgcaaagcaattaattggcctaaaatgtttcaaatattatagtctatacattcagaaagtaaggtttaagaatgaattattggtgcttcttggtgggtgtatatagcagtttttagaagtttaaatttcacctctactcagaaagataagcttttgattcagtggtttcaaattttcagatcaatccatttaagaattgttttttcaaatgtatatacacgtataacataaaaatttttgtaatttcaaatgtcnnnnnnnnnnnnnnnnggatgaattattatatttggttttagttacatttaaaagcttgaaaattacctttctaacaatcatttgaatgtcattcattgtcacatgaaatcaggtatttacgtttttttctaatgctaaaatatccaacattgtaattgccctatttttccatttttataagtataaaagcaatgaattttaacactggtatttaaataatacaaaatattatccaaattcataacagcacagtgaagtttcttttgaagactatgtactggaagcatttagaacttaccaatatatactgggataaatcgtttcaataaagtttatcaaatattctgt

SEQ ID NO: 81718 - DNA, 975 bp, Homo Sapiens
  misc_feature (25)..(25): n is a, c, g, or t
  misc_feature (96)..(96): n is a, c, g, or t
  misc_feature (98)..(98): n is a, c, g, or t
  misc_feature (168)..(168): n is a, c, g, or t
  misc_feature (186)..(186): n is a, c, g, or t
  misc_feature (213)..(213): n is a, c, g, or t
ggatgggtaatcaaagacgtgcgtngatacgctcttggatgctgggcagatgcgagcatcctgtgacctcaatactccgtcatcagatcagacatntnacagttacttgacacttcagcatgattgattagtgatatagttgttgttctagcaaatccatgaggactnttgctgcaccgcaggcgntgagcattgtgccaaggatgctgtctncagtgcctgcaccagcagcgcgctcaagcttgtgccaaggaatgcctgtcagtcatccagggctctgggaggggacgagagttatgtccccaagaacaggaagtcctttacaaagcatccagtctcttcctgtcctccccttccctaggctggggtaggggttagagactggtggcccaggaggtcacctgccttgccctggattccctcttcagtggccagcaggacttggcagggccaccagctcgccaaggttctgggcggggctccagcctctcctgcctgctccttggctctgctgacctttcacaggcctgacagcagactcagcagggccatcccgggatgctgcaccttctggctggctccctaccagcgcctttccctgtacctggcagcttctctcttggccccacagtcacagcactccacttggtcacaaagacttcagagcaataagaggcgtcctgagccttcagcacctcccaggcctgggatatcgggttcagagggtgctgcagagcagcatgagggtggctccacccatgaggctggtgacactgacgctggcttggctaagttggctcaagccgggtctggcctgacagggtgcagtcacaccaggagcgcatggcagatgcagcctcagtgatgcctctcttgccgggtaggggctgggagtccccgtgcatcctgtctctggcccatgaggggctgcagcactgtgggcgccagagcacagattaaactctcaaacccaaa

SEQ ID NO: 81719 - DNA, 980 bp, Homo Sapiens
  misc_feature (446)..(455): n is a, c, g, or t
  misc_feature (544)..(553): n is a, c, g, or t
cccgcgccataagtcagtgtagcctcaggcatgcccgagttccattgggaacggtatgaaccttccttttcaggtgatcctcaagaccgaactgattgtcattctggcacaacaacagatcctacaagaccttgagtgttggtccctaccgcagtacattacatcagtcattgtaccctgccacctcgtgtggccagtgaggcaggggacttggctatcagacttgaaatattcccgagagacaataaacggtgaaaggccagtgccaagtccacattcctccaggtgatacgttgaagcaacctcttactgcctttctcctggtttcatgacagtgatattcctatttctataaatatatttttaggaaaaaaagtcagtgatcctaattgtatcacattataagaaagcactctgtggatcaacataagtgggtacacaagaannnnnnnnnncttggtgtatgtaagcacatttgttcctttatatctgtttacaaaactgtgaatcaaaaagacaaaactttcttcctagtttttgtaannnnnnnnnngaactagcatgactgtagggttgagctacagtcaacaaaaattgggctaagtcacttttccccaggaaagaatatttccctctcctgcatcaagtctgcgtggccatcctccccccaccatccaagactattaggttttgtccctgcacccttcactggcatcctcaatcattaaccttctgaaagctcacagtacacattagtatgtataactggctttaccaaattgaatgaaaaggagcttgtgcaaaaaaatttaaaaatggatgtcaagatgttatgtaaaagatgagtgtaattgtgaaatgttctatacactatcaaatatataaagctttctatattgaatgtacattatacagatcattcatatgtgtacataaaattttaaaaataaagggaattgactgctttgttaatgagaaaa

SEQ ID NO: 81720 - DNA, 566 bp, Homo Sapiens
cggcaactgcaacaacagcatcagtaccaccaccaccacgcccagcagtcagctgcagcctctcccaacctgactgcttcacagaagactgtaactacagcttctatgattaccacaaagacactacctctcgtcttgaaagcagcaactgcgaccatgcctgcctctgcggtgggccagagacctaccattgctatggtgaccgccatcaacagtcagaaggctgtgctcagcactgatgtgcagaacacaccagtcaacctccagacgtctagtaaggtcactgggcctggggcagaggctgtccaaattgtggcaaaaaacacagtcactctgcaggttcaggcaacacctcctcagcccatcaaagtaccacagtttatcccccctcctagactcactccacgtccaaactttcttccacaggttcgacccaagcctgtggcccagaataacattcctattgccccagcaccacctcccatgctcgcagctcctcagcttatccagaggcccgtcatgctgaccaagttcacccccacaacccttcccacatcccagaattc

SEQ ID NO: 81721 - DNA, 2370 bp, Homo Sapiens
  misc_feature (919)..(919): n is a, c, g, or t
  misc_feature (2292)..(2313): n is a, c, g, or t
ctggaccggtccggattcccgggatatcgtcgacccacgcgtccggttttccattcatatgttctttgcattttatttttgaggtttctgtgagaagtaaagatagttggaatttttgcgatattgaatagaacatcttctgttcccagacactgtttggcttcactaatttagaagtcaggaagcaatagaaagttggagatgaggaagtgctagagtaggtgtttgttttggttcttggagggaaaagattctttattccaatttccagagagaagagaaaactcacccaggaagtttaaaaattctttaaacaggtattttgatattggagaataacatgcatataattctgtaggaatgcacatgtaatccaagtgagtggagagtgtttttaatgtttttgaatgaaggaaatgaggttttgtttcacctgttttgcagcagtaagagaaactagtgctgcaagaatgtattttttaatgaagttccttattttgtcttgcatgttttagttttgcttatttttaaatttggaggtcctccataatgtcagataatattgacctgccatacgttagcactcttagttccgctactgtctttaacaggagcaaagagctgtgataaaccatgcttttttgagcttgtctgactcctaattaataacatgtttttggcaagacaacagattgaggttagaggatcagtaggacatttttattccatctgtcctatggggaaatttacaaatcccgtgctctaaaatgttctcaaacatttatatagatttccctttcatcttactaaattttgcattgttcttttcaagtatgtttcgtatttactgtcttttttttctgccatttccccaaataataaactccagatttcataattccagttttttacattccgnttatcctttctggtacaaccattcccattcagccttaaatctgagtcctttttagcagcaacttttttcctgggatcctccttcgtgggcttctaagtcagtgttagttttgaaatttttggcccctgcataaagttctgcatagcatctaatgtcaaaaatagaaccaactggtaatcacagtattatttagtgtggtttccatgacaacaaaaatacatacgaagaaaacttctcaggttactatgctgaaattccaaaatgtctgagttttgaatagtgatcactttgttctggtattgacgcaattatattaggaaaaaagttggttgactgtttttgtttaattgacttctaaaatgttcaaattgtctagttctaaaagtttactaaatgcctagtgcagttaaacatactcttgtttaagtgtgtgttgctaaattttttactgtcattactaaataatctgtgtggcaaaatgtgtgtcagcacttttccctccttttttatctcctattttcaggagtcaaatgtagccataaactgtatccttgtctgacactttagctaaaaatttccagttaggggagtttattgccaaattaaatttggctgttccccccaacccatatagatattaaggaaggtgtacttaaaaaatgtttggactgcttttaaaacctgagcaatgtcattaatccatatgtggactagtgatgaatagatattttcataagagtttaaatgctgatatttggtggaagtagagagtaactcatattctatcaattcaagtattcttactatggttgctttccctatttgttcaatagactgataatactggaatttatagagtttgagccattacaacttttgtgaggatgtgtttcaaacatttctggacaaatcttattttgtatttctggaagaatgtagtaatcttctagaccgcttaaaaccaatgctcccaagctgaatattcttgagaaatttgtttttattatgccatttgacatttcaaatcagtgctcatatacagtaaacttgtgatagaaattgtattttattgctttttggattataattcatataaatataattacttgaatattgtttgagatcattaacatgccagggcagttcccactgatttagatggtccaagataatctcattcaggaggcttgaaacattaatggtttagtcttgtgaattttaacagttctctgtcatcgtttaacaaaaccaacaactgacacaactccttaagctgtggtttcagtctctgctagttcatattgcatgtttattttggacagtcttttgttaagcatggtgcttgtactggtttaaataaaatgttaacattnnnnnnnnnnnnnnnnnnnnnncctgagcaggcggccgcaagcttattccctttagtgagggtaattttagcttggcac

SEQ ID NO: 81722 - DNA, 991 bp, Homo Sapiens
  misc_feature (286)..(358): n is a, c, g, or t
gtgcgtgtcggctatgccaattctatccgcgttccctgatttgtaaacctattacccttaggtgactaaccctcccgcacagaaagccgagcagcgacagtggggagaacggagggcgccaaacgcaacccctatccacggcgttggcgattcataatcagctgcacgacaggttcccgagtggaagcggcagtagcgcaacccaattaattgagttagtccacctcttagcccaccaagcgttccaactttatctccacgactcgtatgttgttggaactgtgannnnnnnnnnnnnnnnnnnnnnnnnnnnnnnnnnnnnnnnnnnnnnnnnnnnnnnnnnnnnnnnnnnnnnnnntgcccctcgagcccaagaattcggcaagaggggaggatgaggaggaggaagaagaactggaagaggtggaagacctggagtttggcacagcaggaggggaggtagaagaagtgcacctccacccccaaccctgcctccagctctccctccccctgagtctcccccaaaggtgcagccagaacccgaacccgaacccgggctgcttttggaagtggaggagccagggacggaggaggagcgtggggctgacacagctcccaccctggcccctgaagcgctcccctcccagggagaggtggagagggaaggggaaagccctgcggcagggccccctccccaggagcttgttgaaaaagagccctctgctcccccaaccctgttggaagaggagactgaggatgggagtgacaaggtgcagcccccaccagagacacctgcagaagaagagatggagacagagacagaggccgaagctctccaggaaaaggagcaggatgacacagctgccatgctggccgacttcatcgattgtccccctgatgatgagaagccaccacctcccacagagcctgactcctagccatcttctgcaccccactctttgtttccaataaagttatgtccttagatagc

SEQ ID NO: 81723 - DNA, 1986 bp, Homo Sapiens
  misc_feature (71)..(192): n is a, c, g, or t
  misc_feature (1889)..(1889): n is a, c, g, or t
  misc_feature (1899)..(1899): n is a, c, g, or t
  misc_feature (1925)..(1925): n is a, c, g, or t
cttactggaaaaacatacaagaaaaagaacttcgggaaaggcagcaagaggaacagaaagagaaactgagnnnnnnnnnnnnnnnnnnnnnnnnnnnnnnnnnnnnnnnnnnnnnnnnnnnnnnnnnnnnnnnnnnnnnnnnnnnnnnnnnnnnnnnnnnnnnnnnnnnnnnnnnnnnnnnnnnnnnnnnnnaagataaagaaacctcagcaaagaggggcaaagaaataacaggagtaaaaagacaaagtaaaagtgaacatgaaacttctgatcccaagaaatctgtagaagatagggggaaaaggtgtccaaccccagaaatacagaaaaagtcaacaggagatgtgccccatacatctgtgacaggggattcaggttcaggcaaggctcaacgagaacctttgacaagagcacgaagtgaagaaatggggaggatcgtaccaggactgccttcaggctgggccaagtttcttgacccaatcactggaacctttcgttattatcattcacccaccaacactgttcatatgtacccaccggaaatggctccttcatctgcacctccttccacccctccaactcataaagccaagccacagattcctgctgagcgggatagggaaccttccaaactgaagcgctcctactcctccccagatataacccaggctattcaagaggaagagaagaggaagccaacagtaactccaacagttaatcgggaaaacaagccaacatgttatcctaaagctgagatctcaaggctttctgcttctcagattcggaacctcaatcctgtttttggaggttctggaccagctcttactggacttcgtaacttaggaaatacttgttatatgaactcaatattgcagtgcctatgtaacgctccacatttggctgattatttcaaccgaaactgttatcaggatgatattaacaggtcaaatttgttggggcataaaggtgaagtggcagaagaatttggtataatcatgaaagccctgtggacaggacagtatagatatatcagtccaaaggactttaaaatcaccattgggaagatcaatgaccagtttgcaggatacagtcagcaagattcacaagaattgcttctgttcctaatggatggtctccatgaagatctaaataaagctgataatcggaagagatataaagaaaaaaataatgatcatctcgatgactttaaagctgcagaacatgcctggcagaaacacaagcagctcaatgagtctattattgttgcactttttcagggtcaattcaaatctacagtacagtgcctcacatgtcacaaaaagtctaggacatttgaggccttcatgtatttgtctctaccactagcatccacaagtaaatgtacattacaggattgccttagattattttccaaagaagaaaaactcacagataacaacagattttactgcagtcattgcagagctcgacgggattctctaaaaaagatagaaatctggaagttaccacctgtgcttttagtgcatctgaaacgtttttcctacgatggcaggtggaaacaaaaattacagacatctgtggacttcccgttagaaaatcttgacttgtcacagtatgttattggtccaaagaacaatttgaagaaatataatttgttttctgtttcaaatcactacggtgggctggatggaggccactacacagcctattgtaaaaatgcagcaagacaacggtggtttaagtttgatgatcatgaagtttctgatatctccgtttcttctgtgaaatcttcagcagcttatatcctcttttatacttcattgggaccacgagtaactgatgtagccacataaggagacataggttataaactagttatcttttanaaggctcagncacacaactcttgaaatgcttatcanggatatggtagctatagctggccatttagaggaattctaggacagtgggaagctgtgttaa

SEQ ID NO: 81724 - DNA, 773 bp, Homo Sapiens
  misc_feature (60)..(78): n is a, c, g, or t
gtgccatgctcaaaattaaccctcactaagagggaataagcttgcggccgccgctcaggnnnnnnnnnnnnnnnnnnngaaatgtttaaagttaaagtttatttgtattctttgtaggaatatcaataaaagacctcaaacgtatctatatctgtacatgtacaagaactgtcaaaaattattcacagaacaaaaataaatcttctttagaacaaacccaggtaatgaaatgctgatacggatctcacatacggaataatctaaatgctactagcacaaaaatatggctttaaaaataaaataaaatcttgggttttgtttttctaaggtgtatttctctttcttgaaataaaaaataaattatttagagctatcattgtaaaatagtcgtgtgttaacacactcttattaaggccctggagatgaaaaacaaaatcaaatttagaaggtcatttcctcacaggtgtaactcaggttaatgtgctgctgtctgcttaagttaatataactaggaaatgtctaagcaccagtcaaaatttaacctaatttactatttaactttcctgaaggtggtcattgagtcaattagtatttaaccttttgttgaactgggaattgaaatgtttccctcgaaaatttggaaatcacataaaatgatatttacacataaatatctgtacccccacaaagatgatggaggtccctaaaacacaacttctgtggaaatctctctacaacaacaaataaatctggttttaagtctcacactaaac

SEQ ID NO: 81725 - DNA, 1296 bp, Homo Sapiens
  misc_feature (615)..(632): n is a, c, g, or t
  misc_feature (665)..(1151): n is a, c, g, or t
agaattcggcacgaggctttaacataatgaaaatgatgttaaaggtaaaatatgctttgtgaactcagatgtctgtagccaggaagccagggtgtgtaaatccaaaatctatgcaggaaatgcggagaatagaaaaaatgtcacttgaaatcctaagtagttttgaatttctttgacttgaatcttactcatcagtaagagaactcttggtgtctgtcaggttttatgtggtctgtaaagttaggggttctgttttgtttccttatttaggaaagagtactgctggtgtcgaggggttatatgttccatttaatgtgacagttttaaaggatttaagtagggaatcagagtcctttgcagagtgtgacagacgactcaataacctcatttgtttctaaacatttttctttgataaagtgcctaaatctgtgctttcgtatagagtaacatgatgtgctactgttgatgtctgattttgccgttcatgttagagcctactgtgaataagagttagaacatttatatacagatgtcatttctaagaactaaaattctttgggaaaaaccctcaattgtgattttaataaattaaaagtagcacattacatggttagnnnnnnnnnnnnnnnnnngcctacagccgcggccctcgtgccgaattcttnnnnnnnnnnnnnnnnnnnnnnnnnnnnnnnnnnnnnnnnnnnnnnnnnnnnnnnnnnnnnnnnnnnnnnnnnnnnnnnnnnnnnnnnnnnnnnnnnnnnnnnnnnnnnnnnnnnnnnnnnnnnnnnnnnnnnnnnnnnnnnnnnnnnnnnnnnnnnnnnnnnnnnnnnnnnnnnnnnnnnnnnnnnnnnnnnnnnnnnnnnnnnnnnnnnnnnnnnnnnnnnnnnnnnnnnnnnnnnnnnnnnnnnnnnnnnnnnnnnnnnnnnnnnnnnnnnnnnnnnnnnnnnnnnnnnnnnnnnnnnnnnnnnnnnnnnnnnnnnnnnnnnnnnnnnnnnnnnnnnnnnnnnnnnnnnnnnnnnnnnnnnnnnnnnnnnnnnnnnnnnnnnnnnnnnnnnnnnnnnnnnnnnnnnnnnnnnnnnnnnnnnnnnnnnnnnnnnnnnnnnnnnnnnnnnnnnnnnnnnnnnnnnnnnnnnnnnnnnnnnnnnnnntcgatgtcagtcagaggggtgaacccgacaggatatacgatacaagcgtttcccctggaactcctcctgggctctctgttcgagccggcggctacgggatactgtgcgctttctccgtcggaacgtggtgtttctatagtcacgg

SEQ ID NO: 81726 - DNA, 1732 bp, Homo Sapiens
ggaagcagtggtatcaacgcagagtggctattacggcggcgcagcgaaaatggcggcttccaggtgggcgcgcaaggccgtggtcctgctttgtgcctctgacctgctgctgctgctgctactgctaccaccgcctgggtcctgcgcggccgaaggctcgcccgggacgcccgacgagtctaccccacctccccggaagaagaagaaggatattcgcgattacaatgatgcagacatggcgcgtcttctggagcaatgggagaaagatgatgacattgaagaaggagatcttccagagcacaagagaccttcagcacctgtcgacttctcaaagatagacccaagcaagcctgaaagcatattgaaaatgacgaaaaaagggaagactctcatgatgtttgtcactgtatcaggaagccctactgagaaggagacagaggaaattacgagcctctggcagggcagccttttcaatgccaactatgacgtccagaggttcattgtgggatcagaccgtgctatcttcatgcttcgcgatgggagctacgcctgggagatcaaggactttttggtcggtcaagacaggtgtgctgatgtaactctggagggccaggtgtaccccggcaaaggaggaggaagcaaagagaaaaataaaacaaagcaagacaagggcaaaaaaaagaaggaaggagatctgaaatctcggtcttccaaggaagaaaatcgagctgggaataaaagagaagacctgtgatggggcagcagtgacgcgctgtggggggacaggtggacgtggaaagctctttgcccagctcctggggtgggagtggtctcaggcaactgcacaccggatgacattctagtgtcttctagaaagggtctgccacatgaccagtttgtggtcaaagaattactgcttaataggcttcaagtaagaagacagatgttttctaattaatactggacactgacaaattcatgtttactataaaatctccttacatggaaatgtgactgtgttgctttttcccatttacacttggtgagtcatcaactctactgagattccactcccctccaagcacctgctgtgattgggtggcctgctctgatcagatagcaaattctgatcagagaagactttaaaactcttgacttaattgagtaaactcttcatgccatatacatcattttcattatgttaaaggtaaaatatgctttgtgaactcagatgtctgtagccaggaagccagggtgtgtaaatccaaaatctatgcaggaaatgcggagaatagaaaatatgtcacttgaaatcctaagtagttttgaatttctttgacttgaatcttactcatcagtaagagaactcttggtgtctgtcaggttttatgtggtctgtaaagttaggggttctgttttgtttccttatttaggaaagagtactgctggtgtcgaggggttatatgttccatttaatgtgacagttttaaaggatttaagtagggaatcagagtcctttgcagagtgtgacagacgactcaataacctcatttgtttctaaacatttttctttgataaagtgcctaaatctgtgctttcgtatagagtaacatgatgtgctactgttgatgtctgattttgccgttcatgttagagcctactgtgaataagagttagaacatttatatacagatgtcatttctaagaactaaaattctttgggaaaaaccct

SEQ ID NO: 81727 - DNA, 1122 bp, Homo Sapiens
  misc_feature (158)..(571): n is a, c, g, or t
  misc_feature (624)..(632): n is a, c, g, or t
  misc_feature (987)..(1007): n is a, c, g, or t
  misc_feature (1099)..(1099): n is a, c, g, or t
cgtaagcgcaggtcgaacagagacccccgagactcccagggaaaccctgtttctttagtccttccgattcccactgtgactgagcgtcgatctttgatgtcgtcagggggcgagcctatgaaaaaccccagcaacgcgcctttttacggtcctgcccnnnnnnnnnnnnnnnnnnnnnnnnnnnnnnnnnnnnnnnnnnnnnnnnnnnnnnnnnnnnnnnnnnnnnnnnnnnnnnnnnnnnnnnnnnnnnnnnnnnnnnnnnnnnnnnnnnnnnnnnnnnnnnnnnnnnnnnnnnnnnnnnnnnnnnnnnnnnnnnnnnnnnnnnnnnnnnnnnnnnnnnnnnnnnnnnnnnnnnnnnnnnnnnnnnnnnnnnnnnnnnnnnnnnnnnnnnnnnnnnnnnnnnnnnnnnnnnnnnnnnnnnnnnnnnnnnnnnnnnnnnnnnnnnnnnnnnnnnnnnnnnnnnnnnnnnnnnnnnnnnnnnnnnnnnnnnnnnnnnnnnnnnnnnnnnnnnnnnnnnnnnnnnnnnnnnnnnnnnnnnnnnnnnnnnnnnnnnnnnnnnnnnnnnnnnnnnaagaattcggcacgaggggcatcttacatctgaaataaggaatgatataaggnnnnnnnnnctcacagaagatgaagcacacaggaacctaatgggccaactgggatgaggtgactattctgagatgactattcagtggctaacttgggttaggaagaaaataattaggtattttctccaaatgttcactggtactctgccactttatttctctcatctgttacacaaagaaccaccaggaaagcaaatcagtttggttggtaactctgtaattcctaactatcactggtttggttctggactaaaactacattgacagattgaatttgcctaatatgatgactgtttttaatatggatctgtatgtgttctattcagcacaaggaaataaaattttagttgaggattcagccctnnnnnnnnnnnnnnnnnnnnngcctacagccgcggccgcaagctttttccctttagtgaggttaattcgagcatgccactggccgtccgcccacacgccgcaccaaccccacncgaggagccgaaaacctaaaaga

SEQ ID NO: 81728 - DNA, 673 bp, Homo Sapiens
  misc_feature (420)..(430): n is a, c, g, or t
gttctgcataggattaagactgagtatcttttctacattcttttaactttcaaatggcactatcttcttttcagtactacaaaaacagaataattttgaagttttagaataaatgtaatatatttactataattctaaatgtctaaatgcttttctaaaaatgcaaaactatgatgtttagttgctttattttacctctatgtgattatttttcttaattgttattttttataatcattatttttctgaaccattcttctggcctcagaagtaggactgaattctactattgctaggtgtgagaaagtggtggtgagaaccttagagcagtggagatttgctacctggtctgtgttttgagaagtgccccttagaaagttaaaagaatgtagaaaagatactcagtcttaatcctatgcnnnnnnnnnnntcaagtaattgttttcctatgaggaaaataaccatgagctgtatcatgctacttagcttttatgtaaatatttcttatgtctcctctattaagagtatttaaaatcatatttaaatatgaatctattcatgctaacattatttttcaaaacatacatggaaatttagcccagattgtctacatataaggtttttatttgaattgtaaaatatttaaaagtatgaataaaatatatttataggt

SEQ ID NO: 81729 - DNA, 1211 bp, Homo Sapiens
aaaagatttctcaatttatttgcatatatacattgtcaccccatggagccagctctatttcagaagtccccggctccccttacccagccaacacccaaaacccacccaagaggatgggtcctggataaataatgcccaggactcatatcctgaccccataggttataacagaattcatcaaacaaaaacagagggctagaggccagtgtccatgagaggtccttgcccctttgtaaacattgacatccaggccactggagcctggggaaagtgtgcaaacatgaggatgccacactgtgtgtccaggggccaggaacacagctggcaaccatacccgtgaagtcctgaggatctgccccccactggaacatggcaagtgccgggggcagaagcaaggcagttaccccacacccaagggctcacatgagatgccagcgacgctcttgcccataggaaattccccacacgggcaatctcctgggatgactttggtgaagatgccttgagtcagctgattctctcgagcagatgactccataaatgtcgcaccccaggactctgccagcttctttccttcaactgcctgtacctctctctctggagagagatctgccttgttccccactagaaccactggcacccgggttttcccatggccttcatgtagcttttggtacagactctcaatgacttggaagctatgcagagaggtgacagaatacacaagcacataaccatggaccccaatgatgaatgaatagggcagaatgctgtactcatcctgccctgctgtgtccaccagatgtaggtgaaactcatctttgccaagagtcactatcttgctgtaagtattctccactgtaggatcgtagccttccgagaactcgccttccacaaattgatgtgccaaagatgtcttccctgtggggagcagtgtgacagttgtatccaaatcatccatccacattcacatcctctgtcctttcggactacacagcggtatccgaggatgaccaccttcctgtagcggactagcggcatggcaggagcccgccccaggggcttgcggaactgcgggctcagagagcccgaaaacgaggtcagggtgtgagcaggcgcggcagctggtgcaggaaagtcgctcaccccgaagctgccgtgggcaagttagaaggaaaccaaaacaagcgccgcgcccggagctgcccccc

SEQ ID NO: 81730 - DNA, 1068 bp, Homo Sapiens
  misc_feature (38)..(38): n is a, c, g, or t
  misc_feature (128)..(128): n is a, c, g, or t
  misc_feature (163)..(246): n is a, c, g, or t
  misc_feature (256)..(364): n is a, c, g, or t
  misc_feature (417)..(436): n is a, c, g, or t
  misc_feature (450)..(699): n is a, c, g, or t
  misc_feature (717)..(868): n is a, c, g, or t
  misc_feature (991)..(1008): n is a, c, g, or t
tacgtctgcttgctgcttgtacatgtctctgcgttccngatcttgataccttacgccttgatgactgtacgctcccgcacgaacgacgagccaggatcatgacgagaagcgaagacgcccatacgcancgctctccccggcgttgccgatcataatgcagctnnnnnnnnnnnnnnnnnnnnnnnnnnnnnnnnnnnnnnnnnnnnnnnnnnnnnnnnnnnnnnnnnnnnnnnnnnnnnnnnnnnnattgctccgnnnnnnnnnnnnnnnnnnnnnnnnnnnnnnnnnnnnnnnnnnnnnnnnnnnnnnnnnnnnnnnnnnnnnnnnnnnnnnnnnnnnnnnnnnnnnnnnnnnnnnnnnnnnnaagaattcggcacgaggaccattctgatgttggagcggccgcggctgtaggcnnnnnnnnnnnnnnnnnnnnggatacagcaggannnnnnnnnnnnnnnnnnnnnnnnnnnnnnnnnnnnnnnnnnnnnnnnnnnnnnnnnnnnnnnnnnnnnnnnnnnnnnnnnnnnnnnnnnnnnnnnnnnnnnnnnnnnnnnnnnnnnnnnnnnnnnnnnnnnnnnnnnnnnnnnnnnnnnnnnnnnnnnnnnnnnnnnnnnnnnnnnnnnnnnnnnnnnnnnnnnnnnnnnnnnnnnnnnnnnnnnnnnnnnnnnnnnnnnnnnnnnnnnnnnnnnnnnngagtcactgcacccagcnnnnnnnnnnnnnnnnnnnnnnnnnnnnnnnnnnnnnnnnnnnnnnnnnnnnnnnnnnnnnnnnnnnnnnnnnnnnnnnnnnnnnnnnnnnnnnnnnnnnnnnnnnnnnnnnnnnnnnnnnnnnnnnnnnnnnnnnnnnnnnnnnnnnnnnntctagtcattctggttttattaagatttattagacctgaggcatgaaaaatagcatactggatgggacttcagcatcgatgagttgccttagtaatactgttaataaaaagcactaaatatgnnnnnnnnnnnnnnnnnngcctacagccgcggccgcaagcttattccctttagttgagggttaattttagcttggcac

SEQ ID NO: 81731 - DNA, 1196 bp, Homo Sapiens
ctgaaatatcctaaccccctaagctccaggtgccctgtggacgagcaactggactatagcagggctgggctctgtcttcctggtcataggctcactctttcccccaaatcttcctctggagctttgcagccaaggtgctaaaaggaataggtaggagacctcttctatctaatccttaaaagcataatgttgaacattcattcaacagctgatgccctataacccctgcctggatttcttcctattaggctataagaagtagcaagatctttacataattcagagtggtttcattgccttcctaccctctctaatggcccctccatttatttgactaaagcatcacacagtggcactagcattataccaagagtatgagaaatacagtgctttatggctctaacattactgccttcagtatcaaggctgcctggagaaaggatggcagcctcagggcttccttatgtcctccaccacaagagctccttgatgaaggtcatctttttcccctatcctgttcttcccctccccgctcctaatggtacgtgggtacccaggctggttcttgggctaggtagtggggaccaagttcattacctccctatcagttctagcatagtaaactacggtaccagtgttagtgggaagagctgggttttcctagtatacccactgcatcctactcctacctggtcaacccgctgcttccaggtatgggacctgctaagtgtggaattacctgataagggagagggaaatacaaggagggcctctggtgttcctggcctcagccagctgcccacaagccataaaccaataaaacaagaatactgagtcagttttttatctgggttctcttcattcccactgcacttggtgctgctttggctgactgggaacaccccataactacagagtctgacaggaagactggagactgtccacttctagctcggaacttactgtgtaaataaactttcagaactgctaccatgaattgaaaatgccacattttgctttataatttctacccatgttgggaaaaactggctttttcccagccctttccagggcataaaactcaaccccttcgatagcaagtcccatcagcctattatttttttaaagaaaacttgcacttgtttttctttttacagttacttccttcctgccccaaaattataaactctaagtgt

SEQ ID NO: 81732 - DNA, 549 bp, Homo Sapiens
cagtcgacggtaccggacatatgcccgggaattcggccattacggccggggctagacgccgtacgtgccagatggtgttacctggagcttaaaaagctgcacgcaagtgttaaacttctgtaggaggaatactgttggcgttcaaaagcattgctgtttcaacaatggccaagaacaaattaagagggccgaagtccaggaatgtatttcacatagccagccaaaaaaactttaaggctaaaaacaaagcaaaaccagttaccactaatcttaagaagataaacattatgaatgaggaaaaagttaacagagtaaataaagcttttgtaaatgtacaaaaggaacttgcacatttcgcaaaaagcatttcacttgaacctctgcagaaagaactgattcctcagcagcgtcatgaaagcaaaccagttaatgttgatgaagctacaagattaatgggctctgttgtaatatactggtgatgcatctaaattctccacaaagaccaataaattgacatgttttataccaaagaaacaaccccccacaaac

SEQ ID NO: 81733 - DNA, 1295 bp, Homo Sapiens; identical to SEQ ID NO: 15014
  misc_feature (452)..(587): n is a, c, g, or t
  misc_feature (742)..(804): n is a, c, g, or t
  misc_feature (898)..(908): n is a, c, g, or t
  misc_feature (1215)..(1225): n is a, c, g, or t

SEQ ID NO: 81734 - DNA, 889 bp, Homo Sapiens
tacccaacctatccaatacttaagaattctgctcttattcttcaacaactggtccttaaacaaattgattccagaattttgataaaagaacttcgaaatgttgaagggagttgaggaagttcattgaattacatgtttggcaacttgctggaagcagaatcattgccactgctcacataaaatgtgaagatccaacatcatacatggaggtggctaaaaccattaaagacgtttttcataatcacggaattcacgctactaccattcagcctgaatttgctagtgtaggctctaaatcaagtgtagttccgtgtgaacttgcctgcagaacccagtgtgctttgaagcaatgttgtgggacactaccacaagccccttctggaaaggatgcagaaaagaccccagcagttagcatttcttgtttagaacttagtaacaatctagagaagaagcccaggaggactaaagctgaaaacatccctgctgttgtgatagagattaaaaacatgccaaacaaacaacctgaatcatctttgtgagtcttgaaaaagatgtgatatttgacttttgctttaaactgcaagaggaaaaagactccactgaaattctaagtttgccaagtagtgtaattgaagtccttgtctggtcacacagtttaattctatttttgtaagaacataatgggactgcataacagagttctatattacaattttgtgattattagtacagagtacagctatgctgtgactgttttggaaagccagttttaacactatgttacatttttgtttaaagtaagttaaaccttatataacataatgacatttgatttctggatttttcccatgataaaaattagggggataaataaaattgttactggaaa

SEQ ID NO: 81735 - DNA, 1071 bp, Homo Sapiens
  misc_feature (613)..(613): n is a, c, g, or t
  misc_feature (760)..(761): n is a, c, g, or t
  misc_feature (773)..(774): n is a, c, g, or t
  misc_feature (783)..(784): n is a, c, g, or t
  misc_feature (790)..(898): n is a, c, g, or t
  misc_feature (929)..(929): n is a, c, g, or t
cagactaactggacaactctgtggacagaacacagacacacacaagggaggcacacaaaccaccacaggaccatggcagaataagcaaatgaatatacagatggtgagaaagcacacggcccaggaacagagaacacagtccccatctctgagggtctcaggtcccttcttccactccacagcgacaccttgcttagttcacactgcaatgtggctgtggccccttctgaggcctcgttggtcttcagatcttgagtgaactgggtaggcagaggtaggaagggtcacatggacagaagccatcaagccctctggaggatctgagggacacacctgaacatccaggaagaaaacagaagcaggaaggctggagggacttgggatgaggcggaccaaagtgcatttgacagtgaggacttcctgcattctgcctgtgaggtgcagattgggtgggagatgggctccatcctggatctcttctcagagggcatcttatcctacctgtgaactttcattatggggaagcaagacaggctcctccaacttgcaacccacatatgcaataatgtgatggacatctctctatgatgacacagcagacaccttcaggtcncaacatccactgccccgttgtcatccctcacacaagagatagcctgaccagacagggcttccatccagcagtgcccatgcctagatatacctggcgcaccgcacaacatcgcagcccacacaaggccctgctacctccatccaaccnntcgtgcgaatcnntggctcgannggcaannnnnnnnnnnnnnnnnnnnnnnnnnnnnnnnnnnnnnnnnnnnnnnnnnnnnnnnnnnnnnnnnnnnnnnnnnnnnnnnnnnnnnnnnnnnnnnnnnnnnnnnnnnnntggggtgcctatgagtgagctactcacattnattgcgtgcgctcacggccgctttccatcggggaactgtcgtgccactgcattatgatcggcacgcccgggaaagggttgctatggggtctcgcgtctccccatgatccctgccggcttcggtggggacgttcagtctcaag

SEQ ID NO: 81736 - DNA, 978 bp, Homo Sapiens
  misc_feature (80)..(80): n is a, c, g, or t
  misc_feature (188)..(188): n is a, c, g, or t
  misc_feature (272)..(272): n is a, c, g, or t
aattgttattgccgatgatctgctccatgttgccgagagtccaactcaggactttcttggtgatgagaggacgagttgtntagttcagattattctgcagagaaagttatgtaatgatgctcatggagaacatacattccaatatcgaatctcggtctgatcagctagtacttaaaagcgatcaagantgtaatctgctgaacttggtacttaactcactctctatctggagtaaaaagatatgagctaaatgaaaaagtaagcagattgcntaaggatgccaatgttttaattctcaggaactgtgaatatgtatgccacattgcaaaagaattttgcagaagtgattaatttaaaatgttattaagggccttgagatggggagattatcctgaattactttggagggcctaatataattgtagggatctttaaaagttgaagagggaggcaaaagaggaggtcagagtgatcctgtataagaaagacaactacttttgaaggaagttaaaaggtggctttgaaggaggaagacaccttgagccaaggaatgaagggggcctgtaaaaaaagattgaaaaggcaaggaaacagattctccattagagtccccagaaaggaatgcagccttgctggcacctttttagcccagtgagatcaatgtcaaacttctgacccacagaaccataagatggtaaatttgtgttgttttaaaccactgagtcagtgataatttgctgaagaagcaaatagattaacatagcaactaagtagatgattagttgcattataggtgaagtcaaaaatacagtcctttagtaaagtctctatttcttccttttataagagtaattatatttaaaaaatctacctacccttctggaattgctaatgttagtgtttataaagtcttaaatgtgtgcataaaaaactaaatgtgaatataaaatctaaataaaggaatatgtttgcctaaaa

SEQ ID NO: 81737 - DNA, 948 bp, Homo Sapiens
taggaagcgaggcctgggtggcgaattcggcacgaggcagcgagctgccccggggtctctccggtttcctaatcagggcaacgccgcgggagagaacctttaccttggctcgcactaagttctcggtgccactccctggcagggcgggaccttgtttaggccctgtgatcgcgcggttcgtagtagcgcaaggcgcagagtggaccttgacccgcctagggcgggaagagtttggcccgccgggtcccaaagggcagaatggacgggctcctaaatcccaggaatcctctaaattcattgcagaaaacagtcgggatgtgtttattgacagcggaggcgtacggagggtggcagagctgctgctggccaaggcggcggggccagagctgcgcgtggaggggtggaaagcccttcatgagctgaaccccagggcggccgacgaggccgcggtcaactgggtgttcgtgacagacacgctcaacttctccttttggtcggagcaggacgagcacaagtgtgtggtgaggtacagagggaaaacatacagtgggtactggtccctgtgcgccgccgtcaacagagccctcgacgaagggataccaataactagtgcctcgtactacgcgacagtgaccctggatcaggttcggaatatacttcgttctgacacagacgtttccatgcctttagttagaagagaggcatcggattctcaatgaaaccgggaaaattctgctggcagaagtttggaggctcttttctcaactgcgtccgagaaagtgagaatagtgcgcagaagttaattgcacctggtggttgaaacgtttccttcttacagagatgtgactctgtttgattgtacttgaacaaatgatgatcattttgttggaccctcacaggctgcacccggattttgtttttgtaaaattcttttggaatcttttgaac

SEQ ID NO: 81738 - DNA, 1130 bp, Homo Sapiens
  misc_feature (58)..(58): n is a, c, g, or t
  misc_feature (64)..(64): n is a, c, g, or t
  misc_feature (70)..(70): n is a, c, g, or t
  misc_feature (77)..(77): n is a, c, g, or t
  misc_feature (98)..(99): n is a, c, g, or t
  misc_feature (119)..(119): n is a, c, g, or t
  misc_feature (177)..(177): n is a, c, g, or t
  misc_feature (192)..(192): n is a, c, g, or t
cccgggtaaagattgtatagacaaatgtgagtccgcaggtctaacttagcagtttccncagacngccccntaatatnccaacagcactttgaggtagnntccttccagatatccacagntaatcacagtccaaaggcattgcatccttatggaagcatcggacgtatacaccagatntttgacagtcatccntcatcccccctgcacaaaagttgctataccagcggacaagcaaagacaactactgagcttcttttgattgtcaagtagatataatatcactgccagcaaaacagcacaaaaagtgtctcttccacagtatcactaccagttgggactatgctaagtaaatcagcttgcctagatgaggaccccttctattcttgggtagccaggatttgaaggagatactctgacctgtgccactggtaagtgactaatacttttacacactgaactggtcctggaaactgagatatcttctttgtaagtgaagaatatacaacataatcttgaagaacggcacagtggtatgggccacaagcatactttatgtgtgtaacggactgaaagacaaattaatcttggtgaaaggatttttcatctcttatttctatttgccagtgttagtcagtgttctgctggcttagattattacctttttctggttccttactgtgttttattctgatgggtcctagaaatccctctcctgaccacttgtcagaatcagaaagtgaggaagaagaaaatattagttacctaaatgagagttctggggaagagtgggattcctctgaagaagaggactctatggtgcccaacttatcgcctcttgagagtcttgcctggcaggttaagtgccttttaaaatattccacaacttggaaacctttaaatcctaattcctggttgtatcatgctaaactgttggatccaagcacaccagtccatatacttcgagagataggtctaagactctcccattgttcccattgtgtccccaaactggaaccaattcctgaatggccccctctggcctcttgtggagtcccaccttttcaaaagcctcttacaagtcccggccgtaatggccgaattcccgggcatatgtccggtaccgtcgactg

SEQ ID NO: 81739 - DNA, 1032 bp, Homo Sapiens
  misc_feature (152)..(152): n is a, c, g, or t
  misc_feature (165)..(166): n is a, c, g, or t
  misc_feature (168)..(168): n is a, c, g, or t
  misc_feature (170)..(170): n is a, c, g, or t
  misc_feature (277)..(277): n is a, c, g, or t
gatccgcacgaggctgtcacatcagttgcactgccacatgacgtcatattccagcagaaagatgtgacttgtaggaatgtgatgatagatacccttgatacatctccgttgtgtactcatcatatgacaagctcagttaaaagtgactcgtntaattttctccanntnanggaagtccacagcactacagggagccaggaggaactctctcccagtccgcctttgttgaatccatccacgccacagtccacagagagtcagccgaccaccggtgaanccagccacccccaaaaggcgcaaagctgagccagaagcattgcagtctctgagcggtccacgcgccacagtgccaactgtgacaggctttctgagagcagcgcttcacctcagcccaagcgccggcagcaggacacatccgccagcatgcccaagctcttcctgcacctggaaaagagtaggttcattctcgggtgccccaggccggggagagccagcgtgtactttgtgtttagtcagtgccaggcatggtgctgaggttacatgtgtgtgtgtacagtgcgtgtgattcccatgtccaaagtgctgtcatgctgcctgctttctggagctgtagaaagttgaaacacctggcgcagattgcagcgcagctgtgttggaggcaggactgggctgtttcctcagcctttcttttttgccatcactctaccacttgtgagcaaattgagttatcagaattctatgtattgtgtagctaggcctaatgaagcattcaaaatgagcaatgctaatgggttgtttagctttttgttttctttgtactctgtctctgtagtctctccattctaaagtttaatttggaaaggtctgtcctgaattatcaaagtaagaatactcagatttccataagctcttctcacctcctcttagcccaactcaaactccatcagatcttctcaccttgattttgagctggaatgtttcaatgagcaaaataaattagacaaaagtttactttctttttttccaaaatac

SEQ ID NO: 81740 - DNA, 1014 bp, Homo Sapiens
  misc_feature (887)..(887): n is a, c, g, or t
gagagtaaatgagtttatcagatccttcctgagaacaggtttttcagagaaagggtaaatggatgcacacaaaaaggcacttagctcctggcaatggcagccggccagggaagggaggggagaaccaagcagggagacggggcacagggaagacgcacggcagctccttctcccctggccagagcgggcctcagtggctgggagcaggccccagggacaaagatgggtgggtccaggcctcagagaagggggacatcatagacaaagaggcacttgctgggagccgatgagacaggtgactctggagttcttgaggggcgccgtgccctgactgtggatgtgagcaggaaggagcagaggtctctgggcaggacataggccccatagtgctgatgtgcacttgtgctgtgacctgggcagagactgggtcccagcatctgttgtgcctgccgcagggtgagaaagtcccagccccaagaggctgggctgggaaggagctggctgagtcttgcaaatattcctgaccccagggaccctggccaaacagatccacaggcaaaaagggaacagggacaatgagaggaaagggtgctgctgtcagaggcacgggcctggcatgagggaggtcccttgagacgaagacttgcaggtctgtcttggcggggcttgtcacacctcagcgtccagcgaggagtcagatttctgtccccactgagtcctctcgttgcagatatgctttctgtgcctcctgggggtcctaatctcccattcctgggtcctgctgtccacaggttgagcctgatgtcaacaccctgaaaacccaagttctccttcgggtggagggtggtttgcccggtccgggccgccatttccttctcaaaaggggncgctggctggtaaccaaaagggccagaatactcagtgcaggaaacccgaaacttgcaatcgattccggtaggcggtggactcccattccccccactccctgttgtcgggactcagctgactgcatag

SEQ ID NO: 81741 - DNA, 379 bp, Homo Sapiens
cacctgagagtaaatgagtttatcagatccttcctgagaacaggtttttcagagaaagggtaagtggttgcacacaaaaaggcacttagctcctggccatggcagccggccagggaagggaggggagaaccaagcagggagacggggcacagggaagacgcacggcagctccttctcccctggccagagcgggcctcagtggctgagtcttgcaaatattcctgaccccagggaccctggccaaacagatccacaggcaaaaagggaacagggacaatgagaggaaagggtgctgctgtgagaggcaggggcctggcatgagggaggtcccttgagacgaagacttgcaggtctgtcttggcggggcttgtcacacctt

SEQ ID NO: 81742 - DNA, 1184 bp, Homo Sapiens
  misc_feature (268)..(284): n is a, c, g, or t
cgcatagtgacctatagaacaagttgggtacaaaaaagcaggctggtacggtccggaatttcccgggatatcgtcgacccacgcgtcgatagtttatatatttcgaggttgccaaaggtgacttcagattaaagccttctgtgtaaatatatactgataatgcctatggacatttgggtaaaaccctgtatagaattaattatccttttactttggagtgaaccttggaaaatttataattataataccatggattttgaattttccnnnnnnnnnnnnnnnnngggataactcagtttcagataaaccatctgggttacgggtggcttaatttggaccaaattttatttagcttaatatggacactgacacatttgggggggtatacattagacatatcagagcagtgtatttctggatcatttttataaatgacctcttctaaaacataactgtcacttacctgaaatgctgcatcctaaaattccaaaattatattgagcaatcgccaaggcctaaagccaactgacttaaaggtaatcatttcagctaagattaaatttaaagcctaagaatgtatagagctagttttaaaataatgatctcagatttttaaaaaggatataggaacctgcattgtcattctctgaattaagaactgatggtttctatcattatttagccccacctttgtattttaaaatccttcagaatacatttatgaaccaatgcgactggacttagccacacacaatggaaattcagaccttgactatttggtgtttccagttcacaaaggtgatgaagactgtcttgggagcagcttaatcccaaaatttgtacatttcttgctgctcctggcgtggaaacttaagtgagaccaccaaatacattggtcctgtccaattctactgaatgggggtggacctggcatttatctggccaaaaacaggagccagagaaatatgaatataccaaagttgtttgtttagcctccaacttaaattacattagtcaacttatagatactcatatgatcacttttctttttagatactacatcaactagattcaggagtatatcatttgcagtgcttgtattggtttaaaatgtaagattttaagatcctctaacactgtactaaaacatttcaataaaatcattctgactgcgttcaaacaaa

SEQ ID NO: 81743 - DNA, 611 bp, Homo Sapiens
taatggaacactgtatcagcagcatctgagaacataagaacagttggacattggaaagaggtttgttgccctcatccctccttgaaccacttttttttcccgcttccaccaccaccacacatatatacccctttttctcagtcttaagcatcaaacaatttctgcctctttctttttaattctcccagagggatggttaatgcatcacaatttaacttgtctattcaggtattaatagtcaagggatgcatctgtttgcttatagtaccagttatattcctaggaccttagagagcagtagtgtgagaatagaatgcctttctatttgggttaaactatgtgggaggaaaaagtaacagagtaaaggctttgccttaatgaagtcaagtgttctgcctggtgggaagtggccacacgctgcactgcgctgctcttgtttactctgttctttcagagcctttgtactttgccatcactgctagtaatttcttggtccttttcaatactccattttaatcttgatttttttctataaataataaatctgtgaaaaatctgtaaaaagatttgtgactattaaatgtgcaactaaaaacactggaaaaagaaaa

SEQ ID NO: 81744 - DNA, 1091 bp, Homo Sapiens
  misc_feature (119)..(119): n is a, c, g, or t
  misc_feature (121)..(121): n is a, c, g, or t
  misc_feature (126)..(127): n is a, c, g, or t
  misc_feature (132)..(132): n is a, c, g, or t
  misc_feature (246)..(246): n is a, c, g, or t
gtcttttgtgattgacgaacattccccgaacattgactgatagaatatcgctccttaggattgctgagccaagatcgcagagatttttacatttaggaatgaattatataagtttgtantnatgcnncactncagtcgttcagacaatgcagtctgtcagacaagtgatcagtaacttgatgatatgcagttagatgatgtcatacgaaattgaaaacacatcatttacctatcaaaaggaacatntgttgagaatccagcttctgcagcctccaaaagtgtcgtctctatggcctccagactgtggtaaaacgttgattgccaagaccacagccaaagaagcaggctgtcgatttattaaccttcagccttcgacactgaccgataagtggtatggagaatctcagaaattggctgctgctgtcttctcccttgccataaagctacaaccatccatcatctttatagatgaaatagactcctttctacgaaaccgttcaagttctgaccatgaagctacagccatgatgaaagctcagtttatgagtctctgggatggattggatactgatcacagctgccaggtcatagtaatgggagctaccaatcgtcctcaggaccttgactcggctataatgagaagaatgcctacaagatttcatatcaaccagcctgctttaaaacagagagaagcaatcctgaaactcatcttgaaaaatgaaaatgtggataggcatgtagacctgctagaagttgcccaggaaactgatgggttttcaggaagtgacctaaaagagatgtgtcgagatgctgccctcctctgtgttagagaatatgttaattctacatcagaagaaagccatgacgaagatgaaattcggcctgttcaacagcaggacctgcatcgggcaattgaaaagatgaagaaatcaaaggatgcagcatttcagaatgttttaacacatgtttgtttagattaagagtaaagatcatttgtacagttcagtgatctagtttgggtgtgtcctctttatcagttagtgggaaatagaaacggaaagagtgctcttttaaacaatggaggggagctc

SEQ ID NO: 81745 - DNA, 502 bp, Homo Sapiens
tgtgttataaaaatagttcctctcagtaaatatctgtattaagaaaagcaaagtcaaggggtcatttcactagaattcatcatggtaatatttatgtttgcctttacttccaaaaaacaacaaaaacctcattccctttttacatttcatgtgacccacttcctcagatatacctaataaagcctttatcagtggtcaccattgtgctgtttttcctttcacttaactcagcccttgagccagagaaggaagctgcaatacttctattggattttgcaagacattaggtcatgcatgttgcccataacaaggaaactctttagtgtgaaaccacaaggctagtctcaatctcagctccatggcctctgggaaaataagagtcagggacctgcactgattcttcactaacctgagataaaatggtgttctcttccagtatgtcagtcaatttctcaaagacaagcaatgtttccctcagtcacggtgtaagaaaaaaactttc

SEQ ID NO: 81746 - DNA, 1473 bp, Homo Sapiens
  misc_feature (45)..(45): n is a, c, g, or t
  misc_feature (93)..(93): n is a, c, g, or t
  misc_feature (106)..(106): n is a, c, g, or t
  misc_feature (187)..(187): n is a, c, g, or t
  misc_feature (196)..(196): n is a, c, g, or t
  misc_feature (238)..(238): n is a, c, g, or t
ccctgagccaagatcgcaagggcgcagaggctgctcaagcacttnccatggtggatacagggtggcatgtgccagcaaatttactgttctgtnatggattttaatnaagtacccagatggataagacaggcatatcaccattagcagtggggaactgagctcagaggtacagtgcctgctcaagtanagatgtgtngggtgaggctagacccagacctggtccaccatgcatcctctntgaccccggactggaccccccctcacccgggacctttctccgcagcatgctgttgaggacgaagtcgtccttccaggcgcttctgggcctcctggatgtggctcagtgtgggcagcgccttctttgagtgtgctgcggtcggcctcgccatgctccagccggaacatggcgtccgtctccagcttctgcttcttctcatgctctgcaacgatcagagctcggctgggctttgggggccccagcgcagactcagggccagggcccccaggcaggtaagtgggtggcgctcacctgtggtcagcacctgctcattgtccgccatgtcccagcgctcctccttgcgctgggcgccactcacgatcacgtagtcgcagttggcggggtccgtctgcatctcgatgtagttgacacagaggtggcatttcatccggaacctgtagatcggggttgtgtagtaattgcccaccttcttcttttctgcattgtaacgaacacccatgccgatgtggttcttgcagccatcgcaccagatgttatatggcatttcgaatcggatgatgaggatgccctgtgacagcttccgagcccgctcccgaagcgggtggctgttgtggtatcggttgagagagccatgcttctcagggttgaagtctggaggatagtacttgttgacccctttcctttcacccatcttgggagctgcctactggtcctcagcctcggggcggacgatcagaaactggccttgtgaacacactgcactgtcctgacctcttgtggagcctggcagagggtccacaggcttccctgcgaagatgtcgtgggccgtgtggtggtgccagctcagacaagactcccgccaggcataggaggcatccaaaaagcggcgtgtctctggattctccagtgagggttactccagggtgggcctcttccccttcacgtcctgccaggcaatccccttggggcgagtcataacttttctggacctcagtttccttcccctcttctgagctctctgaatcctcaaagcctcctctgagatagaggctgtgaacgcctttcctacaaatggggaaactgaggctgggagacccgagaactggaccatgatctcaaacctttgagggagggagctaccctggaaggcgatggtcttctccagagccctcccaagggcgctcagtaccacgtgggcacccagagaagttttcttatccctcttggccccctcg

SEQ ID NO: 81747 - DNA, 1101 bp, Homo Sapiens
gggtccggaattcccgggatgcgtgacgtcgggaggagggcagacacgccgctttttggatgcctcctatgcctggcgggagtcttgtctgagctggcaccaccacacggcccacgacatcttcgcagggaagcctgtggaccctctgccaggctccacaagaggtcaggacagtgcagtgtgttcacaaggccagtttctgatcgtccgccccgaggctgaggaccagtaggcagctcccaagatgggtgaaaggaaaggggtcaacaagtactatcctccagacttcaaccctgagaagcatggctctctcaaccgataccacaacagccacccgcttcgggagcgggctcggaagctgtcacagggcatcctcatcatccgattcgaaatgccatataacatctggtgcgatggctgcaagaaccacatcggcatgggtgttcgttacaatgcagaaaagaagaaggtgggcaattactacacaaccccgatctacaggttccggatgaaatgccacctctgtgtcaactacatcgagatgcagacggaccccgccaactgcgactacgtgatcgtgagtggcgcccagcgcaaggaggagcgctgggacatggcggacaatgagcaggtgctgaccacagagcatgagaagaagcagaagctggagacggacgccatgttccggctggagcatggcgaggccgaccgcagcacactcaagaaggcgctgcccacactgagccacatccaggaggcccagagcgcctggaaggacgacttcgccctcaacagcatgctgcggagaaggttccgggaaaaagaaaaagccatccccaggagaggaggagagacgccaggcccttgcaagccaagggcgagcctgaacatcccgcctggtgccccgagaccggaaaatgaaccgcagcttggcgggctcctgctgaaagttccacacccctgggactccctacggagggacaaagcagaaaactccaggccggacacggagaaccattcagccccgcgtccctggggttccccctttttggccccccgggattccggccctcccaacaaaaccaaaggggtccatagcga

SEQ ID NO: 81748 - DNA, 1491 bp, Homo Sapiens
  misc_feature (99)..(99): n is a, c, g, or t
  misc_feature (139)..(139): n is a, c, g, or t
  misc_feature (141)..(328): n is a, c, g, or t
  misc_feature (332)..(332): n is a, c, g, or t
  misc_feature (873)..(897): n is a, c, g, or t
ctttccctgatcttgatacgtatacgccttgagtgagtgtacgttcccgcagccgacgacgagcgcagcggtcatgagcgagaagcggagagcgccatnacgcaacgcctttcccgcgcgtgcccgatcataatgcagntnnnnnnnnnnnnnnnnnnnnnnnnnnnnnnnnnnnnnnnnnnnnnnnnnnnnnnnnnnnnnnnnnnnnnnnnnnnnnnnnnnnnnnnnnnnnnnnnnnnnnnnnnnnnnnnnnnnnnnnnnnnnnnnnnnnnnnnnnnnnnnnnnnnnnnnnnnnnnnnnnnnnnnnnnnnnnnnnnnnnnnnnnnnnaatntggccctcgaggccaagaattcggcacgagggctaacacgaaacttacacatgtccaaaaatgattgagatggagcaggcggaggcccagcttgctgagttagacctgctagccagtatgttccctggtgagaatgagctcatagtgaatgaccagctggctgtagcagaactgaaagattgtattgaaaagaagacaatggaggggcgatcttcaaaagtctactttactatcaatatgaacctggatgtatctgacgaaaaaatgactcagaaaattaaactggaagagaattttaattcgccatcgagaagacattccttttgatggtacaaatgatgaaacggaaagacaaaggaaattttccatttttgaagaaaaagtgttcagtgttaatggagccaggggaaaccacatggactttggtcagctctatcagttcttaaacaccaaaggatgtggggatgttttccagatgttctttggtgtagaaggacaatgacatcaagagtagttgaaagtatcttgccactgttggccnnnnnnnnnnnnnnnnnnnnnnnnncttgaaagattaagtaattttattttagttccattctagaatgttggggagtggggcacaagaaaaaatagtatagctgaaatgcatctgttaaaaatgtcatgattgaaagcagaactgagtttcaaattacaaccttaaaattgttgttagatatttcttcacatatcagctgcccattttgaaaaagaaattatccataaaggtaatgttggtgctccaatttgccagccattcccaacccccttctcccttacctgccttcactaaagaacccagaaaagctaattgctcccctttcagcctctgttgcaactaacaactctcagtggcctcaggacacagctttggccttgggaattctgggaaaacttttacttcctgattaaagatacatatgcagctaggccacctcctcccccccttactgccataaacaccaaagtgatgactggagctggaggagttatttgaaccacgacggaagggccaagagaaccacgaagatgccagttgccacattgttgagctgctgacccaacaccagccattgcctgtctctaaacatcttatgaaataaaaccaattttgttt

SEQ ID NO: 81749 - DNA, 1075 bp, Homo Sapiens
tcgcgcggtgtgccgttggcggcgtcgcgatgcctggttgggctggtgctcgtcgttccatctgggtctctccccggcctgccagtttgcctgtgggacccttgttttcgtccctagtctgggtcgagttttccgttggtcctgtcccggcgtgcgtgcgatgtggtacgcattcgtgacgggactgtgctgtcctgctgttgggccgtattgttgcagtttcgtcctgccagtcttagtttgtctgagtctgtggaccagtttttctgtcatcagtgcacgttgtgttgggccctttcctactctgtgcgactccaggtttttccaggcattcttgtacccatgtcaggggtaagctcctttgcccacgtcttagaatattcgtttctttgtgcatttgttatagatatgatggctgtagatccagagttctcgtgaagatgaggtcaactgatctggactgtgcttcctgtggtgggtggaagatgaagtatctctgctgacatagccagaggcgtgttctctgaacccactctgtggcattcagtatacaaacatctccatgacaatgtttttgcaggaatgcagtcagatctgtgttcagctgagtctgctgggatctactcaataatactgatctgacagtaatttcaggcagaactgccgggtatttaaagggaagaatacaggccagagaaaacatcgccattttttcgtcagatacatccaggttcatattgatagtaaagtagacttttgaagatcgcccctccattgtcttcttttcaatacaatctttcagttctgctacagccagctggtcattcactatgagctcattctcaccagggaacatactggctagcaggtctaactcagcaagctgggcctccgcctgctccatctcaatcatttttggacatgtgtaagtttcttgagccgtggccccctcactgctgtaacccgggttccatggctgcatggacagctcaattttcatcagaagggagcctcaaaattctagcatactgcgacccaaaacttacaaaccgcctcagctggcgacctaccggaa

SEQ ID NO: 81750 - DNA, 855 bp, Homo Sapiens
  misc_feature (56)..(56): n is a, c, g, or t
  misc_feature (58)..(58): n is a, c, g, or t
  misc_feature (68)..(68): n is a, c, g, or t
  misc_feature (75)..(77): n is a, c, g, or t
  misc_feature (82)..(84): n is a, c, g, or t
  misc_feature (115)..(115): n is a, c, g, or t
  misc_feature (120)..(120): n is a, c, g, or t
  misc_feature (138)..(139): n is a, c, g, or t
  misc_feature (168)..(168): n is a, c, g, or t
  misc_feature (171)..(171): n is a, c, g, or t
  misc_feature (175)..(211): n is a, c, g, or t
  misc_feature (215)..(215): n is a, c, g, or t
  misc_feature (226)..(304): n is a, c, g, or t
  misc_feature (307)..(307): n is a, c, g, or t
  misc_feature (313)..(313): n is a, c, g, or t
  misc_feature (323)..(323): n is a, c, g, or t
  misc_feature (330)..(330): n is a, c, g, or t
  misc_feature (334)..(334): n is a, c, g, or t
  misc_feature (360)..(360): n is a, c, g, or t
  misc_feature (364)..(364): n is a, c, g, or t
  misc_feature (366)..(366): n is a, c, g, or t
  misc_feature (368)..(368): n is a, c, g, or t
  misc_feature (372)..(372): n is a, c, g, or t
  misc_feature (377)..(378): n is a, c, g, or t
  misc_feature (380)..(380): n is a, c, g, or t
  misc_feature (385)..(386): n is a, c, g, or t
  misc_feature (393)..(393): n is a, c, g, or t
  misc_feature (396)..(396): n is a, c, g, or t
  misc_feature (400)..(401): n is a, c, g, or t
  misc_feature (405)..(405): n is a, c, g, or t
  misc_feature (407)..(407): n is a, c, g, or t
  misc_feature (413)..(414): n is a, c, g, or t
  misc_feature (417)..(417): n is a, c, g, or t
  misc_feature (420)..(422): n is a, c, g, or t
  misc_feature (425)..(426): n is a, c, g, or t
  misc_feature (430)..(430): n is a, c, g, or t
  misc_feature (433)..(434): n is a, c, g, or t
  misc_feature (436)..(440): n is a, c, g, or t
  misc_feature (442)..(445): n is a, c, g, or t
  misc_feature (447)..(449): n is a, c, g, or t
  misc_feature (451)..(451): n is a, c, g, or t
  misc_feature (453)..(456): n is a, c, g, or t
  misc_feature (458)..(459): n is a, c, g, or t
  misc_feature (461)..(469): n is a, c, g, or t
  misc_feature (471)..(478): n is a, c, g, or t
  misc_feature (480)..(481): n is a, c, g, or t
  misc_feature (483)..(521): n is a, c, g, or t
  misc_feature (735)..(753): n is a, c, g, or t
ccccgtcctcgcggggggcgctctggggccccccgcctgccgtgtgctgcgggtgntntgcgggcggnttggcgnnntgggnnntcgctccgggcccggcttgccctggtgcgcntgttntccgcccgtttttggggnnttggccctgtcccccgggctctgtccccncgnggtnnnnnnnnnnnnnnnnnnnnnnnnnnnnnnnnnnnnnttcnccctcttttcnnnnnnnnnnnnnnnnnnnnnnnnnnnnnnnnnnnnnnnnnnnnnnnnnnnnnnnnnnnnnnnnnnnnnnnnnnnnnnnttncccccncttcctcccntttcttncccntcccctctttcctcccttttccctcncccncntncttnccccnntnctccnnccgcggnggncttnntccntncccttnnttntgnnnttnncctntgnngnnnnntnnnntnnntntnnnncnntnnnnnnnnntnnnnnnnntnncnnnnnnnnnnnnnnnnnnnnnnnnnnnnnnnnnnnnnnnttttcccaacccaccccccaccccctgcttcccctcactgcccaggtcgatcaagtggcttttcctgggacctgcccagctttgagaatctcttctcatccaccctctggcacccagcctctgagggaaggagggatggggcatagtgggagacccagccaagagctgagggtaagggcaggtaggcgtgaggctgtggacattttcggaatgnnnnnnnnnnnnnnnnnnnaaaccgggcaatattgtgttcagttcaagctgtgaagaaaaatatatatcaatgttttccaataaaatacagtgactacctgaacacaatattgcccggttt

SEQ ID NO: 81751 - DNA, 1122 bp, Homo Sapiens
  misc_feature (525)..(560): n is a, c, g, or t
taaaccctcggaagcccgcgacccgacgccgacgcgccctgcggtctggaagccgtcttgcaaccggcgcaacaagcggctgggactgcaccgtgaacaccaggctgtgtcaaaccacgcaaaaggaagctattcatccttggggaagggcctccgtggcactgccaaccaggtcccgtgacaaggcgtggcaaccccccccacgcgcccataattagctgccacaacaagagggaactaaagccacaagtgaagggaggaccatccccggcttggatggaggccaagagcttccccaagggggatctggggacggcttcaactttatgaatgcatcagcctggaagacgtggatggaaagaggcgagggcaaaggaagagatgagggggcatggagagagactcagcgaagaagggagaaaagagccatcatgcagcttgggacaatcttttggttgctttatcagattctcagtcaatcacattggtgtttgctagaaccggggtacgcaggggagtgttgannnnnnnnnnnnnnnnnnnnnnnnnnnnnnnnnnnnacgggcatcgccagctgcccggggggccttcactttgcagtcatcatctgtacaaactcttcataattgacctggccatctccatcgatgtcagcctccctgatcatctcatccacctcctcatcggtcagcttctcccccaggttcgtcattacgtgacgcagctctgcggcgctgatgtagccattcccatccttgtcaaagacacggaacgcctctcggatctcctcctcactgtctgtgtccttcatctttctggccatcatggtcaggaactccgggaagtcaatggtcccgttcccatctgcatccacctcattgatcatatcctgcagctctgcttcagtggggttctgtcccagggatctcatcactgtccccaactccttggtggtgatagtgccatctccatccttgtcaaagagggagaaggcctccttgaactctgcaatctgctcctcagtcagctggtcagccatggcgaggcccggggtgtccggagcacggggatcaaggttcctccgcctcgtgccgaattcgccacccaggcctcgcttccatt

SEQ ID NO: 81752 - DNA, 861 bp, Homo Sapiens
  misc_feature (44)..(85): n is a, c, g, or t
  misc_feature (822)..(822): n is a, c, g, or t
atagctaggtcgaggcctggtgtttaatcggcacgagggccgtnnnnnnnnnnnnnnnnnnnnnnnnnnnnnnnnnnnnnnnnnnagtgagtgtggaggcgcggacgcgcggcggagctggaactgctgcagctgctgccgccgccggaggaaccttgatccccgtgctccggacaccccgggcctcgccatggctgaccagctgactgaggagcagattgcagagttcaaggaggccttctccctctttgacaaggatggagatggcactatcaccaccaaggagttggggacagtgatgagatccctgggacagaaccccactgaagcagagctgcaggatatgatcaatgaggtggatgcagatgggaacgggaccattgacttcccggagttcctgaccatgatggccagaaagatgaaggacacagacagtgaggaggagatccgagaggcgttccgtgtctttgacaaggatgggaatggctacatcagcgccgcagagctgcgtcacgtaatgacgaacctgggggagaagctgaccgatgaggaggtggatgagatgatcagggaggctgacatcgatggagatggccaggtcaattatgaagagtttgtacagatgatgactgcaaagtgaaggccccccgggcagctggcgatgcccgttctcttgatctctctcttctcgcgcgcgcactctctcttcaacactcccctgcgtaccccggttctagcaaacaccaattgattgactgagaatctgataaagcaacaaaagatttgtcccaagctgcatgattgctctttctccttcttccntgagtctatctccatgcccctatctcgtcttcttctcta

SEQ ID NO: 81753 - DNA, 695 bp, Homo Sapiens
  misc_feature (569)..(607): n is a, c, g, or t
ggggacgcgcggcggagctggaactgctgcagctgctgccgccgccggaggaaccttgatccccgtgctccggacaccccgggcctcgccatggctgaccagctgactgaggagcagattgcagagttcaaggaggccttctccctctttgacaaggatggagatggcactatcaccaccaaggagttggggacagtgatgagatccctgggacagaaccccactgaagcagagctgcaggatatgatcaatgaggtggatgcagatgggaacgggaccattgacttcccggagttcctgaccatgatggccagaaagatgaaggacacagacagtgaggaggagatccgagaggcgttccgtgtctttgacaaggatgggaatggctacatcagcgccgcagagctgcgtcacgtaatgacgaacctgggggagaagctgaccgatgaggaggtggatgagatgatcagggaggctgacatcgatggagatggccaggtcaattatgaagagtttgtacagatgatgactgcaaagtgaaggccccccgggcagctggcgatgcccgnnnnnnnnnnnnnnnnnnnnnnnnnnnnnnnnnnnnnnntcaacactcccctgcgtaccccggtttctagcaaacaccaattgattgactgagaatctgataaagcaacaaaagatttgtccccaaa

SEQ ID NO: 81754 - DNA, 1607 bp, Homo Sapiens
  misc_feature (319)..(356): n is a, c, g, or t
aacgggtgatgcggttgggaacgggaccattgacttcccggagttcctgaccatgatggccagaaagatgaaggacacagacagtgaggaggagatccgagaggcgttccgtgtctttgacaaggatgggaatggctacatcagcgccgcagagctgcgtcacgtaatgacgaacctgggggagaagctgaccgatgaggaggtggatgagatgatcagggaggctgacatcgatggagatggccaggtcaattatgaagagtttgtacagatgatgactgcaaagtgaaggccccccgggcagctggcgatgcccgtnnnnnnnnnnnnnnnnnnnnnnnnnnnnnnnnnnnnnntcaacactcccctgcgtaccccggttctagcaaacaccaattgattgactgagaatctgataaagcaacaaaagatttgtcccaagctgcatgattgctctttctccttcttccctgagtctctctccatgcccctcatctcttccttttgccctcgcctcttccatccacgtcttccaaggcctgatgcattcataagttgaagccctccccagatccccttggggagcctctgccctcctccagcccggatggctctcctccattttggtttgtttcctcttgtttgtcatcttattttgggtgctggggtggctgccagccctgtcccgggacctgctgggagggacaagaggccctcccccaggcagaagagcatgccctttgccgttgcatgcaaccagccctgtgattccacgtgcagatcccagcagcctgttggggcaggggtgccaagagaggcattccagaaggactgagggggcgttgaggaattgtggcgttgactggatgtggcccaggagggggtcgagggggccaactcacagaaggggactgacagtgggcaacactcacatcccactggctgctgttctgaaaccatctgattggctttctgaggtttggctgggtggggactgctcatttggccactctgcagattggacttgcccgcgttcctgaagcgctctcgagctgttctgtaaatacctggtgctaacatcccatgccgctccctcctcacgatgcacccaccgccctgagggcccgtcctaggaatggatgtggggatggtcgctttgtaatgtgctggttctcttttcaaccctttcccctctatggcccttaagactttcattttgttcagaaccatgctgggctagctaaagggtggggagagggaagatgggccccaccacgctctcaagagaacgcacctgcaataaaacagtcttgtcggccagctgcccaggggacggcagctacagcagcctctgcgtcctggtccgccagcacctcccgcttctccgtggtgacttggcgccgcttcctcacatctgtgctccgtgccctcttccctgcctcttccctcgcccacctgcctgcccccatactcccccagcggagagcatgatccgtgcccttgcttctgactttcgcctctgggacaagtaagtcaatgtgggcagttcagtcgtctgggttttttccccttttctgttcattccgtactcccacccgggatactct

SEQ ID NO: 81755 - DNA, 852 bp, Homo Sapiens
cacatccattcctaggacgggccctcaggccggtgggtgcatcgtgaggagggagcggcatgggatgttagcaccaggtatttacagaacagctcgagagcgcttcaggaacgcgggcaagtccaatctgcagagtggccaaatgagcagtccccacccagccaaacctcagaaagccaatcagatggtttcagaacagcagccagtgggatgtgagtgttgcccactgtcagtccccttctgtgagttggccccctcgaccccctcctgggccacatccgtactggcccgcgggccagtacggatgtgcgggccagtgtgtccggtttaataaaaagggaaagggtcatcaggtggccacagcctttccttgtcagtcatatccccaacctccagatcctttatactctcataagtttgaatacagtcaaggttagttgggtcaaaaactgatgttgattatgattaaaaagatacaaaactcagcacctccttcattaaaaataaaggttgagaaacttgataagaaaaaaactaaaatattcttatagctgcctgggggagatcttaatccttccacatacagatatccttatatccacaggaggccatgtggactaaaaccaaactgagtccattactcattccctctccggctcttcttgtggctcttcttagacctttcgggagactttgagtggctcctgtgtctgtgactacggtgatgacctggggacttggaacgggatctgtgccgccgatctcgggacctgctgcggtgacgtcttggactcttgctccgatgcctttctcggcgaggggaggggcttctccttttgcgagatcgactcc

SEQ ID NO: 81756 - DNA, 1483 bp, Homo Sapiens
  misc_feature (55)..(55): n is a, c, g, or t
  misc_feature (71)..(71): n is a, c, g, or t
  misc_feature (83)..(83): n is a, c, g, or t
  misc_feature (101)..(158): n is a, c, g, or t
  misc_feature (162)..(162): n is a, c, g, or t
  misc_feature (183)..(183): n is a, c, g, or t
  misc_feature (202)..(202): n is a, c, g, or t
  misc_feature (223)..(223): n is a, c, g, or t
  misc_feature (348)..(348): n is a, c, g, or t
  misc_feature (432)..(432): n is a, c, g, or t
cagtcccgatggaagcgcatgagccacgcatatgtgagtagtcatcatagcaccncagcttacacttatgntccgctcgtatntgttgaaatgtgacgatnnnnnnnnnnnnnnnnnnnnnnnnnnnnnnnnnnnnnnnnnnnnnnnnnnnnnnnnnnttgnccctcgagccagaaaatcgcnacgaggagcttcaagttcnggaaagccatcgtcatctgtncaaggaacagtcgtagtcgtgatccaatcagaatttggacccagtatatcaaaaggtcagactgtcaacctaagcctggacctgacccatataacgggaaagtttaacaatgactcacattctcntaaagttccagccagaataggacacgctcatttggtcattttcccggtccagagttcttggatgtagagaaaactagcttctcncaggaacaatcttgtgattccgcaggagaaggctctgaaagaatacatcaagattctgaatctggtgatgaacttagcagcagctccactgaacagataagggcaaccacacctccaaatcaaggaaggccagattctcctgtctatgctaaccttcaagaactgaaaatatcccagtctgctcttcccccacttcctgggagcccggcaattcagattaatggagaatgggaaactcataaagacagctcagggcgttgctattactataacagagggacacaggaaagaacttggaaacctcctcgttggactcgggatgcaagcatcagcaaaggagatttccaaaatccaggggatcaagagcttctttcatcggaagaaaactactacagcacttcttacagccagtcagatagtcagtgtggttctcctccaaggggttggtcagaagagttggatgaacgtgggcataccttatataccagtgactatactaatgaaaagtggctcaagcatgttgatgatcaaggtagacaatattactacagtgcagacggatctcggtcagaatgggaattgccaaagtataatgcttcatcccagcagcaaagagaaataattaaaagtaggagcctggacaggcggctgcaagaaccaatagtattaacaaagtggagacatagcaccattgtattggacactaatgataaggaatctccaactgcctcaaaaccctgctttcctgaaaatgagtcttctccctcctcaccaaagcaccaagatacagatcaagagaaatatggattattaaatgtaacaaaaattgctgaaaatgggaaaaaggttcgaaagaactggttgtcttcttggggcggtgttgcagggttcatctttactttttaccaaaacttcaaggaaagtaccaccaagttgggttttgggcattaattcagctcccaaaccagaagtttcacaggtggaaccctccaagggggggcaaacaaattggagaatggggctttccaaaggggaataaattcccagtcag

SEQ ID NO: 81757 - DNA, 1042 bp, Homo Sapiens
  misc_feature (41)..(41): n is a, c, g, or t
  misc_feature (81)..(149): n is a, c, g, or t
  misc_feature (153)..(153): n is a, c, g, or t
  misc_feature (167)..(167): n is a, c, g, or t
  misc_feature (170)..(170): n is a, c, g, or t
  misc_feature (248)..(248): n is a, c, g, or t
  misc_feature (300)..(300): n is a, c, g, or t
  misc_feature (563)..(571): n is a, c, g, or t
gcacgcaattatgtgagtagctcatcatagcacccccagcnttacacttatgctcccggctcgtatgtgtgtgaaatgtgnnnnnnnnnnnnnnnnnnnnnnnnnnnnnnnnnnnnnnnnnnnnnnnnnnnnnnnnnnnnnnnnnnnnnttgncccctcgagcccangantcgggaacgaggaaataaatacctatgtagacattctataataacaaggagccatagatgataaaggaattagatttnaatgtagaatgggtgtttctgaaacaaaggtatgtggtactttgtagtattngatgagaagccagtaaccagtagtgttttcctagatatatgcccaccctcacacaactttcttcatgaacaaacattaaatatgcatttgtatcttattaaattatattgtataatgctgaaggaaaacaaaaagtgttcaaataatcataacttctacattacaggttctgtttagatgcagaactagaggggccagggtaaatgtagataaagagatatatagcaccatgcttcttaatgcttcatacttttgcaaacagnnnnnnnnngttttacttttattataaaacttcatctatggtcaaagtaaacactgttacatttaaattgctttttaaaaacaattgcgatctaaaaagtcaaaaatctgaaatttaataatatgagacttacactgaatataatgttcatttagaagttgctgtggtccacttcatttataaggaacaaatatttttacagtacactatagcaacagcaaaagccctctctcaccctgataggaatgggtttgctgggtgtctagaagttagattcctgctgaatagaattagccatccttaaaagattttaatccaatactgaactgtttataaaatgctttctctattgtaatgtactgtaagtagtgaaattctgtatatactgctattttctgtctgttcattgttgtgaacttcttatgtatattagtgaaataaattttcagctttcatgttgtttcctaaacattcataagt

SEQ ID NO: 81758 - DNA, 1035 bp, Homo Sapiens
  misc_feature (13)..(13): n is a, c, g, or t
  misc_feature (21)..(21): n is a, c, g, or t
  misc_feature (352)..(352): n is a, c, g, or t
  misc_feature (423)..(423): n is a, c, g, or t
  misc_feature (760)..(771): n is a, c, g, or t
ccagaccgagcanggtcatgncggaacggagacgccatacgcacgcctttcccggggtgccgatcataatgcactgcacgacagttcccgactgaaagcggcatgagcgcacgcaataattgagtagctcatcattagcaccccaggttaacacttatcttccggctcgtatgtgtgtggaatttgagcggatacaattcaccacagaaacagctatgcctgattacgatttaaacgactcactatagggatttggccctcgaggccaagattcggcacgagggttcctctacagaacatgaaaaccggggtcacctcgtaaaggtaccctcaaggcccagttcagaaaggncacagtcagaacccttcctccttcacaaggagattctcaatcacttgacattccaaacactgctgattctntgggagggctgtcctttgagccagggttggtcagaacctgtaataatcctgtttgtcctccaaatcacgtagtgtccctaacgaacaatctcattggtaggcgggttcccacagatcttcagatctaaacagcggttggcttttagacattatatatattatcagagaagtagcctagtggtcgtggggcacagaaaaaatagataggggcagctctaaagaccagctgttaagacagacaactgcaaactcatttaagcaagagaaaaacagctctaattcgagattgtgaagcaacacttctaaattcaaagacatagagttgtcaaatcaggannnnnnnnnnnnaaaatgatatcctttcgaatgtaactgattttgggaaaatcacatgttcagaattgaggctaaatggtttgatcaggttttctctttgaagagaccacagccttaggaaatggttcttgatctatacaattccaccttggacactgggttaattctgtttgcccctggaacacaatcacgtaagtttccttctagactggcatcctgatgtgtcttgagtataatcacatgttgctacctagtaaataaaatcttaagaagaaa

SEQ ID NO: 81759 - DNA, 1591 bp, Homo Sapiens
  misc_feature (57)..(57): n is a, c, g, or t
  misc_feature (157)..(360): n is a, c, g, or t
  misc_feature (1514)..(1531): n is a, c, g, or t
ctgtcttctgcgtatccctgatcttggataccgtatacgccttgagtgactgtacgntcccgcagccgacgaccgagcgagcgagtcagtagcgaggagcggagagcgccatacgcaaaccgcctctccccgcgcgttgccgatcataatgcagctnnnnnnnnnnnnnnnnnnnnnnnnnnnnnnnnnnnnnnnnnnnnnnnnnnnnnnnnnnnnnnnnnnnnnnnnnnnnnnnnnnnnnnnnnnnnnnnnnnnnnnnnnnnnnnnnnnnnnnnnnnnnnnnnnnnnnnnnnnnnnnnnnnnnnnnnnnnnnnnnnnnnnnnnnnnnnnnnnnnnnnnnnnnnnnnnnnnnnnnnnnnnccaaagaattcggcacgaggttatcatatgttctaaaagagaaggaagagaaaatactactttctcaaaatggaagcccttaaaggtgctttgatactgaaggacacaaatgtgaccgtccatcctcctttagagttgcatgacttggacacggtaactgttgcagttttagactcagcattgtgacacttcccaagaaggccaaacctctaaccgacattcctgaaatacgtggcattattcttttttggatttctcatttatggaaggctaaccctctgttgactgtaagccttttggtttgggctgtattgaaatcctttctaaattgcatgaataggctctgctaacgtgatgagacaaactgaaaattattgcaagcattgactataattatgcagtacgttctcaggatgcatccaggggttcattttcatgagcctgtccaggttagtttactcctgaccactaatagcattgtcatttgggctttctgttgaatgaatcaacaaaccacaatacttcctgggaccttttgtactttatttgaactatgagtctttaatttttcctgatgatggtggctgtaatatgttgagttcagtttactaaaggttttactattatggtttgaagtggagtctcatgacctctcagaataaggtgtcacctccctgaaattgcatatatgtatatagacatgcacacgtgtgcatttgtttgtatacatatatttgtccttcgtatagcaagttttttgctcatcagcagagagcaacagatgttttattgagtgaagccttaaaaagcacacaccacacacagctaactgccaaaatacattgaccgtagtagctgttcaactcctagtacttagaaatacacgtatggttaatgttcagtccaacaaaccacacacagtaaatgtttattaatagtcatggttcgtattttaggtgactgaaattgcaacagtgatcataatgaggtttgttaaaacgatagctatattcaaaatgtctatatgtttatttggacttttgaggttaaagacagtcatataaacgtcctgtttctgttttaatgttatcatagaattttttaatgaaactaaattcaattgaaataaatgatagttttcatctccattcagnnnnnnnnnnnnnnnnnngcctacagccgcggccgcaagcttattccctttagttgagggttaattttagcttggcac

SEQ ID NO: 81760 - DNA, 978 bp, Homo Sapiens
  misc_feature (521)..(576): n is a, c, g, or t
  misc_feature (650)..(850): n is a, c, g, or t
ttttaatcaacactacctaaacactcattaacagcatcatctgtacagctgcttttgaaactcaagtctataagcagaaaaaatatttatgaatttagtcactacaggatacaatattcgtttaactataatactaaagaaaaaagtatgtcttcattttatcttgaaggtaacagtggaatccattcatattaaaacaatttaacttttcttataacttctaccttttctaaactcatacttaggatgctaacaacatagtaaattctcacaatttgtactgattctcctataattttctgtcattacttggagttgtttgctcaattatcttactctcctgtgaatcttagtggctcaggttctccatttgaacggagaggttgaactagatgatctctaaggcacttttcagctctaaaattcggagacaatgaaaatatcctaaaaaaaaggaaatgggtttagcaactgagtgttgtcttgaaagcaaaggtcttatctattttattcctgctatnnnnnnnnnnnnnnnnnnnnnnnnnnnnnnnnnnnnnnnnnnnnnnnnnnnnnnnncacaactaaaattcaaataagtactaaaatatttaatataccttattttatatttccctcgtgccgaattcttnnnnnnnnnnnnnnnnnnnnnnnnnnnnnnnnnnnnnnnnnnnnnnnnnnnnnnnnnnnnnnnnnnnnnnnnnnnnnnnnnnnnnnnnnnnnnnnnnnnnnnnnnnnnnnnnnnnnnnnnnnnnnnnnnnnnnnnnnnnnnnnnnnnnnnnnnnnnnnnnnnnnnnnnnnnnnnnnnnnnnnnnnnnnnnnnnnnnnnnnntgtcgtgcagctgcataatgatcggcacgcgcgggagagcggttggtatgggcgtctccgctctcgccatgatcgtggctcggctcggtgcggagcgacaccatcaaggggatacgtacaaaatcgga

SEQ ID NO: 81761 - DNA, 1002 bp, Homo Sapiens
  misc_feature (28)..(28): n is a, c, g, or t
  misc_feature (161)..(161): n is a, c, g, or t
  misc_feature (163)..(163): n is a, c, g, or t
  misc_feature (234)..(234): n is a, c, g, or t
  misc_feature (251)..(251): n is a, c, g, or t
  misc_feature (653)..(653): n is a, c, g, or t
ccactatactgatcgattcatcgatctnttagggattgcctcgagccacgagtcgcaggaggagtgtgcacgaaaagactgcatcaccgtaactgacgcttgtgatggggaactattgcaactcgcattgacaaggccaatatccagatgtacaaagtacntnaacagtagaccagcaaggaggaaaaacccaattaaaaaatgtgcaaagacatgaacagacacttgtcaaanagaagacatacaagtgnccaacaaacgtgaaaaaatgctcaatatcactaatcatcagataagtgcaaatcaaaactgcaatgagttaccatctcgtaccagtcacaaagttcgagatggtggtgagcctgcagaggaaaagaaacagacactgttggtgggaaagcaaacttgttcagccgctatggaaagcagtttggagatttctccaagaacttaaaatagaacgaccattcaagcctgcaatcccactactcgggatatatccacaggaaaagaattcattttatccaaaagacacctgcaccaatatgttcattacagtgctattcttactagcaaggacacagaatcaacctaagtgcccagcaacagtgaattgaatgaaaaaaatgtggtacataaacaccatggaaatntatgcagccaccaaacacagcaaaatcatgtccttttcagcaacatggatggaactagaggctattatcctaagcaacctaatgcaagaacagaaaactacatactgcatgttcccattggaaagtggcagctacacattgaattcacatgaaccagaggcactggagatcactagacaggtgagacaggaggggcacctgggctgaaaaaccaccgtgttgggtaccatgcttactgtttgagtgatgaggtcattgggacagcaagcctcagccttccaaaatctacccatgtaacaaacctgtatgtgtaccccttaatctataataaaggttaaaattaaagatt

SEQ ID NO: 81762 - DNA, 995 bp, Homo Sapiens
  misc_feature (47)..(47): n is a, c, g, or t
  misc_feature (104)..(104): n is a, c, g, or t
  misc_feature (154)..(154): n is a, c, g, or t
  misc_feature (167)..(167): n is a, c, g, or t
  misc_feature (183)..(183): n is a, c, g, or t
  misc_feature (198)..(198): n is a, c, g, or t
  misc_feature (324)..(324): n is a, c, g, or t
  misc_feature (609)..(617): n is a, c, g, or t
cacatatcatcaaattgtcattaatatataagtgttctattgtactntgtctgctttcagaaaatgaacttgccatgttattcaacaaaatacttagatatatnttttgtacttgatgatgctctaagatcacatgaggtagtattatatatangatgaagacactnttgacataacactgantaggagtgagagctntgcatcagcagaaagcaaactgattatagtgtgttgcaccagatcatgtagctgctgtgtaacatgaccttaaatagtcttcctgcataggaagagcaaaaggtattcatcaataggatatagatntaagacattccctgactaccccttgcgttgttaggtgatgtcttttagcagaatcatgaagaccttttttctcccttaataaaggagaaaaatatactgatggctggagaaatttttctctgcctttcagttttatgaattttttcagaagtaacaatattattattgactttttacttatttgataaaaattaaagaactatttttgttttggtcagataaattgacaagactaatcagtattttattataagtaaaagatttttcttctttccttaaaaatannnnnnnnncacctaggtctaaatagctaactaactggtagaccagagtattacatcatcttattttggttttataccaataaaacatagcgtggaactcattcaggtaatgttttgcatttcattgcttttggatgaacaaaggaagtaaactaatcctttataaatgaaaacccagaatagttggtatgtcagctagtcattcctgtcatattcccagtagaatgattttcaagtttgaatttctgtacaaatatctaaataagagatgtgcagagagcaccaattttccttcaatatccattctttacttttcacataatgatagaacctttgatttttcaagtgggtatgcctcctagaataaagactacatttcccagaaaa

SEQ ID NO: 81763 - DNA, 1145 bp, Homo Sapiens
  misc_feature (137)..(137): n is a, c, g, or t
  misc_feature (182)..(182): n is a, c, g, or t
  misc_feature (211)..(211): n is a, c, g, or t
  misc_feature (284)..(284): n is a, c, g, or t
tccgaacgttgctgtcgatatgatcttaggattgctgagccagatcgcagagaaatgctcatctcagtaacaatcttccccagctggagcatcgtttgatatgagtatgcagttagatcacagtcccagattcatcntgcctttagagccttgtaatctccgagtacatcatttgtaatatntgatgacttaaaaccaatgcttgaaaagnttattccataacatcaacagtgagtgattgtagattaccttagccaaaataccaatgctggaagcattgtgtntgcattgaagctgctgttcaacaagaaaatttataaatttactaatgtcttagcatggtaaagttgcacattaacagaaattaagactgcaaagcaggttaaacttgcttctttataaaacagatgttgggttaatagcatggtttactgtattaaagacttatacacccatttttaacctcattcagacatcaagttatgtgtagcttcacaatggttcaagtggcttacttcaagaaatcttatacttgacagtacaccaattttattgactaaaaatggatgaactttcctaaagattcaaagggcccatcttagtatcacgcagctgactgagcccttcaaaactgacatcttaaggcccaatcaagatccacatatcctgattttgaactatgtgaaagtgggactgttaagtgcaagactaaaataaattatagcagactttttagtaataactttccattttcaaacagtatatcctgtgggccaaagggctatttcttaaagaggcatgtaaatgtatttatttatctaatgtttttttccccatgtaaacttgatatacaaggtttagtatttgctcctctttcatattattttcacacgtatactcagatttggcatgtacctttcaacatctccataaaattaaacaccttttggagaaaagatccactattttctgctcaaaggtttcgcctacctaaagtggaacatgttaaaaatctatgtgaccatcactggacagctttctctcaaaactttccttcaacgccatggattagcaccagttttgtttactttaaggtacttttcccattcatcatctggttataataaatgaatggaagaaaaaaa

SEQ ID NO: 81764 - DNA, 1709 bp, Homo Sapiens
  misc_feature (1635)..(1653): n is a, c, g, or t
aaataaggcataggtagaggacgggggttaatcggcacgaggcacaagggaccaggggtcaactctggtattatggagaacatatgtatatgctacatggaaaatctctaactgtgattccatacaagtgtgaagtgtcatcattagcaggtgctcttggaaaactcaagcatagtcaagatccaggaactcatgtcgtgtcccattttgtaaactgggagacacctcaaggatgtggacttgggttccagaactcagagcagtcaagaagaattttaaggagacgaaaaattgaagtgagtttacagccagaggttccaccatccaaacaacttttgtcaaccataatgaaagattcagaaaaacacattgaagtagaagtacggaaatttttggctctgaagcagacacctgactttcatactgtcattggggacacagtaacaggacttctggaaaggtgtaaagcagaaccatcattttatccccggaactgtctgatgcagcttatccaaacgcatgtgctttcttacagtttgtgccccgacttaatggagattgccttaaaaaagaaagatgtacagttgttacaactctgtctacagcagttccctgacattcctgaatcagtcacctgtgcttgcttaaaaattttcttgagcattggtgatgacagtcttcaagaaacagatgttaatatggagtcagtttttgactatagtataaattctgtacatgatgagaaaatggaagagcaaactgaaattcttcaaaatggcttcaatcctgaagaagataaatgcaataactgtgatcaagagttaaataaaaagccccaggacgaaacaaaggagagcacttcatgccctgtggtacaaaaaagagcagctctacttaatgcaattcttcattcagcatatagcgagacatttcttctgcctcatttgaaagacatcccagcacagcatatcacgctgtttcttaagtatttgtatttcctgtacctgaagtgtagcgaaaatgctactatgactcttcctggaatacacccacctaccttgaaccagattatggattggatatgtctacttctggatgcaaattttactgttgttgtaatgatgccagaagcaaagaggctactgataaatctttacaagcttgtaaaatctcagatatctgtttattctgagctcaacaagattgaagtaagttttcgggagctacagaaattaaatcaagaaaagaataatagaggattatattcaattgaagtgctggagctcttctgatattatcaattctccttcatagacattttataaagctcttttatgtgaactcttgcttcatccaggcaagaacggtgttttgtttgcgaccatctcagtgtcaagagaaacgtgtcagtgagtacctggaccatcacttaactgatgctccggggtaggactgcaggtttcacatgaacctgttctaggctgtggacattggtgtggagaggttctgcaattttttaaaaatatgtaactgggttgattttaagtaaaattatttgtgtattgataaaagtctaatttcttatcatgtgttttgaattttttcttttaataaaaaatgaccattgaagcagtnnnnnnnnnnnnnnnnnnnctgagcaggcggccgcaagcttattccctttagtgagggtaattttagcttggcac

SEQ ID NO: 81765 - DNA, 927 bp, Homo Sapiens
  misc_feature (101)..(101): n is a, c, g, or t
  misc_feature (111)..(112): n is a, c, g, or t
  misc_feature (181)..(279): n is a, c, g, or t
  misc_feature (299)..(702): n is a, c, g, or t
gtgtctacggtgatcagcgtataccatagccacgtcgctaacgggttgtcaacaccagttgacgacgcctacccgatgagtactacgctgacttgagagcncacctccgannggagaagcgacagttccgtagcgcaggtcgaacagaggcgcacgaggagtccagggggaacgcctgtannnnnnnnnnnnnnnnnnnnnnnnnnnnnnnnnnnnnnnnnnnnnnnnnnnnnnnnnnnnnnnnnnnnnnnnnnnnnnnnnnnnnnnnnnnnnnnnnnnttcctgccttttgctgcccnnnnnnnnnnnnnnnnnnnnnnnnnnnnnnnnnnnnnnnnnnnnnnnnnnnnnnnnnnnnnnnnnnnnnnnnnnnnnnnnnnnnnnnnnnnnnnnnnnnnnnnnnnnnnnnnnnnnnnnnnnnnnnnnnnnnnnnnnnnnnnnnnnnnnnnnnnnnnnnnnnnnnnnnnnnnnnnnnnnnnnnnnnnnnnnnnnnnnnnnnnnnnnnnnnnnnnnnnnnnnnnnnnnnnnnnnnnnnnnnnnnnnnnnnnnnnnnnnnnnnnnnnnnnnnnnnnnnnnnnnnnnnnnnnnnnnnnnnnnnnnnnnnnnnnnnnnnnnnnnnnnnnnnnnnnnnnnnnnnnnnnnnnnnnnnnnnnnnnnnnnnnnnnnnnnnnnnnnnnnnnnnnnnnnnnnnnnnnnnnnnnnaagaattcggcacgaggagcatatgaaaaaaagctcaacatcagtgatcattagagaaatgcaaatcaaaaccacaatgaggtaccatctcacgccagtcagtatggcaactgttaaaaagtcaagaaacaacagatgctggcaaggctgtggagaaataggaacgcttttacactgttggtgggaatgtaaatcagttcaaccattgtggaagacagtgtgatg

SEQ ID NO: 81766 - DNA, 964 bp, Homo Sapiens
  misc_feature (150)..(150): n is a, c, g, or t
  misc_feature (201)..(273): n is a, c, g, or t
  misc_feature (287)..(287): n is a, c, g, or t
ccttatgatgtacgtcgcacgagacgaccaggacatgcgagagcgagacgccatagcacgctctcccgggttgcgatcatatgcactgcagacagttccgatgaaagcggcatgaggcacgcaatatgtgagtagtcatcattagcaccncagcttacaacttatgctccggctcgtatgtgtgtggattttgagcgtatnnnnnnnnnnnnnnnnnnnnnnnnnnnnnnnnnnnnnnnnnnnnnnnnnnnnnnnnnnnnnnnnnnnnnnnnnccaagaaattcgcnacgaggacaaactctgaatacagtgctcactgaaatttctcaaggagcattcagcaatccaaacgctgcagcccaggtcttacctgccctgatgggaaagaccttcttggatattaacaaagactcttcttgcgtctctgcttcaggtaacttcaacatctccgctgatgagcctataactgtgacacctcctgactcacaatcatatatctccgtcaattactctgtgagaatcaatgaaacatatttcaccaatgtcactgtgctaaatggttctgtcttcctcagtgtgatggagaaagcccagaaaatgaatgatactatatttggtttcacaatggaggagcgctcatgggggccctatatcacctgtattcagggcctatgtgccaacaataatgacagaacctactgggaacttctgagtggaggcgaaccactgagccaaggagctggtagttacgttgtccgcaatggagaaaacttggaggttcgctggagcaaatactaataagcccaaactttcctcagctgcataaaatccatttgcagtggagttccatgtttattgtccttatgccttcttcttcatttatcccagtacgagcaggagagttaataacctccccttctctctctacatgttcaataaaagttgttgaaagattaacaactat

SEQ ID NO: 81767 - DNA, 1045 bp, Homo Sapiens
  misc_feature (33)..(33): n is a, c, g, or t
  misc_feature (53)..(53): n is a, c, g, or t
  misc_feature (58)..(58): n is a, c, g, or t
  misc_feature (82)..(82): n is a, c, g, or t
  misc_feature (112)..(112): n is a, c, g, or t
  misc_feature (153)..(154): n is a, c, g, or t
  misc_feature (159)..(159): n is a, c, g, or t
  misc_feature (171)..(171): n is a, c, g, or t
  misc_feature (183)..(183): n is a, c, g, or t
  misc_feature (188)..(190): n is a, c, g, or t
  misc_feature (193)..(193): n is a, c, g, or t
  misc_feature (234)..(234): n is a, c, g, or t
agtaggatgagtcctatgcagtcacaactttcntgtaagccagatagagtatntgctntgctgttgctttctatatactgtnggatgacatgtcatgcttgtccagcacacntgttacccagacagctgtggctgtattgtcctcagctgtgnncttgntagcccttgctntatgggatgtgntgcgnnncantgcagatttccccttgctgagaacatgcagatgaataaccnttatagctgggatgcagagaggagaaaagtctgtaggaaataagtgcactgtattccctctgagctacttcctgggcatagtaacatgtatggccagtgtgtgtacttgagccatcaggctcagacacttgttgaatatacctctcattgcattagtttgtaattgtgctagtgctgggtgctgagctcagctgcccggatgacctttccagactgaaggacatactcccctaacagctgggagtgctgctggctggccatttacttccagcccttatgaggagtttcccctgctgaagagccctgcctgccccagatcatacccccttcctgcctgtaacccttaccggctccatatggggtacaaagggctggcctcctcaccccaacttgggaaaccctctggggccatcccagctccagagccccttgtggggtcagtgagacctcattgtggccacattacagcccagtgcctctccctgacaagcctgtacccagccggctcagcccacagcactgtcctatgaaccttcctgcacgccattctccacctcagtatctgctttcggggaacccaacctgcgacagtgcttctgtgtgttttcagtcctgcaggtttgaactctgactttggagacttttccagttatctcatggaatgacagattgtgcctgtatgatatcaggcacaattaatgcaaattaggcagacctatttattctagatgtgaatttgctatttattttaaatgttgattttatgtgttatgtgactctgaacttattgccaaataaaagtttgaattgt

SEQ ID NO: 81768 - DNA, 719 bp, Homo Sapiens
  misc_feature (161)..(203): n is a, c, g, or t
ggtcgggctccggtatctagaagtagaaccagtatccagacagaagaagagaaactgaggccagcattatcacctccaggactttctcgttttccaccttggccatcttcttccttcgtcgtctctcctctttaatttcttttctattccatcatctgccnnnnnnnnnnnnnnnnnnnnnnnnnnnnnnnnnnnnnnnnnnnaagatatgcatactgaaaagtatataacatgtacgtacaatttaaagaataattttaaagtgaatactacgtaactccatccaagtcaagaaattgccagcttctcggaagcccactgtgtctccttcccctacctgcaacctcttccaggctcccttttccagccttcccctttttcccttttattttcatgccttgatttgacttgtgtggtgggaacatgtgaactatgaaacttaaacctgctgcccacccagagcagctgtgaccaagggctgcctcaaggggttgtccacgcaggttgggctcctctctgctgctggacccaagactctgaaccttccaagggacaggcagttcttctaagaagggctcccctgtgtgtgagcaagaccacagctctccttctatctacagatgcatgagggttggaagagtctgggctgtttttagaccttctggtcagctgtatttgtgtaacaacttttgtaataaatagaaaaaccctctgctctg

SEQ ID NO: 81769 - DNA, 883 bp, Homo Sapiens
  misc_feature (141)..(176): n is a, c, g, or t
aagggaaaggagacccagtggccttccgagaacctgcaatttctgaccttgcatggattacgtagtattcactttaaaattattcttgaaattgtacgtacatgttatatacttttccagtatgcatatctttaaattttnnnnnnnnnnnnnnnnnnnnnnnnnnnnnnnnnnnncagatgatggaatagaaaagaaattaaagaggagagacgacgaaggaagaagatggccaaggtggaaaacgagaaagtcctggaggtgataatgctggcctcagtttctcttcttctgtctggatactggttctacttctagataccggagcccgaccagcatacccaggatggagaaacttgccaccatcaggggtgccaggacgccaatcgtgggagctgcagttccatagacaaacaactcagagaggaaatgccccagggcaaggaggaaggtccagagtgtgatgtgatagagcgtcttgttgtgaatgtcaatggcacagaggcagcgaatcactgatgagagcagcgtccagatcccaaaggtccgagcttggaggccattcacaaggtttggcttgccagtgtagagcttttcatagagaaaagtgtggtctcggaagctctgcagcgtgttccccatggctatgatggacaccataaccagccaacttcttaacacattcaggaaacggctcatgactcccctcaaacgtgggagggctttttgcctggcgaccgggcccccagcacagcagtggcagcagcagccgctgccgcaaacaagctcccccaggacagctccagcccggagtccacctgagccatttgtcccccggccgtaatggccgaattcccgggcatatgtccgctaccgtcgactg

SEQ ID NO: 81770 - DNA, 1022 bp, Homo Sapiens
  misc_feature (35)..(35): n is a, c, g, or t
  misc_feature (46)..(46): n is a, c, g, or t
  misc_feature (84)..(84): n is a, c, g, or t
  misc_feature (93)..(93): n is a, c, g, or t
  misc_feature (97)..(97): n is a, c, g, or t
  misc_feature (103)..(103): n is a, c, g, or t
  misc_feature (130)..(131): n is a, c, g, or t
  misc_feature (166)..(166): n is a, c, g, or t
  misc_feature (207)..(207): n is a, c, g, or t
  misc_feature (212)..(212): n is a, c, g, or t
  misc_feature (229)..(229): n is a, c, g, or t
  misc_feature (233)..(233): n is a, c, g, or t
  misc_feature (246)..(246): n is a, c, g, or t
  misc_feature (257)..(257): n is a, c, g, or t
  misc_feature (292)..(292): n is a, c, g, or t
  misc_feature (329)..(329): n is a, c, g, or t
  misc_feature (362)..(362): n is a, c, g, or t
  misc_feature (386)..(386): n is a, c, g, or t
  misc_feature (414)..(414): n is a, c, g, or t
taatgcatacggcgcttggattgactttcgtcagnttgtgtcgtancaggatagagtgaaaggcctgacatcagaagcatcatntgtcataanttcntggtcntgaatcttagagacagcaggactgacnntgttcttgaggaccttcagtgcccagtgcagcccntgggggttgagctccagcattggacaggcacagagcagggnctgcncaggaaagagcacactncagncaggggtgcatgncagaggaagtngggagagcccagaaggacattgcagacagacagcntgcatggggactctggcatcagaaagccgaatgtttntgggaaacggtgggtcacacaggcaggggtganacatgggctctgaggttggctacntgattcaaacccggccgcgctgcgcacntgctgggtgacttggccaggatccctcacttcgctgtgcccatatggaaaagagggcaaggccagtcctcactgccgagggccgagaaggcggtgccgagcccctgctgctgcatgaaccttagccgctgtcactgatcccaattactctgatccttttgcccttccttcccataacggcctgctggacgccacagcctgaatactggagagagctgggcattgcccaggtcacaggagagagtccgtagagacctgcgcaggagccgggacccctgctgagcagtgggagctttctgtcatccccatggctcaaggataacctacctgcctgcagagaagtgcgaaggtcttgctggatgacttttcacccgcactcacccaggagcaggctcccaagtgaagaaaccaccaaaccatcaccagctcctagaagcctccctcccaccaccttctagtcaccatcccccagaagtaatgactctcaaacctgggggatttgaggccagggggagagccaggctctatgctttctgtaattgtgtctcgtttgtgtgcacgcaggtttgttttatgttttagccattaagattttccccagcaaaaaaa

SEQ ID NO: 81771 - DNA, 1073 bp, Homo Sapiens
  misc_feature (82)..(82): n is a, c, g, or t
  misc_feature (96)..(96): n is a, c, g, or t
  misc_feature (206)..(370): n is a, c, g, or t
  misc_feature (387)..(387): n is a, c, g, or t
ggcttacgatctgctatgtgcttgtacagttcttcttctttccatatctgagtaacattccgccttgatgagtgtacgttcnccaccgaagacggncagggaccgtgagcagaacggaaagcccccatacgcaacccgtctcccgcgcgtgccgatcattaatcagctgcacgacagtttccgactgaaacggccgtgacgcaacnnnnnnnnnnnnnnnnnnnnnnnnnnnnnnnnnnnnnnnnnnnnnnnnnnnnnnnnnnnnnnnnnnnnnnnnnnnnnnnnnnnnnnnnnnnnnnnnnnnnnnnnnnnnnnnnnnnnnnnnnnnnnnnnnnnnnnnnnnnnnnnnnnnnnnnnnnnnnnnnnnnnnaagaattcggcaagagnctgatgttgagcggagaagagagaggcctctggtccacggactcagccgaggaggacaaagaaaccaaaagaaatgaatccaaagaaaaatatcagaaaaggcatgattctgacaaggaagaaaaaggcagaaaagagccaaaaggattaaagacacttaatgattctccctttccagaggatgacagtgaatgggctacattccgacagcagagaagagaaacaaaacactaaaagtgcaagagagagagcagggcaggacatggggctggagcatggctttgagaagcccctagacagtgccatgagtgctgaggaggataccgatgtcagaggcaggaggaaaaagaagaccccgagaaaggctgaggacactagagagaacaggaagctagagaacaagaacgctttcttagagaagaaaactgtgcctaaaaagcagaggaatcaagacagaagcaaaagtgctgcagagttagagaagctgatgcctgtatctgcccaaacgccaaagggccggaggttgagcggggaagagagaggcctctggtccacggactcagccgaggaggacaaagaaaccaaaagaaatgaatccaaagaaaaatatcagaaaaggcatgattctgacaaggaagaaaaaggcagaaaagagccaaaaggattaaagacacttaaggaaatca

SEQ ID NO: 81772 - DNA, 644 bp, Homo Sapiens
aacattaatctcaatgcgctgggattacaggtgtgagccaccgcgccaggccaacatttaacaatcttttgatttacatttttataaccactccatcaagatttgacccatgctgagtgtgggtcctgggaacctgcatgaccagcagtctgatgggagcacccatgaccataatggctacactctagtcatgaattaacatttcattaaacccaaacgtctgcttcaattcttcctccagtgtgatgtacagtttccttgcagtgcccaagggctctagagctcatcccacccaaaccaaagaatgctggtcaagtgggaaggagtccctgttctcagctgtagagggtgtggggagcactccgagtgccgtatctcagaacatctaagaacagtctaggaaaacacactccatttgtggttctccagagaatcagcacttggaatcctttgccaccgcgtaccccaggctctgaatcctgactgcgagattacacctgccagttcaccatcgactgtgtcacacggctcagcacagctcccaggccaacccatcctgatttccatctacttctaaactgcatcactctactcctcacagcaacaactcaaattccctaatgactaatctgttcttaaaaaaa

SEQ ID NO: 81773 - DNA, 1004 bp, Homo Sapiens
  misc_feature (739)..(739): n is a, c, g, or t
  misc_feature (755)..(755): n is a, c, g, or t
  misc_feature (760)..(760): n is a, c, g, or t
  misc_feature (764)..(764): n is a, c, g, or t
  misc_feature (776)..(776): n is a, c, g, or t
  misc_feature (798)..(798): n is a, c, g, or t
  misc_feature (801)..(802): n is a, c, g, or t
  misc_feature (808)..(808): n is a, c, g, or t
  misc_feature (814)..(814): n is a, c, g, or t
  misc_feature (852)..(852): n is a, c, g, or t
  misc_feature (858)..(858): n is a, c, g, or t
  misc_feature (886)..(886): n is a, c, g, or t
  misc_feature (900)..(900): n is a, c, g, or t
  misc_feature (965)..(965): n is a, c, g, or t
caatcctggaggagcccttgctggggctcggtccggcgggagcatgcagtggcggagcccggcctgccacccgctcactcgccccaagtctgagaaataaatacattcatcactgcacaaacatattgatacaaaaacaacactgttaagagtgtttgcaccgtctatgttggtaaggaccagacccagtcagccccttccgctgcctggggtggggttagggggccccaggagtggggacccaccagagtcgacagagctgcgcaaaggtcccggctttttggcttgagtgggaccctcgcatcaacccatccccaagggtcacgggcagagcagcagggggacccaagcccagactcgggtcctgtggccagaactgacggccatccccgcgtaggctagctggtcaggaccagcatggtccggccagagggccttgggggctggtcagcacgggcccaagctctttggtgccagctgggcttggaggggccctgggaatggggacgagggctcaggtgactccagggaggcttccaatccctcccccagccccagggctacccttctctgcccgtgagccactccagggccaactcagaagggtttccagcagcaggggagggttccctggactggccttacagctgctgaggtctgaaactgtaaaagcttatgtaaacaatgagataatatattagcatctttttctgagccatggaggtttcatactcatcanatgtgctttggttaanaatangttngtgattgggtangagctacttttttccttttccntgnntacgcnctttcnacaagaactgcatttctgatcccgttcccggacatcangattantgacgacgcaaaactgtagccgcttggnctcataccagttcnttgtaggtctaattcaaaaaaactctgcgatcttgctccaggcatccccaaggagcgataatccnacagtaaacgtctggttaatttacgtcaatccacacaca

SEQ ID NO: 81774 - DNA, 1737 bp, Homo Sapiens
  misc_feature (634)..(634): n is a, c, g, or t
  misc_feature (664)..(664): n is a, c, g, or t
  misc_feature (675)..(675): n is a, c, g, or t
  misc_feature (688)..(699): n is a, c, g, or t
  misc_feature (1412)..(1412): n is a, c, g, or t
  misc_feature (1468)..(1468): n is a, c, g, or t
  misc_feature (1511)..(1511): n is a, c, g, or t
  misc_feature (1582)..(1582): n is a, c, g, or t
  misc_feature (1645)..(1645): n is a, c, g, or t
  misc_feature (1725)..(1725): n is a, c, g, or t
actttttaaaattttattgatgtaccacctgatcaaagcatgggatattttaatagtattatacataatatttttacatagaaaactttacatagcatttcatattatataattctgcttattctttcaaaaatttatacatccattgggcaaggaatggttttcattaaattaccaatattaaatgcacttaatcattgtgtataggttaaaccaaagtaactattaactaacttttaggcattttaaggaggtaaaacatacattttacacataaatatttgatgcaaatatgcagataaaattttttaaaaattagaacactgagtaaaacacctttgatagattatattgttttgttttgagagcaaggatttccagatatgttcattctttaaaacactcagctttggtttctttgtttcccaaactgcaaagctgctgataacaaaactccaggattccatgtgagttcagctatgtctactttaacacaaatattaaaacagaattcagaaaatgcagtattaaggatccagcttctattgaaaccaatatccatttgcatcataacaacaaacatttgaatgagatggtcacacttgtacttatcagcaggttcctttaataacanagactactaaatgtatatccttaatcacanaagaacaacanaaaaaatacaggnnnnnnnnnnnncatttcgtacaaaagtcacctgccagaggaaaatgttgtgtttccagatattataatacaattttcataatgtatgttctttggttgtacatgaggagtacagggaaaagatatatttgactctaaagatgcgtatcagaaataaaaattacccatccactgtttgttgttaagatgccaaagctggtgatttccctaacagacaatgaagagaaacaaaattgctcaaagcagcagtattgtaacaaataaaaacttctctagagacccagcacacataatcaacacttaaagcattctgaaaaagaaataaggccttggaaaatgtttcactctcctccattacttggttaaataaatggtgtcctggcctgatgttgcggttgtacataccctttcactagtgtttgagtggcacaagccacatttaccatgagaaagaagagatttattcataaaaatgaatttaggctgaatggcttattattggaggtaagggatttcaaatctctgttcgtcactgtccactgacaagaaaaatcaccctgaatggttttacatccaattttttaaaagtccattgctggtacaattcaaatgcctcattcagaaaattaaatcttttaaaatactaaactaataagaaatgtaagcctgaatgtttcagcaagtaataaaatgcactgacacatctgctacccctcaagaggcanaattaaagagagggcagaagacaccagacaaattttagtcacatccgatgaagaanatgacatgagaatctcagaaaggacagggaaaataccaatcanggatatagctgcacgcaagatggacttaatgaatgacacgtgttcccatgtatacttttgtaaaatataantggagagactgactgttgaggtgatgagcgctatgatacagggagtgtaggttcatggtgcantgtaagggcactggatccagggcaaacagtcaatgtgtacatttcatcacataagtatctcatagtctttctgctaatancagtctttacta

SEQ ID NO: 81775 - DNA, 1045 bp, Homo Sapiens
atcagaacattgtctttagaacctgaagaatcactggatgtgtcagaaacagaaggtgaacagatcctaaaggtggagtcctctgcacttgaggttgatcaagatgtcctggatgaagaatctagagctgataataaaccatgcttaagttttagtgaacctgaaaatgctgtatcagagatagaagtagcagaagtggcatatgatgctgaagaagactaatgtatcacaagcagttccctccatttagactattcaaaaatttagaagagtggcaaatactattttaaaagaagaaccaagaactgtaaaacatatagaaaagagcaagaatgcacatgtataaagtttacataaagaagtttttttaagttattgagataggaaatatattcactgctgcttttaattgtattttatccaattacatttaatacactaaaaaaaatcttgttggaattctgttatcaaggcccacattcttaaatactgtgcataaattattatggtgttttgcctatatattgctccaaactactgtgtatatatgtatgtgtgttaaatcaccaattatattaatcaaatggaaattaattgcatgttactatctgggtgatatattcttctttatatctctgacatgacatattttcattaatagtttaaatcagtgaccatcataataaagataaaatttagttgagtttttaatgtttacatgtttacatctttaaataaaatttgcttatttgaaatgttaatgctctttagaaaaatgactttctagtaccaaaggaaaactacttgaaagagctgtaatcatatagctaaagtgataagatagccttgattttaaaagctgattcattaatatcaaaatactttaataagtgtcacagttattaatatgttacatttgtttagtttccacgtaatctttatctctacctagatttagtgagtttgcctctttcagaatactacctccttttgttaaggcatattctttcgaaaatatagattctaaataaataggggcttatac

SEQ ID NO: 81776 - DNA, 974 bp, Homo Sapiens
  misc_feature (38)..(38): n is a, c, g, or t
  misc_feature (44)..(45): n is a, c, g, or t
  misc_feature (48)..(48): n is a, c, g, or t
  misc_feature (107)..(107): n is a, c, g, or t
  misc_feature (127)..(128): n is a, c, g, or t
  misc_feature (133)..(134): n is a, c, g, or t
  misc_feature (137)..(183): n is a, c, g, or t
  misc_feature (216)..(216): n is a, c, g, or t
  misc_feature (230)..(230): n is a, c, g, or t
  misc_feature (238)..(246): n is a, c, g, or t
  misc_feature (311)..(429): n is a, c, g, or t
  misc_feature (657)..(667): n is a, c, g, or t
  misc_feature (854)..(866): n is a, c, g, or t
tggaaagacagctgattagtagtaagtctgatacccangtagtnntanaaaccaaagcatccaggatgcacacccctgcaccatttgctgtgcgaattaatagtctngtctctctctctcttctttnntcttnntannnnnnnnnnnnnnnnnnnnnnnnnnnnnnnnnnnnnnnnnnnnnnnagccatgtctcaccactgcactctagcctggtngacagaatgagacnccgtctcnnnnnnnnngaagaagtagataatctgaatagccctatatctatagaaacttaatagtgctgggagatataggnnnnnnnnnnnnnnnnnnnnnnnnnnnnnnnnnnnnnnnnnnnnnnnnnnnnnnnnnnnnnnnnnnnnnnnnnnnnnnnnnnnnnnnnnnnnnnnnnnnnnnnnnnnnnnnnnnnnnnnttattccagtgtcctttctagcataccatgttgcctctaaagattgcagctccttatttactagaaaattgttcctgcccaatctacatctccacctcaccccatcttttcttaagcactatgtttgtgtttttatcagtattatattcattgtctttggaatacatgttcttgtttgtgtttggaaaaaaaatctcttttaccagcttgcactcggaccaacttggnnnnnnnnnnngcttaaatgtttttgctatgtacagtttaaaaatgtgaagtttgtagctttaactttttgtaagaaaatctaataacactggcttaagtgctgacttgaaatgctattttgtaaggtttggatgtaagtaatcaattgaggtcagcagtttgtatgagacatagcttcctccattgcccccactccnnnnnnnnnnnnnaagtttgagatgcttcctgtgtttttatgttagaattgttgttctccttcttttcttcttcctatacctcatcacgtttgttttaaataaactgtcctttggaccaca

SEQ ID NO: 81777 - DNA, 677 bp, Homo Sapiens
  misc_feature (32)..(32): n is a, c, g, or t
  misc_feature (37)..(37): n is a, c, g, or t
ttcgttcgaaagagcagcattaaccacgatcntcagntaataccagaccagatcagacagatatacctcctgaatgtttggtgtctccccgctatcaaaaaagtataagaacaagcagataacagcgagaatcttggaggcccatcagaatgtagctcagatgagtctaatagaagccaagatgagatttattcaagcttggcagtcactacctgaatttggcatcactcacttcattgcaaggttccaagggggcaaaaaagaagaacttattggaattgcatacaacagactgattcggatggatgccagcactggagatgcaattaaaacatggcgtttcagcaacatgaaacagtggaatgtcaactgggaaatcaaaatggtcaccgtagagtttgcagatgaagtacgattgtccttcatttgtactgaagtagattgcaaagtggttcatgaattcattggtggctacatatttctctcaacacgtgcaaaagaccaaaacgagagtttagatgaagagatgttctacaaacttaccagtggttgggtgtgaatagaaatactgtttaatgaaactccacggccataacaatatttaactttaaaagctgtttgttatatgctgcttaataaagtaagctttgaaatttttccatttttttccatggaaa

SEQ ID NO: 81778 - DNA, 1059 bp, Homo Sapiens
  misc_feature (732)..(740): n is a, c, g, or t
  misc_feature (969)..(1000): n is a, c, g, or t
acatgactcatattaggcaatatactttgaagatctgtacaacatagtaatcacagcagggtcttgctaactcacaaatttagcatacatgctgcaaaaacatctctcctggagtcccaagggctttcaaatgttccaccaggggcagtcaagactagattcacggtgctctcttcatcatgcgcacaaaatgtgttttcccataacaccatattatcacaagtcatatcacacactctgacacgctcagtttgtaagtttagacctcttatacacacacccacgcacacactgtatgtgtatgtgacctaaaacatacacacatgcacacacacatacatatccattcattcattcattcaagtggtgtttccagtgtctgtgtgtcactgtttatgcagtttccatttcccagtgaattatgagtggagggcaacttttctaaccagattgtcttttcagaacaaagacctgggaattgaggaagagtttggaaagagggagaggcaaggaaagagagctttaaattgaaaggttaatttcctaagaggaacctgggctgaatgactacagtgttataccctccaatctttgcaggtgggcatggaacactgcttgtatcactctgtgcacggtataaatccatatatccacaaaaacacacatccatccatcaacatatacatggtttgggatgagcaggtcaatagttttgagagggagtttgttccnnnnnnnnnctcattatactcttaaattgttgtcagttatcaaacaaacaaacagaaaaattgtttggaaaaaccttgcatacgccttttctatcaagtgctttaaaatatagactaaatacacacatcctgccagttttttcttacagtgacagtatccttacctgccatttaatattagcctcgtatttttctcacgtatatttacctgtgacttgtatttgttatttaaacaggnnnnnnnnnnnnnnnnnnnnnnnnnnnnnnnncctgagcaggcggccgcaagcttattccctttagttgagggttaattttagcttggcac

SEQ ID NO: 81779 - DNA, 896 bp, Homo Sapiens
gatccagaagttgtacattttacctaacaacatcacttgtgttgaacattccaactccagaatgatccccaatcaccctaatctcagaatgctggaatgatgtctgttggaaaacccaggactccacacacaaaactcctgggattttgtttcccatctctttctaggtgtttgcaatgtacaaataatacagctgtgctaatctcacatttagccatgatagatgatggttctagagtgtacttccatttgtaagtcctcctgataagtgctttcttgtttatcactatgtaaatctgaaatattttgtacttcatttgtttttatccattctgaattttcaaagcataaaaatgtcaaagaaaaattgagataaacattttgttcaccattaaatgtttgcatctgcagtctatgatgagaaacaatgaaattatgactaaaatttaacaaatagtattttcttatagaagcaatgtattaaatgattagatacacaggacagttcacagcaaattgtttacttacatggcataattgaaatactgttatttgtaaagagttctatactgcctaccttagctaaccagaattgttcatagacttgtgataatatggtgttatgggaaaacacattttgtgcgcatgatgaagagagcaccgtgaatctagtcttgactgcccctggtggaacatttgaaagcccttgggactccaggagagatgtttttgcagcatgtatgctaaatttgtgagttagcaagaccctgctgtgattactatgttgtacagatcttcaaagtatattgcctaatatgagtcatgttatttctagattgaatttaaagtaagtatggattatggaagtctagtaaatatacttttccctaaaaaaa

SEQ ID NO: 81780 - DNA, 988 bp, Homo Sapiens
  misc_feature (96)..(96): n is a, c, g, or t
  misc_feature (100)..(100): n is a, c, g, or t
  misc_feature (134)..(134): n is a, c, g, or t
  misc_feature (137)..(137): n is a, c, g, or t
  misc_feature (230)..(231): n is a, c, g, or t
ggccagattcgccgaggtcaactgagctagactgtctagagctctgtttaccaacgacacagcacatctcacattatttatatttaactggccagncatnttgaaaatactcagtgtatctgttgagcctcatntcntacatgaaattatgtcatttgcccaatgatttgtttcagctgtctgtaggctgcataaccactctgatatttaagtatctgctatttatatcnntaaaagacaaataatttaattgcatgtgctagggaaaagctaccatgacattcaccccaagtaaatagaatcctagatgaatcctagaaaaataatccctaagcagataggtagacagaggtaaacattcacatgatttagctctctagctcttgcactctgaacattcttgctttggttctgacttctgggaactgctttgcatttctcctatagatctgtagttaagggaaccaaggggtcattggggcaaaagcattgtttctcaaagctccttgattaagagaaagaacagaaatttgcacagaagatagtgtcaaggagtgagaaagtttgtttgagggcagtagctcagtgtggaagaaaatcctgaagtttctgttgaagccatacaatgttctatggggttactctctaagacattctctgaggtgtgtgaggaagtcactactcctagcctttgttaagatgtaattttaaatattcagttatggtactatgtttgcaactctcgtcttatcacaatgcctcagtagtttgttcccttagaaacatttagatgtgcacaaattaatcttttatatatctaaaggtttttctatcatgcattggattgctcagaataaagtgtctgttagacttcgttttggtaaataaattctccataatgtagattaataatataaaagtctttaatgacacaatatatctatatagcctcactgtataattcagaaataaaaattgattctgcaaa

SEQ ID NO: 81781 - DNA, 1031 bp, Homo Sapiens
  misc_feature (79)..(113): n is a, c, g, or t
tgtatcatcactatagggcgctagcgctgtagctgcgaacgacgagcgcagcgagtatgtgagcgaggaagcggcccgnnnnnnnnnnnnnnnnnnnnnnnnnnnnnnnnnnncagtcgacggtaccggacatatgcccgggaattcggccattacggccggggaggtgggtgccaggccctggccgtggcgaaagagccggcggagccggagacccgctcccggagacgccgcctcgcgatccccgcgcgggcgggaccgggcggccggcatcatgaccctgtttcacttcgggaactgcttcgctcttgcctacttcccctacttcatcacctacaagtgcagcggcctgtccgagtacaacgccttctggaaatgcgtccaggctggagtcacctacctctttgtccaactctgcaagatgctgttcttggccactttctttcccacctgggaaggcggcatctatgacttcattggggagttcatgaaggccagcgtggatgtggcagacctgataggtctaaaccttgtcatgtcccggaatgccggcaagggagagtacaagatcatggttgctgccctgggctgggccactgctgagcttattatgtcccgctgcattcccctatgggtcggagcccggggcattgagtttgactggaagtacatccagatgagcatagactccaacatcagtctggtccattacatcgtcgcgtctgctcaggtctggatgataacacgctatgatctgtaccacaccttccggccagctgtcctcctgctgatgttcctcagtgtctacaaggcctttgttatggagaccttcgtccacctctgctcgctgggcagttgggcagctctactggcccgagcagtggtaacggggctgctggccctcagcactttggccctgtatgtcgccgttgtcaatgtgcactcctaggcttggtgtctcagacattgatgtaccttttccctgcctcgctccaggttttagtgaagtaaacagtatttggaaagttaaa

SEQ ID NO: 81782 - DNA, 1300 bp, Homo Sapiens
ggaccggtccggattctccggatatcgtcgaccacgcgtccggcggcagtgagctcggccggcaaccgagggacccgcgtccagatcttcagtgtctattggatttttccaagagaaagtttgtaaaattccttacactgtagatgtggatcagatacgatgattcagtagaagagcacatgtcaggggcagtggaggctggctgctgaaggatgaacggagaggaagaattctttgatgccgtcacaggctttgattctgataactcttctggggaattttcagaggcaaatcagaaagtcacgggaatgattgacttagacaccagcaaaaataataggattgggaaaactggggagaggccctctcaagagaacggaattcagaaacacaggacatcgctgccggctcccatgttcagcagaagcgacttcagcgtgtggaccatcctgaagaagtgtgttggcctggagctgtccaagatcacgatgccaatcgccttcaacgagcctctgagcttcttgcagcggatcacggagtacatggagcacgtgtacctcatccacagggcctcctgccagccccagcccctggagaggatgcagtctgtggctgcttttgctgtttcggctgtggcttcccagtgggagaggaccggcaaaccatttaatccactcttgggagaaacgtatgaattaatcagggaagatttaggattcagatttatatcggaacaggtcagtcaccacccccccatcagtgcgttccactcggaaggtctcaaccatgacttcctgttcccatggctccatctaccccaagctcaagttctggggcaaaaaccgtggaagcgggacccccgaggcaacatcaccctgaagctgctcaaacataatgaagcctacacctggaccaaccccacctgctgcgtccacaacgtcatcatcgggaagctgtggatagagcagtatgggacagtggagattttaaaccacagaactggacataagtgtgtgcttcactttaaaccgtgtggattatttggaaaagaacttcacaaggtggaaggacacattcaagacaaaaagtaggtccttgccaagtgttcatggggcaccactacagcctgtgtgtccacgttagaagggctcaggtgctcctgggcctgcgtgtgcctacgtgcatgagacgcgggtacaccagtgccatctgttcatggtccagaagtatgactcttttttgttttggaaagacattttgttattgagcataaaaggaaataaagggtatttttgaatgt

SEQ ID NO: 81783 - DNA, 1034 bp, Homo Sapiens
  misc_feature (30)..(30): n is a, c, g, or t
  misc_feature (87)..(566): n is a, c, g, or t
cgcaggtcgaacagagagccagaagagctncaggggaacgctgtatcttatatctgtcggttcgccactctgactgagctcgatttnnnnnnnnnnnnnnnnnnnnnnnnnnnnnnnnnnnnnnnnnnnnnnnnnnnnnnnnnnnnnnnnnnnnnnnnnnnnnnnnnnnnnnnnnnnnnnnnnnnnnnnnnnnnnnnnnnnnnnnnnnnnnnnnnnnnnnnnnnnnnnnnnnnnnnnnnnnnnnnnnnnnnnnnnnnnnnnnnnnnnnnnnnnnnnnnnnnnnnnnnnnnnnnnnnnnnnnnnnnnnnnnnnnnnnnnnnnnnnnnnnnnnnnnnnnnnnnnnnnnnnnnnnnnnnnnnnnnnnnnnnnnnnnnnnnnnnnnnnnnnnnnnnnnnnnnnnnnnnnnnnnnnnnnnnnnnnnnnnnnnnnnnnnnnnnnnnnnnnnnnnnnnnnnnnnnnnnnnnnnnnnnnnnnnnnnnnnnnnnnnnnnnnnnnnnnnnnnnnnnnnnnnnnnnnnnnnnnnnnnnnnnnnnnnnnnnnnnnnnnnnnnnnnnnnnnnnnnnnnnaagaattcggcacgaggatgtctatagaagtagcctggaaaaccatgagttttggagttcagtgaccccctgctttcctctgctcctcccttcccaaggcattgaagctgaatgtgccaactggcagttagaagcgaaagatggcattgggagaaattttagagagctttcaaactctttattctcatgttccacatggtctaattttaacataaataatatgccttcacactggattgtaaaaggcatgtgatttttgagattttattttgtgatgtattgtcttctgcagtattaaagggaaagagatattaatgtgcattaccctatcttgtttttgaagccagggtagttgtatgattttgttaccagcagtgctaacctgaatgtgacctggttaccttggaaatgcaggaacttatatgaatgtactataaaataaaatgcggactgattcccaggattctg

SEQ ID NO: 81784 - DNA, 996 bp, Homo Sapiens
  misc_feature (808)..(809): n is a, c, g, or t
  misc_feature (818)..(818): n is a, c, g, or t
  misc_feature (828)..(828): n is a, c, g, or t
  misc_feature (856)..(856): n is a, c, g, or t
  misc_feature (868)..(868): n is a, c, g, or t
  misc_feature (912)..(912): n is a, c, g, or t
  misc_feature (923)..(923): n is a, c, g, or t
gggttaaatgatttcttatttattttaaaatatgataattatggcatgagtcccaacagtgagaggatgtatctgtaagttactccacacttttcaattaacatgaacattttttagtaggcatatatctcaatacttggataatcacttttgttttgcttgtgtttcttaggaacaaaggagaaacaggctagccagagaattaccttcagctgtatcacgagacaaggtaaaaaaatgtttttaatgcatattcccaatacctaaagatagattgatgagctcagaatattactcagtcctaggagtaattttttcttcttttcctccctttaacactccattggaactaactgagtaaaggcatacaagtttaaaatgggttttgagtgatttaaagataatagtattttgaattcactgacataaatgcttaaaagtagatttaagcatttatttaagcatttaagcatcaagctttttaaaaaaattcagtcagtgactttatcaactttgcacatagctgaaatgactcaagattttattataataagagggtttcttggaaaaaacagtatgcacagaacagaggttttaattactagtaataattaaaatagttgtaatactaaagtgtgtataaaaatcttttaccttgaattctttgccagaaaagaatcttattaaataccaaaaataaaaatgaagcttttggatttggatttttcttatgtattcatctgaaggaaacttttaacaaaggtgacaatggtgaaggaaaatatgcagaataaacaatctcccatgnnatatttcanttttcatgtnattttacgatttcatttacagagggaanattcatttatanactgttcctgatgcattttgcatcctgatttttttccccctggnattttgcttantctctaagtccagtgtttggactgctcccagagcctcccgtgcttcgcgagtgatgaggttgtcgatctatca

SEQ ID NO: 81785 - DNA, 993 bp, Homo Sapiens
  misc_feature (68)..(68): n is a, c, g, or t
  misc_feature (124)..(124): n is a, c, g, or t
  misc_feature (133)..(133): n is a, c, g, or t
ttgagcgatacatttcacacaggaacagcttgactgatacgattaatacgactccttagggaaattgncctcgagccagaaatcgcacgaggttgatctttcatagcatgtaagtagatatatntgacagacntacagtctcattatccgtacatcagacgaggaggaaaataaaagtgctgcgcagaatgtcgtaacgcaaattgacataatttgaatttagacgatgatgtatgtactgcaaagcaagaagggaaactcgtaagagagagcaagcacaatgtaacaaagctattaacataatgaaacagaaactgcatgacctttatcatgatatttttagtagattaagagatgaccaaggtaggccagtcaatcccaaccactatgctctccagtgtacccatgatggaagtatcttgatagtacccaaagaactggtggcctcaggccacaaaaaggaaacccaaaagggaaagagaaagtgagaagaaactgaagatggactctattatgtgaagtagtaatgttcagaaactgattatttggatcagaaaccattgaaactgcttcaagaattgtatctttaagtactgctacttgaataactcagttaacgctgttttgaagcttacatggacaaatgtttaggacttcaagatcacacttgtgggcaatctgggggagccacaacttttcatgaagtgcattgtatacaaaattcatagttatgtccaaagaataggttaacatgaaaacccagtaagactttccatcttggcagccatcctttttaagagtaagttggttacttcaaaaagagcaaacactggggatcaaattattttaagaggtatttcagttttaaatgcaaaatagccttattttcatttagtttgttagcactatagtgagcttttcaaacactattttaatctttatatttaacttataaattttgctttctatggaaataaattttgtatttgtatt

SEQ ID NO: 81786 - DNA, 1636 bp, Homo Sapiens
  misc_feature (75)..(109): n is a, c, g, or t
aacttatagaccactataggcgccaccttacagcgaacgacgagcgcagcgagtattgagcgaggaagcggccgnnnnnnnnnnnnnnnnnnnnnnnnnnnnnnnnnnncagtcgacggtaccggacatatgcccgggaattcggccattacggccggggaagctgcaggtgggaagcccatcaccatgacactggggcaggcttcagcaggggccaaggagctcacaggacttctcaccacagccaagtccagttcttctgaaggtggagtctcagccagcccagtcccttcagtggtctccagcagcactgcacccagtgccttgcacacactgcagagccgcctgggggccacatctcctggcagctccctcccaggggccacatcagccagcagcctcctccaaggcctcagcttcagcttgcaggatatcagcagcaagacctctggccttccagcaaatccctccccaggaccagccccacaggccaccagtgtgaagttgcccacccccatgcagagcctgggtgccatcaccacgggcaccagcaccattgtccgtaccattcctgtggccaccactctctcctccttgggtgccactcctggtgggaagcccacagccatccaccagctgctgaccaatgggggcctcgctaagttggcaagcagcctccctggcctggctcagatctctaaccaagcatcaggcttgaaggtccccaccaccattactctgacacttcgtggccagccgagcaggatcactacactgagccctatgggctcaggagcagccccatccgaggagtcctcttcccaggtgctgccctccagctcacagcgcctgcctccagcaccctgaagatgctgtgtgatatgtcctccttaccaagttggtgatggctgcctcatggtgggccctggacaggtgtgtggtcctgctgagctgtccacgtgtcggaagacctgtttaagacagtcatttttgcctctccgccaactgtcttcagagaaaccattaggttaggtgatacggtgccagcaagggaagcaccatcgtccaggatctgcaaatctggttcctgggaaccccagactcctcagcagatctggctgtacatggatcagaaccacttcttcccccgcttaagctgtggtttgacccaagggtcagcatataggactgcctgctgcatttaatgaaggtgtttcctttggaagtctgtgctaccctctgcccctagttgggaggagacatccatctggtctgggattcgggagttagaatggaaagctcttggctaaagactggagtcatcctggctgccaactggtggttcagagcccggacgggcttgtttgccatcccctgtgccttccactcagcagccagggagagtggtcccgatgcaattcactttaaaccacgtcaatactgagtgctgctgactctgtaaactcctggcttgttgtcataagaaggccgaactcgcgggttcctcagccttgctacttaatggagcgttgccgggaatggccttttttaccagctgggcggtcacagcggttatgacaatacaccccgggtgggcacacgggctcccccgcgggaaagacgccccgcgtgctac

SEQ ID NO: 81787 - DNA, 977 bp, Homo Sapiens
  misc_feature (52)..(52): n is a, c, g, or t
  misc_feature (118)..(118): n is a, c, g, or t
  misc_feature (128)..(128): n is a, c, g, or t
  misc_feature (162)..(162): n is a, c, g, or t
  misc_feature (177)..(177): n is a, c, g, or t
  misc_feature (213)..(213): n is a, c, g, or t
  misc_feature (215)..(215): n is a, c, g, or t
  misc_feature (246)..(246): n is a, c, g, or t
  misc_feature (353)..(353): n is a, c, g, or t
ttaccacgtaggtcatgaagccagtgaggtgctccaccttctggacgtaccnttcagttccatgtcaactcacctgtcaagctgtttatgatgcagctctcaccactagagatattgncgatcagccntgtatcctgccatcctcgacctgcactgtgactntcgattccttgaatntcgttctctgctgcactcccagctgccacccatgtntntgatgaggtgtcaaacagaatgtgctgcctngagcgtcggcagccaccaagtttgtccagaaacagccatcccccgtgaactgatgttccatgaggtgcaccagacttgaggcaaggattgctccctgacctcccttntaccccacttccctacacaattctcttatttatttggtttggctcctgttccaatttgaaaggagtctgtgttcataatactgtttctcctctcaatttcccagaaattgggttctatgctggctggaaatgttgggggaaagagaaggcaaaggatgtggaaatgagatgtgcttaggaaagggtcaggcccatcgtaggagcaccatatgcctgcagccttttcactacgaattagaataaggactatgtggttgtctctggaccttatcaagacaccttagtgtctgaccaggggacgatagtaacttttctaaggattgaataaattgagcttttcttctggcacagaggtactgagtggtaagtaacttttaccctgcctgagattcctcaggagaaaaggcaacctgcctccagcctgaaatacataaagcctcattttaagactgtaagtccatgctgcctggctactagagagcaaggggctttcttaccaccagtgctgaggagaaaagtactgaacggaaacggagttgtctttgtactcttgagttgtaccttattcttccacttggcctgagtttttataaaatttcaataaattgtgacagtgtgaaaaaa

SEQ ID NO: 81788 - DNA, 941 bp, Homo Sapiens
  misc_feature (190)..(190): n is a, c, g, or t
  misc_feature (196)..(196): n is a, c, g, or t
agaactgacgtgtttttgtggagcatgtcacagtatccatgaccgcagatcttatccatcgagttgcacacatagagagcatgtgcttcagtagcctgaaatgctcagagtgttggatccaaagtagaccatacaaaagcttgttcctaactgtagagttagtccaaactgcctctgatcctgctctttnctttcntcagaaaaaacatgatgaccattataccagatagtatgaaataatgctagtcatttcccaagatctccaccaaatggagacctttcagaaatgccaggggtgacctaatagaaaacgatggagccacgttctagacagctggttcatcctagctttgtcacagatgtgaagcagtttacctccctccagtggtttcctcatccgtaaaatggggatcaataataactcctgccctgcctacctcacagggttgttgtgaggatcacgtagttcatagatgtgaaagggtttaaaagtttaaaagcactgtacacatttaagttattaattcatatggccttggctgaggtaaggcagattggtttacaagatacagaagtatggatatatactgtgacttcattgcttgaatctttcctttgctggtctaacttgactgcttcatggagtttgaaatcttaatttttaaaatccctgtgtggctcattagacgactataagcacaacctgtatttgtaccttaatctcttacatttccactgctgtgtatctgacatatctactagtaagcactgttttgtcaaaccgtctttctctccttcattttactggttcttagtctcctatcaatataaggaaataagaagtgccagggagccgcccattgtgtgttacggtttatatcgataatcttcaatataaaatactggccattttataaaatattaaatatatgtaaaaaaaa

SEQ ID NO: 81789 - DNA, 642 bp, Homo Sapiens
tcagaaaaacgaagacaacagttgctgctgatgctagaaggactagtagatgaacggagtcggctcaatgaggccttacaagcagagagacagctctatagcagtctggtgaagttccatgcccatccagagagctctgagagagaccgaactctgcaggtggaactggaaggggctcaggtgttacgcagtcggctagaagaagttcttggaagaagcttggagcgcttaaacaggctggagaccctggccgccattggaggtggggaactggaaagtgtgcgaattcatcacaagcatgcctactgagcactggcgggtcagactgcagcccaggatggaaaaccttgtttgcactaaccagaaagatccttgtctgattttggcagaattaaacggtgacttactaatgatagaactggtacaagtagcatcaactacaaagtgaaactcactttagcctacatggatctcactgtacatacatatcaatccctaaattgaatggtggaggttgcaaagtgtatttgcacattttaaatcattctgttttagtttttccacttttattcattcttatccctagccccttctcgttccctcatcccttctgtgggccaataaagtttattcttccccaaa

SEQ ID NO: 81790 - DNA, 1366 bp, Homo Sapiens
ctgtcagtgaactcagtgcttgtatcttcggtgtcatcccctgcagctgcacctctctggatgggcatggaacttcaccagactgctatagagctgtctctctgcttgtaaggcctcattgagccgactccgttcatctactagtccttctagcatcagcagcaactgttgtcttcggtttcctgaaatttcttgaccctgggattctactgaagcaactttttcccgaagaagtaagacttcctgggtcaggcgttccatagctggtatgtcttcaggatcaaccagttgcatttgcaggtcctttatgagatcttctttaatctgtatgttcctggtcagagactccatatcagcagcctgcacctgcagctcttcttcctgcacagccatcatggactgtagagcagaaagttccatctgactttctctttcttttttagccatgagttcaagttcctctttggcattactcagttctttttccagccctgcaactgtgtccaagtctcctaatgtggatctgggtatgctgacatcctctttggcagtcaatgaagtgctatcatctctggaaggtatctgcattgaaccttgatcagtctgttttccaagacggccagtgggggtaacttcagcttgttggttagagatgggtgcttgggacatcagggagtctctccctcctaaatattggcgcagggcctgtaattctgaatttctttccattaaggcttgcaccaacttctctgcagcagcttggctttcctgctccctggtgctcacagactgaagcaggccttgaatctccatttcatgttccagcacttgtttatttcgatcacttagaaggtcctgcagcatcctttcctttcgctgtagacgctggcacagctcctctgctatctcactctgccctggtccaagtttgcagagcagtgttgcactaagatcctccacttctttgttcctatcatgaagagacgtctgtaactgctgaatgatactctcttgttccttctgccaacggctaaatttggtttccatttcttctttcagccactggaggttttgacaggtagtagataactgttccacttccaggcctttggccctcaggagactctccatactttgcatagtagcttcattggaggagaggacatcgcgcagtctctctaagtcatgatctcgctctctcacagcaagacgaagctggcgcagttctttttctttctcttctagagccagagaatttttcatctatagcccgctccagagcaacagctttatcatgtattcgctggcgaagtttctcaagcaacatttcatttgcttcaagggttttgtctgagttatctcgata

SEQ ID NO: 81791 - DNA, 2020 bp, Homo Sapiens
  misc_feature (605)..(605): n is a, c, g, or t
gggaaggcatggaggcatagtttggttagtttcatcactaggatgtataaggtgacgacacaaaccaaatacctttctttcatcacttaactatacgtactttatctctggtaacactagaatgctgtggtcttgagggaatgttagcaaggaacacatagaagatttggtgtttcataagcctgtctaggtgtggcaggttttgtgtggtacactgatgtttaccataagcaggtacaagcttcatgaaccgttcttaatgaactataattgaatagataccaaaaatagaatgacaaatgtattttaatagcagatgaggcagttttaggatgaattttccactgttgattttacttcaagacatagcaagagaaacaaaattttgttttcaagacatttccactgcagtttcaagctgtagtgggcatatgcttcatttacttccaaagaggcaaaagcagctggaattggcttacagcacatgctttgtttcatgttatgggtgaggacctacatacactcttactttagcagtcacttaaccttctcccagcaaggcagttgtggggttcactaggatttagtgcctgatcttttttttngggaaggggcgggaatgaatgtgttggggctgggagggaagcagaagaaaatgggagtgtgagtgagtgtgcatgtgtctgaaagtcaccattgcccccacctgcacctagcaaggaacaggtgtttgatgtattttgctcatgactgcagtatgcatgtatttttttccttctctgtgttttctaaacttacactaaaggattcatcaaatcatcttgttcagatggctcaggattgtatttattttgcttaccccgtgctcttgggttctatagtatttctataattatgtaacgagaatagtgttgcactgtaatctatcatatagagctatatgtatggaaaattttgatcaattttttaagaaatgtatcctgtttgcaaaggcacagtaaagttgcatcttatagactataggcaataaagctaacaataaaccttatttaacacaaaccacatccatatcctctgttcatttgattttggaaaaagtagcatatccagtagtttcagggaattcattttaactttaagaattctgatatatttaatttataaatttcggactgatataatagagttttggaaaactataagaaatgctttgttaatgtgtgtattcctatgtaaaacacatggcttttcctgtgtatatttttaaaaattaaagaaatgcacatttaccagaacaccaccctctttgtcccccccttatctcacttattacacaccaccacccatcccttccctaccctcccgccctctcacccgtccttttctttacttgtattcccccccaacaccacctctccattcccaccgccccgtacaacaactccctagtaccccaccctctacatatcctctccacccacaaacaaactccctctaaccgattcagtagaacgcgtgtaaatcaccaccaccaccaatttataacatacttctctccctgttgccctttcctccccgcctgccccctactgccgtgcgtattaggcgcggacccgacatgactcactctagtcatcctcccgcccactatcacagcaccacataccactactcgaagacgaatatccataactgtgtggtgtccgcgcctgttaccctcgatggcgcccctgcggtatgctccagtcccgcgcttgtcttcctcccctgtgcctccgcgcccccgtccgtactaagtgccccacccccccgctgaggtgccgctatagattatctcgcaatgattgcagacagttttcccgcgctgctgtctgccacattatcccctatcaatggcgcgcccccgtcatcgtgtggacgagcaccgcatcgccgccgagggctgttgtgcctcctcccccatgtttttaggcccccacaagagatggcgggcccccccgcgccggccccgcgcatctta

SEQ ID NO: 81792 - DNA, 1067 bp, Homo Sapiens
  misc_feature (1009)..(1027): n is a, c, g, or t
ccgttttgacttggtagcgatttaataggactcattttaggggattggccctgggagcacaggaatccgccaggagccgcggaggtgagtgaactaggagttgtgggcccgaggggtcgtcttatagctaccagcccacaggcatttagtctacgttggaggaaaacaaatacgggtcctgcttaggagaaaagaaaaacgtcttacagccagtgtctaaactccaaacaacggaatgtatcaatgagaccttgtatatggatacacgtgcatttaaaaccgccctgccggcttgtagagcttttgccgttctccagcgctttacaggggttatcgcacttaagcctcggaacaacttaaccagatgaggacacctgaggttcagattaagaaatctgcccaaagtcttacaacagtgattctaccagaaaggaatgaagaacagaaccttcaggaattgagtcacaatgcagacaaatatcaaatgggagattgttgcaaggaagagattgatgatagtattttctactagccattgggaagataaaaggagacagaagattgaagcctttgccagccattctttccctttttgcttccaaactcctcaactgggaaccttcatatgtgcagtatttatattggatcatactggtgattataaaagttcctaggaggctagaagagccaaccaacagagaagggaaagcagtctgttctgaacatagggacataagttcattcatgccaagtatctttccagcatgtttctcccatttagaatatctagcatgtaaggcctttcaatattaatataagcccaatatcagctctttctctttgtatttcatctctttctactctcctatttgtattttgtgttcctatcaaagtgtcgtatctgggagatgacctgccttatcctgttctataacagttttgtttgctgctgtgtctttagaacagtgcctggcacacagtaagcactcaataaatctttgatgaatgnnnnnnnnnnnnnnnnnnncctgagtaggcggccgcaagcttattccctttagtgaggg

SEQ ID NO: 81793 - DNA, 1306 bp, Homo Sapiens
cagtcgacggtaccggacatatgcccgggaattcggccattacggccggggaactcccggagaatccgaattcgtggtcctcagaattggtttagggttgtttcgcggttcttcccgtattctgcctccgaggcccagtggggctggctgtgggccccctgtgctgtttgaggcgtgaaactcacctcaggaaatgtatctgatccattagcgtggattcatattatttggtgatggagaatcttcagctgtgttaagtgttaccgtcagtttcagagatggcttctttgcaaaggaaagggctgcaggcaaggattctcacctctgaagaagaggagaaactgaaaagagaccaaactttggtgtctgattttaaacagcagaaattggaacaagaggctcagaaaaattgggatcttttttacaaaagaaatagcactaatttcttcaaagacagacactggaccaccagagagtttgaggagctaagatcatgtagagagtttgaagatcaaaagttaacaatgcttgaagctggctgtggggttggaaactgtttattcccacttttagaagaagatccgaatatctttgcctatgcctgtgatttttctccaagagccattgaatatgttaagcaaaatcctttatatgatacagaaagatgcaaggtattccagtgtgatctgactaaagatgatcttctggatcatgtaccgccagagtctgtggatgtagttatgttgatattggtgctgtccagctgttcatcctgataagatgcaccttgtcttacaaaacatttacaaggtattaaaaccaggcaaaagtgtcttgtttcgtgactacggactgtatgatcatgccatgcttaggtttaaagccagcagcaaacttggagaaaacttttatgttagacaagatgggaccagatcatatttttttactgatggtaagatgaatggaatccagtctttaaatgttttattctttgtttctgtttatttgattgcattatcactgcaaggctgcttggagaaggcttgcgacatgtgcacgagaccctgaaacaagccctctactgcacaatatttacccagcacctggaaggcacagacctggcccctgcccttgaagagctcacaagccttctctggtgtcagtgactcccctaatgagcttgggttaatggacagcctctgacatgccatgtggattccctactaggaattgtgctggaataagagggagggcaagtcagaaacttcttgtccagttaaaaataaagcaaatttgacagtaaaaa

SEQ ID NO: 81794 - DNA, 1644 bp, Homo Sapiens
  misc_feature (253)..(261): n is a, c, g, or t
  misc_feature (1452)..(1471): n is a, c, g, or t
cagtcgacggtaccggacatatgcccgggaattcggccattacggccggggctgatgtgaacagccaagaactacagacacaacccactcattatcagcatttctgtctctgtcaaacaattagtttatagatagtcataatctttctttcttccggatggtttatccttgtatgctgaacaaaagaaaaaatgtgaagactgaaaggtgtgatttttcaattctcctcccagttaccgaatcaccctcttannnnnnnnnccctaagcctccgttcactgtctctccctctccctttctcttcatgtgcactcacagagacccagcattgcattaccatcgtggaataatctagcgcaaacctaggaaagctgaagccacaaagtccaaagccacctttgtactcacctgcagagctccagaagaccttgatggcagcctgcctatgctgtgtgtttgctatattcaatctttacggcttcctgacttctgtgacagtaagccaagtgcaaaaatacacttgatgagaatttcctcttttaataatgttatttgaacaccacatattttagatttatcttatttgaaagtattagttccattgtgcctggaaaccacactcctttagattgggggccgagaggcgacaacccaacattgaggagagtttatttttaaacatggctagttgtcagtatgtacgtgagctagtatttttatgagtcgagttttttaaaggcacattctgtatactgcttagtatatgcattttataccatgtaattataaaacactcgagtaagttcagcattagaaatgtttagctttgtatgaactgagtgtgccagaaataaacctggagcaatttttaaataagcaaaataaaggagatttttctatttgttcactttaatttattcacttttgtgtacttttatgtactgcaaatcagatttcagtctaaagcgaaacatcagtaagttaataataaacctatctttcgggaagttgaatattaatctgtacccaaaacgtatttagtaaaatatttgcccccgccaccctgccatgctgacataacaacttttataatgttgaatagatgatatgggaaatactaataacaacaatgtaatttttgcagacagctttaacttatatacattgcttgatttttttcaaaagactaaatatgtcatttatactttgtttattttctaccaaagaaggtttgtaaaaatatgcctgctgcttttccttttgaaggacacaaacctggtcccaacatgtgtggattttaactctgagtggggtgcattaaatcaaaagagagaggcagaagatgaaatgctaaagaagggtcaggcaaacttctgtttcagtataaaattcatcatgcaggcttctgagtgaaatagaatgatttgaaaccactactgtattgcctggatnnnnnnnnnnnnnnnnnnnncctttatacaaaaatgttaaaagcaggtttcctggcatgttttaaactgttttttctttaggaataaattacatttatctgcacagatgttgaaaatcctgttaaacccttgtcaaggatttgtttattttacattaaacaaatttattatgatgaacgtgaacaaataaatt

SEQ ID NO: 81795 - DNA, 978 bp, Homo Sapiens
  misc_feature (210)..(210): n is a, c, g, or t
  misc_feature (231)..(231): n is a, c, g, or t
  misc_feature (320)..(392): n is a, c, g, or t
ggaggtggaccagcgcgcacaggggaattcatttcgtcgcccctaatttagagtagttcaccgccctttgattcatttggatacactccttctcttgcaagtgaccgccctgagtggcttctcctgaaattacagcctcaggtggagatgagggggctagctatgcccatcttatgctgtagctagtgattacacaggttagtgactatngagcatacaaaatatatactntatgatgatgcttccaccccacacgactgcaacatacaggtgcctggggaaatgtggagaacattcaatcttgccgtcactattcatcnnnnnnnnnnnnnnnnnnnnnnnnnnnnnnnnnnnnnnnnnnnnnnnnnnnnnnnnnnnnnnnnnnnnnnnnnagaggtccagagtcctggcccttgatgcccagctcagtgccacaaagctcaataggagggatgttccagtggatgagggccaccaggaagcacaggtccaaggctggtcccacacttatcagcagcaacaactgtcagttcatcctgcatgggaaaaatgttggaatgggagtctgaaatggggctactgtttcagtcctaacgtgctgtgtgacattgggacaacactttccctctctggacctcagtttccctctgtatacaaggatcagattcttgctgtgacccaagaactcctgaaatcatatagaaaggctggggtgggccctgtcattcgtggttgatttcaatacactcaagtgccattcatcctttaagaaaaacatctggatatcaaggtggaaatggcccatttaatgattgattatatcattttgtggatatagttataatctgatgggcctggctgggagtggaagaagggaagccttttgcaaatagtagagtatcagttgcaggtgccaatgactaactttttgaattctatgttggcattaacaataaagcattttgcaaaccctgaaaa

SEQ ID NO: 81796 - DNA, 875 bp, Homo Sapiens
ggggatcagtatcactacctcctggaccggaacctctcctgcagggtggtgggggtcccctaccaaggcaatgccacggctttgttcattctccccagtgagggaaagatgcagcaggtggagaatggactgagtgagaaaacgctgaggaagtggcttaagatgttcaaaaagaggcagctcgagctttaccttcccaaattctccattgagggctcctatcagctggagaaagtcctccccagtctggggatcagtaacgtcttcacctcccatgctgatctgtccggcatcagcaaccactcaaatatccaggtgtctgagatggtgcacaaagctgtggtagaggtagacgagtcggaaaccagagcagcggcagccacggggacaatattcactttcaggtcggcccgcctgaactctcagaggctagtgttcaacaggccctgtctgatgttcattgtggataacaacatcctcttccttggcaaagtgaaccgcccctgaggtggggcttctcctgaaatctacaggccctcagggtgggagatgaaaggggctaagctatggcccatctgaatgctggtagctagtgacttacacaggtttagttgactaatgaggcattacaaataatattactctatgatgattgcttccacccacacgactgcaacatacaggtgccttggggaaatgtggagaacattcaatcttgccgtttgtggatatagttataatctgatgggcctggctgggagtggaagaagggaagccttttgcaaatagtagagtatcagttgcaggtgccaatgactaactttttgaattctatgttggcattaacaataaagcattttgcaaacactggtaaa

SEQ ID NO: 81797 - DNA, 584 bp, Homo Sapiens
  misc_feature (80)..(178): n is a, c, g, or t
tctatctgggcccccaggcgattgatggtatccgcccccatggagggtcttccccttggtcccccgacccccaggcaggnnnnnnnnnnnnnnnnnnnnnnnnnnnnnnnnnnnnnnnnnnnnnnnnnnnnnnnnnnnnnnnnnnnnnnnnnnnnnnnnnnnnnnnnnnnnnnnnnnncggcaggtcggacatctccctcctcgtccactaggacagtgtctgatttgccctctttccctccctgcataagctgatccagagaattgtcacaagacagagttacaaatttagtttaaagatcctcgtgggctccattcgtgatgctagattcgggcaaccgcttggctctacagagagcagggagtgccccggggggctgaacagaggaggctggttttctagacggaagggctgaggaaagcggaaacagaaaacacggatcgctcacttcgaagctgcttttcttgtaagggtgaaagcagaagagaactccttattgtaccggcaaggatcagcctgtttggggattaggctgttattactctcctggtttctcagaagttcagataaacaacttagcttc

SEQ ID NO: 81798 - DNA, 285 bp, Homo Sapiens
gtctggcctctttcatttagcttaatgttttcaaggttcatctatgttgtatcacgtatcagtactttattttttgtgtggcacgtcatatggatataccacaatttgtttatcttttcattaattatgggcatttggcttatttctacttttttggctattataaataatgctgctgtgaacatttgtgtgcaagtttttgtgtttcaattctcatgggtatatacctaaaagtggaatttctgggagtaaccatatatttgagttgcaaatggaaaatgcttg

SEQ ID NO: 81799 - DNA, 1050 bp, Homo Sapiens
  misc_feature (717)..(717): n is a, c, g, or t
  misc_feature (758)..(758): n is a, c, g, or t
  misc_feature (879)..(879): n is a, c, g, or t
  misc_feature (884)..(885): n is a, c, g, or t
  misc_feature (934)..(934): n is a, c, g, or t
  misc_feature (968)..(968): n is a, c, g, or t
  misc_feature (996)..(997): n is a, c, g, or t
ttttttgaatatcaaagaagtttaatacgctgccataaaataagcgccttgaaaaagctcatggaatagaagtcagtgttagagaaacccctcccacacatcctctggctccacaccgcatccttcaaaaccaaacaagagaatctgaaacaacacaggacatccttccaagcttggatttcagtgagggcccctctaccaataacaagaacacagtttcctacatggcctgataggaaagcaaaacacagaagcacaagaagtctacaagatttcaatatttaagagacttggtacatattcaaagttaaaataactccaacttttatagctatacatattgttttaaagcaacttaatatattttaaaattttatatatacactctcaaaggttcttcaggtgaggtatgtaaacattgtctaatgaaaaatttcaatgtttcaaaccaacaaattcacagcatacattgaattttcatccattaaagacacagtatattcctacactcactaacatagtagaaatccaggcccaagagctacagactgatcttccgggtggccactttgcagaattttctcatttcactgcttcgggaaagaacactgtcacaacaggccaggagcacacgcttggtaccaggagggcgctaggccctctggaggccctgtccttgggcagctggatcactggctaagactcacaagacagcanaaagagcacaactgaacaactacgagatcgacctcagcaantgacacactgggacggaccagaaagacttttaagggacggtagagattcattttagagctcctgaatccacagcggatcagcagccctggcctaactcattcagaaaggtgcgggctatangatannatccacgtggcactgagcttcagtaatgcatgggctctatggccctggncctcaaagcatcatgctagctcattagggcctgngctgtgcttcatacaggtggggtgattnnctagacatatgcaatgaggaatatgcatgagttaaagatgcatgctgacaaga

SEQ ID NO: 81800 - DNA, 1037 bp, Homo Sapiens
  misc_feature (75)..(75): n is a, c, g, or t
  misc_feature (94)..(478): n is a, c, g, or t
taactcgatttttgatctctcaaggggcgagcctatgaaaacgccagcacgcgccttttacggtcctggcctggntgcctttgctcacatatcnnnnnnnnnnnnnnnnnnnnnnnnnnnnnnnnnnnnnnnnnnnnnnnnnnnnnnnnnnnnnnnnnnnnnnnnnnnnnnnnnnnnnnnnnnnnnnnnnnnnnnnnnnnnnnnnnnnnnnnnnnnnnnnnnnnnnnnnnnnnnnnnnnnnnnnnnnnnnnnnnnnnnnnnnnnnnnnnnnnnnnnnnnnnnnnnnnnnnnnnnnnnnnnnnnnnnnnnnnnnnnnnnnnnnnnnnnnnnnnnnnnnnnnnnnnnnnnnnnnnnnnnnnnnnnnnnnnnnnnnnnnnnnnnnnnnnnnnnnnnnnnnnnnnnnnnnnnnnnnnnnnnnnnnnnnnnnnnnnnnnnnnnnnnnnnnnnnnnnnnnnnnnnnnnnnnnnnnnnnnnnnnnaagaattcggcaagagggttaaaaatttaaccaaatttaagtgcttcctaaaatttggtgaatgtcttattttttaaaatgataataccaataaggaatgttggcacataattcccatttcattataaaacctctttaatagaatagaatcaaataattggaaatggcctatagattaaaaagctgagaaagtatatggtaggtagcaaactccccagaagtatgaactctggattagacatctcagaatacatgagcactcatgttggcttgctttgtagctatgaacttaccctgtattattgaaatgtcagcataatgactggaaggtgaaattggtccattttagagcattactattatgctatctgtccatttaaattaataattgcattaaattcattttagaaggtgctattacattagtagtaagaaagtaaattcatatataaatatttgattatcagatggtttacttacagatacttattttcctgtaaaataggagagtttacctgaagaaaaataaaacttttaacttttctgggaaaatcaaaaa

SEQ ID NO: 81801 - DNA, 931 bp, Homo Sapiens
  misc_feature (38)..(38): n is a, c, g, or t
  misc_feature (66)..(66): n is a, c, g, or t
  misc_feature (72)..(72): n is a, c, g, or t
  misc_feature (79)..(183): n is a, c, g, or t
  misc_feature (205)..(206): n is a, c, g, or t
  misc_feature (214)..(214): n is a, c, g, or t
  misc_feature (259)..(259): n is a, c, g, or t
  misc_feature (272)..(272): n is a, c, g, or t
  misc_feature (320)..(320): n is a, c, g, or t
  misc_feature (342)..(342): n is a, c, g, or t
  misc_feature (345)..(369): n is a, c, g, or t
  misc_feature (379)..(801): n is a, c, g, or t
gacaggttccgactgaagcggccatgagcgcacgcaantatgtgagtagctcactcatagcacccnccagcnttacacnnnnnnnnnnnnnnnnnnnnnnnnnnnnnnnnnnnnnnnnnnnnnnnnnnnnnnnnnnnnnnnnnnnnnnnnnnnnnnnnnnnnnnnnnnnnnnnnnnnnnnnnngcccctcgagcccaagaatcgnncacgagcntgatgtggagcgccccgcgctgtagctgagggagagaggattgtntgagtccaggaantggaggctgcaataagctatgattgtgccatggtgctctagcctggcnaacagaacaagatgctgtctcntgnnnnnnnnnnnnnnnnnnnnnnnnngatgaatagnnnnnnnnnnnnnnnnnnnnnnnnnnnnnnnnnnnnnnnnnnnnnnnnnnnnnnnnnnnnnnnnnnnnnnnnnnnnnnnnnnnnnnnnnnnnnnnnnnnnnnnnnnnnnnnnnnnnnnnnnnnnnnnnnnnnnnnnnnnnnnnnnnnnnnnnnnnnnnnnnnnnnnnnnnnnnnnnnnnnnnnnnnnnnnnnnnnnnnnnnnnnnnnnnnnnnnnnnnnnnnnnnnnnnnnnnnnnnnnnnnnnnnnnnnnnnnnnnnnnnnnnnnnnnnnnnnnnnnnnnnnnnnnnnnnnnnnnnnnnnnnnnnnnnnnnnnnnnnnnnnnnnnnnnnnnnnnnnnnnnnnnnnnnnnnnnnnnnnnnnnnnnnnnnnnnnnnnnnnnnnnnnnnnnnnnnnnnnnnnnnnnnnnnnnnnnnnnnnnnnnnagttcaaaaccagcctgggcatcatagtgagacccccatctctaaaaccaaaaaaactagtcaggcatgtggtatgcgcctgtagtcccagctacttggtaggctgaggagagaggattgtttgagtcca

SEQ ID NO: 81802 - DNA, 1041 bp, Homo Sapiens
  misc_feature (133)..(133): n is a, c, g, or t
  misc_feature (175)..(391): n is a, c, g, or t
  misc_feature (859)..(896): n is a, c, g, or t
ggtctggcatatatgcctttgctaaatgtattctgcatatccctgatctgtgataccgtataccgcattgatgagatataccgtcccgcagccgaagaccggcgcagcagtcaggagcgagaagcgaagagcnccatacgcaaccgctgtccccgcgcgtgaccgatcataatgnnnnnnnnnnnnnnnnnnnnnnnnnnnnnnnnnnnnnnnnnnnnnnnnnnnnnnnnnnnnnnnnnnnnnnnnnnnnnnnnnnnnnnnnnnnnnnnnnnnnnnnnnnnnnnnnnnnnnnnnnnnnnnnnnnnnnnnnnnnnnnnnnnnnnnnnnnnnnnnnnnnnnnnnnnnnnnnnnnnnnnnnnnnnnnnnnnnnnnnnnnnnnnnnnnnnnnnnnaagaattcggaacgaggagtttttaaatgaccaaacttgtccttaaagatgttgttattaactcgagttagttcttatttcctctgtttattttttattctaagtacactgattctgtgaatgtaccttttttattaacagggaaagaaatgaattaatttgatatgctctaaatacataaaggtgcttcaaaatatgtagaaacattactatgaaatcagtttttaaaagatatactttctctttgtcctgaggtttttcggtcttgttcaaaaggaagaattcttgcctgccatacagaaactctctagcactccctgaccttaagcttttctaaaaattctgtttgtgtgaaaagtacaagaataacaatacttacaacttccatttttgtaacctacgttcacttatgatctggatttataaacattacttggtataacgtttttcatttcctttaatgtctcnnnnnnnnnnnnnnnnnnnnnnnnnnnnnnnnnnnnnnatctatatcttggtagatgtatttcatccctagagcaggtcagcctccttcccctaatgcgaatgcttgttttgttagggaagggcttcctccaacttcgtgtgaaattgtgatgttgaagtgaataaatgtctaaagtgtaaaa

SEQ ID NO: 81803 - DNA, 619 bp, Homo Sapiens
  misc_feature (411)..(465): n is a, c, g, or t
gaattcggcacgaggattaactcgagttagttcttatttcctctgtttattttttattctaagtacactgattctgtgaatgtaccttttttattaacagggaaagaaatgaattaatttgatatgctctaaatacataaaggtgcttcaaaatatgtagaaacattactatgaaatcagtttttaaaagatatactttctctttgtcctgaggtttttcggtcttgttcaaaaggaagaattcttgcctgccatacagaaactctctagcactccctgaccttaagcttttctaaaaattctgtttgtgtgaaaagtacaagaataacaatacttacaacttccatttttgtaacctacgttcacttatgatctggatttataaacattacttggtataacgtttttcannnnnnnnnnnnnnnnnnnnnnnnnnnnnnnnnnnnnnnnnnnnnnnnnnnnnnntctatatcttggtagatgtatttcatccctagagcaggtcagcctccttcccctaatgcgaatgcttgttttgttagggaagggcttcctccaacttcgtgtgaaattgtgatgttgaagtgaataaatgtctattgtgtaactctcaaaaaaa

SEQ ID NO: 81804 - DNA, 615 bp, Homo Sapiens
gcggccgcggccagggcggcccgtgggaccgcgggcccccggcgcagcgctgcccggctcccggccctgccggcctcctcccttggcgccgcggccatggcggccagcgcgaagcggaagcaggaggagaagcacctgaagatgctgcgggacatgaccggcctcccgcacaaccgaaagtgcttcgactgcgaccagcgcggccccacctacgttaacatgacggtcggctccttcgtgtgtacctcctgctccggcagcctgcgaggattaaatccaccacacagggtgaaatctatctccatgacaacattcacacaacaggaaattgaattcttacaaaaacatggaaatgaagtctgtaaacagatttggctaggattatttgatgatagatcttcagcaattccagacttcagggatccacaaaaagtgaaagagtttctacaagaaaagtatgaaaagaaaagatggtatgtcccgccagaacaagccaaagtcgtggcatcagttcatgcatctatttcagggtcctctgccagtagcacaagcagcacacctgaggtcaaaccactgaaatctcttttatgggattctgcaccaacactgcactta

SEQ ID NO: 81805 - DNA, 2492 bp, Homo Sapiens
aatgatgaactatagacagtgggtacaaaaagcaggctggtaccggtccggatatcccgggatatcgtcgacccacgcgtcgaatgaagtctgtaaacagatttggctaggattatttgatgatagatcttcagcaattccagacttcaggggatccacaaaaagtgaaagagtttctacaagaaaagtatgaaaagaaaagatggtatgtcccgccagaacaagccaaagtcgtggcatcagttcatgcatctatttcagggtcctctgccagtagcacaagcagcacacctgaggtcaaaccactgaaatctcttttaggggattctgcaccaacactgcacttaaataagggcacacctagtcagtccccagttgtaggtcgttctcaagggcagcagcaggagaagaagcaatttgaccttttaagtgatctcggctcagacatctttgctgctccagctcctcagtcaacagctacagccaattttgctaactttgcacatttcaacagtcatgcagctcagaattctgcaaatgcagattttgcaaactttgatgcatttggacagtctagtggttcgagtaattttggaggtttccccacagcaagtcactctccttttcagccccaaactacaggtggaagtgctgcatcagtaaatgctaattttgctcattttgataacttccccaaatcctccagtgctgagttgggaaccttcaatacttcccaggagtcatcaaacagcatcagctgttagtaaagtttcaacgaacaaagctggtttacagactgcagacaaatatgcagcacttgctaatttagacaatatcttcagtgccgggcaaggtggtgatcagggaagtggctttgggaccacaggtaaagctcctgttggttctgtggtttcagttcccagtcagtcaagtgcatcttcagacaagtatgcagctctggcagaactagacagcgttttcagttctgcagccacctccagtaatgcgtatacttccacaagtaatgctagcagcaatgtttttggaacagtgccagtggttgcttctgcacagacacagcctgcttcatcaagtgtgcctgctccatttggagctacgccttccacaaatccatttgttgctgctgctggtccttctgtggcatcttctacaaacccatttcagaccaatgccagaggagcaacagcggcaaccttttggcactgcatccatgagcatgcccacaggattcggcactcctgctccctacagtcttcccaccagctttagtggcagctttcagcagcctgcctttccagcccaagcagctttccctcaacagacagctttttctcaacagcccaatggtgcaggttttgcagcatttggacaaacaaagccagtagtaaccccttttggtcaagttgcagctgctggagtatctagtaatccttttatgactggtgcaccaacaggacaatttccaacaggaagctcatcaaccaatcctttcttatagccttatatagacaatttactggaacgaacttttatgtggtcacattacatctctccacctcttgcactgttgtcttgtttcactgatcttagctttaaacacaagagaagtctttaaaaagcctgcattgtgtattaaacaccaggtaatatgtgcaaaaccgagggctccagtaacaccttctaacctgtgaattggcagaaaagggtagcggtatcatgtatattaaaattggctaatattaagttattgcagataccacattcattatgctgcagtactgtacatatttttcttagaaattagctatttgtgcatatcagtatttgtaactttaacacattgttatgtgagaaatgttactggggaaatagatcagccacttttaaggtgctgtcatatatcttggaatgaatgacctaaaatcattttaaccattgctactggaaagtaacagagtcaaaattggaaggttttattcattcttgaatttttcctttctaaagagctcttctatttatacatgcctaaattcttttaaaatgtagagggatacctgtctgcataataaagctgatcatgttttgctacagtttgcaggtgaaaaaaaataaatattataaaatatgctattgtttttgtgttcttgctgcaatgcctttaccaaagtggccttaaatatgagtagtgaattgagaacatcttgaattcttaaaagacttcttagtgactttttataaaaaggccatgtagaaaatttattaaaactactatgactgctacattcaggaatatgccagtggtaaagcatttaaatgtagcttgtcagatttaccataatcctactaatttctttgcagcttattaattttgtgaaatttgtatatatgaagaatttgcatgtatgtgtatttacaaatttttctaagtatcttgaattctcagactgcaaaaggcctattttaactattga

SEQ ID NO: 81806 - DNA, 1028 bp, Homo Sapiens
  misc_feature (15)..(15): n is a, c, g, or t
  misc_feature (99)..(99): n is a, c, g, or t
  misc_feature (137)..(137): n is a, c, g, or t
  misc_feature (159)..(159): n is a, c, g, or t
  misc_feature (167)..(167): n is a, c, g, or t
  misc_feature (265)..(265): n is a, c, g, or t
  misc_feature (298)..(298): n is a, c, g, or t
cgtgcactgcccatntgtatatggtgtctgtccaagcttgagatgtgtgaatgccagagagatgaccattcctgccctattatcattccatgttgacgntgcatgcgagtgaccctcttcaggtgcctcagtccccntagaccgagatggagaagatcnttgcagtntgggacctcatacccgagttttgacttccctgactgctacccagggagagctgaggaagaggagaaagggcgtgagcttgcctcgggacttcatcttntacagtgtgctgtgggcaagcggctgccacggncagcggggactggaataccacgctgcttgcttcgtggccatcctcattggcttgtgtctgaccctcctgctgcttgctgtgttcaagaaggcgctgcccgcccttccccatttccatcacgttcgggctcatcttttacttctccacggacaacctggtgcggccgttcatggacaccctggcctcccatcagctctacatctgagggacatggtgtgccacaggctgcaagctgcagggaattttcattggatgcagttgtatagttttacactctagtgccatatatttttaagacttttctttccttaaaaaataaagtacgtgtttacttggtgaggaggaggcagaaccagctctttggtgccagctgtttcatcaccagactttggctcccgctttggggagcgcctcgcttcacggacaggaagcacagcaggtttatccagatgaactgagaaggtcagattagggcggggagaagagcatccggcatgagggctgagatgcgcaaagagtgtgctcgggagtggcccctggcacctgggtgctctggctggagaggaaaagccagttccctacgaggagtgttcccaatgctttgtccatgatgtccttgttattttattgcctttagaaactgagtcctgttcttgttacggcagtcacactgctgggaagtggcttaatagtaatatcaataaatagatgagtcctgttagaaaaaaaa

SEQ ID NO: 81807 - DNA, 998 bp, Homo Sapiens
  misc_feature (230)..(231): n is a, c, g, or t
  misc_feature (278)..(279): n is a, c, g, or t
  misc_feature (293)..(293): n is a, c, g, or t
  misc_feature (352)..(352): n is a, c, g, or t
cgttggtaaatgtacgaaaatcaccaagacacagcagtcgaattgaagaccatttggattgccccgggcagattgcacgagagtatccctccagccaggacacccacgtgccaacctgtcccaagtcaccggtacagcccagttcgccagtacagccaacctcacccagtccccccacccgtccttttacatcccagttcccccgatataccccaaccctttccaagtannccctaccagttcccaaaagccaccccacctgcccagtgatggccggnncccggtccccaccnttcaccaccaccccaaatactccccaacatctcctacttattccccaacctctccagtntacaccccaacctctcccaagtactcacctactagccccacttactcgcccacttcccccaagtactcgcccaccagccccacctactcgcccacctcccccaaaggctcaacctactctcccacttcccctggttactcgcccaccagccccacctacagtctcacaagcccggctatcagcccggatgacagtgacgaggagaactgagggcacgtggggtgcggcagcgggctagggcccagggcagcttgcccgtgctgccgtgcagttcttgcctccctcacggggcgtcacccccagcccagctccgttgtacataaatgccttgtggcagagctcccggtgaacttctggatcccgtttctgatgcagattcttgtcttgttctccacttgtgctgttagaactcactggcccagtggtgttctcactcctaccccacccaccccctgcctgtccccaaattgaagatccttccttgcctgtggcttgatgcggggcgggtaaagggtattttaacttaggggtagttcctgctgtgagtggttacagctgatcctcgggaagaacaaagctaaagctgccttttgtctgttattttatttttttgaagtttaaataaagtttactaattttgaccaaa

SEQ ID NO: 81808 - DNA, 1140 bp, Homo Sapiens
  misc_feature (929)..(974): n is a, c, g, or t
gaactgccacacctggtcagaggatacttccatatcaaaaatcaaatataatataatgccatcatttgcaaataactatagaatattttaatgtttatttagcttgacctttggggattcttgttcctgatttatcatacttgttttagtcacaccagagataatgatcaaacattaaataacttttatttataagatttcttagcaacagatcatagtacatgtacatactaaatgaatatatcaacatttttctgtgctatttcaaaggttcagtaattttatttcataaaggtatctaaaaagactaaaccagtcatcttaaatatattaccactaaagcccaatatccacctactgtctgaatttggagagagtatggctaatgttagatactaaacatggtgagaatcctctcagatactggtttcagagagctgtcacccatagaaccaagggctaaaaagttactcatctttatggtataattttacttcaatctaacaaaaatttactgagcatctacagtgttctgggcctcgagccaggtgctgggacacagaggtgagccactcatgagtcctccccatgagtctctttagctggagaaccactttgtctagagtgtgtgattttgcacttaacctctctagagtctatggtgtgtgagatgaacagtggtaatattggtttgcatagagaggatacctgtagacagaacccagtgatggagccttaagtaaagagtataattttggtgtgtggttggtagaatcactataatggaatgtgacttaaaccttagacatcaatcattattttggtactttaaatataactgatgttttattccttgtgactacactatttagatatttacattaaatatcgaaaaactgatcacaaagatactataatacttttatacnnnnnnnnnnnnnnnnnnnnnnnnnnnnnnnnnnnnnnnnnnnnnntttactattggcattagtaattattttccctttatgcaatttcttttagagtgcttctgtcttctcctcctacccaatagtaccatgaaattgtattattaactgagctatagcaagtcataatgatcatttgaaatcatttattaaataaatgaggtaaagatgt

SEQ ID NO: 81809 - DNA, 1972 bp, Homo Sapiens
  misc_feature (70)..(70): n is a, c, g, or t
  misc_feature (289)..(298): n is a, c, g, or t
caagacgcgggtggggagtgcgccaaggcggcgatatgggtaaagagagggggccgagaatagaggtccncgcaaatgttgcggccgtaaagtatcgattatggggggggccgaaatatatcttcgcccacgtctaaaatattttgtaataacattttacagggacccggccccccattgccggaagtatgctggcgtgaacggtccagcgcgcccccagagggggcgtgctggacatctagcttcatcttttgggtggagattttgctagagggggtagtgggtcttnnnnnnnnnnacgcggcggcgggacctccgcaaaaatatagaaaaaagaggtggtcgtctgcgattttgtaggggcgcataaaaactaaatgtgcccccgtaaattattcgccccgtcataaaaggaaggggggtgtcagtgagggtgtctcgcgcccccaacaactcccttatcaggggagaaagtgtgtgcgcccaacaaaaaaaagacagagggggggactccccacaaaaaaagggcgccccctcctctatagagtgtggggattacgaggatttcccccttttttaagaaaagggtccgaattccagtttaaacaagaatttccagggttaagtttggcttccattttaaggttaattttccagggtattttggaggcgtagaagtcagtttggaggaaacattttgtgggcagggttaagaagataaaaagccaaaggggaggtgtgtcaaaaacaaagaaggatccagaagtttagtaagtgaaaagagtttaatgaagcctcaagggtttaagggaaattaaatggaaacttttaatcctaattgcttttcatctgacatgcttaaaggaatccttttaaactgataagaaacaatgaataggaaagaaaacctgctaaaatctcttagaatttacacgattcttattctactacaagaaagcattatttggtacaaggtgtatttgtggatgtacatgaacagtatatatattatccggatcatgttgtgctatgtacaggtctttacaattcttcctgaaggttaaaacagttcattagaattcaaaatgcgtaatcatctgtaagttggcacttgttaggctcttgtcagcattgataactggcatgttttattgcagcccagttccagccagtgtttgccaacttgtacaacagaagtccagcaataggtgggtagagtgcaggaaaaacagtgccatgtttctcaattggagaccctgaaataagtgaagttactagctgctaaataaatgtcactcaaaagcagtctcttggctttttcttacacagcgggcaacttttcttttaaattctccatttctatcttccctccattctttcgcagcatcaacattagcaggtgagtctccattagggtctgccagcatagaaatgacactaatcatgatggtttccacagtgtggatagggagccagcgttcctctggcttttcataaccatacttatcttccccaggctcatgaagaatagaaatgcacacatcaccatttttatcaacatttgggtgccagatttctgtaatgaatttcattttaggaggtcggaggggataatcttttgggaaagtaagatgagccttaaaaacaccaccttcataaagtgtatctggagggccaataataaggacttcccagtcggtagagatcattgtcatctattaaacctgcagaaaagccttccactggatttttgttgagttctgccagctgtcttcgcagtagcagtgccgactgcagctccgtcatcctccctgccgagggcccgggctggcgccggggcttccgaagggctggggacaggctctgggggcggctggagcggggtgtgccgaggaacccgggccccgcgaccggagcgccggagccgaggaaggccgggctgaggcggcgggagcggcgcctcgctgccccc

SEQ ID NO: 81810 - DNA, 1017 bp, Homo Sapiens
  misc_feature (41)..(41): n is a, c, g, or t
  misc_feature (137)..(137): n is a, c, g, or t
  misc_feature (206)..(206): n is a, c, g, or t
aagaagtagagactgacaggatcatgacttaccttgcagtntactccatctgtccagcgcaagagccattactggatgtgagtatgtgcagtgatatctgcccttacatacacactgagccagacatgcagtgcatntcagaggatgtgatcagctctactaaagtgtcatccgtgagcaggaaccagtacaatacattgctatcntgactataaaaaggaagaaatctaagctttccatgaaagccagcacttgctcatttaatcctggagttttgttgcaaacctgacggaatggaaacgacagaatataactaaccaactggaaaaatggatgaaactcaatgtagaagagggactgtatagcacaaccctggctggtagcatcacaacacctcctctgcttatcgtattttatcaacagcactctaccatcgatcctatgtggaatgtccgccaccttggttccagtgctggaaaacgatattcacctcagtttgtaaaggctgccaagttactccattggaatggacatttgaagccatggggaaggactgcttcatatactgatgtttgggaaaaatggtatattccagacccaacaggcaaattcaacctaatccgaagatataccgagatctcaaacataaagtgaaacagaatttgaactgtaagcaagcatttctcaggaagtcctggaagatagcatgcgtgggaagtaacagttgctaggcttcaatgcctatcggtagcaagccatggaaaaagatgtgtcagctaggtaaagatgacaaactgccctgtctggcagtcagcttcccagacagactatagactataaatatgtctccatctgccttaccaagtgttttcttactacaatgctgaatgactggaaagaagaactgatatggctagttcagctagctggtacagataattcaaaactgctgttggttttaattttgtaacctgtggcctgatctgtaaataaaacttacatttttcaataggaaaa

SEQ ID NO: 81811 - DNA, 2042 bp, Homo Sapiens
  misc_feature (158)..(166): n is a, c, g, or t
  misc_feature (1348)..(1365): n is a, c, g, or t
  misc_feature (1398)..(1925): n is a, c, g, or t
  misc_feature (1941)..(1941): n is a, c, g, or t
  misc_feature (1998)..(1998): n is a, c, g, or t
cagtcgacggtaccggacatatgcccgggaattcggccattacggccgggtgtcacagacaaatatgggtagttttgtttaaataggtaagcaaaatattatactttatagcagtggattaccaacaccttgacttctttgttacagtgctaacatcnnnnnnnnngtgcaggtatccatgattattaagcagggtggaagttcagtattttgtcatttaaaaagattagttatataatgtctgcttccagccagtgagaaacatctagccatacctttcttatgcaagccattgagttatcaggactgtgaattaacactgtatgaataaatttctgtacaccttattgtttggccagaaggccaccaagtgtacttatatgtaatccttaaattttaaagtagctgtaatttttaaatatttctaaacttttcttaaaccactaaaattaagctcttactacttagtcaactatcctcagctgtattcgtactcaattgtcagtatggcacagattactgtattaaaatattctcctttcgtcttcatatttaccttctgaggtaatttctttaacttaatggtgttactacaaaagatttgcagaacttttaatcaagcactatgttaatactgtaatatcagaatactatgttgcattatttaaaatgttcaaattgaatagattaaaaagtttttaaatgctattgcatcatataatttgctattcatccactatggcattgcatatcaatcagttaatacacttaatgttgcatgagtgatattttggtctgggtttcctcttaagattttagtttgtctgaattaaggaaaaatgtttttaatatacattcttattttgtcccacccctccagaaataagctggaaatcttaactttttggggggtcttttttggtgttttaatgggcccagaactgtggtttaaatttttatgtatgtattttcttttttgtggagtataaatttaaaaactggatttgggacctaaaatactcctcaggttgatgtattcatgaagttttaaaacatctttagttttcaaagtaaactggatatgtggaccttaaagttattgagtttaagctacaaattgtaacgtcattactggacatgtcagcatcaaccctctcaaaatagcttggtcactttatgaaggggcgttttaaagttgttgtttagcagtgacatttaatatggtccaattgcttttctttttaacgtgacaaaaagagaataaggaacaaacactattgctgccgaatgccataacactgagttgtacaaattgtgattgaggaaatgaaaaggtttatactttttnnnnnnnnnnnnnnnnnngcctacagccgcggccctcgtgccgaattcttnnnnnnnnnnnnnnnnnnnnnnnnnnnnnnnnnnnnnnnnnnnnnnnnnnnnnnnnnnnnnnnnnnnnnnnnnnnnnnnnnnnnnnnnnnnnnnnnnnnnnnnnnnnnnnnnnnnnnnnnnnnnnnnnnnnnnnnnnnnnnnnnnnnnnnnnnnnnnnnnnnnnnnnnnnnnnnnnnnnnnnnnnnnnnnnnnnnnnnnnnnnnnnnnnnnnnnnnnnnnnnnnnnnnnnnnnnnnnnnnnnnnnnnnnnnnnnnnnnnnnnnnnnnnnnnnnnnnnnnnnnnnnnnnnnnnnnnnnnnnnnnnnnnnnnnnnnnnnnnnnnnnnnnnnnnnnnnnnnnnnnnnnnnnnnnnnnnnnnnnnnnnnnnnnnnnnnnnnnnnnnnnnnnnnnnnnnnnnnnnnnnnnnnnnnnnnnnnnnnnnnnnnnnnnnnnnnnnnnnnnnnnnnnnnnnnnnnnnnnnnnnnnnnnnnnnnnnnnnnnnnnnnnnnnnnnnnnnnnnnnnnnnnnnnnnnnnnnnnnnnnnnnnnnaagcgtttcccctggnagctcctcgtgcgtctctgttcgacctgcgcttacgatactgtcggcttctcctcgngagcgtgggcttccaaagtacgctgtagtaccactcgggtaggg

SEQ ID NO: 81812 - DNA, 1217 bp, Homo Sapiens
gcagagccatgtattggaagcaaagccccagaagatgataaaacaattatagaggaataggcaaccaaaattgcagatttgaagagacgtgtggaattccttgtggctgagaatgaaagattaaggaaagaaaataactaaaggctgaaaaggccagacttctaaaaaggtccagtagaaaaggagctggatgtagatgctgattttgtagaaacgtcagaattacggagcttgccgccacattcagaaactgctacagcctcctcaacctggcagaagtttgcagcaaatgccgggaaagccaaggacattccaatccccagtcttcctcccttggattttacatctccagaacttccccttatggatctccctgagaatattctgaaaggatttatgaataattaaaatggaaggccacagaagaggggagaagaggaaataatacagtaatagttaatccagcaaaaagaaatgaaaagggaaaaccacatagaagggtaatcccggaaatgcttcatctggtggactgtgggagcagaggcattgccaggacttgggaaacagtcactgtgaaatgcgctgcgtatctcattcactcacttcagctaatgattccgacttggcagacgctaaactcatggaggttcggtttctcctgatacaaaccaaatggctacctggaagaatttctttcaagcaacagttatttttcttatcttcagggttaaaatgtataaaagttatgtgtaattaatctataatgccataaatgataatgcaaaacctaaataatatggtcgccggaggggctgccttatatttgaaacatgctttctatcatgcattgactgtatgcattttgttaatgcacattctgtttgtttaaggtgtgtaagatacacacccttctagatgaaactatatgtgccacactttgcactactcatgataacctcaagactatcagaagaaatatttaaatttccattttatgaagaaaggaaccaaattattatgctttttaaaacaaattaccagtttacataattaatcagggtgcattttaagttctaacttcgtttattgtataatgcatcatttgaaaataccaaggaggaaataccctttgtttttaatgatgcaagagtggacgtaatgctagttggcagtattttattgtaagaaatcaataaagtaattgtgttttataaaaa

SEQ ID NO: 81813 - DNA, 1574 bp, Homo Sapiens
  misc_feature (29)..(29): n is a, c, g, or t
  misc_feature (115)..(115): n is a, c, g, or t
  misc_feature (212)..(212): n is a, c, g, or t
ttgtgagcacagtactgggccatgtaccnaatgcctctgggagccccagcaggagtcccagttgtgtcagcagcaaatgatcgtgccctgggaaggacttgaagctacacagccntgatatcagttctgagggacccctctgggggaacagctccctcctctttccccagagctgactggaagtctgtctcattctacacactgcattgtancagaaaggaccaagtgggaaaataaagaacatggaacaggctgagagagaggcagctccatcaaagggacctaggtgtatgccaaaaatgagaatgaagattgaccagcgacttctttggcagagacctgggcaggctggctgatggagagctggggcctgtgaatacagtaagggtggggtccacactgccaccgcctcccctcagatgccgcttctctggactcagcagcactgggcagtctgcccagttctgcccgtggcttctgctccagagaagcccagtggggacagtcagagtggaggagtgaggggctgtcccagcagaagccctggctgctgccttgggtggcactgtcaaaggctctggaggtcccagagggccaagggtctgaagactcgggtttgaatgtagttgagagattcttggagcaatgatgcttgttacggaaggaattattgggaattgaaaaggtggcattagtctgggatgataaggagttttaaccatttgagtccatggtatgggaaaaattgccgacgggaacatattttgtatggttttgcttatttagtaaatgtttgtaaaagcctatatctgtgcttttaatgggtttgggtattttagggtgtggaatagatttccaggacttccctgatttataccatcatgctgtggaaaagaaggtttgacctcctccattgttcaggaccaactgggaagggacttggggatgcctttgtttaaacactccctctcacttttcccatttgaattctgttacactggggttccaaaaaaaattattaaacgtatgctttgaaaacagctgccttttaaaaattaatgtggctcctcggggagattgcatcagccacctttcggcagctcctgccagacgccaggagcctttgtttgacttcctcattttctctcaactgaccttttaatgtagagcaaaagaaaaggagccaagaagcccaggaccaggcatgtggagaaggtggtgggctctcacctttttatattcagtccagctcttatgaggctcgccatcatctggtgcgacttggacttgaactttggaattctctggtgaggccaagattccctcttgcttgtggagaccagcactgctcagtgttcagggtgtgtcatgaataaattcccatttttgcaatctcagcacccaaggtcctaaagctaatctaaatgtgggctctaaatctgatcactgggagagattctgggtcctcagccaccccgttggcatatttagaaattctccccaagtaaggccgggaagccctggattgatacaagggggtttttttaagaaagaggaaaacccggtcttaatga

SEQ ID NO: 81814 - DNA, 1082 bp, Homo Sapiens
  misc_feature (78)..(79): n is a, c, g, or t
  misc_feature (118)..(118): n is a, c, g, or t
  misc_feature (162)..(162): n is a, c, g, or t
  misc_feature (232)..(232): n is a, c, g, or t
  misc_feature (315)..(315): n is a, c, g, or t
  misc_feature (797)..(797): n is a, c, g, or t
ttttctccgctcgttgtgtgggatttgagcgaaaacattcacccaggaacagtttgactggtacgatttatcgactcnntttaggattgccctcgagccaagaatcggcacgagcgcnacgagcttgcggaaggatctgggggaccttttaagaagagtgcncccccaccccccttcccttggacgaccagtacaatgtttgagaactcactgcaagctgtaagcggcccantacttcccactccctttttgaactctctgtgcagcagagcaaataaactctcctctggaacatgaccccagcagcctgagacncacccctggcgctcacaggggctgcagcctgcctcatccaaggacagtaggagtgcagacccacctaaccctggacccactggtgtacccatccacccatcctggtagcttaacacaaaagatacacttttaggagcttcatagcccctcttcccccattgcctgagaaaccactttccctgggcaacttagggcaagctcaaatcccactgctaccaccacagctggtgctcttttgcaagtgccacctcctagctggagaccaaccagcacagtccacacagcacctcaaggaagaataaatagaactgttcccaggaaggagaaaatgcctgcatgagctcagctgttaccactgcgtaccacaccctgaccagtcagaggtcttgagtcggtccgcatgacaagttcaccgctcgcataaccagcattcaagaaagccagcacactaagcctatctacagccagggagtctcagagtntacgtcactcccctgccacctcaatcagagctggtgctggtatccactgctgggagacttgtgctgaggtgaagcctgggctggatggctggaggatgaagaactgcacggaggagatggaggcacccagacagatgccccatggacatcctgaagcagagctgcctcactgccctgcacacacatgagagcgcagccaggaacagaaggactgggcaacattcaggcggagcccaggccaattttctaaacatggaatatgagttaaataaatggcttcgtatt

SEQ ID NO: 81815 - DNA, 1047 bp, Homo Sapiens
  misc_feature (495)..(514): n is a, c, g, or t
  misc_feature (547)..(921): n is a, c, g, or t
  misc_feature (967)..(967): n is a, c, g, or t
  misc_feature (990)..(990): n is a, c, g, or t
  misc_feature (1010)..(1010): n is a, c, g, or t
  misc_feature (1012)..(1012): n is a, c, g, or t
  misc_feature (1026)..(1026): n is a, c, g, or t
actctaaagatagaattggggagtaaacttcagtttttgtttagagtggatctgaatatttaaaatcctataataatttttgtgaatcttcattctttgagtatgggattgtaaaagacaaactatatcctacagtagtatcatcatcagtatcaaaggtctcctttttttacttggaaaagtaattcacaaacattataaaaatactattcaaacagtaccaaagagtagattagcaaaagtaagtttttttccctagcctgtctcatttttccatcattacacagactacttggaatgtcttagatgtccttgtattgtaattttctgtgtaggtagaaataaatgtagctttcttattttacacaaataggaacttactgtatatactgttctgcactttgcttttattaaagatcttttgataaagaactatattgataagcagtaaagatgtcatgctcctggcccaataaaatattgttagcattgtcnnnnnnnnnnnnnnnnnnnngcctacagccgcggccctcttgccgaattcttnnnnnnnnnnnnnnnnnnnnnnnnnnnnnnnnnnnnnnnnnnnnnnnnnnnnnnnnnnnnnnnnnnnnnnnnnnnnnnnnnnnnnnnnnnnnnnnnnnnnnnnnnnnnnnnnnnnnnnnnnnnnnnnnnnnnnnnnnnnnnnnnnnnnnnnnnnnnnnnnnnnnnnnnnnnnnnnnnnnnnnnnnnnnnnnnnnnnnnnnnnnnnnnnnnnnnnnnnnnnnnnnnnnnnnnnnnnnnnnnnnnnnnnnnnnnnnnnnnnnnnnnnnnnnnnnnnnnnnnnnnnnnnnnnnnnnnnnnnnnnnnnnnnnnnnnnnnnnnnnnnnnnnnnnnnnnnnnnnnnnnnnnnnnnnnnnnnnnnnnnnnnnnnnnnnnnnncgcaggaagacatgtgagcaaaggcagcaaaggcaggaacgtaaanggcgcgtgctgggtttttcatangctcgcccctgagagcatananatcgagctcagtanaggtgcgaaccgaaggatata

SEQ ID NO: 81816 - DNA, 967 bp, Homo Sapiens
ggcagtaactataacggtcctaaggtagcgaggcctgggtggcgaattcggcacgaggtcgggtccgtctctgcccgcggctgtggcggcgccggcggatccagccttagcggtttctctctgggcggcggcggcggcggctcggttgacgcctcctccgccagctgagcccgcgggagcccaggacgccgcttccccgcccatccccgctccccgaggccggccgcctggtcatggcgcagccgggcccggcttcccagcctgacgtttctcttcagcaacgggtagcagaattggaaaaaattaatgcagaatttttacgtgcacaacagcagcttgaacaagaatttaatcaaaagagagcaaaatttaaggagttatatttggctaaagaggaggatctgaagaggcaaaatgcagtattacaagctgcacaagatgatctgggacaccttcgaacccagctgtgggaagctcaagcagagatggagaatattaaggcgattgccacagtctctgagaacaccaagcaagaagctatagatgaagtgaaaagacagtggagagaagaagttgcttcacttcaggctgttatgaaagaaacaggtcgtgactatgagcaccagttacaccttaggctggagcacgagccgaacacagtgggcaccagtatagagaatccgacgagagggaaatagctgatttaagaagaaggctgtctgaaggtcaagaggaggaaaatttagaaaatgaaacgtgaaaaaggatcccatccaggataccatattgcatttagttgtgtctccttagatgcctcttggctgtgacagtttctcagatttttcttgtttttaatgacctttctgtcattttttaaagtgctttttaaaggttttgtttatgatgacattcagcacttggaattgtgaagtcatatttatattaataaataacttgatttgtgacc

SEQ ID NO: 81817 - DNA, 800 bp, Homo Sapiens
  misc_feature (88)..(88): n is a, c, g, or t
  misc_feature (114)..(114): n is a, c, g, or t
  misc_feature (152)..(152): n is a, c, g, or t
  misc_feature (158)..(158): n is a, c, g, or t
  misc_feature (176)..(176): n is a, c, g, or t
  misc_feature (211)..(211): n is a, c, g, or t
  misc_feature (256)..(256): n is a, c, g, or t
  misc_feature (265)..(265): n is a, c, g, or t
  misc_feature (271)..(271): n is a, c, g, or t
  misc_feature (278)..(278): n is a, c, g, or t
  misc_feature (301)..(301): n is a, c, g, or t
  misc_feature (346)..(346): n is a, c, g, or t
  misc_feature (413)..(413): n is a, c, g, or t
cgctcctataggatgccctggagcaagatccgcacgaggattgaagctcttacagaatctgccaacaaattgatcctagatccttctnaagtgctccagcccatgaggatctanttaggacgcaggagtcgctcctttctgaagctgtgcgnttctcnttgaagaaatgctgtgtntaggtacttttctttatgtaggactggataactcncccatagttactttttctgtctccccctacccatcagtcttcatntgtcccatntggccntatcccncacataacatctcctcagatatntgaagacgtgtctttcaggactcctctcaatcagtgtccccagtntcatcagctgtgggtcacatgtcctcattcttagtacccctaccatctcagttattctccacccaanaacatttaacctagcctttcactaggtttcgagtaatacaaaatagagtagtataatatgatctctgctaaattcatcatttttaaagtagcctaagactattagctgttttgttggcagcctatacactgttaagttatgaagtgcactgttaagtacttagtatgaacgttgatgtcaaggtcttgggctacttttaattcatgccttgccctcgctctacttttacagtaactagctccaagtataggacaagtccaagtccgtctgtgcttgctccagtccagctactttttctaccctaccagtgtctttgtggacttgagttgattcattcactattcatatgcaactctgataaactaaccgtgtaaaaataaaacattg

SEQ ID NO: 81818 - DNA, 1147 bp, Homo Sapiens
ggctaggtacgaggcctggtggtgaattcggcacgaggggccagaggccctgcccaggcagatgaagcccccagcgtttcaaagggggaaactgaggctgtgtgagggacacagcgtgtgcagggcccacaaacacggtcctttctctaggttagcggatgcagatgcctgatgagtgccatgccctctgtggacacctggggaggggggtcacctccagcgccgccctgggacttccactgcacgtgcaagagacttaccctttcacacagatcacctgcctgccgcagggctgatgaggatgggtgaggagcgcagccactgggtgtcatgcactgtgggggttctcccaccttctgcccctcctcaggttccttgctgcttctctcctctcccaactgtggcacgctgagggctcaggcacaggaccgctcctctggggcagcctccaataacccttggacaacctccactttttcatcttcagccctgaccactccctggggcccatagccttacatccatctgcccccagcccaaacacttctgcaaacactagaaaaggaggtagcccgtgtgccctcctgcaccgcctcctccactcctgtcttggagaggctttcccgtgggccgagcaacccccttacctttggcacttgccctgattctctggccagcttcctacaacctctccttttcagccacacccaagtccacctgttcacaaacaccctgggctgggccctggccgaaccctggcttctacctacctgtctcaggaagtgcctgagccttgcacctacagaccctcccagagaaagccctggctttgcaaccagctgtcttctcatgagacacagggccacaggagcaccacggtgcccaaatgggtcttggagcattagaccaggggcttcatgcctgccctggggacaggtggccaaagtggcatgggagatagggagacagtgtgggtgagcaggtgggcaggagctacaggagcctggggcctgtggatcacagacaccgccaggcaagtgccagttcacacaggtacaggtggctgcagagtgcccaaaggccaagcagcagagtgcctggtgtggacgggagaggagtggggaggttgggcgcagtgaaaacacac

SEQ ID NO: 81819 - DNA, 1005 bp, Homo Sapiens
  misc_feature (157)..(157): n is a, c, g, or t
  misc_feature (162)..(162): n is a, c, g, or t
  misc_feature (164)..(164): n is a, c, g, or t
  misc_feature (166)..(166): n is a, c, g, or t
  misc_feature (179)..(179): n is a, c, g, or t
  misc_feature (206)..(206): n is a, c, g, or t
  misc_feature (230)..(230): n is a, c, g, or t
  misc_feature (244)..(244): n is a, c, g, or t
  misc_feature (308)..(308): n is a, c, g, or t
cttggttgtaagcctagacactcttcggtttgagtgtgagctcctgtataacccccctctggagatgttggaaccccctcagcacaagtacaatgatccgagtgtcccagaagtgtctcctgttctttccagccaaggcaccaccgagccttgatcnttctntncntgggaagatctcnagatgtgtgatataattagttttatcnaatatataaatagagattattttntctgaaatctgtangaaaagtaaagaaaagcaatgctgttggttatctcagggtgcccaaagtgtagtagtcaatttntgtactaggaaaggcacccaatgcatttcctgacttttaagcatttccttgttggaagcagcagagggccaggccaagttgctgacagtgactttgcaggttgaataaagaaacccttggaggggaagcaggcttgtctgaagcagcatgtatattcactgggcatgtagctcccacaccagccttgagccaggccctggacaggaggggctgttgcaggatgagggaggccagagaaggcatcgaagccaagacctgggcccagctggggagggatgtgggaaaggaaggatgggagggaggaccctctgggaaaatgtggatttgagctggtgagagtgttgctaaggctgggctaaagcctggagagggtaggaggaggcaagaggggtccaggcagggctgatcctggcctctgacctgtccagggcgacccctgaagcccctgctgcctctgggcattgctgggagaggccaaggcaggactcacgtctgaacagagatcccctcgggcattgctgatgggccaccttcagctgcagggaagaagcctaggagaggaggcatgggagggacctgggccttgttcagattggccacctctgctgagaagtccataccagtacacccctaataagttatgccacataccaacgtactgtggatattataacctgcattaaaacaactctaaaga

SEQ ID NO: 81820 - DNA, 789 bp, Homo Sapiens
  misc_feature (85)..(119): n is a, c, g, or t
  misc_feature (515)..(682): n is a, c, g, or t
aaaactgatacactcactatagggcgctagcgtcttattagccgaacgacgagcgcagcgagtcattgagcgaggaagcggccgnnnnnnnnnnnnnnnnnnnnnnnnnnnnnnnnnnncagtcgacggtaccggacatatgcccgggaattcggccattacggccggggccagcagccgcgcattccagagccatccctgacccaggaactttccgcagactcgccgccatctgggagtgaagcaacatggatgcaggcagccaagtccccatggaagtcgtgcttcccaagcacatcctggatatctgggttatcgccctcatcatcctggccaccattgtcatcatgacctcgttgttgctgtgcccagccactgcagtaatcatctatcgcatgcggactcatccgatccttagtggggctgtttgagagcctcccaagagggccgggtgagggatgaggacaggcatcctatccccagcctcttcctgtcttcagaaaagcagcaggagnnnnnnnnnnnnnnnnnnnnnnnnnnnnnnnnnnnnnnnnnnnnnnnnnnnnnnnnnnnnnnnnnnnnnnnnnnnnnnnnnnnnnnnnnnnnnnnnnnnnnnnnnnnnnnnnnnnnnnnnnnnnnnnnnnnnnnnnnnnnnnnnnnnnnnnnnnnnnnnnnnnnnnnngtggatgtgaaagctgtacgtgatcagttaaagctaacaaagatataagggtgtaatggttgaatcctgagaagcttcaagaaacagagaacctggatggctgattg

SEQ ID NO: 81821 - DNA, 921 bp, Homo Sapiens
ggggatggtgatccctgccctttctacctcatagggatgtgagaaccacctgacttagtggatgtgaaagctgtttgtgatcagtaaagctaccacagatataagggtgttatgctgaatcctgagaagctttcaagaaccagagaacctgattgctgatgatggccttaaaggtggtgagggagatactgggggcagagcagactttgccagtgcccctcaggtcaaaccaagccaagagcaccctgtccccattccaaggggccagcagcactttggcccaaagtattttctttaaggtgccattccttcatgttttctcagtttggagggtgatgggtagagctttccagaaccttctccattccagaatctctgcccctgtgtaatctgaaggaaggctgtgccatctttgggcactgccaagggagttggggtgatgggcttctttctgcactggagtctcacatctgttagctttgacactcaagcaatgttggaaaatgcagggtgactgagttccctgcccagctttcgggatctctggcccccatccccttgtgtgtgtccctctgcccagctcctgctgtaattagctccacgtgtacccccttcactccctcccaccagctctgcagccagcctatggcaattatattttaagaggtgttcccaggacttttgggacctactaaaacaatgatggttattttagatgtgatgatttatatttatgtagagatatttctggaccactcaagctcttcgataccaaaatcaggagcatcttgggatttattaaattatgtaagaagatagcacagatatcgggatattattgtgtgaaaatgctgcttttactttgatgtgatctcattgatgtacacaaccaagttccaataaagtgctagaatgtgaaaa

SEQ ID NO: 81822 - DNA, 2185 bp, Homo Sapiens
  misc_feature (45)..(45): n is a, c, g, or t
  misc_feature (551)..(583): n is a, c, g, or t
  misc_feature (1835)..(1898): n is a, c, g, or t
gacttcagccggatctcgtggcggagcccatcttgctccctctcncaggcctttacccgctccctaggattcccgggccctgacagtactgcttttaaagagacagtgttagggatcttggaagcacagccaacatgtgtgacattgaagaagccactaaccaactcctagatgtgaaccttcatgagaaccagaagtctgtacaagtgacagaaagtgacctcggaagtgaatctgagcttctagtcactattggagccactgtacctactggctttgagcaaacagctgcagatgaagtcagagagaaacttgggtcatcatgcaaaatcagcagagaccgtggcaagatatattttgtcatttcagtggaaagtctggcacaggttcattgtctgagatcagttgataacttatttgtggtggttcaggagtttcaagattaccagttcaaacaaacaaaggaagaagttctaaaggattttgaagacttggctggaaaactcccatggtcaaaccccttaaaagtgtggaaaattaatgccagtttnnnnnnnnnnnnnnnnnnnnnnnnnnnnnnnnntcagaattcaagtattgagaagattaataatggacaagaagtcaaaatcgatcagagaaatgttaaaaaagaggttcactagccatgctttagattctcatatcttagattattatgaaaatccagccatcaaagaggatgtatcaacattaataggtgatgatttggcatcttgcaaagatgagactgatgaaagctcaaaagaagaaactgagcctcaagtgctgaagtttagagtcacatgcaacagggcaggagagaaacattgctttacctcaaatgaggctgcaagagattttgggggtgctgttcaagattattttaagtggaaggccgacatgaccaactttgatgtggaggttcttttgaacatccatgataatgaagtcattgtgggcattgcattgactgaagagagtctccaccgaagaaatataacacattttggacctacaactcttagatcaactcttgcctatgggatgctcaggctctgtgatcctctaccttatgatataatagtcgatccaatgtgtggaactggggcaataccaatagagggggccactgaatggtctgactgcttccatattgctggtgataataatccactggctgtgaatagagcagcaaataacattgcatctttattgaccaagagccaaattaaagaaggcaaaccctcctggggcttgcccatagatgctgttcagtgggatatctgcaatctgccattgagaactggctctgtggatattattgtaacagatttgccatttggaaaaaggatgggatccaagaaaagaaactggaacctttatccagcttgcctacgggagatgagccgtgtctgcacacctaccacaggccgagctgtactacttactcaagacacaaaatgctttaccaaggcgttatctggaatgcgacacgtatggcgaaaggtggatacagtctgggtgaacgttggtggtcttcgtgctgcagtttacgttctgatacgtacacctcaagcttttgttcatccttcagaacaagacggagaaagaggaactctttggcaatgcaaagaatgaagatgactaatagtacttgtacttcccaccactggaaatgttagcataaaagaacttggagaggaaaaaagtattaacaaaactgcagtctgcactctttaaacctgtttaaggctcttcatcctggttagcaaaaggtgtgaatgtaatgtgatggaatttaaaagttttatgannnnnnnnnnnnnnnnnnnnnnnnnnnnnnnnnnnnnnnnnnnnnnnnnnnnnnnnnnnnnnnnccatgttggtcaggctgttctcgaactcctgactcaggtgatctgctgcttggcctccaaagtgctgggattacaggcgtgagccactgcgctagccgtcaatttcttaacaagcatgaaaggggttcatcttgtttggtcttgactgcgtcagatggtggaaatggttgtgtatgtcatgcttttggtgccaatgcttcctgtgcattaccttatgcagagaacaagtagcaactaaatatgtggtgtaagggtaataactaaaacattttggttcggaactgtta

SEQ ID NO: 81823 - DNA, 1008 bp, Homo Sapiens
  misc_feature (119)..(119): n is a, c, g, or t
  misc_feature (141)..(218): n is a, c, g, or t
  misc_feature (224)..(637): n is a, c, g, or t
  misc_feature (679)..(696): n is a, c, g, or t
  misc_feature (754)..(767): n is a, c, g, or t
ttggggacgcttaccgaatggtctacggttagttggaagcccccctcccgaggagaagcgacagttccgtagcgcaggtcgaacagagaccaggaggagttccaggggaacgttgtatntttagtctgtccgttccgccannnnnnnnnnnnnnnnnnnnnnnnnnnnnnnnnnnnnnnnnnnnnnnnnnnnnnnnnnnnnnnnnnnnnnnnnnnnnntgcccnnnnnnnnnnnnnnnnnnnnnnnnnnnnnnnnnnnnnnnnnnnnnnnnnnnnnnnnnnnnnnnnnnnnnnnnnnnnnnnnnnnnnnnnnnnnnnnnnnnnnnnnnnnnnnnnnnnnnnnnnnnnnnnnnnnnnnnnnnnnnnnnnnnnnnnnnnnnnnnnnnnnnnnnnnnnnnnnnnnnnnnnnnnnnnnnnnnnnnnnnnnnnnnnnnnnnnnnnnnnnnnnnnnnnnnnnnnnnnnnnnnnnnnnnnnnnnnnnnnnnnnnnnnnnnnnnnnnnnnnnnnnnnnnnnnnnnnnnnnnnnnnnnnnnnnnnnnnnnnnnnnnnnnnnnnnnnnnnnnnnnnnnnnnnnnnnnnnnnnnnnnnnnnnnnnnnnnnnnnnnnnnnnnnnnnnnnnnnnnnnnnnnnnnnnnnnnaagaattcggcacgagggttggagcggccgcggctgtaggcnnnnnnnnnnnnnnnnnngagatggagtctcgccactgtactccggcctgggtgacagagcgagactccattctcnnnnnnnnnnnnnncagaagacaaccatgtgaaggcagggagacacagagacagcaccatgtgacgacagaaaattggattaatatatctataagccaaagaatgccagatcgccagcaaaccaccagaagtaaggaagaggcaaagaaggattccccgacaggtttcagagagggagcatggccctgctgacaccttgatttggacttcttcccactagaactgtgatacaataaatttttgctgtcttaagcc

SEQ ID NO: 81824 - DNA, 982 bp, Homo Sapiens
  misc_feature (132)..(146): n is a, c, g, or t
  misc_feature (205)..(215): n is a, c, g, or t
  misc_feature (579)..(809): n is a, c, g, or t
  misc_feature (862)..(862): n is a, c, g, or t
cttctattttctggaaaacatgcatgaaaaatgtattcagttcaattgcagaaggagaaaaaaaatcaacttaaggtgaatactgtacaattctggaataagaactattcctgctcattctttttctatgannnnnnnnnnnnnnngggagcccagaatttccctgggaaataagaataagatcctttaaatactgtccagaagnnnnnnnnnnntaccaccttataacaggtctcatttgtgactgcttccaaaactgcagataaaacctcaaatcatcaaaaggtttgatttattaaaaagaaaaagtctctggtgaaatctcaagagtcccttccaccccaagcatttttcttcattaaacaagcagtcaaaaacccacttcaaactataaattgaacagcaatggaaaaataagaaattttcattcttttccaatcaatgtaatttaacataaactccagtttacttacacctaatgcaataacagcctttgttgtgtccacatttcaaaacatagaacatttgcaagacaaaaaaaaccatcactttttccttctccctcgtgccgaattcttnnnnnnnnnnnnnnnnnnnnnnnnnnnnnnnnnnnnnnnnnnnnnnnnnnnnnnnnnnnnnnnnnnnnnnnnnnnnnnnnnnnnnnnnnnnnnnnnnnnnnnnnnnnnnnnnnnnnnnnnnnnnnnnnnnnnnnnnnnnnnnnnnnnnnnnnnnnnnnnnnnnnnnnnnnnnnnnnnnnnnnnnnnnnnnnnnnnnnnnnnnnnnnnnnnnnnnnnnnnnnnnnnnnnnnncgcgcggggagaagcggttgcgtattgggcgctctccgcttctcgctactgancgctgcgctcgtcgttcgctggggagcgtatcaccatcatggtgtataggtatcaagatagggaaagcagaaaaaatgtacaaagcacaaagcaggacgtaaagcggtgcgggtttcaag

SEQ ID NO: 81825 - DNA, 679 bp, Homo Sapiens
aagaattcggcacgaggggatctcctgggccttggagcacctcacgctgggggaatcaatccctgagggactcagaatcttctccgtgcaacctggaaagttcatctcttgtttccttcagtcaaagaaagtccattgtacataacaaaacagcccccaaacagcccagtgccgacaccattgttcctttcacactttcctttgttgcatgcagttgggttcaaatgccaaatagtgattagaagacgaccattctgatctgtgtgtgatctggtcactatgtgactgcctttacggtttctctccatgtgctatatgaatgaagaatgcataccagtgttttaaaaggtatttttatgtgtttttaaacacttttttaaatgagcctgacacctgtgtttcagcatttggagacatccccatgttattcttttaagtgtataattactgatacttttttgtttgtttgtttaactaagttgtgtttaacttatgtgcagtctttataatgtatgtatgttattacagtttcaactatcatattttctttgattacatttataatttgatcttgctctgattataatgccagtgaatgttgctgaactctttgtatatgcaaattgcaagatttaaaccattctgatgcaaggataaacctttactttgactaccaaaa

SEQ ID NO: 81826 - DNA, 1253 bp, Homo Sapiens
gatgctacataacaaaggaaaaagaaatcactgttcatttctggaatggcaaagctgctaaagtgcccctaggtggggtccagtcggtgtccctgaccatctggaagaaggctgtggagaggctgcacaagtctttcaccagggagcaccccaggccccttcactgggccccttgctgctctctgctagggccaatcactgggcgcatcactaatgagcttcctccggatgctccattcctgtgccctctctgccaccatcatgcctgctgccagctactgtgccagggctgcctctgtggctgcccgccatgtggcacgacctggtggcctctaaccagggacctcagaagtcatgcccagagaactcccagagttggagcccacagcacagcttttgcccctggaaggtcctaaaagaggagaaagtagcaatgcacgctcccctggctggttcttcctcctcatcctcctcctgtgaacaagacggtgtggagaatgatctggagatgggccctccccagagactgatggtgaacagtgcagtcaacacagatcccatctttcttgagatgcctctgagacagagtggcctctgccagcctgagtggaggtattggaagagaaacgggcctgagccatgccctggggaagccaggaacaagatattccaacatctgcaaagaagaaaaggatcacaaacagcagagagcacaaactgtagtagtggcgactaccaaggagctggtctcgaaagcaacccacatgaagccaccgcggaccccgccaggggaagctgaacacagaaagcggagtcagagccttgcaatatgtcagtggaacaagaattcccgttagactaagagccctgaggatctaggtaaagaataaacatggtaaatattcgaggagagttatacagagtggctgacaaggccttcttcaacggaaggaggcagaggacaggccacaggtaacagtcaaataaccaccagtatctccaccccacgaagacctccctgcagataagcagcaggaaggcacctgttgtgagggctataggaatgtgggatcctgccctggggctccctgccagggccctggtgaaactgctttaagatgcctcttccgtggaagagggggtcagcctgctttgggcaaatgtgtccacagccactctgccaccttcccataaagcctagttgtacatgagtgacattttgtttcacctcttaataaaaatgaattctcttc

SEQ ID NO: 81827 - DNA, 468 bp, Homo Sapiens
cacaatcaatgactttttaaaatcagtgacttttgattcttaaaattgcagtcagcataacaatgtatggaatttttcccccttttataggtaaagaataaacatggtaaatattcgaggagagttatacagagtggctgacaaggccttcttcaacggaaggaggcagaggacaggccacaggtaacagtcaaataaccaccagtatctccaccccacgaagacctccctgcagataagcagcaggaaggcacctgttgtgagggctataggaatgtgggatcctgccctggggctccctgccagggccctggtgaaactgctttaagatgcctcttccgtggaagagggggtcagcctgctttgggcaaatgtgtccacagccactctgccaccttcccataaagcctagttgtacatgagtgacattttgtttcacctcttaataaaaatgaattctcttcaaaa

SEQ ID NO: 81828 - DNA, 1785 bp, Homo Sapiens
  misc_feature (1596)..(1599): n is a, c, g, or t
  misc_feature (1601)..(1642): n is a, c, g, or t
  misc_feature (1644)..(1654): n is a, c, g, or t
  misc_feature (1656)..(1663): n is a, c, g, or t
  misc_feature (1665)..(1674): n is a, c, g, or t
  misc_feature (1680)..(1680): n is a, c, g, or t
tggaccggtccggaattcccgggatcggcagcccgtgagacgcccgctgctggacgcgggtagccgtctgaggtgccggagctgcgggaggatggagccgctgaaggtggaaaagttcgcaaccgccaacaggggaaacgggctgcgcgccgtgaccccgctgcgccccggagagctactcttccgctcggatcccttggcgtacacggtgtgcaaggggagtcgtggcgtcgtctgcgaccgctgccttctcgggaaggaaaagctgatgcgatgctctcagtgccgcgtcgccaaatactgtagtgctaagtgtcagaaaaaagcttggccagaccacaagcgggaatgcaaatgccttaaaagctgcaaacccagatatcctccagactccgttcgacttcttggcagagttgtcttcaaacttatggatggagcaccttcagaatcagagaagctttactcattttatgatctggagtcaaatattaacaaactgactgaagataagaaagagggcctcaggcaactcgtaatgacatttcaacatttcatgagagaagaaatacaggatgcctctcagctgccacctgcctttgacctttttgaagcctttgcaaaagtgatctgcaactctttcaccatctgtaatgcggagatgcaggaagttggtgttggcctatatcccagtatctctttgctcaatcacagctgtgaccccaactgttcgattgtgttcaatgggccccacctcttactgcgagcagtccgagacatcgaggtgggagaggagctcaccatctgctacctggatatgctgatgaccagtgaggagcgccggaagcagctgagggaccagtactgctttgaatgtgactgtttccgttgccaaacccaggacaaggatgctgatatgctaactggtgatgagcaagtatggaaggaagttcaagaatccctgaaaaaaattgaagaactgaaggcacactggaagtgggagcaggttctggccatgtgccaggcgatcataagcagcaattctgaacggcttcccgatatcaacatctaccagctgaaggtgctcgactgcgccatggatgcctgcatcaacctcggcctgttggaggaagccttgttctatggtactcggaccatggagccatacaggatttttttcccaggaagccatcccgtcagaggggttcaagtgatgaaagttggcaaactgcagctacatcaaggcatgtttccccaagcaatgaagaatctgagactggcttttgatattatgagagtgacacatggcagagaacacagcctgattgaagatttgattctacttttagaagaatgcgacgccaacatcagagcatcctaagggaacgcagtcagagggaaatacggcgtgtgtctttgttgaatgccttattgaggtcacacactctatgctttgttagctgtgtgaacctctcctattggaaattctgttccgtgtttgtgtaggtaaataaaggcagacatggtttgcaaaccacaagaatcattagttgtagagaagcacgattataataaattcaaaacatttggttgaggaannnnannnnnnnnnnnnnnnnnnnnnnnnnnnnnnnnnnnnnnnnnntnnnnnnnnnnnannnnnnnnannnnnnnnnnccttgntcgggccggcctcggcccctcgaagaagcttttcatagacccatttcgttggggcggcgcgggccccagataggaaaagggaaacatggggccatagcctggttt

SEQ ID NO: 81829 - DNA, 1077 bp, Homo Sapiens
  misc_feature (179)..(179): n is a, c, g, or t
  misc_feature (222)..(222): n is a, c, g, or t
  misc_feature (306)..(306): n is a, c, g, or t
  misc_feature (447)..(447): n is a, c, g, or t
  misc_feature (981)..(1003): n is a, c, g, or t
ctctccagagttcccatttaccgggaccccgcggtactggagcttccccacagtacatcccggtgtatccaagccgtgcactgcagtatgcatcgtcctaacccaccgagtgatgaggagtctccccgtggcagaattgacagagccacatgagcttacgatgccaggatcccagacantgctgcgccatgaaacaaagacatccgtagtcccagctctcancagtactgagcaaattcacctacgcccgtcagagccaggaggagtggagcactgtctaccccccaggagaaatcatcgacactntcgtggtggagaacgcaaacggagaggtgacagatttcctgagcttttatacgctgccctccaccatcatgaaccatccaacccacaagagtctcaaagctgcttattctttttacaacgttcacacccagaccccttttntagacctcatgagcgacgcccttgtcctcgccaaaatgaaagggtttgatgtgttcaatgcactggatctcatggagaacaaaaccttcctggagaagctcaagtttggcataggggacggcaacctgcagtattacctttacaattggaaatgccccagcatgggggcagagaaggttggactggtgctacaataaccagtcaccagtgcgattctggataaagccactgaaaattcgaaccaggaaatggaaccccaccactgttggtccaattttcacacacgtgagaatccctagcaaagggagcagaactgaaccggctttaccaaaccgccagcgaacttgacaattgtattgcgatggcgtgggctgcgtgacgtcacctccggtcgtgtctctggtctccgtgttttccagttaattacatcctcatgcagccgtgatcaagggaatgtaactgctgaaaactagctcgtgattggcatataatggagttaacgggtgaataataaaagtatatatatcttttctnnnnnnnnnnnnnnnnnnnnnnncctgacaggcggccgcaagctttctccctttacagagggttaattttagcttggcactggccgtcgttaaaacc

SEQ ID NO: 81830 - DNA, 435 bp, Homo Sapiens
tgcaccctcctcccactgcaatgtctagttaactttgtaatcccacaggttttctttttgctccattgagaaagccacttttaatattttaaagttgctctctgtaccacccccaccttccccccatgcctcctaaggaatcaaagttcaaaccagactctgagtgggggatgggtgagattatcagaccaagttagttctttagattgcttagaggcccagaagggtttcaagccctttgaaggagtatttgggtggcacctggcatcctttgtttctggcaacagagtgcactcagcactcctggggggcaagggcttcctcccatccttggcttatggaaagccatcccagatcaggccccccaactctccagaacaggctacaaacatgcaaattagaattcttttaatataaaaaaaagtactaaaataa

SEQ ID NO: 81831 - DNA, 200 bp, Homo Sapiens
aagaattcggcacgaggccattgcctaaaaaaatttctcataaaaatcaaagagcatatttcacattctcctccataccaaatgcctctttttcgtggtgcaagaagcatcctctgaggctgacaggaattctctaagctgaagagatacaaaggagttgatgggaaggataatccgcccatcggttcctgacacaatat

SEQ ID NO: 81832 - DNA, 716 bp, Homo Sapiens
gaagtcacttcttctggaaaggcacattgtaccctggatgcagcagcttcatcagcaatggaagtggctgatatgtggactctgcagattatataaccttcctaagcacccgaatgttgagatgccagatcaaccactacccatgggtcagaatgggacaacagaagaagtgacttcaaaagaagacgaagaagaagagatggatgaagatatagaagacttagatcactatgagatgaaagaagagcctactagtgagaagaagttggaggatgaaggaactgaaaaagaaaactgggcaatattagagaaaattaggaagactgaaaggcaaggccatttaaatgtgttgaccctgatagtcctttgcacagtgatcttcagatcttaaaaagaagcgataggagacattttgcttatctttcaagtgttcctgacagcatctcagaggatggtgtcctctggcttactctctgggaaatgctgctctgttggaaatccggagttctgagtgatccccatgcgttttctgctgcagagcaggacatgctgaagtgattccttcgtgagcagatgttagaggtctccctttgacagcttgttacaaagttgatcacgaatatactattacgtgtgttatggtcctcattatttggatgaataatttgaataataagtcagcttgtgacttagccaaaataaatcttctgattcct

SEQ ID NO: 81833 - DNA, 1199 bp, Homo Sapiens
  misc_feature (86)..(86): n is a, c, g, or t
  misc_feature (107)..(540): n is a, c, g, or t
ttccaggggaacgctgtatcttatagtctgtcggttccccacctctgattagcgtcgattttgtgtgctcgtcagggggcggaccntatgaaaaacgccagcacgcnnnnnnnnnnnnnnnnnnnnnnnnnnnnnnnnnnnnnnnnnnnnnnnnnnnnnnnnnnnnnnnnnnnnnnnnnnnnnnnnnnnnnnnnnnnnnnnnnnnnnnnnnnnnnnnnnnnnnnnnnnnnnnnnnnnnnnnnnnnnnnnnnnnnnnnnnnnnnnnnnnnnnnnnnnnnnnnnnnnnnnnnnnnnnnnnnnnnnnnnnnnnnnnnnnnnnnnnnnnnnnnnnnnnnnnnnnnnnnnnnnnnnnnnnnnnnnnnnnnnnnnnnnnnnnnnnnnnnnnnnnnnnnnnnnnnnnnnnnnnnnnnnnnnnnnnnnnnnnnnnnnnnnnnnnnnnnnnnnnnnnnnnnnnnnnnnnnnnnnnnnnnnnnnnnnnnnnnnnnnnnnnnnnnnnnnnnnnnnnnnnnnnnnnnnnnnnnnnnnnnnnnnnnnnnnnnnaagaattcggcacgaggcgacagcgagatcctctccaggccctgcggcgccgcaatcaggagctgaagcaacagaggacacctgaagctgaatatggaacagattttctattcggtgtctgtaggacaagtaatcaacagcccctctgagtcaggcctgtgatgactggctctatcactaggttgatagtttgctttctgagagccaactgaaagaagctctagaacccaataaaagacaacatatttatcaaagatgtatccagttaaagcaggcaatagatgaaaataaaaatgctcttcaaaaattaagcaaagctgatgaatctgcacctgtggcaaactataatcagagaaaagaagaggagcatactcttttggacaagcttacccaacaactgcagggccttgctgtgacaataagcagagaaaatataactgaagttggggcacctactgaagaagaggaagaaagtgaaagtgaagatagtgaagacagtggtggggaggaagaagatgcagaggaggaagaggaagagaaagaggaaaatgaatctcacaaatggtcaaccggtgaagaatacatcgctgttggagattttactgctcagcaagttggagatcttacatttaagaaaggggaaattctccttgtaattg

SEQ ID NO: 81834 - DNA, 607 bp, Homo Sapiens
  misc_feature (372)..(474): n is a, c, g, or t
  misc_feature (478)..(514): n is a, c, g, or t
agcagagctgaggataaagaggaatatcctgcacacttcttccttctgtgtcagggaacatttgcttgtctacagctcgagtatttgtaaacactcagtagcacccaaaccctgagccctagcagtttcctttggcttgtttactagcaagagtagcatgtcggaggacgatgagacattgaatcaaactcttagacaagctggtgaaagttttaacgactgctggaggcaacatgcttccacactgacagaaatcatctttcaaaaatcctgcacatatctcaggcttatgaaacaaactaattcctaatagttggaaatgaattaaaagcttgcggtgagataaaagatagattttggctggatgtgatnnnnnnnnnnnnnnnnnnnnnnnnnnnnnnnnnnnnnnnnnnnnnnnnnnnnnnnnnnnnnnnnnnnnnnnnnnnnnnnnnnnnnnnnnnnnnnnnnnnnnnntgcnnnnnnnnnnnnnnnnnnnnnnnnnnnnnnnnnnnnnggttttactaggcatgaaaatgagtccatttccattctaggccccaggatatcaccatgaccaataaaaacaatctgtggcactcaaaaaaaa

SEQ ID NO: 81835 - DNA, 993 bp, Homo Sapiens
tgaaatgtgatgttctaccattggttttgagtacgtgaatacttcctgtcctactgtttcccctaccctattctcaccttctctccgcccacatcctcaccaagagattgtgtgggacatgaccttgaaatgctggcgatgatccacactgggatatcatcgctggcgactgcactctcaggagcccaaaatcaggagtgaaattgccacttctagtccccttatttcctatggaaacaacgccttccgcacccctagcacctgccgtcctcactgtaaagcttcatcaggatcgtccaccgtgtatattatacgcttcagatcatgttgcttatattgttgctgcaatgaccatcgttttcactttgctggtaaccacttgattgctgacagctacagtcaatgaacctgctgatgactttttttaatgtagtacaacagtgacagttatgacaggcttaccttggaagagttgtcatttttactgccaattttttggatgaagatgtttttataaacctttcaaaatggtctgcaaacagagcaggaattgcacaattaactcaataatgctgtgtgttctcaagaagctcccttagtgaggccgatcttaagatggccgattctgcccgttgaaggcatcctgggaaagaaaacaagcatcccagcgggcatctcaccacgacttctcctggagtcctcacacggtcactgacaactacagtcagttttaggaactagagtgccgtatcatcagacttaccctgtcctgccccaccttccctgctaacatcgaggtgtgtgcagttaccttctgagcttggaacaagcagactggaattttcctctgctacctcttgtgtataaaatcttgtttataaaatttcaaaaggaagtagatacactagggaagaaccttaattctaaatttggttcatgtgtggcaaagttcttagcttctaagagtataaaataaatttttcaaaaacagaa

SEQ ID NO: 81836 - DNA, 999 bp, Homo Sapiens
  misc_feature (62)..(62): n is a, c, g, or t
  misc_feature (81)..(81): n is a, c, g, or t
  misc_feature (83)..(83): n is a, c, g, or t
  misc_feature (132)..(132): n is a, c, g, or t
  misc_feature (139)..(139): n is a, c, g, or t
  misc_feature (165)..(165): n is a, c, g, or t
ccccagctacactatgtccgctgttgtgttgatgtgacgatacattcaccaggacagttacntgaacgaattatcgactcntntaggattgcctcgagccaagattcgcacgaggcatgagctgcagacacntggatcncagtcagaaaggccagtgagcactanggaagacttggggccaggcggagtgggtcacctgacactctgtgagccccttctagtcttgctcacaccggaattcattcactccaagaagccatcaggggtaagatactttcctttaaacgtcactaagaaagaagaggcctgccggtgacacagtaagatgccattgatctaaagatgcgtcttgatttcagaaaggtccggaagtggaaagcaggtttcagggctgctgaggtacagggttctcctgtaggccccagggatggtctcaggggtgctgagtgcgtgcgtggtaaatggatggagcccaggggcgcctcctgccagtgtcctccaggcactcaaacctagcccttctgaagccgacctcacgtgacctcacagcccctcctgaaggcgcctcactgatgacggtgggtggaataacagcccccagagatgtccaggtttggaaccccaggacgtgggaaagtgttaccttgcgtggcaaaagggacccggcgcctgtgcttcagttcaggatttcgtggtggggagatgaccgtggatggttgaggtgggccctgagtaatcatgggggcccttataagggaaggggagtcacgagggtctgcgcatgaagcaaggaagcttctggctgtgaagatggcaagaaggcctggggccaggcgatgaggtggcccctggaggagctggaaaaggcattggattctgccccagagcctccgtggagaaacaaagccgcactgacaagacttcagcctggtgaaaaccattttggactcctgacctctagaactgtaagataataaattggtgtggttttcaacctca

SEQ ID NO: 81837 - DNA, 1252 bp, Homo Sapiens
  misc_feature (222)..(222): n is a, c, g, or t
  misc_feature (244)..(347): n is a, c, g, or t
cgccgagcagatacacgaatggatattcacaccctcgatatttgtagcagcactgtccactcaataaccaaaaggtggaagccatctaagcatccactgatggatgaatggatacagaaaatgtgatacatatgtacaatggaatactattcagccgtaaaaaggaaggaaattctgacacatgctactacttggatgagttttgaaaagaaactatgctgnccgggcgcagtggctcatgccnnnnnnnnnnnnnnnnnnnnnnnnnnnnnnnnnnnnnnnnnnnnnnnnnnnnnnnnnnnnnnnnnnnnnnnnnnnnnnnnnnnnnnnnnnnnnnnnnnnnnnnntagataagtaaaaataaaaataacttctccctttcggattcccgacgctgtggttgctgtaaggggtcctccctgcgccacacggccgtcgccatggtgaagctgagcaaagaggccaagcagagactacagcagctcttcaaggggagccagtttgccattcgctggggctttatccctcttgtgatttacctgggatttaagaggggtgcagatcccggaatgcctgaaccaactgttttgagcctactttggggataaaggattatttggtcttctggatttggaggcaatcagcggacagcatggaagatgtgtgctctggctcggataagagatgggacatcattcagtcactagttggatggcacaaggctcttcacagacgcatctgtagcagagtggaacttgtactaacttatgatagaatgtatcagaataaatgtttttaacagtgtaaaagcacaaaacaacaaaaaaacttccgaggacatcatatgccgggtggcgggaaaacagcagggtcactggaactgggcccatgggtcatacgctgttcctagacccaagctttcttgtcccacacggggtagatctgccgggttcccctataagggcaagccggcattaaaattccggataaagcccccgggtttaaccccgtggttgtaatgaactgcggggaaaaaggggacacagagcagacaagcacaggcgacgcagataaccaccgacgtcgcgcaacaccaacgggacagcacacacagcatgccaaccacacaaaacacctgtggagacacgcgaaacaaggggaaggcccaaacgcagggcggggcacgggaacaagccgcggcgggaacggcggccgggacaggacgaagccacaacgcagcgacggaagagcg

SEQ ID NO: 81838 - DNA, 547 bp, Homo Sapiens
aagaattcggcacgaggctgggatgggtgctctttggctggttttggctgcggatggtgagatcagagcagctcttcctgctgctggcccctgcaatcagttgttgggatgccagtgcagatcactaagtagtaagattttaatcaaacacgaccaggtccgaaatgcaggtcatgagtgtgaaattctcaaatttacataaaaagtagaagtatagacagtttaacatttggtattaaaggagaggaaattgtagcagcttttcacgtttcccagtccccattagagggcttgagaccttgtacctgaacaacccattttgcactcagtgctttctgatgccttaggagaattgttttgtttcacaaaagctgggaaggaagaagtccattctgcagctgttagatctgcctctcaggaaaaagtactaacttgttctttttgttcctggctttcatcagtttgtgagatttctctattttttttaaatataattttatttctttcaacaaatataaaataaaaaacaactttggaacaatgaaaa

SEQ ID NO: 81839 - DNA, 1679 bp, Homo Sapiens
aagaattcggcacgaggaccattctgatgttggagcagccacactcagggaaatctgctacaatggcgagatccccttgaaagacaagacgctgattgagaaagagagattctatgaaagccggtgcaggccagtgacaccatcatgtaaggagctggctgacctcatgacccgctgcatgaactatgaccccaatcagaggcctttcttccgagccatcatgagagacattaataagcttgaagagcagaatccagatattgtttcagaaaaaaaaccagcaactgaagtggaccccacacattttgaaaagcgcttcctaaagaggatccgtgacttgggagagggccactttgggaaggttgagctctgcaggtatgaccccgaaggggacaatacaggggagcaggtggctgttaaatctctgaagcctgagagtggaggtaaccacatagctgatctgaaaaaggaaatcgagatcttaaggaacctctatcatgagaacattgtgaagtacaaaggaatctgcacagaagacggaggaaatggtattaagctcatcatggaatttctgccttcgggaagccttaaggaatatcttccaaagaataagaacaaaataaacctcaaacagcagctaaaatatgccgttcagatttgtaaggggatggactatttgggttctcggcaatacgttcaccgggacttggcagcaagaaatgtccttgttgagagtgaacaccaagtgaaaattggagacttcggtttaaccaaagcaattgaaaccgataaggagtattacaccgtcaaggatgaccgggacagccctgtgttttggtatgctccagaatgtttaatgcaatctaaattttatattgcctctgacgtctggtcttttggagtcactctgcatgagctgctgacttactgtgattcagattctagtcccatggctttgttcctgaaaatgataggcccaacccatggccagatgacagtcacaagacttgtgaatacgttaaaagaaggaaaacgcctgccgtgcccacctaactgtccagatgaggtttatcaacttatgaggaaatgctgggaattccaaccatccaatcggacaagctttcagaaccttattgaaggatttgaagcacttttaaaataagaagcatgaataacatttaaattccacagattatcaagtccttctcctgcaacaaatgcccaagtcattttttaaaaatttctaatgaaagaagtttgtgttctgtccaaaaagtcactgaactcatacttcagtacatatacatgtataaggcacactgtagtgcttaatatgtgtaaggacttcctctttaaatttggtaccagtaacttagtgacacataatgacaaccaaaatatttgaaagcacttaagcactcctccttgtggaaagaatataccaccatttcatctggctagttcaccatcacaactgcattaccaaaaggggatttttgaaaacgaggagttgaccaaaataatatctgaagatgtaatgcttttccctgctgccagctgatctgacactgtttgctggcacattaatcatagatcacacgaaagattgactggactttagccctcaaatttcagtatctatacagtactaggaccatgcattcttaacaatattagac

SEQ ID NO: 81840 - DNA, 1141 bp, Homo Sapiens
  misc_feature (115)..(115): n is a, c, g, or t
  misc_feature (139)..(139): n is a, c, g, or t
  misc_feature (797)..(812): n is a, c, g, or t
ccaagaattcggcacgaggtcttataatgtaacgagaaggaaaggtatgaatcaaattattcccaaaatgttgaaaactgaactatagtagtcatcataggaccatagtcctctntgtggcaacagatctcagatatcntacggtgagaagcttaccataagcttggcacctataccttgaatatcggctatcaagccaaatacctggttttccttatcatgctgcacccagagcaactcttgagaaagatttaaaatgtgtctaatacactgatatgaagcagttcaactttttggatgaataaggaccagaaatcgtgagatgtggattttgaacccaactctacctttcattttcttaagaccaatcacagcttgtgcctcagatcatccacctgtgtgagtccatcactgtgaaattgactgtgtccatgtgatgatgccctttgtcccattatttggagcagaaaattcgtcatttggaagtagtacaactcattgctggaattgtgaaattattcaaggcgtgatctctgtcactttattttaatgtaggaaaccctatggggtttatgaaaaatacttggggatcattctctgaatggtctaaggaagcggtagccatgccatgcaatgatgtaggagttctcttttgtaaaaccataaactgtgttactcaggaggtttctataatgccacatagaaagaggccaattgcatgagtaattattgcaattggatttcaggttccctttttgtgccttcatgccctacttcttaatgcctctctaaagccnnnnnnnnnnnnnnnngtcaaagcctcttaataaatttaatggaactatacatagaacagcagctcttcctcaccctttgcatacctttaatatttttccttcttaaattggccacagcaggggtcattcacactctcactgtcttgcaggaatcacaagaagtcttcatatgtgaacgtgccattcagttggtagttaagagcattcaacttcaaatatatagaagatatttgttttagtgcaaatccatgatggagtgcctcccttttccttttttcactttttgaaaaagatgttttgggtagtagtttaatatctcagggtgctctttctaacatagtaaa

SEQ ID NO: 81841 - DNA, 610 bp, Homo Sapiens
aagaattcggcacgaggtttcaactctgtatgaaaatgttaaatattgtaagaaagttatcctctcattttttcactgctatgatatatttattataaaatagggaatgaatgaatgaatatggattgctgttaactagaaacacttctgtatgtcagtcagcatttaatgaccacctactgtgtgcacagcactactggtaaaattttgaagacattgttaacattaaaaaatattttaaagttgtctacaaatctgagccttgtaatgatgtatatttaagttatttttgtttttatagattaaagtaagattatactatccagttttattactaaaaaagactggttttaattttaccaatgtgtgaactataaaagctttttgcctacagattttacattttaaaattatctatggctgttttaaattgtctagcaatttatatggttgtggttaactcatttaagaaacaattatctttctatattaagccattttcaaatagcaagacagtgcttgtctttttttgttattacactaactgcaattcagtaagctgcatgacaaaatatgtattatgtaaataaactgggtttactaaataaaa

SEQ ID NO: 81842 - DNA, 580 bp, Homo Sapiens
ctatacgaacaaagaaaaatggtcatgtacctcaacatgctaaggacttgtgagggctacaatgaaatcatctttccccactgtgcctgtgactccaggaggaaggggcacgttatcacagccatcagcatcacgcactttaaactgcatgcctgcactgaagaaggacagctggagaaccaggtaattgcatttgaatgggatgagatgcagcgatgggacacagatgaagaagggatggccttctgtttcgaatatgcacgaggagagaagaagccccgatgggttaaaatcttcacgccatatttcaattacatgcatgagtgcttcgagagggtgttctgcgagctcaagtggagaaaagagaacattttccagatggcgaggtcacagcagagagatgtggccacctagcctttccttatccccttcccttcccttcacccccatcctcttactcctttcatgtcccatttcagacagagtaaccattaacaaaaaagaagagaaaaagttaaagtcgttatattcaaaagccctaaactaaatattattaataaccccctctgaatttcaaaaa

SEQ ID NO: 81843 - DNA, 1031 bp, Homo Sapiens
  misc_feature (303)..(365): n is a, c, g, or t
  misc_feature (672)..(672): n is a, c, g, or t
  misc_feature (748)..(748): n is a, c, g, or t
  misc_feature (824)..(824): n is a, c, g, or t
  misc_feature (831)..(831): n is a, c, g, or t
  misc_feature (853)..(853): n is a, c, g, or t
  misc_feature (878)..(878): n is a, c, g, or t
  misc_feature (882)..(882): n is a, c, g, or t
  misc_feature (904)..(904): n is a, c, g, or t
  misc_feature (982)..(982): n is a, c, g, or t
  misc_feature (995)..(995): n is a, c, g, or t
ggtctatcaagctatggaaaccaaccaagtaaatcccttctctaattttcttcatgttgaccctagaaaatccaactgaatggtatctctttggcacgttcaacttggtctcctattttcaataactgttgaaaaacatttgtgtacacttgttgactccaagaactaaaaataatgtgatttcgcctcaataaatgtagtatttcattgaaaagcaaacaaaatatatataaatggacttcattaaaatgtttttgaactttggactagtaggagatcactttgtgccatatgaataatctnnnnnnnnnnnnnnnnnnnnnnnnnnnnnnnnnnnnnnnnnnnnnnnnnnnnnnnnnnnnnnngaaaaaatgtatatgttttttgtgtatttgggaaacgaagggtgaaacatggtagtataatgtgaagctacacatttaaatacttagaattcttacagaaaagattttaagaattattctctgctgaataaaaactgcaaatatgtgaaacataatgaaattcagtaagaggaaaagtaacttggttgtactttttgtaactgcaacaaagtttgatggtgtttatgaggaaaagtacagcaataatctcttctgtaacctttattaatagtaatgttgttgtagccctatcatactcactttttangacacagtatcatgaaagtcctatttcagtaagaccatttacatacagtagatttttagcagagattctttagtgntacatacatattttagagaattgttggctagctgtacatgtttttgaaagctgtttagctagctataaggctatanttggaantttgtattttttattacagcanacatttatcagtcatccagttgctnacanatatgtttagatagtgtgtgangttggttagagttagaatgtaacatggtctatgttcattggatcactcggtgcgatctggctcgaggcaatccctaangagtctataatcngatcagtcaacgttctgtgtgatgtatcgctcaatc

SEQ ID NO: 81844 - DNA, 1353 bp, Homo Sapiens
  misc_feature (100)..(134): n is a, c, g, or t
aaaaaacgttaaattaactgaacgcaatcacaattaagttggggccggcagtcgtctttcgaacgacgagcgcagcgagctggtagcgaggaagcggcgnnnnnnnnnnnnnnnnnnnnnnnnnnnnnnnnnnncagtcgacggtaccggacatatgcccgggaattcggccattacggccgggcataaattcttaatctatggggtgtagttagctactgtaaatttgatgcacatatttttccagattcaataagtaggatccccatcaagctatcttctgaatctttaaaaatgtattctccttatttcatgggtatataattattttctgggcaacagtttgttcatggtacatttgtctccagccctagactcagaaaaatgtaatttattttaatggagaatactatttagaagctgcagtctctgtgtagggaggtgttcctaggtaatagtgccctggcttttaggtcttctctatggaggatatggcaaagacatacaaaattatatatacgtatccacacattaataactctatttctatattaaaaacatgaccacaagccaacacttttaattccactgcagcactgctggggttaatttctttgctttccaaattcccttgtctgtagctatctttcatcacttgcaaaaatagcacgtgctcaatcctaagattaaaatataagctactctcagaattgataactcataccactctttgtttaaaaatcaactaagccagaattcagtttttattcacagttcttatctttagctcagggcgtaatataaaagcactaggtttaaaacttacttggtcagcagcaatccacttctaggtacatgtccaaaggaactgaagaaagcatctcaatgtgtgaatgcctacctgtgttcattgcagcattattcagaagagccaagaggtggaagcaaagtaaatgtccattgacagatgaattggtaaacaaaatgcattatatacatacaatgcaatatcatttagccttaaaaacaaaattctgccatatgctacaacatggacgttatgctaagtgaaataaaccagttccgaaaggacaaatacacccatttccacttatatggggtatctaacgtcaaactcagaagaacaaagtactgcggtatttgccacaagctggtggaggagaaaatgagttgttcaatgggtattgagtgtcagccacgcaagatggaaaagctttttgagatttgttgtataaaaatatgcctatagttaacaatactcttcggtacacacaaagtatgtgaaagggtaaattttatgtgtttttatcacaataaaaattgtaataaaag

SEQ ID NO: 81845 - DNA, 1013 bp, Homo Sapiens
  misc_feature (55)..(55): n is a, c, g, or t
  misc_feature (73)..(73): n is a, c, g, or t
  misc_feature (198)..(198): n is a, c, g, or t
  misc_feature (201)..(201): n is a, c, g, or t
  misc_feature (206)..(206): n is a, c, g, or t
  misc_feature (209)..(209): n is a, c, g, or t
  misc_feature (217)..(218): n is a, c, g, or t
  misc_feature (224)..(224): n is a, c, g, or t
  misc_feature (242)..(242): n is a, c, g, or t
  misc_feature (250)..(250): n is a, c, g, or t
  misc_feature (254)..(255): n is a, c, g, or t
  misc_feature (285)..(285): n is a, c, g, or t
ccacagacattgactgtacgattatcgatcattaggattggcctgagccagatcngcacgagcaataccactntacagtaccatactgagctatacatttgtgtataaagtgactgatcagaaatcatccattcagtaagtactcttctctaaattgctgtatgtctataagaacagttgacttgccttttcctcacntcntcacntcntccaacanntgaatntgaaggagacgtgaaaanttgacatntgtnnttgcccttgggctggaaactatcatatatncataagtttgagcctagaagtgatccttgtgatcttctcacctctttaaattcccacaacacaagagattaaaaacagaggtttcagctcttcatagtgcgttgtgaaatggctggccagagtgtaccaacaaagctgtcatcgggctcacagctcagagacatctgcatgtgatcatctgcatagtcctctcctctaacgggaaacacctcagatttgcatataaaaaagcaccctggtgctgaaatgaacccctttcttgaacatcaaagctgtctcccacagccttgggcagcagggtgcctcttagtggatgtgctgggtccaccctgagccctgacatgtggtggcagcattgccagttggtctgtgtgtctgtgtagcagggacgatttcccagaaagcaattttccttttgaaatacgtaattgttgagactaggcagtttcaaagtcagctgcatatagtagcaagtacaggactgtcttgtttttggtgtccttggaggtgctggggtgagggtttcagtgggatcatttactctcacatgttgtctgccttctgcttctgtggacactgctttgtacttaattcagacagactgtgaatacaccttttttataaatacctttcaaattcttggtaagatataattttgatagctgattgcagattttctgtatttgtcagattaataaagactgcatgaatccaaaaaccaaaccaac

SEQ ID NO: 81846 - DNA, 1012 bp, Homo Sapiens
  misc_feature (62)..(529): n is a, c, g, or t
  misc_feature (568)..(587): n is a, c, g, or t
  misc_feature (850)..(860): n is a, c, g, or t
cgctgtatcttatagtctgtcggttcccacctctgactgagctcgattattgatctcgtcannnnnnnnnnnnnnnnnnnnnnnnnnnnnnnnnnnnnnnnnnnnnnnnnnnnnnnnnnnnnnnnnnnnnnnnnnnnnnnnnnnnnnnnnnnnnnnnnnnnnnnnnnnnnnnnnnnnnnnnnnnnnnnnnnnnnnnnnnnnnnnnnnnnnnnnnnnnnnnnnnnnnnnnnnnnnnnnnnnnnnnnnnnnnnnnnnnnnnnnnnnnnnnnnnnnnnnnnnnnnnnnnnnnnnnnnnnnnnnnnnnnnnnnnnnnnnnnnnnnnnnnnnnnnnnnnnnnnnnnnnnnnnnnnnnnnnnnnnnnnnnnnnnnnnnnnnnnnnnnnnnnnnnnnnnnnnnnnnnnnnnnnnnnnnnnnnnnnnnnnnnnnnnnnnnnnnnnnnnnnnnnnnnnnnnnnnnnnnnnnnnnnnnnnnnnnnnnnnnnnnnnnnnnnnnnnnnnnnnnnnnnnnnnnnnnnnnnnnnnnnnnnnnnaagaattcggcacgaggggagcggccgcggctgtaggcnnnnnnnnnnnnnnnnnnnncttccctcaaagaacctgcggttgcgctttgtgtgttttgtttttgttttccatttgggggccccatgggaaagagcttctgaactctttcctttatgaactcccactgtgttcctataaaggcccttttctttcttagtgttgtaagttacattttcattatgccccatcacatcttctttactgtaaaaatattaaaaagctgtttccaagtgggacagctaatgaagctctaattattgcagacatatttttgagatgtnnnnnnnnnnntttaaagttaaatgataagtcttagaggcgagtgaggaataaaatggatgtaaacatttacatgggatgcattagaattctgctgtgtgtactgtcttttggttgaaacaaattatgaacagtgactaataataaaaagtcaatacccaatg

SEQ ID NO: 81847 - DNA, 558 bp, Homo Sapiens
ttttttaacagtttacacagactttatttttcacccattgaggtgagcacacaaaaatctgggcaggcagagttctatgagatgcagtgtcacaattacctgccctggttcacagacacagaccacgagactcggtggtgagggaaaggggtcttgttcttaccataaattgctatgggattatcacaatgacacatttattcctggttctatttacatcatggagtgtggagagggtacatttcttacactaaaaatatatactttggaatctctaaaacaaaaaaatatctctatctctacatgagacccactagaaagaagaacatagaaaacaagggaaatgtaccagcacctcgaattgtctccttccgagggaaggttgctctgttctccacctgacaccattagcttggaagggcagccaaatctaaccaatcagacagacagacacagataaacaagagggaggctttatgatcctggaggagtgaatataggagaaaggaaggaggaggaggattttggcctcttctacaaaaggagtaattgcacaat

SEQ ID NO: 81848 - DNA, 694 bp, Homo Sapiens
  misc_feature (148)..(158): n is a, c, g, or t
  misc_feature (211)..(211): n is a, c, g, or t
cgcggggggtgaggaaaagggttcttgttctaccataaaatgctaatgggataatcacatgacacattaattccgtggttctatttacacattggagtgtggagagggtacattccttcactaaaaaatatatactttggaatctctnnnnnnnnnnntatctctatctctacataggacccactaaaaagaagaacatagaaaacaaggnaaatgtaccagcacctcgaattgtctccttccgagggaaggttgctctgttctccacctgacaccattagcttggaaggggagccaaatctaaccaatcagacagacagacacagataaacaagagggaggctttatgatcctggaggagtgaatataggagaaaggaaggaggaggaggattttggcctcttctacaaaaggagtaattgcacaatcagtttggtgcttctgtttccagcattattgcacatgtgaaaagcctgcatgttgaagtcaattgcaaacctgctaagcgaagcccaagctccgctgatttctgctgggctcagaaaagtgccatgggtgagttctctctctcaagaaatattaatgccatcagctagaagaaaaagttctgtattctccaatgctgaaactgggttaggtttaagaaaaatgctattccttttctcttcagaaggatcagaaaccattcccttcc

SEQ ID NO: 81849 - DNA, 632 bp, Homo Sapiens
ttttaatttggaacatacaggacaatttattgaagtcaatctcaagcaaaatctgaaatcagtggaatgtcattaaaaacctttccaaattaatcctcacggaagcaaaaaacacattggaattccaaagtatttgtaaaataaaaaaggcaacatctcagtaaatataatgtacaaaaattatatgttcctaccagcacacacatcagtaaagaagcttaaatattacaggcaaccctaaatacactataactagtcaacaataagctatctatatacaggttaaccaagctttacacgtttcacactatgcaataaaacataggccaatcaacaaaatcctcaaaatattatatatcttgaagtctatgtggcaacatcaagtcattatacagtaatgccctagtggaacacccccagggaaaattaacactaatcccttagtgtcaagagcttctagccaagtcacagaaactcaaaagagattgactttagtgaatattgatgctttgttattaaagactcaagtctcaagtgatttaggccaagtaacggttcacaggatctacaaagtttattacagatgaagtacagaaataaccaatctacaaagatcattatcataaagaaca

SEQ ID NO: 81850 - DNA, 1000 bp, Homo Sapiens
  misc_feature (150)..(234): n is a, c, g, or t
  misc_feature (521)..(521): n is a, c, g, or t
  misc_feature (542)..(542): n is a, c, g, or t
  misc_feature (643)..(869): n is a, c, g, or t
acatttcttctgtctttattgtattgcttcaattggcaaatcatgcttgtattcattcatggggtacaatgtggaatgaggaaatcccactacttagcatctccactacctcagagagaccaattccacgtgaggtcccagaagtgttgnnnnnnnnnnnnnnnnnnnnnnnnnnnnnnnnnnnnnnnnnnnnnnnnnnnnnnnnnnnnnnnnnnnnnnnnnnnnnnnnnnnnnggggttgtcagttaaaggaccaaagtctcagacaggaggaagagcttttgacatctagtgcacagcagagtgaccagagtcaatgagaatgtgttgcattttgcaaaacacctgagagagtccatatcaaatgtctccctgcatttagattggagaggacgaaggccctgaggtccaagaacattgaaacctgacagtggatgccaatggctgtggggaggagctgggcgaggcgcccaggttgtcgtctgcccggcaacgtgggagcctgcagcactttcctgcanagctctattttatctttttanataaaaatggttactgataagtgaccggttcttgcaaatcttgtagtaacattaggtggcatatgggtcacagacactctcctcgtgccgaattcttgggnnnnnnnnnnnnnnnnnnnnnnnnnnnnnnnnnnnnnnnnnnnnnnnnnnnnnnnnnnnnnnnnnnnnnnnnnnnnnnnnnnnnnnnnnnnnnnnnnnnnnnnnnnnnnnnnnnnnnnnnnnnnnnnnnnnnnnnnnnnnnnnnnnnnnnnnnnnnnnnnnnnnnnnnnnnnnnnnnnnnnnnnnnnnnnnnnnnnnnnnnnnnnnnnnnnnnnnnnnnnnnnnnnncgcccgggagaggcggttgcgtattggcgtcttcgcttctcgctcatgattcctggctcggcgtcggtgcgggagcgttcactcatcaatgcggaataggtatcacaaatcggggataccagaacaaattg

SEQ ID NO: 81851 - DNA, 431 bp, Homo Sapiens
  misc_feature (174)..(273): n is a, c, g, or t
tttcaatgttcttggacctcaggccttcgtcctctccaatctaaatgcagagagacatttgacatggactctctcaggtgttctgcaaaatgcaacacattctcattgactctggtcactctgctgtgcactacatgtcaaaacctcttcctcctccctgagactttggtcctnnnnnnnnnnnnnnnnnnnnnnnnnnnnnnnnnnnnnnnnnnnnnnnnnnnnnnnnnnnnnnnnnnnnnnnnnnnnnnnnnnnnnnnnnnnnnnnnnnnncaacacttctgggacctcacgtggaattggtctctctgaggtagtggagatgctaagtagtgggatttcctcattccacattgtaccccatgaatgaatacaagcatgatttgccaattgaagcaatacaataaagacagaagaaatgtaaaatgcaa

SEQ ID NO: 81852 - DNA, 1247 bp, Homo Sapiens
  misc_feature (164)..(164): n is a, c, g, or t
  misc_feature (191)..(191): n is a, c, g, or t
  misc_feature (206)..(206): n is a, c, g, or t
atgcgaacatcccagacatgctgtcgatatcgcccttagattgctgagccagatcgccgagagaagaaagcaggtttacatcctagatctgacatatgcatatcaggatgctgcctccatatctattagacagtaacactcgaaaagtcatgctgcaaaccctntataaaccggtccaagagtgttgaccncctcatatgactgtntcactaaggacaagagattctgcagacctggcagacttgtcggaagaatggacaactaccagaagatgcgggctcctccaccgcctcccgctgcatccacgaccaccactgtgggtcgcaggcctccagcgtcaaacaaagcaggaccaacctcagttccatggaacttcctttccgaaatgactttgcacaaccacagccaatgaaaacatttaatagcaccttcaagaaaagtagttacactttcaaacagggacatgagtgccctgagcaggccctggaagaccgagtaatggaggagattccctgtgaaatttatgtcagggggcgagaagattctgcacaagcatccatatccattgacttctaatcttctgctaatggtgatgtgaattcttagggtgtgtacgtacgcagcctccagggcaccatactgtttccagcagccaacccttttctcccatcacaactacgaagaccttgatttaccgttaacctattgtatggtgatgtttttattctctcaggcagtctatatatgttaaaccaatcaaggaacttactctattcagtggaaacaataatcatctctattgcttggtgtcatttataggaagcactgccagttaaagagcattagaagaggtggttggatggagccaggctcaggctgcctcttcgttttagcaacaagaagactgctcttgactgataacagctctgtcaatattttgatgccacaataaacttgatttttctttacattccttttatttttcctttctctaaatttaatttgttttataagcctatcgttttaccatttcattttcttacataagtacaagtggttaaatgtaccacatacttcagtataggcatttgttcttgagtgtgtcaaaatacagctaggttactgtgccaattaagacccaggtgtatttcacccatctgtttcttcttggctaatctcctgtacttcggccttttaattactgggcccttattccttatttcggacaccattgatgttgattttcc

SEQ ID NO: 81853 - DNA, 583 bp, Homo Sapiens
ttagtacaagtgaaacagcctcgaaaaaaggtcatggcttgcaaaaccgcttttaataaaaccgggttccaagaagtgtttgatcctccaccgcctcccgctgcatccacgaccaccactgtgggtcgcaggcctccagcgtcaaacaaagcaggaccaacctcagttccatggaacttcctttccgaaatgactttgcacaaccacagccaatgaaaacatttaatagcaccttcaagaaaagtagttacactttcaaacagggacatgagtgccctgagcaggccctggaagaccgagtaatggaggagattccctgtgaaatttatgtcagggggcgagaagattctgcacaagcatccatatccattgacttctaatcttctgctaatggtgatgtgaattcttagggtgtgtacgtacgcagcctccagggcaccatactgtttccagcagccaacccttttctcccatcacaactacgaagaccttgatttaccgttaacctattgtatggtgatgtttttattctctcaggcagtctatatatgttaaaccaatcaaggaacttactctattcagt

SEQ ID NO: 81854 - DNA, 1025 bp, Homo Sapiens
  misc_feature (63)..(63): n is a, c, g, or t
  misc_feature (88)..(88): n is a, c, g, or t
  misc_feature (96)..(96): n is a, c, g, or t
  misc_feature (104)..(105): n is a, c, g, or t
  misc_feature (111)..(111): n is a, c, g, or t
  misc_feature (127)..(127): n is a, c, g, or t
  misc_feature (136)..(137): n is a, c, g, or t
  misc_feature (142)..(142): n is a, c, g, or t
  misc_feature (144)..(144): n is a, c, g, or t
  misc_feature (146)..(146): n is a, c, g, or t
  misc_feature (150)..(150): n is a, c, g, or t
  misc_feature (325)..(325): n is a, c, g, or t
  misc_feature (402)..(402): n is a, c, g, or t
ttctaagtactgctgacctgagcatgtaaagatatgtctctcctccactgtgagctgctgctnttgagctacttgcactctcctcttntccttttnccgcactnntccacncctcccacattacagnccagatcanncatcncntnggcnccttgaggaaataagcagctgtctgggaggagaggactgcatccatgggcgaaaaaacactcactttgtctctgcagcaaagagttgccccttctttctactgttgtttctctgtggactgggcaaggtgggtattattcctcactagctgggttaccatcttcaggcactttanacatctggcattcggaatggaaatgtaataatggacattagggagccctgcctttttctactggttcccccaatgtntgaaagaggcattaggctcctggtagccttttctgtgcattgctgtatacacacagacacacacatgtatgtttgttaccaagaactggtcagaccttgcgagtttatttgtaaacactggacagatggagttaaaaagagcttttgttgagatttggcatgaaggatatggtgctctatttgtaatagaaacttccaaggctcttccagctcccctttctcgccattctttagctgtagtcatgaatagtctccatgattttcaaaattgattccctttaaagtgcaaaatggtcaccttctaaaagatatattcatagttattaatgaccctattcccaccacaaattttaaagtgctcctaagcccataacttgcctgtttgaactatggtaatgggtggaagaggagttcaccagtttcaaagatcagactctgtatcaaaagtacctttgcccttaggaagagtgagtattggagtcatcttatctattactccaaacctccctttttatttcttgagcctggcttggaccttggcattccgtttgaattccttctaactggaacatttgtgttgtatctgtaacactggcactgaaataaagaccacacggttaaag

SEQ ID NO: 81855 - DNA, 1002 bp, Homo Sapiens
  misc_feature (108)..(314): n is a, c, g, or t
  misc_feature (338)..(338): n is a, c, g, or t
gtgagtgtacgctcccgcaccgacgacgagcgcagcggtcatgagcgagaagcgagagcgccatacgcaaaccgcctctcccgcgcgtgccgattcataatgcagctnnnnnnnnnnnnnnnnnnnnnnnnnnnnnnnnnnnnnnnnnnnnnnnnnnnnnnnnnnnnnnnnnnnnnnnnnnnnnnnnnnnnnnnnnnnnnnnnnnnnnnnnnnnnnnnnnnnnnnnnnnnnnnnnnnnnnnnnnnnnnnnnnnnnnnnnnnnnnnnnnnnnnnnnnnnnnnnnnnnnnnnnnnnnnnnnnnnnnnnnnnnnnnnaagaattcggcacgaggagctttntgtaccaaatgagagttggagcccagccaacaaatgcttttccctgtgtaaaagtctctctggaagggacattccatctccatggtgcactctgaggggcactgtcaactagagattggccccatccaggtgggaggaacccctttgggatggtgagtatccaatctgctgtgcatttgacaggatctctgaatggctaggtaatggatcccaagcaggctcacaaatttaaatgagggctttgtgtgcagaaagaggaataagtacagattattttcctaccactagatttttggggagagtcaccatggaatgttgacaattacttaaaatattttaagctcccttgctgaattcctgtcctgtccctgaggaatcagatggtcatacagccataggcacccacccgaaatttccctaggagttggagtaatgctagaattgaagaccttctgagtaaagggcttctctgccttctcagaggcaggagaatttgcactggttgtgttaaatgtataaaaagctatatgttcaccagtttactcatttccaatgtgtagatgaataaaatgtagtgtacaaattatttgaaaatcccagaaggaaggtacttttcaaatacagtattttttttaacaaataaacttacgaataaaacagcaaa

SEQ ID NO: 81856 - DNA, 777 bp, Homo Sapiens
cttacttcctgccatccccaagtgatcttccgagtaaaatgcaaatcccatcaggccacttggatgaaaacccttcaaggattactggatagaattcaggctttcccctccagcccccaatcatagctcacaaaccttccttgctatttgttcttaagtaaaaaatcatttttcctcctccctccccaaaccccaaggaactctcactcttgctcaagctgttccgtccccttaccacccctgatacaactgccaggttaatttccagaattcttgcaagactcagttcagaagtcaccttctttcgtgaatgttttgattccctgaggctactttattttggtatggctgaaaaatcctagattttctaaacaaaacctgtttgaatcttggttctgatatggactaggagagagactgggtcaagtaagcttatctccctgaggctgtttcctcgtctgttaagtgtgaatatcaatacctgcctttcataatcaccagggaataaagtggaataatgttgataacagtgcttggcacctggaagtaggtggcagatgttaacgcccttcctcccttgcattgcgccccctgtgcctacctctagcattgtaacgaccacatagtattgaaatggccagtttacttgtctgccttcctttccaagaccgttggtgcctagaggactagaatcgtgtcctatttaactttgtgttcccaggtcctagctcaggagttggcaaataagaattaaatgtctgctacaccgaaaacctc

SEQ ID NO: 81857 - DNA, 1031 bp, Homo Sapiens
  misc_feature (56)..(492): n is a, c, g, or t
ggctcgatttttgatgctctcaagggggcggacctattgaaaaacgcaagcacgcnnnnnnnnnnnnnnnnnnnnnnnnnnnnnnnnnnnnnnnnnnnnnnnnnnnnnnnnnnnnnnnnnnnnnnnnnnnnnnnnnnnnnnnnnnnnnnnnnnnnnnnnnnnnnnnnnnnnnnnnnnnnnnnnnnnnnnnnnnnnnnnnnnnnnnnnnnnnnnnnnnnnnnnnnnnnnnnnnnnnnnnnnnnnnnnnnnnnnnnnnnnnnnnnnnnnnnnnnnnnnnnnnnnnnnnnnnnnnnnnnnnnnnnnnnnnnnnnnnnnnnnnnnnnnnnnnnnnnnnnnnnnnnnnnnnnnnnnnnnnnnnnnnnnnnnnnnnnnnnnnnnnnnnnnnnnnnnnnnnnnnnnnnnnnnnnnnnnnnnnnnnnnnnnnnnnnnnnnnnnnnnnnnnnnnnnnnnnnnnnnnnnnnnnnnnnnnnnnnnnnnnnnnnnnnnnnnnnnaagaattcggcaagaggcaggtaagtgaatctgtccaaggtcacccagcaaggtatcagtagccctgagggtaaggactctgataaggctcgggagggtcctggaaagcctgaggcggcaggaagagtgtgcagagttgagcgtgtctggaaggctgatccactgctgggcccacatcaaagcccccatggggagcagacccgactgcacatggctcttttgctggaagaagagcatggctgcgcagaggactaaaatttcatctgggaaggcttcttttgactgtcagtagcaggatgtcaccagatgagggtgctatgggaccacagctgtctttgttcccattgcaactcaaccctgcgggaggccgcctgcatccctgagagccttctggagcctacagaggagacattggccagccaaaaggaaaggagtggccagggtacgacctggagtagggaagggaaaaagttcccggaaagaagagaattggatgagaggtctcggtggaaataaaggttttctggcattggtcaagg

SEQ ID NO: 81858 - DNA, 557 bp, Homo Sapiens
  misc_feature (77)..(134): n is a, c, g, or t
ctgcaaatgtagactatactgtaaaaattcagtttgttgctttaaagaaacaaactgatacctgaattttgctgtgnnnnnnnnnnnnnnnnnnnnnnnnnnnnnnnnnnnnnnnnnnnnnnnnnnnnnnnnnnactcttcaaaaagcagttctgcagctggttaattcatgtaactgtgagagcaaatgaataattcctgctattctgaaattgcctacatgtttcaataccagttatatggagtgcttgaatttaataagcagtttttacggagtttacagtacagaaataggctttaattttcaagtgaattttttgccaaacttagtaactctgttaaatatttggaggatttaaagaacatcccagtttgaattcatttcaaactttttaaatttttttgtactatgtttggttttattttccttctgttaatcttttgtattcacttatgctctcgtacattgagtacttttattccaaaactagtgggttttctctactggaaattttcaataaacctgtcattattgcttactttcccccacaaaacca

SEQ ID NO: 81859 - DNA, 696 bp, Homo Sapiens
  misc_feature (65)..(84): n is a, c, g, or t
gagacagagtcttgctctgtcacccactgcactctagcctgacaacagagcaagacttcgtctcnnnnnnnnnnnnnnnnnnnngaaattacattagttgaggacctgctgtatgtgatatgaacaatgaggatcaactctttttgtaatagtttttttacatatgttatttcatttgtttatttcctctgtgagggtaagtattgatagtccagtcatagactggtaacacaggcacaccattaaaaataatagacatacagtatgcagtattttgttttacttatgaaactccgtattttatgtatgatgtattgagtatgaagaatagtacatactgtttccttttaactttatgtttcttgcctttgtatattttatatgaatagcacttgtcactaacatagaaagcagtagaggtggaagagggagacttgccagaataagtttttaatgtgaatcagagatttttattaggaattgggagtggaaggagagagatagtattagaaagtatgtatgcagcaaaggatggagaaactgtccttgttgttaaggcatctaaggatgctccaattactggggaaaacataccaggctcaaaatggtctgattatgcaaataccttctaatacgtttgtttcttttgttgtgccctataaagatgccattaacttcatatttatgtcactaata

SEQ ID NO: 81860 - DNA, 1479 bp, Homo Sapiens
  misc_feature (55)..(452): n is a, c, g, or t
  misc_feature (507)..(531): n is a, c, g, or t
aacgccagcaacgcggccttttacgggtacatgcccttttgtggccctttgcatnnnnnnnnnnnnnnnnnnnnnnnnnnnnnnnnnnnnnnnnnnnnnnnnnnnnnnnnnnnnnnnnnnnnnnnnnnnnnnnnnnnnnnnnnnnnnnnnnnnnnnnnnnnnnnnnnnnnnnnnnnnnnnnnnnnnnnnnnnnnnnnnnnnnnnnnnnnnnnnnnnnnnnnnnnnnnnnnnnnnnnnnnnnnnnnnnnnnnnnnnnnnnnnnnnnnnnnnnnnnnnnnnnnnnnnnnnnnnnnnnnnnnnnnnnnnnnnnnnnnnnnnnnnnnnnnnnnnnnnnnnnnnnnnnnnnnnnnnnnnnnnnnnnnnnnnnnnnnnnnnnnnnnnnnnnnnnnnnnnnnnnnnnnnnnnnnnnnnnnnnnnnnnnnnnnnnnnnnnnnnnnnnnnnnnnnnnnnnnaagaattcggcacgaggttaccattctgatgttggagcggccgcggctgtaggcnnnnnnnnnnnnnnnnnnnnnnnnncaaaaacccatgaaccacaaactcaaatttctcctcaaatggggttaatctgacaaatgaggcatggacccagccttgtggaaaaagcattccacgctaatgagatcttggtctttcttgtgaggctacgttatttatgtaaatatgtctggaggcaccttctctaagcttttagttttctatgatctattagtttagtgtttattaaagaatcaaatgtatagaattaccaggcattcgtggggaatgctgtgtagcaaatgtaaaactgacctgctcggaagaaacgtaggaacgcttcaaacccactgtaatgtttggtttgagattattttcattgctttgagagtgaactgcctaagagtaggccttataataaatgctatgtgcgtcttcagtagttccaagctaaagcaatttggcattctcccactgtgatttgtgacttttaaacccacaaaataaaagctttttggtattgattgtttttaattaaaaatacttccaagtataaattgaaacggatgccacccttgaagatttactggcgggaatgctcactcttgtcgttttcctcagtatcgttcatgtctttggcaacaagaacacctgatgaaagcaagcaatgctcagttcccatcaacatttctagttagggggattctcataaccccacagtttacctgagaaagttttctgtgttagaagaatggggtcgagagtattaccttttagctcagtgtggccgggccttttgttgcagtcaaatggcaaatacgcactccttgaaatggcttcttttatttggttttgttttcttagacttataaatttgaaaagaatgcaatttaaaaagtgatttctcacaaagagtaaatatgccttttgcaaatcaatttttgtaacaagttatttatatgatattacttaataaactggtttttttct

SEQ ID NO: 81861 - DNA, 1012 bp, Homo Sapiens
  misc_feature (760)..(831): n is a, c, g, or t
  misc_feature (932)..(932): n is a, c, g, or t
ctcattccactccccttcccccacccctgcccctgccaatgatcagatggcagagagatttcatctatgacttttcaacaaattgtgcaggtgcagaccttggttgtgggcccagttctcatttcatcgaaacgtcagaaataaaaatgataaacaaatgaaataagaaacaagtgacacaaaagcaacttcatcaaagccgtgctctgggccttcattcctctgggagtaaaaggataagttgtaataattctagaattttctgaatggggtcactgagatctggcaggcattgtcacaggtacacttgtgaatactggcttcactgtgtctgacctagagaagcggaggggaagggagagctagggacaggtcaggcactgtctcaggacagaactccctcctggcctccttgcagcccttgccatccccccatagtccactcatcccagcagtcaactggtctttctgagatgcaaaccagatcacctgccctgttttagaaccccatggcttcccggtgcctgagcaccggccaactcattccccacccctctccccttggctcctcagccacttggcctcctatctgctggcgacacttgtgacccacggctggctcttccgaatttgcaagtgccagctccactgtcacttcctcagagagcctggcgtccttactggtttctctttgttacatctccctgtgtattctccttggagcactcatcacagttgacctcgtgccgaattcttgggnnnnnnnnnnnnnnnnnnnnnnnnnnnnnnnnnnnnnnnnnnnnnnnnnnnnnnnnnnnnnnnnnnnnnnnnaaccgccacaattcacacacatacgagcgggaccataagtgtaaagctgggtggcctatgagtgactactcacataattcgtgcgcctatggcgctttcancgggagctgcttgcactgcatatgaacgcacacgccgggaaggggttggcatggggtcctccctcccgcacagatcgtgg

SEQ ID NO: 81862 - DNA, 1045 bp, Homo Sapiens
  misc_feature (40)..(40): n is a, c, g, or t
  misc_feature (84)..(118): n is a, c, g, or t
  misc_feature (719)..(736): n is a, c, g, or t
  misc_feature (780)..(796): n is a, c, g, or t
cagacgtatagactcactatagggcgctgctcgtctcagncgaacgacgagcgcagcgagtcatgtgagcgaggaagcggccgnnnnnnnnnnnnnnnnnnnnnnnnnnnnnnnnnnncagtcgacggtaccggacatatgcccgggaattcggccattacggccgggggcggtggcgcgagttggactgtgaagaaacatggcggccgcgacgttgacttcgaaattgtactccctgctgttccgcaggacctccaccttcgccctcaccatcatcgtgggcgtcatgttcttcgagcgcgccttcgatcaaggcgcggacgctatctacgaccacatcaacgaggggaagctgtggaaacacatcaagcacaagtatgagaacaagtagttccttggaggcccccatccaggccagaaggaccaggtccacccagcagctgtttgcccagagctggagcctcagcttgaagatgatgctcaaggtactcttcatggaccaccattcgctgttggcaagaaacggctttacttacaaaacagactctttaccttctgctgtgtttgaagtatgtttagtcagcatgctcaggaaataaatgtgaattgcccttgaaaccacacaactcaaacaacccaaaatacccccaacaccataaaacatccccccaccccacataaatcaaaatgaagaacgaacgcccttacatggtgcgcgnnnnnnnnnnnnnnnnnntccttccatatccccaccgccacaccgacaagttgttgttcggnnnnnnnnnnnnnnnnnagaaacttttttacaaaccatcttgttgggggcgcgcgggccccaccctaggaaaggacatgagggtgccattttcatgctcccccacaaaacacccctgaggatactaaaacagcggcttttgctctttcccccaaaataaacaaacaacccgcgcggggggaacacaacaggtttgcttgcttataacatcacctccaaatgtgggggtcctttgcagcgagctatttctctgtcgagtttatatac

SEQ ID NO: 81863 - DNA, 740 bp, Homo Sapiens
  misc_feature (513)..(547): n is a, c, g, or t
  misc_feature (550)..(557): n is a, c, g, or t
  misc_feature (658)..(658): n is a, c, g, or t
gggaggcgcggtggcgcgagttggactgtgaagaaacatggcggccgcgacgttgacttcgaaattgtactccctgctgttccgcaggacctccaccttcgccctcaccatcatcgtgggcgtcatgttcttcgagcgcgccttcgatcaaggcgcggacgctatctacgaccacatcaacgagggggtgagggcctgtgccatccctgaccttggacccgcctgaggggtgacagtggagtagagaagctgtggaaacacatcaagcacaagtatgagaacaagtagttccttggaggcccccatccaggccagaaggaccaggtccacccagcagctgtttgcccagagctggagcctcagcttgaagatgatgctcaaggtactcttcatggaccaccattcgctgttggcaagaaacggctttacttacaaaacagactctttaccttctgctgtgtttgaagtatgtttagtcagcatgctcaggaaataaatgtgaattgcccttgnnnnnnnnnnnnnnnnnnnnnnnnnnnnnnnnnnnaannnnnnnnaacatgtccggcccgcctccggcccctccgagaaagcttttctaagaccaattcgttttgggcgccgggggcccccggtagggtaaggtggaaacatgggncccatagcctggttttccctaaggaaggatcccctgggcccaatgaacctaagggcctttgggaatttccctccacacaaat

SEQ ID NO: 81864 - DNA, 1008 bp, Homo Sapiens; identical to SEQ ID NO: 15279
  misc_feature (986)..(986): n is a, c, g, or t

SEQ ID NO: 81865 - DNA, 1006 bp, Homo Sapiens
  misc_feature (915)..(945): n is a, c, g, or t
gggggcgcgagttggactgtgaagaaacatggcggccgcgacgttgacttcgaaattgtactccctgctgttccgcaggacctccaccttcgccctcaccatcatcgtgggcgtcatgttcttcgagcgcgccttcgatcaaggcgcggacgctatctacgaccacatcaacgaggggaagctgtggaaacacatcaagcacaagtatgagaacaagtagttccttggaggcccccatccaggccagaaggaccaggtccacccagcagctgtttgcccagagctggagcctcagcttgaagatgatgctcaaggtactcttcatggaccaccattcgctgttggcaagaaacggctttacttacaaaacagactctttaccttctgctgtgtttgaagtatgtttagtcagcatgctcaggaaataaatgtgaattgcccttgagacctgcttctacattggttgctttgttaactctacctgatcttcacttgtcagtaatttgagaccacttcaaagccctctgcaaacaccccaaaggcagaatctgctattttgagttttccattaacttccaaagaattctggttttcaaaacaggagccagagttggagatattacagtcaactttggcttctaagccagtaattccattcttaaatacctcactgtcttggccatggggaagcactatggcctcagctgggggaaagaccctggcctaggggtcttagccactccccaccctagggtatagttcaggggtatccaatcctttggcttccctgggccatgttggaagaattgtcttgggccacacataaaatacagtaaccatagctgatgagctaaaacaaaaaacaatggtttgtgcaaaaatctcataatgttttaataaagttgaagaatttgnnnnnnnnnnnnnnnnnnnnnnnnnnnnnnngaccgcgtatgcggccgcaagcttattccctttagttgagggttaattttagcttggcact

SEQ ID NO: 81866 - DNA, 1019 bp, Homo Sapiens
  misc_feature (50)..(50): n is a, c, g, or t
  misc_feature (62)..(63): n is a, c, g, or t
  misc_feature (71)..(71): n is a, c, g, or t
  misc_feature (169)..(169): n is a, c, g, or t
  misc_feature (255)..(256): n is a, c, g, or t
tggatgatcgaggtccccagtagctttgaacaagagtcagcccaaccctnttcagccagctnnttgtgacntgtagggtgcaggagcttccagaagcagtgtgtaattaggacccaagcactgggagggctgtggctagacccttgtcagacttgcatctatctcagtnagaatcttgctgcagaaaacaagagccacttgtagctgtttaattagacaaggattactacctggcccctggtgcttgcaaaatgnntggaagagctggagaagcagactctgctgatttccaggaactcccagcgccagattcatcatgtctgttgtgaccaggaaagctgcccccatctgcaggaagccactatgccagaaagctgctgactgcagaactaggctccctctgccacggtccgtgccagccaatagatgtcctgaggcctgcccctctcccacttcactcagttcccaaatctaaatttttacaagagattctgtttgggggaacttaagtcagatccagaaccttggctgcaagggagtctgggaaatgtcatttccctagaaggaagttagggtgggtggagcaagccccacctgcgtttttctgccacagcatccaatcgtgaagaactcgggagagggtggagtccacatctagggttgtcctgccccttggctctatccctgcccagaggtgggaactggaggagtgggctgcaagactgagcctaaatgtctccccggccttgacttttctttctagtcctggggcctagattctgcacttggggtctctgacacaacacaccatcccaaagtagccggaagagctaaacacagggggttcttaaaatggctgcccccgccacccgggcctcccttgggcaaaaggaattgtcagccctaccccaacccttcaactaccagaatctgggccaccccagcagtatttttatttaaaatgttgcccattttatgagttatgatcaatttgtattaaattaaagttacagatgtca

SEQ ID NO: 81867 - DNA, 1392 bp, Homo Sapiens
  misc_feature (928)..(973): n is a, c, g, or t
gaagacctggactccattccaccgtggccactggagacctcaggccagttgtttaccctccagcctccagtctgtaaaatggaggttgcattccctacttcctaaactctcttccagcatcgatgttctgtagctctgaccttgatagggatacagctttgatccaaggatgtgacatggcttctcctcagggcaacccctgcccaaccctcatccccatcttctcaggggcaggggactaccttccagtgtctccctccagcccagccctgacctcaggaagtgtcagagcatggccagtagttggcagcccgaaagacacacagcaccctcttatgtcccatggcctaagacttacccctgaccaagctagtgatgggccatttacccttgaccccagtccacagtggtcacaggtagtacctggtcctagggttgcctgagagccaacctctcctgccacccccacaccaagaactatatggttcctacttctcccactgatctgctggtcagtgatgatgctgtggcctgtggaaggcacctggtagttgagtccacacattatagtcatgtgccaccaccttcctgcccacaggccgagggacagggtgagggtatacccaaagctgatgcagagcccattagcctaaaagcaactgcaggacaagcctccctggatgatcgaggtccccagtagctctgaacaagagtccagccaaccctcttcagccaggcctctgtgacctgctagggtgcaggaggcttccagaagcagttgttgtaattaggacccaagcactgggaggggctgttggctagaccccttgtcagacttggcatctatctcagttaggatcctgctgcagaaaacaagagccacttgtagctggtttaattagacaaggatttactacctggcccctgnnnnnnnnnnnnnnnnnnnnnnnnnnnnnnnnnnnnnnnnnnnnnnatttccaggaactcccagcgccagattcatcatgtctgttgtgaccaggaaagctgccccatctgcaggaagccactatgccagaaagctgctgactggagaactaggctccctctgccacggtccgtgccagcaatagatgtcctgaggcctggccctctcccattcactcagttccaaatctaaattttacacgagattctgttggggaacttagtcagatccagaaccttggtgcaggagcctggaagtcttcctaaagattcgggggtgggaagccactggtttcgcaagtccacggaaacggagggggccacctggtgtgcctgctatccgccagggaggggggggaagcaaggacgcgggttagcgcgatggggcaacccaccgaagggtggcgcggaaccacgcttttgaac

SEQ ID NO: 81868 - DNA, 1656 bp, Homo Sapiens
gctggaccggtccggaattcccgggatatcgtcgaccacgcgtccgggcgtccccgcgaagcctgggcctgtcaggcggttccgtccgggtctcggccaccgtcgagttccgtcgagttccgtcccggccctgctcacagcagcgccctcggagcgcccagcacctgcggccggccaggcagcgcgatcctgcggcgtctggccatcccgaatgctatggccgccgtcgccgtcttgcgggccttcggggcaagtgggcccatgtgtctccggctgcggcccctgggcccagctccccgcccgcttctgcagccgggacccggccggggcggggcggcgggagtcggagccgcggcccaccagcgcgcggcagctggacggcataaggaacatcgtcttgagcaatcccaagaagaggaacacgttgtcacttgcaatgctgaaatctctccaaagtgacattcttcatgacgctgacagcaacgatctgaaagtcattatcatctcggctgaggggcctgtgttttcttctgggcatgacttaaaggagctgacagaggagcaaggccgtgattaccatgccgaagtatttcagacctgttccaaggtcatgatgcacatccggaaccaccccgtccccgtcattgccatggtcaatggcctggccacggctgccggctgtcaactggttgccagctgcgacattgccgtggcgagcgacaagtcctcttttgccactcctggggtgaacgtcgggctcttctgttctacccctggggttgccttggcaagagcagtgcctagaaaggtggccttggagatgctctttactggtgagcccatttctgcccaggaggccctgctccacgggctgcttagcaaggtggtgccagaggcggagctgcaggaggagaccatgcggatcgctaggaagatcgcatcgctgagccgtccggtggtgtccctgggcaaagccaccttctacaagcagctgccccaggacctggggacggcttactacctcacctcccaggccatggtggacaacctggccctgcgggacgggcaggagggcatcacggccttcctccagaagagaaaacctgtctggtcacacgagccagtgtgagtggaggcagaggagtgaggcccacgggcagcgcccaggagcccaccttcccctctggcccagccaccactgcctctcagcttcaacaggtgacaggctgctttcgtgacttgatattggtgtcatagcatttggcctacattaaaagccacaatttcatggggaaaggacaaaatggagagtgactgaggtgctgacctcagtgcaaggctggtgaaccctgcagcgggccagctatggtgggaagcctggcatttggggtgctccttgcaacgtcttaagcaagcgacccccctgacatagcaaaaggtggcaacccatggaggcagaaagaaggacgccagcctgacccttatctgaaacgtcctaagcagagttaatcctggctgctcaggagaggcgacacatttcaaatctccacgagatattctccacacagaaaatcttcttgattctatagagacttaatcatgcctatggctttgaataatcttatgtgatttaaataaattaaatctttatagaga

SEQ ID NO: 81869 - DNA, 1031 bp, Homo Sapiens
  misc_feature (86)..(86): n is a, c, g, or t
  misc_feature (199)..(199): n is a, c, g, or t
  misc_feature (308)..(308): n is a, c, g, or t
  misc_feature (365)..(365): n is a, c, g, or t
  misc_feature (435)..(435): n is a, c, g, or t
cggacaaaaacagaaaaaaagacacctgaaccatttgcagatgctgaacgtagacgtacaataatctattcatatgatgtcttggncatgacaacgaccgaagttacaatatgtctaaaagaaagtggtatggtgaagatgtttcagtcatctagatcatactgtagggatatctgaaaggaaaaatggtcttcaagtngcatgtcaaaaagctttgatggactggaagtaactgcgagagttgtaccatcagaagggtggcctaagactacaatgctaaagtatgcatacctcagttagaaaacttntgaaaggaagtctcagccacagaatgcatatacctgtagagttttgcatgggtttantatgaatacaattgtaaaaaatagctgcttgcacattataccagaaaaacctccaaaactgcaattgctntgaaaatagattttaggttttttggagtttcctgaaatgcttggtctgtattttgataattgtgcatattatgtaaaaatgttggtggacccataaatgaccagactttttctaagaaaaatgttgctttaatgcatttcatgaatttttactcttatatcattgctcgctagtaatagcaaatctgcttttctgcatctgctttgcgtagctattgtaaggctttgaactaatgtatgtatttattgcttgaacttctgtgcataccttataaagcataatgtctgacaatttaaatggctcatgtattcttgcttctatcataagctgattatggggactatgatcttttgtatacagcaaattttaaactgtagcacaaacatctgtttatgtattggtggaatatacctgttttatttatcttttttgaggtaaactaatttttgatacttttcattactgtgtactatgttcatactttgaattctctgacgttagaagtcatggttgagaattgtaacagctgttattcgttctgtattcatggctttcactgctgaataaaataaaggaccaaacctaggatttgaaag

SEQ ID NO: 81870 - DNA, 1131 bp, Homo Sapiens
  misc_feature (103)..(103): n is a, c, g, or t
acgcggagtccccataccatccttcgaagaatacaaaacaatttctctgggaatagtaagcggtaataacctccagtaggacagccaatttatttgttaatcnatatattcaagtgaaacgtctctaggagaaaatgacagttatcagctcattgcaatatgattcccaaatgagtatatgtgagcaagagttaaattggcttcatgacagcaagggaccagtcaacttcagcatcatatgcacaagtcctcagagtacccttgaatcacaatggcaatggatcagtgtcatcaatctaatcaagtctgggacgtggggaaaaaattagatcagctacggcatataaaaaagtctttgtttcacatatgtgtaatagcttatttaattttttatcctgctacacaaatatgtaattaaccaatgaggactcatgacttgatagtgtatgtatgtaaagggatatatggacttaatcataagctgttgaggtgaaagacgtggatccacctgctttccaagaaaactcggccaaatttatttgcagctggatattgaatgggacttttctggttgtcttagaattctggctaaaggctcaaagctgacgaaagacagtaactgcaccaacatgatactagacacagccagtctggacttatcaaaagagcagaaagagaccaatgactcccagtccgtattatccatctctagaagactagagtcaaaagcatgattaaagagtcattaagcggaggttctaggccatagggagattgctttgaatttcttgcagacaagtgtgagggactcagcatggtagaaggtagcctggcatcccactccaagactgaaagcttgcagagtaacaggagcacacaggttcagtgcagcagatgtggtgtggcttgagaattcttggaagagcttgatgagtgtttgctggagtttgggatgagggtgggcactgggaacacagagactggtaaatagtgtttggcaaatacaagtgcttgatgaatatttgttgaatgaatagatgagttcttcccccctggggaattcaggaggtgaaaggttggcttgagcacccaaatggcaggatgagagaagagaagcactgatagcacctc

SEQ ID NO: 81871 - DNA, 1041 bp, Homo Sapiens
  misc_feature (225)..(427): n is a, c, g, or t
gagcagacttagaaacccagcaccggcatctaagttgtgctatatgccatgcataatgtgctcaagatatcacctaattgtgataccgtctcccccttgagtgactgtacggtccagcaacggaggacgacagagagagtctgtgagcgagaagcgaagggcgcccatacgcaaacggctatcaccgcgcgttgaggattcaataatacaatggcaccacaagannnnnnnnnnnnnnnnnnnnnnnnnnnnnnnnnnnnnnnnnnnnnnnnnnnnnnnnnnnnnnnnnnnnnnnnnnnnnnnnnnnnnnnnnnnnnnnnnnnnnnnnnnnnnnnnnnnnnnnnnnnnnnnnnnnnnnnnnnnnnnnnnnnnnnnnnnnnnnnnnnnnnnnnnnnnnnnnnnnnnnnnnnnnnnnnnnnnnnnnnnnaagaattcggaacgaggccaattgactgctttgatttttttccctcttaattgtgctactatgtgttcaagtttctgtagtgctagcagtagactaagtaggtaagaaaaaattatggtagagaaacttatgaaaaatccatctattaattttctttcctgtgaattagaaaaataccattgttcttttccagccaaaagaatatctccctctaggagccattaaatattttgaaaaggagtgacatggtgtggaatgtgttttaggagtcaggtggtagtgacatgtaggattagaggactggcaatgagtcagtaatgtggtgcagtggtccagatgtggtgaggatctgaaccttagtagcagcagcagtgaaaatagaatgaaaggaaatagagatccacaccaggccctctgtttctaaataggaaatagttaccaattattaaccagctttcatattgttaggatattacgggtctcaatggtcggttatctctggtctcaagtcctttcactctatttttagggaaaatgtgtttaaacccctattttaaggaaatgatagtttatagattatttataaattatagttaatttagaaaatagaaaaa

SEQ ID NO: 81872 - DNA, 1028 bp, Homo Sapiens
  misc_feature (149)..(209): n is a, c, g, or t
  misc_feature (227)..(630): n is a, c, g, or t
  misc_feature (661)..(679): n is a, c, g, or t
gtatggaagccccacgttccggaaagagaaggcggacagtatccgtaagcggcaggtccgaccaagagagccacgaggagctcccaggggagacgcttgtatccttatgatcgtgtcggtttcaccacctatgactgaacttagattannnnnnnnnnnnnnnnnnnnnnnnnnnnnnnnnnnnnnnnnnnnnnnnnnnnnnnnnnnnncatgacatttgatgcccnnnnnnnnnnnnnnnnnnnnnnnnnnnnnnnnnnnnnnnnnnnnnnnnnnnnnnnnnnnnnnnnnnnnnnnnnnnnnnnnnnnnnnnnnnnnnnnnnnnnnnnnnnnnnnnnnnnnnnnnnnnnnnnnnnnnnnnnnnnnnnnnnnnnnnnnnnnnnnnnnnnnnnnnnnnnnnnnnnnnnnnnnnnnnnnnnnnnnnnnnnnnnnnnnnnnnnnnnnnnnnnnnnnnnnnnnnnnnnnnnnnnnnnnnnnnnnnnnnnnnnnnnnnnnnnnnnnnnnnnnnnnnnnnnnnnnnnnnnnnnnnnnnnnnnnnnnnnnnnnnnnnnnnnnnnnnnnnnnnnnnnnnnnnnnnnnnnnnnnnnnnnnnnnnnnnnnnnnnnnnnnnnnnnnnnnnnnnnnnnnnnnaagaattcggcacgaggcgcggctgtaggcnnnnnnnnnnnnnnnnnnngataacacttacaaagatttaataggcactctcatgcattgtgggtgggactgtaaactggcacaatccttatagatggcaacttgccaatatctatcaaaagtaaaaatgcacatatcttaacctagtaattctaactttagatttccagcttacagtaaactcactcatgtgcaatgtgacctatataaaaggttataaaatgaatcattatttataatagcaaaaggttaggaaaaaaatgtcagcagggactgctcaaatatattatggtacattcatacaataacatctgcaattatagaccaagaatcaagaaactcttcatgtaacgacatgggacaagctc

SEQ ID NO: 81873 - DNA, 457 bp, Homo Sapiens
  misc_feature (56)..(175): n is a, c, g, or t
gtttgggcgattcttctgcttcagcctcccgagtaaaaggcatgcatcaccacacnnnnnnnnnnnnnnnnnnnnnnnnnnnnnnnnnnnnnnnnnnnnnnnnnnnnnnnnnnnnnnnnnnnnnnnnnnnnnnnnnnnnnnnnnnnnnnnnnnnnnnnnnnnnnnnnnnnnnnnnatcagccactatgcccggctgggatcatatgttccacacatgtttgttcaataagcatggactgcaaccacctacatgaatattcatagctcctcctgtagcctgttgaatatgtatgtttagccaacctcttcagcataaagctcctgcccaaacccctcctgctcctaaatgtctgtctctggtgttaaccagaggctgctcttcccaggctgctggatggctaccttgcaggctgtcacccttaacaagaaataaagtgtcctttgcaaatgcaaaaaa

SEQ ID NO: 81874 - DNA, 1052 bp, Homo Sapiens
  misc_feature (20)..(20): n is a, c, g, or t
  misc_feature (100)..(100): n is a, c, g, or t
  misc_feature (194)..(194): n is a, c, g, or t
atgtatgaacagtctccacnagaaagacgagaacagaatcatgacgagaacgaagaccgcccaaacgcaacacgtatcacaacataggcagatcattatncgaagacacaccagatactgactgaaagcgacagtgagccagacaagataatgtgaataggacatacataagccccccagctatacatatatantccagatcgtatatgtgtgaactttgagcggtaaacaattcacacaggaaacagctatgacatgatgcgatgtagtacgactcatatagagaaatggccctcgagaccaagaattcgacacgagaataaaaattagtacactgtcctaatgaagtgtaaatgaacaagttttacatttcttaggattcaggaatatatggaatctagttgtatataattgacttgagagccacagagattgtgttgatttatgagctggactcctattgttttagaaacatgcagtaatgattaacttgtgtcaatgatggtaatgagaccaaacttgtacatttaattaagggtaccagttctttttatgttactagactataccttggcctttaaaaatgaatctcactgattaaagagaacaggcattattaggatagcattccaccacaactagaaacattcaaataatgtgtcttaattgtaatctgtatataggaaaatttttcctatggatatttttggtgttttaccacagtgaactgatttgtagcacttatgaagtgcagaaggtaatattcttgaaaatagaaaaaggttgggtgagcaggctttaatgcctttcccccaagaatatacatcgaatttttcttaatcttttggggttggccagcttccagatttcattaataatgagctctgcctttaataaaagtacatgatcatagctacactgtatgtttaggtggtgtgaaatgatttataatcacagcttgaactgtgtttgcttggtactgtcatagtgattacaaatttcatggaatgcgaagagcaacaataaataaaaaaataccactcaccctcaaa

SEQ ID NO: 81875 - DNA, 1103 bp, Homo Sapiens
  misc_feature (74)..(92): n is a, c, g, or t
aacgacgggccacgtgccaatgctacgaattaaccctcactaaagggaatacgcttgcggccgcctgctcaggnnnnnnnnnnnnnnnnnnnacaaaaatcccacttaatatattttagcacaaaaatgtctaatatacactggataagcgtgcatttacgtacatacaactaggggaaacatttacagagggctacgggatgcaaatgaacttaatgagtaataaaaaccagttgttatctgtaaaacagagaatctcaatactgtattctcagtcaagaattagaacataaacttcctcttaagctgaagcttaaaacacaaaattggagccattttagaaaatacagaaaatgcaatgatcattcaggtatgaaaaccaaaatgtcgagagcactccaacagaaaagtcttgtaatgcatctcattgtataaaacagtatgtatttagattggcacagttaaatacataagggaaagagaaagtctttgccctttccacaattttccttcactataaaatattatacaacattcattaaaacctccatgtttattttaataactgacctgaaactagtaaaaaatagagcaatattctccacaggagacttatatgaaaatagtatcttaagctacaagttatctgtgtattccacattgtcattaactgcttaagaacattctatgtaaaaggaccattaaatgggctacactatgatcaacagctacttgcacttacctcaactcttatgattcgtgacatttatctaaatacacatctgccaagttacactggacaatgctttccacaacatatgtcttttatccattatcagtacgtcactccatagtgttgtctcatacccatctcattcatgtatcgtaccttcactcgttatctcttctactggtttgaaggattgtattgtcgtcacatatcctgtatcttcttactcactcccttgtcttcctccacttcctgtttcctgcgtatactccaggtccctacatgtctctggtcaagtctgtgcttccttgtttctctccccttcacaggaatctcgtcacctctgtattccggtgtctttctctttcgtcgt

SEQ ID NO: 81876 - DNA, 458 bp, Homo Sapiens
  misc_feature (227)..(238): n is a, c, g, or t
ataactgtagtggatgtgaaaacaaacgagttgaattttaaaacatagcatttattagtgctatacagtcacattcctttcagccagtagtaaagttaaacagatgagtgatacagtacctgaatggtactgcttctgaggcaacactttggattgaaagtgctgcttttggttaaaggaactatgttgtggaaagcatattccagtgtaaatttgcagatgtgtgnnnnnnnnnnnngtcacttttcataaggtttggagtaagttgcagtggcttttgatcatagtttagcccatttaatggtccttttacctagaatgttcttaagcagttaatgacaatttggaatacacagataactcgtagcttaagatactattttcatttaattctcctgtggagaatattgctttatttcttactagcttcaggtcagttattaaaataaacatggagg

SEQ ID NO: 81877 - DNA, 1019 bp, Homo Sapiens
  misc_feature (135)..(135): n is a, c, g, or t
  misc_feature (250)..(250): n is a, c, g, or t
  misc_feature (254)..(254): n is a, c, g, or t
  misc_feature (329)..(329): n is a, c, g, or t
  misc_feature (352)..(352): n is a, c, g, or t
gagcccaaccaaccgttcccgagtgcgatatatcactgcaacagttcagatgaacgcctgacgcaccatatgtgatgtcactcatagcacacagcttacattatcatccgctcttgtgtgtgaatgtgaccgatncaattcaccaggaacagcttgacagattcgaattaatagactcacttaggaattgccatcgagccaagaatcggcacgaggtgatgacaaagctggattctagtgacatgtatancganttgaaggaaacatatcctaattatcgtcctctgtacgttgcacgacttcatcaattggatgctgaaaaggacganttgaaaagacttaatgaaattgntgatgcggcaaatgctgttatttctcatatagatcaaacagccctagcagtttatattgcaatgaagactgatcccaggcctgatgcagctactataaaaaatgacatggacaaacaaaaatccaccctcgtagatgccctttgtaggaaaggttgtgccctggcagaccatcttcttcacacccaggctcaagacggagccatttccactgatgcagaaggaaaggaggaggaaggagaaagtcctttggattctctggcagaaacattttgggaaactactaaatggactgatctctttgacaataaggttttgacatttgcatataaacatgcattagtaaataaaatgtatgggagaggccttaaatttgcaactaaacttgtggaagaaaaaccaacaaaagaaaactggaaaaattgtattcaactgatgaagttacttggatggacccattgtgcatcttttactgaaaactggctccccatcatgtatcctcccgattattgcgtattctaaaataggaaacaagactttaaattttaaaaaaggaagttttatagtgaatggatataaaaacaaatttgtggcatttttagtctaatgcatgttttcatccactatccagtactgattattaaaatgacatgtatttatcagagaaaa

SEQ ID NO: 81878 - DNA, 661 bp, Homo Sapiens
  misc_feature (498)..(510): n is a, c, g, or t
ggtgatttagctttgaccacttttcatcctacagcttcaatatcaaactggttaggaaagcccagggggaagggagggggcaggggaggaggcaattctgaatgaatgaatggattttttgttgtttttgcatgtttaatatagaagttcccctcgttccttgggagatgatggcctttgaatatgcagacaacctttgaattgtgcctactaaattatagcaggggactttggcacccaaggagttctgactttctgggattataatagtaattcccagccatactctggactttattttgctaaccataactgagcaaatgtaaattactgctatattaatgttttaaagcactgggatagtctaattctaacttgtaattaattatgtttgccaattatctgtttgaaataaatttgtgtctgaacagctattgaaactgttaaattgtacagatattattcatgacagctttgtactgtggaatgtgcttaatnnnnnnnnnnnnngtttgacttttgtccagtaaattgctaagtaatgtcaataaatcgagtatgggtattatgcagtgcacctaatctggcttcatgcaattgttacttcagctactgattcaaagccaatactcttaataaagtgttgcaatactctgaaaaa

SEQ ID NO: 81879 - DNA, 614 bp, Homo Sapiens
tatttacctctagaggaactcttgaatgaacctgagaaggaatttaattagcccctaattaaacaaatgggtttggagcatacctttagaacaatggaatgcaatgataacaggaagtcaagagaagcgtgagaactctgacagaagaagttcaaaagctgaatgatctttaccaacaaaaaattaaggaagcagaggaagaggatgaaaaatgtgccagtgagcttgagtccttggagaaacacaagcacctgctagaaagtactgttaaccaggggctcagtgaagctatgaatgaattagatgctgttcagcgggaataccaactagttgtgcaaaccacgactgaagaaagacgaaaagtgggaaataacttgcaacgtctgttagagatggttgctacacatgttgggtctgtagagaaacatcttgaggagcagattgctaaagttgatagagaatatgaagaatgcatgtcagaagatctctcggaaaatattaaagagattagagataagtatgagaagaaagctactctaattaagtcttctgaagaatgaagataaaatgttgatcatgtatatatatccatagtgaataaaattgtctcaata

SEQ ID NO: 81880 - DNA, 1432 bp, Homo Sapiens
  misc_feature (23)..(24): n is a, c, g, or t
  misc_feature (51)..(51): n is a, c, g, or t
  misc_feature (129)..(129): n is a, c, g, or t
  misc_feature (145)..(145): n is a, c, g, or t
  misc_feature (147)..(147): n is a, c, g, or t
  misc_feature (165)..(166): n is a, c, g, or t
  misc_feature (179)..(179): n is a, c, g, or t
  misc_feature (405)..(405): n is a, c, g, or t
  misc_feature (1140)..(1140): n is a, c, g, or t
ccaacagtacagcacagtcgctnnaatgtcgagtccgagcggaccctttcntcatgtgagttgagagtgttgagagatctcctcccagataaagacagagaagctacgttcattgtgtgctcatggtgntgtagttgactctgtntntgaaatgatgctcagtcnntgcttgttgcacntgtgtgtcagtgaaactggagaacacagtagcaaatcacatgaaggctgagatgattgagatgaaagttaacatagtgtgaatgaaagtctgcccaacagagcagtagatgatataacaaagaaagcatgctttctgaggagatagtgggaataatccctgaagagttggcagtgtgagtgcaactcatgtatcttctgtgaggtgggatttttgtgttcctcacnacccatgtaattattcttagaattgagattgctacacggagcagtccttgacgatcgtgtttctgacgtttctcttccttgcctggactgcctttgacaaggcagaaatgaacatgaaaagtccccaggagaggggagctgtgtagtgagggatactgagggcagtcctgtggctgaggggcacagattgaactgctgaactagttggaggtctagatgaggtgctttacgcatcagctgccttagacagcttctagaaaggagcgagcgctacttcttaagtacttaagtgacatttagataatttatagtaaaactgaaattattattagccaatgcattggtgcatagaatttactagggctacttctggaagccaaaatagaatagcatttccatgtgcattaaatactttgccagcactgcctttgccagcatcctaaatctggagttttacaaagaaggaaactgtatctttaggttaatcaaagctatgcatttcatatagctttttcatttaaaacaagacaaagaaacaaattcctatgaccaaattgcttgcctacagttccctgcagtaattgtatgatctcacccagtgtgcaatttgtgaaaatgaaccaaatgtcattacttttgtcttaaagaaaagtctatttcaagaatatgaacagcagtgtttccttgtacatgtcaccttttgttcacattttcattaagtcagaatgaccttantgagcctactcctggggtcaatgcatttcaaactaatccaatatttagtgtttcacagaaacactagaaaacgttgaacactcctactgcctggatatatggtagtgcagttatgtcgtttatggctcaagatgtcattagaaatactgcagtggtgtattcacagctgtccttctctgaatgaaagagtgtagggacacctgccacatggcagaccctgatgaatttcacattaaggcttggaaaggagcaaatataatgggaggaattaatccaaaatttgactggatca

SEQ ID NO: 81881 - DNA, 819 bp, Homo Sapiens
cgggggaaagtgtctgttcttgtcttttgttcacttttcaaaggggctgtttatttttcatattctgagactccagcaggatgtcttatcaacagcagcagtgcaagcagccctgccagccacctcctgtgtgccccacgccaaagtgcccagagccatgtccacccccgaagtgccctgagccctgcccaccaccaaagtgtccacagccctgcccacctcagcagtgccagcagaaatgtcctcctgtgacaccttccccaccctgccagccaaagtgtccacccaagagcaagtaacagcttcagaattcatcaggagcatgaaaggataaggataattggctcacctcgttccacagctccacctgcatcttctcatcaaagcctaccatggatacacagggagcttctttccccttaaccagtgatctgcccatgatgatccctgacagcaaaaggtttcctttctgaggctgccatactgccactgtccaggtggagactgagaaaaggaagtcctcagctgtgccagttcccagagcttcggaagaaagagcagcagctctgtccctgggaaccatcagaaaattctgttgatgtgttctgtgtctgtctgtcacctgggcatgagcttctaccacctgtgcaattgtcacttttctttcactccctgaataaagtatctttgcctacgtccacactctcatcgaccacctccgtccccattttataacttagcactacccccccgtacacaatatatgtcggataacaaccccagtgcctaatgtgcccactgcaaacctctcaccatcag

SEQ ID NO: 81882 - DNA, 283 bp, Homo Sapiens
  misc_feature (162)..(178): n is a, c, g, or t
ggatagcttttaattacatttcagagaggtgtaattttgggtagatgctcattacatttttgaaaggtttatgattccaaaataaagatttatatgactggtgatactggctttacagaaatttcagagaactaatttttaaaatctttagcatttaaaacnnnnnnnnnnnnnnnnnctgacatattctgacaaagagcagcaaaccactgctgtgtggcattcttggagtgtgctgtgaatgtgctttttaagaaattaaaaagagatcattttaaaattg

SEQ ID NO: 81883 - DNA, 1336 bp, Homo Sapiens
  misc_feature (1108)..(1108): n is a, c, g, or t
  misc_feature (1127)..(1127): n is a, c, g, or t
  misc_feature (1141)..(1141): n is a, c, g, or t
  misc_feature (1145)..(1145): n is a, c, g, or t
  misc_feature (1200)..(1200): n is a, c, g, or t
ttatttctaagagacagttgttaggcagttgttgcaaatagatgatgtagctgtacattgtaaatgtatgctctggaatgagtcactttttttccctgagcctcagtgtcctcatttgccaaataaagatgcttcctaactgattcctgatgactttttgaaagtgaattaggataattgcatcttaaggtactttagacactatgagtttatatataggcaagatattcattcattcataaactattgcctacactttgaaattttcattttttgaagttgacttacagaggttcatgtctgagttactgaccttcttaaagcctcatcttcagccctctctgcaattacacaatccgtgcaaatggctgtctcgggttttcatagaacaagacgatgacatgctggaggctgccaaggcatcactgggcatctacttaacactgaccagaggatgtgaagccactgaaagcttgactcagggaaaagaaatgtgggaccatcacacacatgaaaatggctataatcctcactgtattttcttgttcttcttgaaaaatataggatttgattccacagttcttcttgactttttgatttcatcagaaacctgttttcttgaatattttgttagatatttaaaattactgcaaaaggactgggataattttttcaccatttgcaataactttgatgcaactgaatctaaatatgacataagtatttgtggctgtgtcccctcacttgtccaagaccaaagctccaaccaaacaataccccatcgtttgactgctcctcatagtcacagagatgtgtgtgctcggcactcctgggcttccgatgctccctctgaaccactgaaacctgtgatgtccaagggtgctcacaccatgtgtgcttatagtctgtcttccccccgggcctctcaaagtctggtagattacgacagctctgatgattctgacgtggaatccacagaccagtgtttagctaaacagtaaacagacatcttttacaccagcaagcaactaaggagattcaggatgcagctgggacaagcagggataaaaaagaatttagccttgagcctccatcaagtcctctgggntctgaaagaatttgatacntgccttctcctttngatntgtgaagtagccccaaatgatgtcgtctctgaagtgggaatattttacagaatangtaaaatgcttccaggaactacaagatgccatctgccgtttgcaaaagaaaaatcttttcccatataatccaactgcacttttgaagttgttaaaatacatagaggtgataagtaataaacctatgaacactttgt

SEQ ID NO: 81884 - DNA, 1200 bp, Homo Sapiens
  misc_feature (1016)..(1024): n is a, c, g, or t
  misc_feature (1030)..(1114): n is a, c, g, or t
tcggtaggtacgaggctgggtggtgaattcggcacgaggccggcccagagttcgtggaggtcattggaggcctcggcgctgcccgtgtgcggagcctctttaaggaagcccgagcccgggccccctgcatcgtctacatcgatgagatcgacgcggtgggcaagaagcgctccaccaccatgtccggcttctccaacactggaggaggagcagacgctcaaccagcttctggtagaaatggatggtgcctctcttgaccagctaccctcccaggggaccatgaggaagctcagaggaaagacccccgcctgctcctgtctcaccgagcccacagggtcacggagggcaatggagggtcattcgctctgctggggttgccttttgcactgaagatagagaccacctttttgagtgacttgagcccaaaggcaagcgtatatcaaacgatcttctccacataacctctctgtgccatcataagaatagctgcttccgcccccggatttgctcaggcctgggaatccgctgactgaaggcctcttgttgagtgccagctctaaacaagtccctttatgcagagccacagctgtgcatgctcagccctgccgaggtcccaggccaggctttgttgcttccgttcatggaagcgcacaggatggggccgacgctgtgccggtcgtggggaaatctcactggggaagagaaaagcccaagccttgttggttacgtcagccggtccatggcggtgtcctgcggaccccagagcccccgggaagggcgcaagtcaaagagcactggaggcaccgccggcgatggacgtccaggtcccggctcctgtgctggaaagcgttgatggggagcgtcggcgctgaccacacgcgggagctgcggaagcccagcggttcacacaggcctcccttcaacgtagtcatcccctggtggtggaagcaagacgacggcccctgacgtgcagccacacacagaaaaggctgctgtgaacattttatgcttcgacnnnnnnnnncttcannnnnnnnnnnnnnnnnnnnnnnnnnnnnnnnnnnnnnnnnnnnnnnnnnnnnnnnnnnnnnnnnnnnnnnnnnnnnnnnnnnnnttcctaagtagttgggactcaaggcttgagtcaccatgccaggctctgttttttcagtctgtgaaaaataaagtcatcagcatgtg

SEQ ID NO: 81885 - DNA, 1960 bp, Homo Sapiens
taggggcgaagagtatgaagtcgacggcgcgccgaattcggcacgaggggccgtgctgctgctgctgctccgtgccctccgccggggtccaggcccgggtcctcggccgctgtggggcccaggcccggcctggagtccagggttccccgccaggcccgggagggggcggccgtacatggccagcaggcctccgggggacctcgccgaggctggaggccgagctctgcagagcttacaattgagactgctaacccctacctttgaagggatcaacggattgttgttgaaacaacatttagttcagaatccagtcagactctggcaacttttaggtggtactttctattttaacacctcaaggttgaagcagaagaataaggagaaggataagtcgaaggggaaggcgcctgaagaggacgaagaggagaggagacgccgtgagcgggacgaccagatgtaccgagagcggctgcgcaccttgctggtcatcgcggttgtcatgagcctcctgaatgctctcagcaccagcggaggcagcatttcctggaacgactttgtccacgagatgctggccaagggcgaggtgcagcgcgtccaggtggtgcctgagagcgacgtggtggaagtctacctgcaccctggagccgtggtgtttgggcggcctcggctagccttgatgtaccgaatgcaggttgcaaatattgacaagtttgaagagaagcttcgagcagctgaagatgagctgaatatcgaggccaaggacaggatcccagtttcctacaagcgaacaggattctttggaaatgccctgtactctgtggggatgacggcagtgggcctggccatcctgtggtatgttttccgtctggccgggatgactggaagggaaggtggattcagtgcttttaatcagcttaaaatggctcgtttcaccattgtggatgggaagatggggaaaggagtcagcttcaaagacgtggcaggaatgcacgaagccaaactggaagtccgcgagtttgtggattatctgaagagcccagaacgcttcctccagcttggcgccaaggtcccaaagggcgcactgctgctcggcccccccggctgtgggaagacgctgctggccaaggcggtggccacggaggctcaggtgcccttcctggcgatggccggcccagagttcgtggaagtcattggaggcctcggcgctgcccgtgtgcggagcctctttaaggaagcccgagcccgggccccctgcatcgtctacatcgatgagatcgacgcggtgggcaagaagcgctccaccaccatgtccggcttctccaacacggaggaggagcagacgctcaaccagcttctggtagaaatggatggaatgggtaccacagaccatgtcatcgtcctggcgtccacgaaccaagctgacattttggacggggctctgatgaggccaggccgactggaccggcacgtcttcattgatctccccacgctgcaggagaggcgggagatttttgagcagcacctgaagagcctgaagctgacccagtccagcaccttttactcccagcgtctggcagagctgacaccaggattcagtggggctgacatcgccaacatctgcaatgaggctgcgctgcacgcggcgcgggagggacacacttccgtgcacactctcaacttcgagtacgccgtggagcgcgtcctcgcaggtacagggggcgcgccctgggtgaaggccctccttagcagggcttgaaccccagaaatacccaggcaggtattgagaggtgaggtggatggaaccatcacacaggaaggaacacacgttgcgtttcagttctgcgtaactcatgtctttatgataccttgtacttttccttagtttaaaatatcacagatttacctaagagtagacgctcgtccaacagaaataaaaaatgccttgccaaagaaagtgaaa

SEQ ID NO: 81886 - DNA, 796 bp, Homo Sapiens
gcacctgggcagaaaagtatcttaattaatgaaagagctaagccatcaagctgggacttaattggatttaacataggttcacagaaagtttcctaaccagagcatctttgtgaccactcagcaaaacttccacagacatccttctggacttaaacacttaacattaaccacattattaattgttgctgagtttattcccccttctaactgatggctggcatctgatatgcagagttagtcaacagacactggcatcaattacaaaatcactgctgtttctgtgattcaagctgtcaacacaataaaatcgaaattcattgattccatctctggtccagatgttaaacgtttataaaaccggaaatgtcctaacaactctgtaatggcaaattaaattgtgtgtcttttttgttttgtctttctacctgatgtgtattcaagcgctataacacgtatttccttgacaaaaatagtgacagtgaattcacactaataaatgttcataggttaaagtctgcactgacattttctcatcaatcactggtatgtaagttatcagtgactgacagctaggtggactgcccctaggacttctgtttcaccagagcaggaatcaagtggtgaggcactgaatcgctgtacaggctgaagacctccttattagagttgaacttcaaagtaacttgttttaaaaaatgtgaattactgtaaaataatctattttggattcatgtgttttccaggtggatatagtttgtaaacaatgtgaataaagtatttaacatgttaaaaaaaa

SEQ ID NO: 81887 - DNA, 603 bp, Homo Sapiens
tcttaatatacaatcatgcactgcataatgttttggtcagtcatggaccacatatacaacagtggtcccataagattataatacattatttttactgtacctcttctgtgtttagatacacaaataccactgtgttactgttgtctacaggcacagtaacacgctgtacagatttgtagcctaggagcaacaggctataccatatagcctaggtgtgtagtaggctataccatctaggtttgtgcaagtacactctgatgttcaaacacaatgaaatcgcctaacaatgtagttttcagaatgaatccttgtcattaagtgatgaatgactatatatttgtataggcatagaaaaaagtctagaaaactatatatttgtataggcatagaaaaaagtctggaaaagtcagatatcaaaacagagagaaatgagaagagtgagcgatgaggaagggacctttactttttctttaggtttttttagtactgcttgaattattttacagtaagcattaattattgttacataaaaacttcctttttaatattaataataaagtgttcttttacaataaatgtctcatgaaacatcaattacaaaaa

SEQ ID NO: 81888 - DNA, 1184 bp, Homo Sapiens
  misc_feature (536)..(561): n is a, c, g, or t
  misc_feature (766)..(775): n is a, c, g, or t
ccaccactttcacaggtaatcctttctccctccagtaagtatctcttggacagaactctcagatatggttcgagttctgttttatttgggatatgattagggagaggtctttccccctcttgtttggtagatctgttgggtagaattattttccccctgttgacctcagctgcgaggtttggaccttgaggcttggatgagggaatttttccctttctttggagaaggcttatcattcttactggtaagcatgtattttattttctgtcctgtcttgtatttatttggcctttgtgtattcagtgcttgcatttacttggcttttgcatagttgacattaaatcagagcacccacgaaatgagctctcaaagttcaaaggcatgccagaatattttctggaactccagctagtaacatattcaaacattacagggatcatttagtctgtttttcttaaaactgaactaaaagatggaggctataaaatcatacactccaaataagatatgcatatttcattgatatcttgaggctnnnnnnnnnnnnnnnnnnnnnnnnnncacattcaggatacaaatattgccttgttaaagaaatactgtctcaaaggtggctgaaacctttcttttctaggacctttcccctccccttcttacagtatcccctctttatccttctctaaacagctattctaacatactacttaaataaaaacacttgaaaaccagcagatataaaacaaagtcattttgaccttcctactgnnnnnnnnnnaaagcaaagattaaattcccatgtaaaaccttcctccctatacaaaaaagaatagcagcatttttatcttcaatgacaaagaattgagtccaagaaaatactgtataaaccttgttaaaaatcactcttgtcttttggtcctactcacataattcagcacactttcacagttaactattttttgttcaatttagtgcactggtgagtgactcaaactgctttatcccaaatttgatttacagcctttataagattgcctattaaaaaagcttaaagcttatccttagcccattttgtcagaaaaataatttgcatctaatcatttttataaactggtgaatttacgtgttttactatatcatgactaaaattctaaaataaaagttttaatatctttatgtaaaaaaaa

SEQ ID NO: 81889 - DNA, 1090 bp, Homo Sapiens
  misc_feature (168)..(169): n is a, c, g, or t
  misc_feature (208)..(208): n is a, c, g, or t
  misc_feature (220)..(220): n is a, c, g, or t
  misc_feature (223)..(223): n is a, c, g, or t
  misc_feature (247)..(247): n is a, c, g, or t
  misc_feature (284)..(284): n is a, c, g, or t
  misc_feature (380)..(481): n is a, c, g, or t
ccgatgagcgcatgagccacgcatatgtgagtactcatcatagcacccagcttacattttcttcgactcgatgtggttgaatttgagcgatacaattcacacaggaacagtatgactgatacgatttatacgatcactataggaattgccctcgagccagaaatcgcnncgagggagacaggataatgtgatctgactagtggaaatntcagattacttntantgattggaatgggctataagatantgtgctgaagagaaaacagttggtctgttcactgctntcattgagaaaatgtggaatgtctcttgactaattgacaaagtgtaatgaaatgacaagctggttgaagctggtaatcaatgcatggccatatttnnnnnnnnnnnnnnnnnnnnnnnnnnnnnnnnnnnnnnnnnnnnnnnnnnnnnnnnnnnnnnnnnnnnnnnnnnnnnnnnnnnnnnnnnnnnnnnnnnnnnncatgtcataagagaaacagatgtgcatatacacacaataaataagaaaattaataattgtattaagtggtatgaaaaaaagggggaggattgttcactcactgttacctgtgttagtatcctgcaaatgcatgaatggttgaactcccatgtcagcatttttgttgccatttatttagtaccagacatagtgctggtctcacagcttaatatttggtaatgaataaattctgctagtggtatatgttgatctgaacttacaatgatgggatatagaattggcagagtggcagatgttcacaattgtctacaagtagatgtgctagacaatggaaggatgcaggccaacctctttgattacaattgagattcatgtgactattgagccctggaaatgtagcttgtccaaattgagatgtgctgtcagtataaaatacataccagattttaaagatgtaccaaaaaatgtaaactatctcaatttttatattggtgaaatcaatatgtcttggtatagtggcttaaataaaacaattttagcctttctcagtttatttttctgcaaaaagattaaaaattgtacatgaagctcatgttaactttcttttgg

SEQ ID NO: 81890 - DNA, 424 bp, Homo Sapiens
gccgcggctcatgcgcggtgcacagaggcttgtttcacatctgtaacaacaggaggaggcccagcctcgtgatgaggaatagcaaggagagaattcagctccagttcaaaagcctacaaaatctgagactgtcattgcttttataaggattccagctttccctcctggccagaaatgttcagcctggactcattcagaaaagcatccctggatgtgaatgaggaccctccttaaacaggaatggagaggttgagctggtcatttccaaccttagcttcaaggcagaactggaattagtttcaaaataaaccttgatcctaggcacttagttctagaagatcctacaagcacgtctgctgtaactctatgtatgttttctgtaaaatcccctgcctttaaaataaaaaggaaaaaatccccaaaa

SEQ ID NO: 81891 - DNA, 1015 bp, Homo Sapiens
gggacagaggcttgtttcacatctgtaacaacaggaggaggcccagccttgtgatgaggaatagcaaggagagaattcagctccagttcaaaagcctacaaaatctgagactgtcattgcttttataaggattccagctttccctcctggccagaaatgttcagcctggactcattcagaaaagatcgggcccagcacaggcagcgtcagtgcaaacttcccccaccccgccttccacccatgtgtgtcaaccctaccccaggagggaccatctctcgagcttctagggacctattaaaagagttcccacagcccaaaaatcttctcaacagtgtgattggaagagccctcggcatctcacatgcaaaagacaaactagtctacgtgcacacaaatggaccgaagaaaaagaaagtcacactgcacataaaatggcccaagagcgtggaggtagaaggctatggcagcaagaagatcgatgctgagcggcaggctgcagctgcagcctgccagctgttcaagggttggggtctgctaggtccccggaatgagttgtttgacgcagccaaataccgagtgctagctgatcgctttggctcccctgccgacagctggtggcgtccggaacccaccatgccccctacttcctggcggcagctgaatccagagagtattcgaccagggggacctgggggcctatcccgctctttaggccgggaagaaaatgatgacgaggaggaagagctagaagaagggaccatagatgttaccgacttcttgtcctgaaccagcatgattcccacgctctatctaggactcaaggggatttcctttaaatgagtatgactacagtgccttatggtttgtcactttccacttcgagatctttggccatggattatatgaactctcatcaaatagaaattgtatcaaatatggacaaacaagttctaaatcttgctgtaccaatccttgtcatgtcccaaaaatataaattgctttgctaaataatagc

SEQ ID NO: 81892 - DNA, 1481 bp, Homo Sapiens
  misc_feature (35)..(35): n is a, c, g, or t
  misc_feature (146)..(314): n is a, c, g, or t
  misc_feature (326)..(326): n is a, c, g, or t
ggtacgtatacgccttgatgagtgtacgtccgcanccgacgacgagcgagcgatcatgaggagaagcgaagacgcccatagcaaacgcctttcccgcgcgtgccgattcataatgcagctgcacgacagtgtcccgactgaaagcnnnnnnnnnnnnnnnnnnnnnnnnnnnnnnnnnnnnnnnnnnnnnnnnnnnnnnnnnnnnnnnnnnnnnnnnnnnnnnnnnnnnnnnnnnnnnnnnnnnnnnnnnnnnnnnnnnnnnnnnnnnnnnnnnnnnnnnnnnnnnnnnnnnnnnnnnnnnnnnnnnnnnnnnntggccctcgagnccaagaattcggcacgagggctaagggaagaaaggaatctgagtttgatgatgaacccaaatttatgtctaaagtcataggtgcaaacaaaaaccaggaggaggagaagtcaggcaaatgggagggcctggtatatgcacctccagggaaggaaaagcagagaaaaacagaggagctggaggaggagtctttcccagagagatccaaaaaggaagatcggggcaagaagcgaaggtgggcacaggggctttgtgcctgagaagaatttccgagtgactgcttataaagcagtccaggagaaaagctcatcacctccccaaagaaagacctctgagagccgagacaagctgggagcgaaaggagattctcccacaggaaagtcttccatttccataactcgaaaggcacaggtcaatgtccggatggactcttttgatgaggacctcgcacgacccagtggcttattggctcaggaacgcaagctttgccgagatctagtccatagcaacaaaaaggaacaggagtttcgttccattttccagcacatacaatcagctcagtctcagcgtagcccctcagaactgtttgcccaacatatagtgaccattgttcaccatgttaaagagcatcactttgggtcctcaggaatgacattacatgaacgctttactaaatacctaaagagaggaactgagcaggaggcagccaaaaacaagaaaagcccagagatacacaggagaatagacatttcccccagtacattcagaaaacatggtttggctcatgatgaaatgaaaagtccccgggaacctggctacaaggctgagggaaaatacaaagatgatcctgttgatctccgcaataatattgaacgtcgtaaaaaacataaggagagagatcttaaacgagctaaatcgagagaatcagtggattcccgagactccagtcactcaagggaaaggtcagctgaaaaaacagagaaaactcataaaggatcaaagaaacagaagaagcatcggagagcagagacaggtccagatcctcctcctcttctcccagtcatctcactcctacaagcagaagagtacactgaagagacagaggaaagagaggagagcacccgggcttgacccatcagactggcacccatatgga

SEQ ID NO: 81893 - DNA, 988 bp, Homo Sapiens; identical to SEQ ID NO: 8720
  misc_feature (489)..(569): n is a, c, g, or t
  misc_feature (579)..(593): n is a, c, g, or t
  misc_feature (812)..(821): n is a, c, g, or t

SEQ ID NO: 81894 - DNA, 1061 bp, Homo Sapiens
  misc_feature (32)..(32): n is a, c, g, or t
  misc_feature (38)..(38): n is a, c, g, or t
  misc_feature (49)..(49): n is a, c, g, or t
  misc_feature (75)..(75): n is a, c, g, or t
  misc_feature (88)..(88): n is a, c, g, or t
  misc_feature (90)..(90): n is a, c, g, or t
  misc_feature (96)..(96): n is a, c, g, or t
  misc_feature (101)..(101): n is a, c, g, or t
  misc_feature (113)..(113): n is a, c, g, or t
  misc_feature (131)..(131): n is a, c, g, or t
  misc_feature (166)..(166): n is a, c, g, or t
  misc_feature (318)..(318): n is a, c, g, or t
  misc_feature (347)..(347): n is a, c, g, or t
cgcttctccccaccagcgaaggacgctgtganccaganccgcgagcacnccgggagaacagccgcatcctgacgnccgtcgcttgcgntnggcccngcacntgcgcattgcanccgtccgcacttgggccntacgtcagcagatggccgccccttgccctgatctncaggagccgccccctccaggacgtcatcacaaatcaggagcccgctcttgtgtgacgtcataaagcccgctccgcatcatgacgtcacagtgcgcgtagtcccgccccctcgctttctccctttgctcctccgtccgctcccgtcggacggngacattgcaatgaggcggaatcgcggccntaagccggccctgggtggagctggcgaggtgaaaccaggtgggatggcagcctctcccacgggccgtcccagacggctccaacgctacctccagagcggcgaattcgaccagtttcgggacttccccatctttgagagcaacttcgtacagttctgccccgacatctatcctgccccgacctctgacctctggccccaggtgactcggttgggagaagttgccaacgaggtcaccatgggggtggcagcctccagtccagccctggagctcccggacctattgcttctggccggccctgccaaggagaacggacacctgcaactcttcgggctgttccccttgaagttcgtccagctctttgtccacgacaaaagccggtgtcagctcgaggtcaagttgaacaccagccgcaccttctacttgcagctgcgggccccactcaagacccgagaccgagagttcggccagtgggtgcggctgctctaccgcctgcgcttcctctctgcttctgctgtgcccttcacgcaggagtaagagccccaaggcgtggaagccagacttgaccccaagacctctgaactctggggactctgagtcttccagcatccttcaaggtcaccgaatgaccagagatcaaagtaccttgcctcagggccgggcagatgagatattaaagttaataaaggtcagtccattaagaaccaacaaaaaaa

SEQ ID NO: 81895 - DNA, 452 bp, Homo Sapiens
ttcgggacttccccatctttgagagcaacttcgtacaggtgactcggttgggagaagttgccaacgaggtcaccatgggggtggcagcctccagtccagccctggagctcccggacctattgcttctggccggccctgccaaggagaacggacacctgcaactcttcggctgcgggccccactcaagacccgagaccgagagttcggccagtgggtgcggctgctctaccgcctgcgcttcctctctgcttctgctgtgcccttcacgcaggagtaagagccccaaggcgtggaagccagacttgaccccaagacctctgaactctggggactctgagtcttccagcatccttcaaggtcaccgaatgaccagagatcaaagtaccttgcctcagggccgggcagatgagatattaaagttaataaaggtcagtccattaagaaccaacaaa

SEQ ID NO: 81896 - DNA, 1026 bp, Homo Sapiens
  misc_feature (55)..(55): n is a, c, g, or t
  misc_feature (133)..(133): n is a, c, g, or t
  misc_feature (159)..(340): n is a, c, g, or t
tcttcatggtatccatgatcttgataccgtataccccttgatgactgtaccgccncgcacgaacgacgagccagcgatcagtgacgaggagcgatgacgcccatacgcaaactgcctgtcaccgcgagtgtcngattcataatgcagctgcatgacagnnnnnnnnnnnnnnnnnnnnnnnnnnnnnnnnnnnnnnnnnnnnnnnnnnnnnnnnnnnnnnnnnnnnnnnnnnnnnnnnnnnnnnnnnnnnnnnnnnnnnnnnnnnnnnnnnnnnnnnnnnnnnnnnnnnnnnnnnnnnnnnnnnnnnnnnnnnnnnnnnnnnnnnnnnnnnnnnnnnnnntaatatggccgtcgaggccaagaattcggcacgaggcaagtgtgcaaacagctatggaaagtgaactcggagagtctagtcccacaatcaataaaagactctgcaaaagtacaatagaactttcagaaaattctttacttccagcttcttctatgttgactggcacacaaagcttgctgcaacctcatttagagagggttgccatcgatgctctacagttatgttgtttgttacttcccccaccaaatcgtagaaagcttcaactcttaatgcgtatgatttcccgaatgagtcaaaatgttgatatgcccaaacttcatgatgcaatgggtacgaggtcactgatgatacataccttttctcgatgtgtgttatgctgtgctgaagaagtggatcttgatgagcttcttgctggaagattagtttctttcttaatggatcatcatcaggaaattcttcaagtaccctcttacttacagactgcagtggaaaaacatcttgactacgtaaaaaagggacatagtgaaaatcctggagatggactatatgctcctttgccaacttactcatactgtaagcagattagtgctcaggagtttgatgagcaaaaagtttctacctctcaagctgcaattgcagaactttcagaaaatattattaaaaacaggagtttacctctaaaggag

SEQ ID NO: 81897 - DNA, 909 bp, Homo Sapiens
gcggccgctgggcctgagtgtcgccttcgccgccatggacgccaccgggcactgacagacctatggagagtcagggtgtgcctcccgggccttatcgggccaccaagctgatttcctgcaacttcgccacttaaaactctaccacgaaggtatccagaattgagaaaaaacaacatagagaacttttccaaagataaagatagcatttttaaattacgaaacttatctcgtagaactcctaaaaggcatggattacatttatctcaggaaaatggcgagaaaataaagcatgaaataatcaatgaagatcaagaaaatgcaattgataatagagaactaagccaggaagatgttgaagaagtttggagatatgttattctgatctacctgcaaaccattttaggtgtgccatccctagaagaagtcataaatccaaaacaagtaattccccaatatataatgtacaacatggccaatacaagtaaacgtggagtagttatactacaaaacaaatcagatgacctccctcactgggtattatctgccatgaagtgcctagcaaattggccaagaagcaatgatatgaataatccaacttatgttggatttgaacgagatgtattcagaacaatcgcagattattttctagatctccctgaacctctacttacttttgaatattacgaattatttgtaaacattttgggcttgctgcaacctcatttagagagggttgccatcgatgctctacagttatgttgtttgttacttcccccaccaaatcgtagaaagcttcaacttttaatgcgtatgattttcccgaatgagtcaaaaatggttgatatgccccaaaccttcatggatgcaaatggggtacgaaggtccactggatggatacaataccctttt

SEQ ID NO: 81898 - DNA, 557 bp, Homo Sapiens
atgtgtatatgacattatgcagtacctcagttcacagcccacgttgacaaaagtttttaatttatataacaagattgaagcaggtagagcgttactcccattttctggttcaagaaagtgagtttgagagagagatttttctatgatcatgtggctaatcagttattaaatggtaaagccagaacttagtgtctgctgacctttagatcggtacacttactctcagccactcaaaagacctctgtgaagtaaggtggtgcctttcaggggagtagggggtgagtagcgtatgcttgatgcttgttctttaacaattctaatagcatctacttcacatcttgatgtttgtgatgactgatatccatggtgaattgtagacaaaatcttttcactttcctaaagaaacctgatggtttttttcagagataaaatcccatctcaaggcacagcgaaattaaaatgaggtgaagtttaggtactctcagaatgtttattcgcatacagattcttaaaaaacatgatttattgtaggcagatgtcacctctttaagcaaaag

SEQ ID NO: 81899 - DNA, 295 bp, Homo Sapiens
tattagctactacagcttagagtagctgctatgggagtgtggcctttttgattaaatactagctgatcaaccctagaatataaattcttgttttataacatttagatttaaataacaataagaatgtaagctccatgaaggcaagaatgcctttttgttttgttcactgctgtgtctaaaataatgcctggctcaaatatttgttgaatgagtaaatatgctgactttgctgaagtatttaagcaagttacagatattatacaagtaaatattttgggcacaagcacacttaatg

SEQ ID NO: 81900 - DNA, 1031 bp, Homo Sapiens
  misc_feature (68)..(68): n is a, c, g, or t
  misc_feature (79)..(79): n is a, c, g, or t
  misc_feature (89)..(199): n is a, c, g, or t
  misc_feature (221)..(622): n is a, c, g, or t
  misc_feature (678)..(714): n is a, c, g, or t
  misc_feature (728)..(762): n is a, c, g, or t
  misc_feature (853)..(894): n is a, c, g, or t
ggtactatggaagccccgctccgaaggagaagccgacagtacccgtagcgcaggtcgaacagagagcnccgaggagctnccaggggaannnnnnnnnnnnnnnnnnnnnnnnnnnnnnnnnnnnnnnnnnnnnnnnnnnnnnnnnnnnnnnnnnnnnnnnnnnnnnnnnnnnnnnnnnnnnnnnnnnnnnnnnnnnnnnttcttgccctttgctgccctgnnnnnnnnnnnnnnnnnnnnnnnnnnnnnnnnnnnnnnnnnnnnnnnnnnnnnnnnnnnnnnnnnnnnnnnnnnnnnnnnnnnnnnnnnnnnnnnnnnnnnnnnnnnnnnnnnnnnnnnnnnnnnnnnnnnnnnnnnnnnnnnnnnnnnnnnnnnnnnnnnnnnnnnnnnnnnnnnnnnnnnnnnnnnnnnnnnnnnnnnnnnnnnnnnnnnnnnnnnnnnnnnnnnnnnnnnnnnnnnnnnnnnnnnnnnnnnnnnnnnnnnnnnnnnnnnnnnnnnnnnnnnnnnnnnnnnnnnnnnnnnnnnnnnnnnnnnnnnnnnnnnnnnnnnnnnnnnnnnnnnnnnnnnnnnnnnnnnnnnnnnnnnnnnnnnnnnnnnnnnnnnnnnnnnnnnnnnnnnnnnnaagaattcggcacgagggttaccattctgatgttggagcggccgcggctgtaggcnnnnnnnnnnnnnnnnnnnnnnnnnnnnnnnnnnnnnaactgcctggtacnnnnnnnnnnnnnnnnnnnnnnnnnnnnnnnnnnncaatgcgaaattgttatttccattctcatggtgaagttgcgtggacgcgtgtgtgcgtgtgtgcaagagagcgggagtgaggtccaggctnnnnnnnnnnnnnnnnnnnnnnnnnnnnnnnnnnnnnnnnnnggtggccgggccggagcccccgtctgcagtgccccccagcctgccgggcccaggagagagagagaagcatctttgctactagctgttgctgctacctgcctctgcccgccgacgccccccgccttttgagattaagg

SEQ ID NO: 81901 - DNA, 1011 bp, Homo Sapiens
  misc_feature (14)..(14): n is a, c, g, or t
  misc_feature (168)..(168): n is a, c, g, or t
  misc_feature (181)..(181): n is a, c, g, or t
  misc_feature (234)..(234): n is a, c, g, or t
  misc_feature (275)..(275): n is a, c, g, or t
ctgagtgatgatcntgatttattcatgtgtagtagactgattccagatcatcatttgatcagaacagtcacagtactatctactggatcgagtaagtagaagcatatcatgttggagcacatacaggagacactgtgtgatacagctgatgacactgctccatccatntctgctcttgggntccaatcagagttcctcaaacgactgacttaatttctcggagtgatagctccnacacaggctccagaagcctgcattgatatccatccacactntgttttccttcagacattattatgtctgtactaggcaactaattcagactgtcctggttgggaatattctgtgatgctctgactcccctagtctgtagacggaattggcatacggtctaatttgtgtagtaagcacctttgttcatactagtagtgactgtattcttgattcagcctgatagctaccatgctgctgtcaaaaccaaccagaggggagcttgttcttctgctgtagtgtgcagtgactggcctcacccaggactttgatgtgagaatgagcactttcctctatcaggaaatttcaagtgtttcctgttattcgtagctcaatgtaatgcctcagttcattttcagttgtttgattatatgtgactaatatgtattttttattcaaacaagacttctgtacatgtttcttcaaaacagtttattaactgtcttcagtcttggattacatcaagtttataattttggcaaattgttgagacactgtgaagtcagcgttaaccatgtgcatacaacttaaggaattttttcctcctcatgtaaattttacttttcatgcttatatagtttcaacttttatcttcatagtaatttctcatctactcataataccaaaagttaagtcatgctgttttgtgtgctctcttgctaaagaccgcagagaccatacctgttgtcaaagagggtgtaataaactgtaataataatcatgaccacaaaccataaaaaa

SEQ ID NO: 81902 - DNA, 1007 bp, Homo Sapiens
  misc_feature (47)..(47): n is a, c, g, or t
  misc_feature (224)..(224): n is a, c, g, or t
  misc_feature (226)..(226): n is a, c, g, or t
  misc_feature (278)..(278): n is a, c, g, or t
  misc_feature (280)..(615): n is a, c, g, or t
gggggtggtgggaggagccatgcaaccttcccgggtcgatatatcangcgacgttccgatgagcgcgtgcgaccatattgatgtcatcttgccccagctacatttgctccgctgttgtgttgatgtggcgatacattcaccagaacagttgactgatcgaattatacgctccttagggattgcctcgagccagaattcgcacgagccgctgctcagtttttttntntagtagagatgggttcaccgttgaccaggatgtctcgatctcctgcctcatntnnnnnnnnnnnnnnnnnnnnnnnnnnnnnnnnnnnnnnnnnnnnnnnnnnnnnnnnnnnnnnnnnnnnnnnnnnnnnnnnnnnnnnnnnnnnnnnnnnnnnnnnnnnnnnnnnnnnnnnnnnnnnnnnnnnnnnnnnnnnnnnnnnnnnnnnnnnnnnnnnnnnnnnnnnnnnnnnnnnnnnnnnnnnnnnnnnnnnnnnnnnnnnnnnnnnnnnnnnnnnnnnnnnnnnnnnnnnnnnnnnnnnnnnnnnnnnnnnnnnnnnnnnnnnnnnnnnnnnnnnnnnnnnnnnnnnnnnnnnnnnnnnnnnnnnnnnnnnnnnnnnnnnnnnnnnnnnncccatctacatggttttctttttcttagtatgggagtgtccatgaataaattcatgggcatcctcataactcttccatgaatggcaaggggtacttatggaaaacagttttccaaagatctgattgttttgaaatgtgttagattggacttgttcaaatgttcatatttttgttctatgctaaatgcatcgttaggggagtagtggtaaatattccagaatccatatgaaattcatgagtttatttatgtctaaaacactgaaaactgtgtccaatatcgttcagtttcctgggtctttttcttattagcacatttgagaaaaatattcctttcctttattgtagtaaatctattaaaggcaatagccaataaaacatttttaattttaaaa

SEQ ID NO: 81903 - DNA, 609 bp, Homo Sapiens
  misc_feature (56)..(56): n is a, c, g, or t
cacaaacattagcagtccgggcatggtggctgaagcctgtgatcccagcatgttgngaggccgagtgggaggattgcctgagcctaggagtttaaaccagcctgggcaccatggtgagaccccatctctattatttaaaatgtttcttaaataaaaaaaacacaaacattagcaactagttggctagccataattcctcccttgtttcgattgccagttagaagcaatttttatttcactggttatttgcaagagaaggggtaaaaaaacagcatcagagtgcaacactgaagtgagcttactttaatttgtaagtgaagctgttgctgaacatgaccactatcgttgctgaaatataaaattatactcactgattgtaatggttgaaattttcctgaataatcattagccaaagatcaactctctaatggtgctaatggcaatctagctaatgtgcaaatttaggaagtcttcagtactaagtacataattttcaaataatattttttaattgtctactttggatgttagctatgtcttgtgagtataaattccaattttaagcactattttgatgcaaaaaaatgaataaaaaatttaatttataaa

SEQ ID NO: 81904 - DNA, 1325 bp, Homo Sapiens
  misc_feature (58)..(58): n is a, c, g, or t
ctgaccagcagcatctgtgacaacatacaggctactgaagtttctgtgccacaagtanattccagtgaaagctcagggggtacatcgagtgaaagcattcctcaaactgcaccacaaccagccatttctccaccaccaaagcctacggtctccagagttgtttcttcaacacgtctggtaaacccaccacctagatcttcaggaaatgcagcaacttcaggaaatgcagcaacaaaaatacctactcctatagtaggagtcaagaggacatcctcacctcataaagaagagagtcccaagaaaaccaaaacagaagaggatgaaacaagtgaagatgctaactgtcttgctttgagtggacatgataaaacagaagcaaaggaacaacttgatacagagacaagtacaactcaatcagaaactattcagacagcggcttctctgttggcctctcagaaaacatccagtacagacctttctgatatccctgctctccctgcaaatcctattcctgttatcaagaattcaataaaactgagattgaatcggtaaaaacaacctcaggggtccataaacaatatctgccaactcaacctgttgtcttcaaatgctaaaaaaggagaatggagggtacaagactagacatgactgaaatggattggggttttatggtgacctcccttactgcgctaatcagcacttgatcggaagtccaggttagtatgtgaagccaggagtactattattatcgtgttagcaacagttgcattaactatttcaaaaattactgcctttaaaaaaaacaacctcaagctatatttgtattcataattgacatctggattgggtttatgtttgatgcattgtttggaaaatttgcaatacaaactggcataagaattacttattctgatgatgcacttttatgtatttttcattagaaagtagaactaattttagattttcagcttgatggattttcagtttttcctgaagaattttctttaccattagtcttcaaattggatactgttgtgcagtggtgtactgttatacttcagagaaagggtaagagtacatctagttcagttcctatgaggtagctgtaacccttaaaaatgaaacgtcaactctagggtacatttgacattgaaagaatagttaggaaataacttggttttgatagggtcatgattaagaaatgatatattggttttatttatggaattgttttatagtgcatacaaatcagcgatcagccagcaaatatttttctttgagcttgtgaaagctctgtgttcttttgccttcaatctgttgtcttc

SEQ ID NO: 81905 - DNA, 1259 bp, Homo Sapiens
  misc_feature (278)..(291): n is a, c, g, or t
  misc_feature (810)..(810): n is a, c, g, or t
tttaattcaaggtttggggaatactcttcaacctacaacactgctataaggaaattattaagttattttgggaaaacactagttggcatgagattacttccattcttaaaacacctaatctaacaaggccgtgtccagtcaatgaagaggtagctcttgcttcattctttaattgaatctgattgattgtacgcaacttctatctgtattttacttttatttattattaggtataataataggaaaatctgtcttcctaccctgtgatatcatattcnnnnnnnnnnnnnnaattctcctggtctgtgaaggattggtatgtgcagtcaatccacataataacaaaaagctcctgtttgaaaggacaatgttaaaaaacagtgtagacattaaaaaccttctgaaaaagattcttaaaatgctatcttccctcaaatatattcctgttaaatattaattcagtttgttgggtctaaaagaaaatgccttatagctggaaagacatcctttcctactgtcccatcaattaaccatgtctgctttgtgtttggtgtggaattaccaccattagaacacaccacaccttgactgctagatagatagtatatgagtacagttttaaattaacacagtattaaaggtaggatctaaaaaaatcttaacagattattgtaatgtagattaacagactaaagagtatttcccaaatagaccactccagtaatttgctaaaactattattattaccaatatgaaagtgtcccattatcccggtgactaatagcactggtatagaaaagggtggtgtanggctggcagggtaccttgttaggtgtctaaggaaccatcctgccttgtgctctatgactagctttaacctgcaagtcacaaaaatgcactcataatgaggagacgactagctttatttgacttctgagactttgtccatggtgtggaaagccaaagagaaggtaaattttctttgtagtactgcaatatacagcatagtgttaagactcaagtcttaggctatttctaatatgtttacttagtaagtgatactatatctatagcatttcttgctgaagcaagctggattgtttatagcaaactatttactgtttaactcactctaatggcactctctataagaatctatcaatgatctgagtcgtttgccatagtacagtctgggcatcatcaagtctcaccatcatcatctcaagtatgagctgctctgcgttctgctcagcaatcta

SEQ ID NO: 81906 - DNA, 1051 bp, Homo Sapiens
  misc_feature (62)..(62): n is a, c, g, or t
  misc_feature (127)..(127): n is a, c, g, or t
  misc_feature (187)..(187): n is a, c, g, or t
  misc_feature (215)..(356): n is a, c, g, or t
ttacgtctgcttgctgcttgctacattcttctgcgttccccgatcttgataccgatacgccntgatgactatacgtcgcgcaccgacgacgagccagcgatcatgacgagagcggagacgccatacngcaacgcctctcccgcgcgtgccgatcataaatgcagctgcacgacagttcccgactggnaaagcggcagtgagcgcacgcaagtaannnnnnnnnnnnnnnnnnnnnnnnnnnnnnnnnnnnnnnnnnnnnnnnnnnnnnnnnnnnnnnnnnnnnnnnnnnnnnnnnnnnnnnnnnnnnnnnnnnnnnnnnnnnnnnnnnnnnnnnnnnnnnnnnnnnnnnnnnnnnngaatgggccctcgagcccaagaattcggcacgaggattgaccttacttgcatttatccggcattatttcaacacctcctgtgaagaaagtacttttctggcatagctaccgtgagttctcagcaggaacttcccagcgatgataatgtacatgaaattagccacgtaacaagagtctatttgccttgaaaaaacaattatccttgaacttcctccagctatgcagggattctcattaaagagctgatctgcatctgtttatccattttagtagcttttaaatatgattttatgtgaagtgccatttctttattctactaaagagagacagcagaaataaagatcagaagcaaatgtgagcaaatctgttttactgttaacttcaattatgaacttgaaattgtgccacatgactttttcctctaaaaactggatcctagtgttttaattacctgtgtgcagctattttaaatagcattttacttgaataatatgtatgttgtcattgtttcatgctatactttgtgggataaaacttgggaatgagtgtggtaagaaatttataaagttttgcttttaaaacgtggacataactcatttttctagtttttgacaattgtgtgttttagtgtctagtctgcagagagctgtgtgattaataaacgtggaattaacagaatttcctctccctgtaaa

SEQ ID NO: 81907 - DNA, 1521 bp, Homo Sapiens
  misc_feature (257)..(266): n is a, c, g, or t
  misc_feature (1281)..(1290): n is a, c, g, or t
  misc_feature (1439)..(1448): n is a, c, g, or t
aaggctaggtacgaggctgggtggtgaatcggcacgaggtggaagacctgctggacgctctcgggagagcagacatagcaccagaagccactgggagaagtgttttcgatccgtgtctgggccacagtagtattcactgtttagtctttgagttccgtaagcagtctcttcacacatttcttacagtctggagtgtactgactaaatctgtgtaagcaaattgaaatactctttcttttaggtagcgtcacagtggnnnnnnnnnncctcaggataatttctatacaatttccttactgtcagagggaccagatctttccctcactgtggcaggggccgtgcaggtggataaaggaagagctggtttccggagagtgactgtaacagcgttgactcgaagctagagatggagggggtggccgtctcttagacattggacacctctcagagcctcctgagggcttctttgtcttctagaatctctaccggtggtcctcctgcaggttctggctcacagacatcatcatgcctttttttccctccctgaggcgccttggcagaagagcgtgaccctgtgagccaggccccccttagctctgcttcagatcacagaacacagacagactcgcgagttgctggacctctttggtattaagtgtttgaatccatggtgggccttttgcaagtagcgttagctctttttaaatgttgaactgagctaaggatgcactttcttgtggacatagaaggggcccacgtaaggccctgagtaggctccttagttgctgctttacctgatgagggccaaagagattaactctgcctcgttgccatgtctcagaaaagttgccatatttcacccagaaggggctcgttttcctcttactcttactttaaccatgtgcctggaggagccattctgggctcttgcacttgcccagcctttctttgccaggggcagagaagggaaagggggtagattgagtgtgccaagggccgtgcaagggcaggcttgctttccacccatctgctgagggagccctctcctctcgctccttgcctctgttcacacctgttgtcttggaagaggatggtccctttgtcttaaggctttgtgataaagtcatctccagttaggatctgcacctgtttccttcgtaatagtgcctggcggcctttctgaagttacaggtggttgggagccctctcgcatgcagaacatctggtagattgatctgccaggctgggtggttctactgctttctcaatttctaagaaccnnnnnnnnnncttaaagagttctgctgaattatttgacaatatttgtaagtaccatgtttccttgtggtgtatgctctgttctggtttctgttttcaaatcaaatgcctgtttgggaggagatgaacgtatttagtctattagatttgcactgctggannnnnnnnnnaaagtgtaaccttgaatagctgtcttattgtttatcctgtaagattagtcaatcgattaaagtttgataacta

SEQ ID NO: 81908 - DNA, 997 bp, Homo Sapiens
  misc_feature (24)..(24): n is a, c, g, or t
  misc_feature (73)..(73): n is a, c, g, or t
  misc_feature (77)..(77): n is a, c, g, or t
  misc_feature (92)..(92): n is a, c, g, or t
  misc_feature (111)..(111): n is a, c, g, or t
tgttcaggaaagccaaattaatgntgggaagcaattgatacaccacagagtggtgccccctcagccacgaacntgtnggaaatgacctgctnttgagtgcaaagccaaatnttatgattattttgagaccggatataatgaaagaaacaatgtaaatgaatcttggaaaaagtccttacggaaaaaggaggcttcaccaccaagtaacaaactgtgctgcagcaaaggaagtaaaatatgagccatcttctcaccgaactttgaagcatgcacagcatgatcagttagctctcgtaaattttattttgaatggattttgtagttttgtacaacagataaaattatgccatgaacatgccatgtcgttttaatgcctggagagcagattgcgtaaaacatctgtatagcaggcatcagcgagcttcttataaatgtggtgatttttaccaaggaaacgattgacttaatgcttaaaagtatatcatagttttcttacggaaaagatcagtagatgagattgggggacaatgtgcccttgcaatatttccattgccccccaaggagcctgtcactagctaagaaatttctacatgtttgccagttaattagggagttatttggtaagcaaatcaatataaccagcaaagatacctgcttcttctatatgatacaatattttttttaaataaaagactaaagacagggagctagatgaaatggcttaatggtgctgttaagtatttgtacctaacagtcttgtgtgacagatgaaaataggatgtaacataatgaaacacacctgtctaggggcggcaatcaacagtcttacacagagagggtattccctgcaagtttctggcttgcctgtgatgggtgatgaggcttttagagaggtgttatacagggcgatttttggtgccttacttttatcttaatttttgccaatgtgaaaattaaggataaatcagagttacagcagggatttaacaaacaggac

SEQ ID NO: 81909 - DNA, 2397 bp, Homo Sapiens
tggaccggtccggaattcccgggatatcgtcgacccacgcgtccgcggacgcgtgggtcgacgccgctgcggggccatgatccggaacgggcgcggggctgcaggcggcgcagagcagccgggcccggggggcaggcgcgccgtgagggtgtggtgcgatggctgctatgacatggtgcattacggccactccaaccagctgcgccaggcacgggccatgggtgactacctcatcgtaggcgtgcacaccgatgaggagatcgccaagcacaaggggcccccggtgttcactcaggaggagagatacaagatggtgcaggccatcaaatgggtggacgaggtggtgccagcggctccctacgtcactacactagagaccctggacaaatacaactgtgacttctgtgttcacggcaatgacatcaccctgactgtagatggccgggacacctatgaggaagtaaagcaggctgggaggtacagagaatgcaagcgcacgcaaggggtgtccaccacagacctcgtgggccgcatgctgctggtaaccaaagcccatcacagcagccaggagatgtcctctgagtaccgggagtatgcagacagttttggcaagtgccctggtgggcggaacccctggaccggggtatcccagttcctgcagacatctcagaagatcatccagtttgcttctgggaaggagccccagccaggggagacagtcatctatgtggctggtgccttcgacctgttccacatcgggcatgtggacttcctggagaaggtgcacaggctggcagagaggccctacatcatcgcgggcttacactttgaccaggaggtcaatcactacaaggggaagaactaccccatcatgaatctgcatgaacggactctgagcgtgctggcctgccggtacgtgtcagaagtggtgattggagccccgtacgcggtcacagcagagctcctaagtcacttcaaggtggacctggtgtgtcacggcaagacagaaattatccctgacagggatggctccgacccataccaggagcccaagagaaggggcatcttccgtcagattgacagtggcagcaacctcaccacagacctcatcgtccagcggatcatcaccaacaggttggagtatgaggcgcgaaaccagaagaaggaagccaaggagctggccttcctggagggtgccaggcagcaggcggcacagcccctgggggagcgcgatggtgacttctaacctggcagaggccctggccggccctccccctgctctgcttctgcgccttctgcgtttggacataggactctgcagggccgccctctctaactggcctggctctggaagggctggtgaggactctgcctccttgcctgcctacaaggtgcctggtttgcagcaggctctccgctctttccagcaaagctgctcagagagggtgtccagcacagtggagaggccggaagtgagacgggcagacggcacctgcagcctgaaacgcaccgctcctgcgtgcgcccccacctggtccccggatgcccccaccacctggacagaggccacactgactgcccacccagctgtggcgggaggtgcagagcagagggctttagggagcagtgactgcggtcacccctttagttctctgggtgtagaccacaccacctcccactgggcaccccccaacacggtgtcctgccacccagcgcctggctccaggaaaacacgcttgccttccttcccggcagcttcgccactctccttatggactctgttctgtttgtacatggctgacggaaatctctttggtacaaccgaataaagcctggtggcagtgctgcgcggggctcccagccctgctgggaaggaccagggaaccactcagcaaggagaccctcttggccctgcccccaccatgcacccagcagccgggagtgcagcgggcagcctggcagtgagtgaaacccaggcctccagccctccaaagcctggggccactccctgtagcaggcgatgctagaataaggaggagagccagagctgaggctccttgccccttggcccctccaggggccatgggatctctgtctcccacacccctgtcacggcccgcctggagcagcccagaggccgaagaggttcttactgcagcctccgggaggtgtctagggaggccatagattgcctggtctcgccgcattcaaaatgaggcttatgatcagtacttttttcagccccacattcctctccagaatggcctctgccctacagcacctggcccatgtggcaccccatgggcctgtctctgctgtgtgaggtcgacctcacgacccagcacaggagctggaggcgagtgcacgcgagctctccaagccaggaagggcagctgt

SEQ ID NO: 81910 - DNA, 1050 bp, Homo Sapiens
  misc_feature (25)..(25): n is a, c, g, or t
  misc_feature (131)..(131): n is a, c, g, or t
  misc_feature (144)..(144): n is a, c, g, or t
  misc_feature (196)..(196): n is a, c, g, or t
  misc_feature (265)..(265): n is a, c, g, or t
  misc_feature (268)..(268): n is a, c, g, or t
gaggcagaatcgcagaggggagatntatggaggaacctaccatgcatgatgcgcaggttacgtcagtatcactctgtaggcatcgagggtcatactgagagaaccatacaatgtcatgatgtgcaaagccnttatcaggctcancactcaatagacatcagagattcataccgagagaaaccttacaaatgcatcnagtgtgggattcctttagtcagcgtgtccatcttagacttcatcagactgttcatactggagacagacntancaaatgtaatgagtgtggcaaaacctttaaacggagctcaaacctcactgcacatcagatattcatgcaggaaagaaaccatataaatgtgatgaatgtggcaaggtattcagccatagttcacatcttgtaagtcaccagagaatccacactgaagagaaaagatacaaatgtattgaatgtggcaaagcctttgggcggttgttttccctcagcaaacaccaaagaattcattctggcaaaaaaccttataaatgtaatgagtgtgggaaatcttttatttgtcgctcaggcctcactaaacatcgaataagacatactggagagagccttacaactaaactcaatgtgacaaggccttagacgttgtcctagtttctggaatcaccgaataattcctacttactgatataccttgtatatttaccccttctcttgaaatccctgtggaattgtaatctccagtattggaggtggggcccattgggaggtgattgaatcatggaagtggatttctcaaactgagaaagatgtagcgtcatccccttggtgctgtcctggcaatagtgacttctcttgaggtctggctgtttagaagtgcatagcacttccctgtcgcttgccctcattctcaccatgtgaaataccgacacccgctttgccttccaccatgattttaaccttcctgaggcttccctagagggtgatcagatgccagcaccatgttttcatttaagccttcagaaatatgagccaattaaactcttttctttatacaaaaa

SEQ ID NO: 81911 - DNA, 1038 bp, Homo Sapiens
  misc_feature (42)..(42): n is a, c, g, or t
  misc_feature (52)..(52): n is a, c, g, or t
  misc_feature (59)..(59): n is a, c, g, or t
  misc_feature (62)..(62): n is a, c, g, or t
  misc_feature (72)..(72): n is a, c, g, or t
  misc_feature (78)..(79): n is a, c, g, or t
  misc_feature (141)..(141): n is a, c, g, or t
  misc_feature (145)..(145): n is a, c, g, or t
  misc_feature (166)..(166): n is a, c, g, or t
  misc_feature (180)..(180): n is a, c, g, or t
  misc_feature (182)..(182): n is a, c, g, or t
  misc_feature (188)..(188): n is a, c, g, or t
  misc_feature (216)..(216): n is a, c, g, or t
  misc_feature (249)..(250): n is a, c, g, or t
  misc_feature (343)..(343): n is a, c, g, or t
  misc_feature (386)..(386): n is a, c, g, or t
  misc_feature (444)..(444): n is a, c, g, or t
ctttgttgaggacagcctggagactctagtcccagcgttttntgtcttaggntggatcntcntgatccagtntcttcnnttccttcctaccactgagtatttgtgatagtctgcttgctctcctgcaggagtatcagcacntctncagtgaccgaatccaccgtcncagttgacatcatntnttaacncattgtctactcccctcttcttatgaanacagtgattcccgtgagtactctgttctgattnntgtaccggcgcttaagtctttctgtagacgttgaaagccacaaagaacgtgactgcagtgagcctcccactggagcagccttaaccaacactntggccaaagcccccccacctcccctgtgtactgtgtgtgtgtntggtggatacagtattccttttcagtgtccctaaagctgtgatggggagtccccactnacctagaaagcattaccagtcacctactctgcattctcagatgtaaaccttgtgtagtgttctttttgcaatgacctatttatttaacctatttatatttatttaatttttactctgaaatgtatccagttacaattgtacttgcttaaagcacatcagatttgttttggacaacacccttgaccattttaaaactggaaaagtgatactgtatccttccatgggatggatgctttacagtagtcttattattaaagggtgattaatttggtcggggtaaaatgttaatttttaggtgatttttaagaattctgtgccattatgtcttctgtgtggatggttaattgtttaattagtacgtgttaattgtgtgatacagtcttctttgtggaacccaaaatcctctttttagctttatattttataaactgccagattgtacaacttttatgtgcatttttaaagcttgaagacatgagggtcattatctaagttaaacagcctatttttgtgcctcctgtacagttttataattctgctgatggcggcatcttatgtcgagccaaccacaataaaggtagttttagattttgg

SEQ ID NO: 81912 - DNA, 1416 bp, Homo Sapiens
  misc_feature (81)..(115): n is a, c, g, or t
aagtctataatcactatagggcctagctcttgcgcagcgaacgaccgagcgcagcgaagtagtgagcgaggaagcggccgnnnnnnnnnnnnnnnnnnnnnnnnnnnnnnnnnnncagtcgacggtaccggacatatgcccgggaattcggccattacggccggggaccaccctccggaactatgggatggggaaacagggcaatgagagccggatccagagggaggcccacttcctgctggaagcactcaggaagacccaaggccagccttttgaccccaccttcctcatcggctgcgcgccctgcaacgtcatagccgacatcctcttccgcaagcattttgactacaatgatgagaagtttctaaggctgatgtatttgtttaatgagaacttccacctactcagcactccctggctccagctttacaataattttcccagctttctacactacttgcctggaagccacagaaaagtcataaaaaatgtggctgaagtaaaagagtatgtgtctgaaagggtgaaggagcaccatcaatctctggaccccaactgtccccgggactcaccgactgcctgctcgtggaaatggagaaggaaaagcacagtgcagagcgcttgtacacaatggacggtatccaccgtgactgtggccgactgttctttgcggggacagagaccaccagcacaactctgagatatgggctcctgattctcatgaaaataccctgagatcgaagagaagctccatgaagaaattgacagggtgattgggccaagccgaatccctgccatcaaggataggcaagagatgccctacatggatgctgtggtgcatgagattcagcggttcatcaccctcgtgccctccaacctgccccatgaagcaacccgagacaccattttcagaggatacctcatccccaagggcacagtcgtagtgccaactctggactctgttttgtatgacaaccaagaatttcctgatccagaaaagtttaagccagaacacttcctgaatgaaaatggaaagttcaagtacagtgactatttcaagccattttccacaggaaaacgagtgtgtgctggagaaggcctggctcgcatggagttgtttcttttgttgtgtgccattttgcagcattttaatttgaagcctctcgttgacccaaaggatatcgacctcagccctatacatattgggtttggctgtatcccaccacgttacaaactctgtgtcattccccgctcatgagtgtgtggaggacaccctgaaccccccgctttcaaacaagatttcgaattgtttgaggtcaggatttctcaaactgattcctttctttgcatatgagtatttgaaaataaatattttcccagaatataaataaatcatcacatgattattttaactat

SEQ ID NO: 81913 - DNA, 1075 bp, Homo Sapiens
  misc_feature (58)..(58): n is a, c, g, or t
  misc_feature (74)..(74): n is a, c, g, or t
  misc_feature (85)..(85): n is a, c, g, or t
  misc_feature (87)..(87): n is a, c, g, or t
  misc_feature (123)..(550): n is a, c, g, or t
  misc_feature (588)..(604): n is a, c, g, or t
gcggtcgaacagggcgcaagaggactacgggaaaccttgttctatagtctgcgggtcnccactctgactgggtngatttgtgatntntcgggggccgagctttgggaaaccccgcaacgcgcnnnnnnnnnnnnnnnnnnnnnnnnnnnnnnnnnnnnnnnnnnnnnnnnnnnnnnnnnnnnnnnnnnnnnnnnnnnnnnnnnnnnnnnnnnnnnnnnnnnnnnnnnnnnnnnnnnnnnnnnnnnnnnnnnnnnnnnnnnnnnnnnnnnnnnnnnnnnnnnnnnnnnnnnnnnnnnnnnnnnnnnnnnnnnnnnnnnnnnnnnnnnnnnnnnnnnnnnnnnnnnnnnnnnnnnnnnnnnnnnnnnnnnnnnnnnnnnnnnnnnnnnnnnnnnnnnnnnnnnnnnnnnnnnnnnnnnnnnnnnnnnnnnnnnnnnnnnnnnnnnnnnnnnnnnnnnnnnnnnnnnnnnnnnnnnnnnnnnnnnnnnnnnnnnnnnnnnnnnnnnnnnnnnnnnnnnnnnnnnnnnnnnnnnnnnnnnnnnnnnnnnnnnnnaagaattcggcacgaggtggacggccgcctgctcaggnnnnnnnnnnnnnnnnnatggaccaagagttttgatttatttagggtggagttcaggatcagaatggtttcagaagctcccaggtgattccggagtgagttggagctgcaagcccctgagctagattataagatgcttctgggaaagaaccacattttaggaatttgcttcccacccagtgccctgcatttaatcagcacctgatgacttggcaggacttgccccaccagggtctggctttgaagggtagtggacaccaggatcctttggattaatcctctgccacctctctcttttcctcaaccgagagtgaatttatgtaattgagtgaaagtctacgaatcataattgtaataaattaaggctgggcatttgtttgaaattagataggataaagccaaaggtttgaacaagttgtggatggtttgtaaaaattaatcttacaaaataaatgctgtgtgtgaacacgttgattaaattcaaaaaaa

SEQ ID NO: 81914 - DNA, 1387 bp, Homo Sapiens
  misc_feature (1323)..(1323): n is a, c, g, or t
ccggaagccgccgcggacaagctctcccgggcgcgggcgggggtcgtgtgcttggaggaagccgcggaacccccagcgtccgtccatggcgtggagccttgggagctggctgggtggctgcctgctggtgtcagcattgggaatggtaccacctcccgaaaatgtcagaatgaattctgttaatttcaagaacattctacagtgggagtcacctgcttttgccaaagggaacctgactttcacagctcagtacctaagttataggatattccaagataaatgcatgaatactaccttgacggaatgtgatttctcaagtctttccaagtatggtgaccacaccttgagagtcagggctgaatttgcagatgagcattcagactgggtaaacatcaccttctgtcctgtggatgacaccattattggaccccctggaatgcaagtagaagtacttgctgattctttacatatgcgtttcttagcccctaaaattgagaatgaatacgaaacttggactatgaagaatgtgtataactcatggacttataatgtgcaatactggaaaaacggtactgatgaaaagtttcaaattactccccagtatgactttgaggtcctcagaaacctggagccatggacaacttattgtgttcaagttcgagggtttcttcctgatcggaacaaagctggggaatggagtgagcctgtctgtgagcaaacaacccatgacgaaacggtcccctcctggatggtggccgtcatcctcatggcctcggtcttcatggtctgcctggcactcctcggctgcttcgccttgctgtggtgcgtttacaagaagacaaagtacgccttctcccctaggaattctcttccacagcacctgaaagagtttttgggccatcctcatcataacacacttctgtttttctcctttccattgtcggatgagaatgatgtttttgacaagctaagtgtcattgcagaagactctgagagcggcaagcagaatcctggtgacagctgcagcctcgggaccccgcctgggcaggggccccaaagctaggctctgagaaggaaacacactcggctgggcacagtgacgtactccatctcacatctgcctcagtgagggatcagggcagcaaacaagggccaagaccatctgagccagccccacatctagaactcccagaccctggacttagccaccagagagctacattttaaaggctggtcttggcaaaaatactcccatttggggacctcactgcccttataaaaggcctttcatggatgtttttcagaaagtttggcccactgganaagtggtaaatttttccaggcccttttttatattccccttaaaaatataaggattccatggttt

SEQ ID NO: 81915 - DNA, 997 bp, Homo Sapiens
  misc_feature (402)..(426): n is a, c, g, or t
  misc_feature (456)..(859): n is a, c, g, or t
  misc_feature (878)..(878): n is a, c, g, or t
  misc_feature (968)..(968): n is a, c, g, or t
ggtaagtgtaatatgaaagagtcaagtcagatagggtttgaacccagacctgattgtctagtgctttttccaaatgaaataaccccattttatagagatttagcctcaatccaaaaccattcatgagtgctcagttataactataaatgttacctccagctaaacaggtagagtagtttagtgtgccatgagaatgctgtccctttttcaatttcagtttactgtattgccatctgccctcttgcccacacatattgatacataattgtggaataatagagtgaatgaatgtcatttcctgtatagtcatctctaagatgtaaaaatattctgttttctgcactttgctgccaactcctggactcttaacatttaaaataaatttggaaggtttaaatttannnnnnnnnnnnnnnnnnnnnnnnngcctacagccgccctcgtgccgaattcttnnnnnnnnnnnnnnnnnnnnnnnnnnnnnnnnnnnnnnnnnnnnnnnnnnnnnnnnnnnnnnnnnnnnnnnnnnnnnnnnnnnnnnnnnnnnnnnnnnnnnnnnnnnnnnnnnnnnnnnnnnnnnnnnnnnnnnnnnnnnnnnnnnnnnnnnnnnnnnnnnnnnnnnnnnnnnnnnnnnnnnnnnnnnnnnnnnnnnnnnnnnnnnnnnnnnnnnnnnnnnnnnnnnnnnnnnnnnnnnnnnnnnnnnnnnnnnnnnnnnnnnnnnnnnnnnnnnnnnnnnnnnnnnnnnnnnnnnnnnnnnnnnnnnnnnnnnnnnnnnnnnnnnnnnnnnnnnnnnnnnnnnnnnnnnnnnnnnnnnnnnnnnnnnnnnnnnnnnnnnnnnnnnnnnnnnnnnnnnnnnnnngggcagcaaaagggcagancgtaaaaaggcgcgtgctggcgttttcaatagctcggcccctgacgagatcaaaaatcgacgtaagtcgaggtggggaacggaaggatanaagaacaaggttcccttggagtcctcggg

SEQ ID NO: 81916 - DNA, 1378 bp, Homo Sapiens
  misc_feature (82)..(511): n is a, c, g, or t
tgtctgtcggttcccacctttgacttacgtcgatttgtgatctcgtcagggggcggactaatgaaaacccagcaacgcgccnnnnnnnnnnnnnnnnnnnnnnnnnnnnnnnnnnnnnnnnnnnnnnnnnnnnnnnnnnnnnnnnnnnnnnnnnnnnnnnnnnnnnnnnnnnnnnnnnnnnnnnnnnnnnnnnnnnnnnnnnnnnnnnnnnnnnnnnnnnnnnnnnnnnnnnnnnnnnnnnnnnnnnnnnnnnnnnnnnnnnnnnnnnnnnnnnnnnnnnnnnnnnnnnnnnnnnnnnnnnnnnnnnnnnnnnnnnnnnnnnnnnnnnnnnnnnnnnnnnnnnnnnnnnnnnnnnnnnnnnnnnnnnnnnnnnnnnnnnnnnnnnnnnnnnnnnnnnnnnnnnnnnnnnnnnnnnnnnnnnnnnnnnnnnnnnnnnnnnnnnnnnnnnnnnnnnnnnnnnnnnnnnnnnnnnnnnnnnnnnnnnnnnnnnnnnnnnnnnnnnnnnnnnnnnaagaattcggcacgaggccagcactagccaatctctgagacttgtgagtgtcccccattacaattctctttaagccgtaaaagttttcagaaaatgaggcactggttctagacagataatgttgctggagcagaagatctagcagagtaaagatttcatcaaaccacctccacaagaagccatagtgggtgggatttgattctgcaagaaccttgaccacatgctgaagagcgggtctcactgctgtcattaaactgtcctgtgctaccacctcaaagatggatggctggtcatcggccacagaagcagctgtgaagtgagccccgtgctcagccatagtttcctgcgtgtactggctttcacttttcccacaaactctctcgtgagcatgaactttttagggaagaagagtatcagaagagtgctcagtcttaaaggtaaacgatctgcatgatatctgaaactcgaaactcaatcttatgggcaaaaatgaactggcgaaaaaagacctggaggccgagggtagtctcaggaaggttaagaacaaagttaactcggacgtgggtggaagttgtatgtggcgagggggtaacttgtcaaatgcggcacgtcagggcagagcgtgactgtgggggacaggtatgggggaaggaacgcaatcctctggagctgcgaaccagaaacgccccctcctccccaatcgtgagagctcaaaagccagccgactctgaggattcagtcgtgccactgtgagcccgggacacgagggctgactccagctgttggctttgagtatccccgcccgcgcccgtccttgctcgcctcgtgccgaattcggcgcgccgtcgacttcatactctctcgccc

SEQ ID NO: 81917 - DNA, 970 bp, Homo Sapiens
  misc_feature (213)..(213): n is a, c, g, or t
  misc_feature (270)..(270): n is a, c, g, or t
  misc_feature (298)..(298): n is a, c, g, or t
  misc_feature (303)..(303): n is a, c, g, or t
  misc_feature (376)..(376): n is a, c, g, or t
gaaactatgatcatcattggatcctcagcgatcatcctataactcaggatctactgaggaccattgattatcgtgtgaaacatagctgatctgactatgtcatcaagactctactgagagacccttacattatcagtgtgaaagcttcattatagctataactatttagcatcagcaactcatactgaagagaactctatgaatgtactagtnttgtaaatcagctgggattcttccttttatttcatttcttttaaaaaattatttaanggtagtacatgtagttggaagactactnataanaaccatatatgtgggaaaacttccagccctctgttaattgtgtgtctcaaatttgttctggaaaagaaagggngaaagtctatgaacgacttttcaacctggcaattccatatacaatgttaaacttgatcttatgacatattcctatgaaaataataaatactggcacttttccttgcagaaagcactcagacctgaatcagagaaaatcatatgccaaagccaactgccagtgttagacctctttttccataaagagtaaatggaatgctaacactagtgggcttattgagaaaatttaaaggttgctgtagtgtttagaacttaggctggaaaaccatattttagtgcatcattttactacatgatcttccaattagatagcttgtaatctgttccttacagcacttgctgttgttacatgtgaagattttataaattttaggaaagtgtctatgatatatagtgaaaagtgtgggaaaagaatatagaaataatattcacttctaaaaccattatgataaaatatttgtgtatggattagaatagaaagggattatggatgtatctattcaatttctcagtttatgttgggccttcctttttggaatgtacgctgttatgctatgataaatgatataatgagtaaaaattattcaaagccaaa

SEQ ID NO: 81918 - DNA, 2193 bp, Homo Sapiens
  misc_feature (1450)..(1536): n is a, c, g, or t
  misc_feature (1592)..(1600): n is a, c, g, or t
  misc_feature (1618)..(2062): n is a, c, g, or t
ggggtgatggcgaggcaggctcgggaaaagttagctttatacgtctacgaatatttactgcacgtaggagcacagaaatctgcacagaccttcttatcggagattcgatgggaaaaaaacatcacgctgggagaaccgcctgggttttgcactcgtggtggtgtgtattttgggacctttactgtgcagctcctgaaaggagagacacttgtgaacattcaagtgaagcaaaagcctttcatgattatagtgcagcagctgccccgagccccgtgcttggcaacattccccccaacgatgggatgccgggaggccccatcccgccaggtttctttcagggtcctccggggtcacagccctcgccgcacgcacagcctccacctcacaatcctagcagcatgatgggaccccacagtcagccttttatgtcaccgcgatacgcaggcggccccaggcccccgatcagaatgggaaaccagcctccgggaggagttcctgggacacagccattgctgcccaattctatggatcccacacgacaacaaggccaccccaacatgggaggatcaatgcagagaatgaaccctccccgaggcaatggggcccatggggtccccgcccacagaattacggcagcggcatgagaccaccaccaaactccctcggcccgccatgcccgggatttaacatgggcccgggagctggcagaccctggcccaatccttaacagtgctaactcaattccatactcctcctcatcacctggtacctatgtgggaccccctggtggtggcggtcctcaaggaacacccattatgcccagtcccgcagattcaacaaattccagtgacaacatctacacaatgattaatccagtgccgcctggaggcagccggtccaacttcccgatgggtcccggctcggacggtccgatgggcggcatgggtggcatggagccacaccacatgaatggatcattagggtcaggcgacatagacggacttccaaaaaattctcctaacaacataagtggcattagcaatcctccaggcacccctcgagatgacggcgagctaggagggaacttcctccactcctttcagaacgacaattattctccaagcatgacgatgagtgtgtgatccccccttctccgagacgctgagagagcaggcattgcaggcgggaagatgccagaaattatgcaagaagtgaggtgtcattatccaggagctggtggggagggcatctccctgctcccctcaaccccctcccaccccatccacgccccctacctttcccaattttagtttcatgcaataaaaaggccaaactttttattccataaaacaagaaggacaaaactctcaaaaatgtatttcaagtcagtgaccagaaaaatcccaacccttgccctttccccaaaggacccttttctgtacatgacacnnnnnnnnnnnnnnnnnnnnnnnnnnnnnnnnnnnnnnnnnnnnnnnnnnnnnnnnnnnnnnnnnnnnnnnnnnnnnnnnnnnnnnnaaatggaagcttctagcaagccccccaccccaatcaacctctatgctttcttcttnnnnnnnnncctcgtgccgaattcttnnnnnnnnnnnnnnnnnnnnnnnnnnnnnnnnnnnnnnnnnnnnnnnnnnnnnnnnnnnnnnnnnnnnnnnnnnnnnnnnnnnnnnnnnnnnnnnnnnnnnnnnnnnnnnnnnnnnnnnnnnnnnnnnnnnnnnnnnnnnnnnnnnnnnnnnnnnnnnnnnnnnnnnnnnnnnnnnnnnnnnnnnnnnnnnnnnnnnnnnnnnnnnnnnnnnnnnnnnnnnnnnnnnnnnnnnnnnnnnnnnnnnnnnnnnnnnnnnnnnnnnnnnnnnnnnnnnnnnnnnnnnnnnnnnnnnnnnnnnnnnnnnnnnnnnnnnnnnnnnnnnnnnnnnnnnnnnnnnnnnnnnnnnnnnnnnnnnnnnnnnnnnnnnnnnnnnnnnnnnnnnnnnnnnnnnnnnnnnnnnnnnnnnnnnnnnnnnnnnnnnnnnnnnnnnnnnnnnnnnnnnnngggttttcataagctccggcccctggagagcacacaaaatcgacgctaaagtcaagggggggaaaccgacagactataagatacaggggtttccctggaattcctccgggccccctgttcgacctgccgta

SEQ ID NO: 81919 - DNA, 693 bp, Homo Sapiens
agttcgacggagactctcctcaaacactcaaattctagataggatgttaggaaaggcctctctgaatatgagtgtttgaggagagactgaacagagaaagggacaaaacagcacttgcttccctatggccacatggatagtccctggatatccttgctgtggtagaggtcctctacccattccagccactgatagcagggggattttccttcctaaggagaacagatgtaacagctttgcaaagtaccggcccataggaatcaaatgggtgagatcagctttgggcctgaccccagcaagaccagcatctccagaccccagcctttctcctcaggcctaagagagtcagggaaagagaggagactgtcccagagaccttctcctcgggtcagccagatagtctggatctatggtgtgactcaagctcctccttacccagggggggtaaggccaggcctctagctacttggagttgtctgtaataatcttgaaaggcccaagggcctgtccccatcctgacttaaaggcatctgcttccctgtttcatatcacatgacagagaaacctgttctcatggcatgtaacatccctgtgaagagagcgttgtatatgattttgtattttttaattcattttaatctacaggttggaatctaatttttaaattttattggaactcacattttaaaaaga

SEQ ID NO: 81920 - DNA, 904 bp, Homo Sapiens
  misc_feature (134)..(147): n is a, c, g, or t
  misc_feature (210)..(263): n is a, c, g, or t
  misc_feature (391)..(429): n is a, c, g, or t
gagctgccctgccctccataggcaactggtgcagggactgggaaaccatagacagagtccactcctcctgcctggcctttccccctctccctttccttccttccttcctttctctgcccaccaccccgctcagnnnnnnnnnnnnnncccttcacgtgcagcggcctgtaacacagtattggctggttactctcatgtagcgccttctannnnnnnnnnnnnnnnnnnnnnnnnnnnnnnnnnnnnnnnnnnnnnnnnnnnnntcctgactgagccaccagtatttatctctggagagtttgtgctgagctggtttctgctaatttagtgatgaagcctatccaagttggtgatagcttattattttcataagtaaaaaacaaatgagatnnnnnnnnnnnnnnnnnnnnnnnnnnnnnnnnnnnnnnngacagtatttatcgtagcattagtggtccagcacctcttgggtgaggctgtccaggcaccatgttttctttgagtccaactcattaaaaaagaagaatctctgtcacctcagccaagtgatttattttttgctcccccttttttgagtcacaggccgagctgcagcctaggaaacccaaatagggtttggtgggccacttagtgggcatggttacattggtttatagcatcccaagaactgtagatccctaggcccctgagagctggacagagcagagaactacagggccaagggtccagagaagtgataacttggcccagggccacacagcagaggtagagggtccttggccagcacactatctaccactctaccccacctcccactgcctgccttgctcccctttcctcccttttcaataccctatcttcccttgttgttaagatggccaaataatacatttactctaaattg

SEQ ID NO: 81921 - DNA, 1054 bp, Homo Sapiens
cggcatggaactatgaacaggttgtaaaaaaagcaggctggtacggtcggaatcccgggatatcgtcgacccacgcgtccggcatggccattggagcgatcgcaggaaggagtgtggggactgcggtggagcagcttgcctactatcaccacgactggtttatctttaaggagtggtgtgaggtcggggctgattgcattacacctggcctttatgccatggttggtgctgctgcatgcttaggtggtgtgacaagaatgactgtctccctggtggttattgtttttgagcttactggaggcttggaatatattgttccccttatggctgcagtcatgaccagtaaatgggttggagatgcctttggcagggaaggcatttatgaagcacacatccgattaaatggataccctttcttggatgcaaaagaagaattcactcataccaccctggctgctgacgttatgagacctcgaaggaatgatcctcccttagctgtcctgacacaggacaatatgacagtggatgatatagaaaacatgattaatgaaaccagctacaatggatttcctgtcataatgtcaaaagaatctcagagattagtgggatttgccctcagaagagacctgacaattgcaatagaaagtgccaggaaaaaacaagaaggtatcgttggcagttctcgggtgtgttttgcacagcacaccccatctcttccagcagaaagtcctcggccattgaagcttcgaagcattcttgacatgagcccttttacagtgacagaccacaccccaatggagatcgtggtggatattttccgaaagctgggactgaggcagtgccttgtaactcacaatgggcgcctccttggcattataacaaaaaaagatatcctccggcatatggcccagacggcaaaccaagaccccgcttcaataatgttcaactgaatctcacagatgaggagagagaagaaacggaagaggaagtttatttgttgaatagcacaactctttaccttgagggagtcatctacttttttttcctccttaac

SEQ ID NO: 81922 - DNA, 1084 bp, Homo Sapiens
  misc_feature (86)..(100): n is a, c, g, or t
  misc_feature (759)..(759): n is a, c, g, or t
  misc_feature (780)..(780): n is a, c, g, or t
  misc_feature (852)..(853): n is a, c, g, or t
  misc_feature (871)..(871): n is a, c, g, or t
  misc_feature (898)..(898): n is a, c, g, or t
gggactactacatcactatagcgacacttgtacagaaagcgggtcgcgtaagctgggccctcgagggatactctagagcggcgccnnnnnnnnnnnnnnnagagcatgagtaaagagaaagagagaaggaagaagtgcactaaggagagcgccgtcccttcttcagcattaagtgacactggatggtctggattcggttcttggctgggacaaactcgggctgaagcttcaatgtggattcataccacaccagtgctttttcaaattcttccattgccacgtagacattgcccagagtgaagtggttcacagcaaagtgtggtgcgatctctactgccatggtggctactatgacggcgtcattccagagcttggcattgtgcaagatgttggccaggctaatcaggggcacatccttcatctggtgtggcgcatagtgcagagcctggcggaggcagtcgattgccttctttccttggcctttcaccctccagtagagggctgccatgctggagaggacccaggacgtctggttcttttccaaaactttggcaattcgggtgccaatctgttcaagcgactgttgtggatattggtctttgccgagattttgtaatacctctgttaactgactctcccctgtgtagtgcaggctggctcggttggaaaccccatgcaagtggtccagggtatgcatactcgtggggagattgccattgcaaagaggctccattgctggctgctgtataggggtggaanatctatgtgttctgtgatgtncatgttttttgaggcattcgtccgggctggggcatcccagacgctggtagtcacgttttttttctttgtggnncaggagatgccacttggngccagtgatctctaaggttgctttggnacgatgtcaatttctatctgactggttctacttttttccaggagtttcttatgatctccctcggtgcgattcttggctcgagggcaattcctataggagcgtataattcggaacatgcatactgtttctgtgtgattgtatcgtcacattcaacacaacagcggagcaaatgtaagctgggggcta

SEQ ID NO: 81923 - DNA, 741 bp, Homo Sapiens
  misc_feature (43)..(43): n is a, c, g, or t
agagcatgagtaaagagaaagagagaaggaagaagtgcactanaggagagcgccgtcccttcttcagcattaagtgacactggatggtctggattcggttcttggctgggacaaactcgggctgaagcttcaatgtggattcataccacaccagtgctttttcaaattcttccattgccacgtagacatagcccagagtgaagtggttcacagcaaagtgtggtgcgatctctactgccatggtggctactatgacggcgtcattccagagcttggcattgtgcaagatgttggccaggctaatcaggggcacatccttcatctggtgtggcgcatagtgcagagcctggcggaggcagtcgattgccttctttccttggcctttcaccctccagtagagggctgccatgctggagaggacccaggacgtctggttctgcaaaggaatgttagccaaggctggtgtcctttcaagaacatactcatttattaccaagattaagttcagtaacacaagtcatgaccattcaactgagtatttactaagtgctggcactctgctcagcactttctgttccacctgtccttcattaatccttagaacaatcctgtgagcttgatactactattacagcccttctataaatgagaaaactatgactcagagagcttaagtgtctttgccaagttcactcaactactgaatagcagactatatctcatatctatcctcgtgccgat

SEQ ID NO: 81924 - DNA, 1092 bp, Homo Sapiens
tggcgtgcctctgggcagcagaaacccacaacatgaaagaaatggtgttacccatcttgagcctgtgtctatcgaactattatcagcacatttccagtctttacaaatatctaaccgaggaagttgaaaatgatcaaggagaaccctatttctatcgcaatgtaatgaagaaagtttcaaccaagaaaaagaaagaaacacttgctgctagagcggccaaaacatcaagcaatggaaactgcagaagtgaagatgatgaagcaacagaatggattacattccaactcaaatcgaccaagagaaaccacaaaagagatcataagaaaactccgtcggaaaaaaataaagaaacaggctcaagatagaaaatggacatcgttaccaagcaaacctagagatcactggccccaaggtggcatctcctgggccacaaggaaaaaaacgtgactaccagcgtctgggatggcccagcccggacgaatgcctcaaactccgctgggtagagctgactgccatcgtgagtacctggcttgcagtttcttcaaaaaacattgacatcacagaacacatagattttgccacccctatacagcagccagcaatggagcctctttgcaatggcaatctccccacgagtatgcataccctggaccacttgcatggggtttccaaccgagccagcctgcactacacaggggcagagtcagttaacagaggttattacaaaatcttggcaaagaccaatatccacaacagtcgcttgaacagattggcacccgaattgccaaagtttcggaaaacgaaccagacgtcctgggtcctctccagcatggcagcctctactgagggtgaaaggccaaggaaagaaggcaatcgatgcctccgcaggtctgaatatgcgccaaccagatgaacgatgtgcccctgattttagcctggcaacatcttgcacaatgccaaggtctggaatgacgccgtcatagtaggccacaatgggagtacagattcgacacatttgctgtgaaccatttcactctgggcatggtctactgggaatggaaaaattgaaaaagcctggggtgggatgaatca

SEQ ID NO: 81925 - DNA, 771 bp, Homo Sapiens
atcaggggttgctgttagactgtcaagcagaagtgatggatgttcaaggaggcaggttgccccaaagtgttttctaactttcaagtagagaactttatgctctaataagaaaaatcaactcattcttaaccaccccccaaaacagagaaaacacatacatttatgcattttaaagataaaaagtagtttctcaaaaaaaatctgaagttctctgaaaaccagcttattaaaagtgctgttttgtggtgaaaattgaaaccaaatccactcacatttcctatcgggtcttgaaattcttggtggtgtgtcaccattccactagatggcagtgttgcttactgagtgtcaatggcttttttccccgtaaatggaatcatgtttttctcccccaaagtacaataaagctgccttgtctgcaccattcctcgtgtaagtgcttcatatcaagttaagactgtactagagaaattaagaagagctttatttgtggtaaaagcaagctaaccaattgaccttaaaggttgaaatgcaagccacacctctgattcctagctccctgcacctgcattttaagctcctaaagtgctcagaccactgatctcagagaaggggaggaaaggaggtacagtgcccttagtcatttatcccttgtacagagtagttaaaagcagtactgtattttctgccatccagtgtgacctgtcatcagtttttacatggttggcttttaacagaaaaaagttgagttggaaaataaagtgtagatgtttc

SEQ ID NO: 81926 - DNA, 1028 bp, Homo Sapiens
  misc_feature (172)..(895): n is a, c, g, or t
gtggcaaaagaaacttaaacatactgtttcagtcacattgcattgtagtgtatggcctgtttcttgtatctttaaagacgttgctcaataaaacaaatcttgcaactgttctatgttcactacaccttcagcattggataaaaatcattttctacctcgtgccgaattcttnnnnnnnnnnnnnnnnnnnnnnnnnnnnnnnnnnnnnnnnnnnnnnnnnnnnnnnnnnnnnnnnnnnnnnnnnnnnnnnnnnnnnnnnnnnnnnnnnnnnnnnnnnnnnnnnnnnnnnnnnnnnnnnnnnnnnnnnnnnnnnnnnnnnnnnnnnnnnnnnnnnnnnnnnnnnnnnnnnnnnnnnnnnnnnnnnnnnnnnnnnnnnnnnnnnnnnnnnnnnnnnnnnnnnnnnnnnnnnnnnnnnnnnnnnnnnnnnnnnnnnnnnnnnnnnnnnnnnnnnnnnnnnnnnnnnnnnnnnnnnnnnnnnnnnnnnnnnnnnnnnnnnnnnnnnnnnnnnnnnnnnnnnnnnnnnnnnnnnnnnnnnnnnnnnnnnnnnnnnnnnnnnnnnnnnnnnnnnnnnnnnnnnnnnnnnnnnnnnnnnnnnnnnnnnnnnnnnnnnnnnnnnnnnnnnnnnnnnnnnnnnnnnnnnnnnnnnnnnnnnnnnnnnnnnnnnnnnnnnnnnnnnnnnnnnnnnnnnnnnnnnnnnnnnnnnnnnnnnnnnnnnnnnnnnnnnnnnnnnnnnnnnnnnnnnnnnnnnnnnnnnnnnnnnnnnnnnnnnnnnnnnnnnnnnnnnnnnnnnnnnnnnnnnnnnnnnnnnnnnnnnnnnnnnnnnnnnnnnnnnnnnnnnnnnnnnnnnnnnnnnnnnnnnnnnnnnnnnnnnnnnnnnnnnnnnnnnnnnnnnnnnaccgaacgcttcgcttatcggttattacgtctgtatcaaccggtaaacagactaacgccatggaccagcactgggaaaggataccacccaggatgtaggcgggcaaagttcttagcgggggctatttgttaac

SEQ ID NO: 81927 - DNA, 985 bp, Homo Sapiens
  misc_feature (100)..(100): n is a, c, g, or t
gagccagatccgccgaggtatctgaattagaagtcaaattgtcacaggaatatcatgcctaaaatgttttaaggaaccagtacacgggcacccaccatcntctgtgagaaaacagtccaaaaggctatatcattggcataaaggaaacaaaacccaaagtatgcgttgtaattcttgagccagtattacttgaaacaggataaaagttataaaatctaacataggttaatgcaatgtctctgctactgctacaagtctaaaatatctttgtaacaatgcttacagaaatgccagttttaataacatttcacattgtatatgagagatactgctttatgaatgaatcggaataatacattttcatttaaatcttaattgcttttcattaaatgcgaagtcttaatttcaaaatgaaatcacactaccagcaatagacagttttcttgaaaactctaataaggaacaatagccagttccgtaaataactttaaaattctaaaagtgttggtacactagcaatcacaaatatggtttcttttaatacttttttaatcctgtaaagaagggtttttataaacattctttttattaatcagtcataacatggcgaagtgtgtagttgctgtttctgaaaagtgatccaaactctacatccagagattatgaaaaattcttatagaattttgtaacaagtatttacatgttgggtgaaagaaatttcatagtcgttggagtgccatgaaattaatacttgcaattcagattgcggtagtttacactttttctgtatgtttcaaatcaggtgtgtaccatttgtactgagaacaccacagaatgaattatccaaagtccattgattttaatacgtgttttggtttgtaaacaaattatagtaatttcttgcacatttttggaaattaattgtataagaatttatgtatctgcttctagatacagtgtgtaaataaaaaatttcgttcacaaa

SEQ ID NO: 81928 - DNA, 1002 bp, Homo Sapiens
  misc_feature (85)..(85): n is a, c, g, or t
  misc_feature (212)..(212): n is a, c, g, or t
  misc_feature (226)..(226): n is a, c, g, or t
  misc_feature (265)..(266): n is a, c, g, or t
gaattgccccgaggcagaatcgcccgaggtgacacacgtgaaagcatgtatctcctgctgcagagagatatgccatgatcgcatntcaccactcctgatgtgatgtcatcagcagtcgtcgatatcctcagcacaaacccagctgcaaacctcatctgaagagacgattgaggagcccactgtgtgcatgctgtgagagccagtctctgtcnccaatgcacagggncctatgtgaaagtaaaagtcaagcgtgcttccctatttnntgtgtaggaagactgtccttcatctcagtcatagattgagccctggcccccatcccaggctaggccctgattctggtcacattctgaacactgagccttaatcactgaactctgattctggccccagactgagcctggatcctagtcacagactgagctttgatgccagttattgactgagccttagtcttggtcacagaatgagccccaaccttggtctcaaatggatatccatgattctgatcacatattgggccctgaacctggctccagtagtggcctcaatcaatcttttcacatctaccattgttctgaaggagggtgaggggaatgaagatgagtcagtgccaggtgctaatgaaagaccccaaaccacaggtgccagtttcttcttcccaggacttaaaccgcatggggtattgtgggaaagagctgggacactggagccaggtcaacttgggtcccatcaagtgcccagtggatgactgacagctgggtgtaagggcagcctagcagcaaatgtcctaacccccttggtctcattccagattggttcccagtggcttgccccacccccttatagcatctccctccaggaagctgctgccaccacctaaccagcgtgaaagcctgagtcccaccagaaggaccttcccagataccccttctcctcacagtcagaacagcagcctctacacatgttgtcctgcccctggcaataaaggcccatttttgc

SEQ ID NO: 81929 - DNA, 1013 bp, Homo Sapiens
  misc_feature (27)..(27): n is a, c, g, or t
  misc_feature (74)..(74): n is a, c, g, or t
  misc_feature (99)..(100): n is a, c, g, or t
  misc_feature (103)..(103): n is a, c, g, or t
  misc_feature (194)..(194): n is a, c, g, or t
  misc_feature (207)..(207): n is a, c, g, or t
  misc_feature (224)..(224): n is a, c, g, or t
  misc_feature (326)..(326): n is a, c, g, or t
tccgattatccgctccttagggattgncctcggccaagattcgcacgagagactcataaatttattgacaaatntctgtaatgtactcattgtaaactnntangaaaagatgtactagaaaagttgtgtggccacacacagatgacccttgagttgggcagccaaagtagaagctaagcttgacaggcactgcncagctgacagtcncaggttgaaggagacgnaagcaggaaaagcaatgcagtctgttctcatcccggacaatattcttaatctcatcagctccccctaattctgactccatccagctttgtcagcagcaaacncctcccaaactaagccccactcagaaatgtcactgagcattctgatgctagagctaatagccagggtgactagcacaccatcaccatcagctgccagtctgattgttttgggttctggcccccaataacatcttttcactcttcacacctcacatccggtgtgctctgcccttctctttccattgccgcagcttctcatcagatccaaagcttaggatggggcacctaagcttcgagaacattcatcccaagtcttccctgctcttaggctcttccccctctccttaaggggttataaacaactagacgcatctctctcagaaacccacaatccgaggcatctactttcaacccttgataaattttgaaggcttctactaagtaatgccacttcttttcccccactagaacttacctatgggaaatcaccttcttttctcttccttgccttgtcttcatcatccctgcagacagactcttcaagaggaaaaacctccagaaagagacactttggatagctaagtatcccaaaggattttacccttttaaacaaaaccaaagcatttttttcggtatcgattattttgagattattctcaaatgcctctttaaacatcatttcatggaaaatgtcaaattgaaaatataccttatttaacaaattgaaaataaaaaagatttcatctc

SEQ ID NO: 81930 - DNA, 693 bp, Homo Sapiens
  misc_feature (513)..(579): n is a, c, g, or t
ttaagaaaaggaattcttttgtgtatatatagatacttgcatgatatactgtagtcaatgttcggttcctcaaaaggtcttgctgctgtcaggtgttatgcactccatccatcataactgtatgaaacacatttcatatgtaaataaacgtgggacatttggcccttgtgcttctgtgagagaattattgatggtgggtctctgacatctttgtgaagtttgggaagtaattaattgcagcgacaagctacagggtgttgcagaattcttcccactcagaagaatggcatattcgttctcattagtaatcagctattttgtcactttcttgttgactccatcagtacatgggtacaatccgagggtgtgaatttcagcttgaaattccattgctgttccttgttttgtttgtattgctctaagttgtattcataatagcactttcatatgtttctgcatttgaaccttgcaataagcctgtgtggtaggccacataggtccgaataacctagnnnnnnnnnnnnnnnnnnnnnnnnnnnnnnnnnnnnnnnnnnnnnnnnnnnnnnnnnnnnnnnnnnntttgcatattagaacccaaatattttgctctctaaatctaatgctcgctctatgtggttatgtacatattgacaaatattcatttattcaacaaataaaaagtatgtacaaaac

SEQ ID NO: 81931 - DNA, 1298 bp, Homo Sapiens
  misc_feature (61)..(83): n is a, c, g, or t
gtgccatgctcgaattaaccctcaactaaagggaataagcttgcggccgcggctgtaggcnnnnnnnnnnnnnnnnnnnnnnnaagtacaatacatttatttttaaaaatctatttatttatcaaaacagtattggcacagtaattctcatattatcatcaaataataaaattgctactttctgtactcaattctttagaatcctagaaattgcaaatgcattcaatttaacaatattgtaaataacaatacaaaagaaagaactctgcatatttatggaaacattgttgatggtacagttctactgaaactcatacacatttcactatttaatttacatatggtcttgttgaaaaaaaccagtatgttttactttttcaatttccttatgctaaaatacatgtaattctaaaggatatctcttaggtgttataaaaaccaaggaaggtccaccaccaagtcaaagttagagtcaaagatacttcaaagattccatgaaatgatctgaaaacaaatttaaccaaaaaatgtgtactgtattggggcacatccatggccacccaaactgtattctatctctgactgtggcatcaaagaaaggtatatggaattataactgaccttcatgatattgctccaaagtggattgactaacactttcccctcttgacccaacatcccaagttttccttaataacgcaaacatcagtcatttacatattgctttgagtctttctaaaacttatctgtagttttaaactgcctcatatagaggatcacaaattaagtttactatgctgtatgtacagagatcttttctttctttattccaaactaccttattcaaataattaagagaagcatttagcagggcatttcagagagcaagaagcgcccttaaaagaaggaggtggggggtttccttaaaatatgaagaaatgctaaagctgggttataaaatatggtgctgcatctaaatatttacattcaattatcatttaaccgaaaatacacaatacaatctaattctgcaaatttcaaaagatttattaaaaatgcaatagtgtatgaattatattcctttcttgtgtctctgtgagggcagattcgacttcatttggaatgatctcaaaaatctacccttgaggtacttcatgaatgtgaggcttaaaccaaatggtatgaattatattccttttccttttgtatctctgtgagggcagatttattcatttgaccattcattcatttgaccagagaccattcatttggaatgctctcaaaaatctacccttgag

SEQ ID NO: 81932 - DNA, 1068 bp, Homo Sapiens
  misc_feature (107)..(107): n is a, c, g, or t
  misc_feature (987)..(1006): n is a, c, g, or t
tgattggcgctaatccacggacccttcctgtacgatcaccgaccgttaggaatgcctgagccagattcgccgggtaacaataaactaaaaataagtaagccccatcntcaaactgggaatatttccgtaaattgacaaaggctgtgactctctgcaacaccccatttaagaatgagctaggctgcacttaatgacctgataaaatgtcccacgaaagacacatttttttaaacataaggtcctattgttatatatatgctaacgtgtgtctagaaaagctctagaaaaatacacactgaactgtgaatagcagttatatttagaaagcaacattaggatggacttaagtcagggctcggactagagcaaggcaagtgaggtcccaggatgcaaaagttaaggagacacctgacctcaggggcccacaactgcagagcccctgacagtgagtgtctcagtagcctcgccctagtcctggctttcacttaaatatgttttcgaatgtttgtaataaaatatttcttttggaaggcaaaaatagcaaggaaaataaataggattaaaggatcctaaagcccattcaataaaatttgtaggaggccactgatttggcctaggctcctatgatgtaaccaacagaccaaaccaatatggagtcattcatgctaaatgaaactagttaggagtatattcatataacaagtggctaagtgtcagttacagcctctgagctttagtcaattgtaggtggtcaatagattcagataaggcaatccagttaaactgtatatcccacttgctgttttctgtccctaaattctctctgagtacactgcagccctgaagttctttgaacctgttctgggttctgagggctgtccaattactgaatcatacataaaagccaagtaagattttaaaatttgttataattttggtttttaacaacttctgttgtaaataataaaagcactaaatccctactgnnnnnnnnnnnnnnnnnnnnccgagcaggcggccgcaagcttattccctttagtgagggttatttgagcatggcactgcccg

SEQ ID NO: 81933 - DNA, 2003 bp, Homo Sapiens
  misc_feature (1334)..(1390): n is a, c, g, or t
  misc_feature (1619)..(1619): n is a, c, g, or t
  misc_feature (1632)..(1632): n is a, c, g, or t
  misc_feature (1636)..(1636): n is a, c, g, or t
  misc_feature (1748)..(1748): n is a, c, g, or t
  misc_feature (1878)..(1878): n is a, c, g, or t
ctcctcttttgggtccctttaagtagttgggatattttggacctggagataacaccagttacccatccttaccagggaatgttgccatcaattccagttgaaaataatagaaaagactgaatttttatatgcttcacttaggctttcatttgagtagactctaaaaattctgccttgcttaagttctaacactgcctctcagatttcagttttggacattgcacaactaagaccttttaaacgcatttgcttgctaactcggaagacacatagtctgcagcaagacattcctatattgaagaaatgagagaaaattttatgctgcatcacgtggagagcaaagctcaacggtggttgcattagttccctcggaagtattgaaaaaactttgaaatggaagaaaatttttgcacctatgttctgagtaccagatgtctgggttctttcttctgcattagataaatgatcatgctcagtgtaacaaagggaattaaaagttttcccacagtccccttctaggagagaaactcattgtgtcactgaaatgtttagcttactttaatcttgatatcagcctctacagaccttttattctaagctatcgagcttcttgattgcatttggttgaccacgagtgaccctaaggcattgggggactgtccactgggagttggagtgagcacgtggtgctgcaacaggcattgttttacatactttgtctccagtattctgacaccaagtgtcaactgtggtactttctttgcctaggatatgaattcataattgttgcttttgttgatggttgataccctttccattgatttaaacctaacacattatttctattccacatgcccagtagacatatattccaaagccactggaccacttgagtacataagtgccactgtttaatgcaatatgtatattcaggtctgtaaagctaacagtgtgacttggagtgcttcctgcagatgattctgacttgagtatttacatggaccatggtgatatccaaaagaaaaatgctttttatatttatagattatttcattgaactatatatgaaatgggtatcaataaatgtatttactccaaacgaagagtgcgcgcaaaccaccggtgcacatacccatcccaaaactctgccagaaacctaccaaaaaacaagaagcacgcggactcccgctcccacaccactcgaaagccttgccgagtgatcaggcgagaacaccgagcgcccgtcccgtcctctgcgaaccaccgcccccaaccgtgtgccctctccaaccacccctgttccgccggcccctcctgcattccgccttcgtcgnnnnnnnnnnnnnnnnnnnnnnnnnnnnnnnnnnnnnnnnnnnnnnnnnnnnnnnnntccgccgttaccttcatttggaagacctttccccgcacgcgccgatctcacgtcgttttattccgcgtcccgataccgctaaccggccgtcgcccgccccgtttgccgtaccaccccacctctccatttttccacctatgattgcgcgcgtattgcgggtcgccgcgctggtcgcccgccgattcgtggacagccgcgccgcgtgcgcgtttaaggcgcgcgcgccgtntcgttccgcgctntctntaccgcgtaggcccccctcgtactcctcgcgcggagactctagtgtgtccgttatgccgccgccgttctcttatacccacccgtgttgtccacgctgttcgccatcactcgnttggatcacgccctatattataccgggcgcggacgcgcgcctagatccgcgcattcgcgcctattattcatccgcgccgcgcgcagaatatataccgcgattattgtccactatttatgcactatgcggngcatgagatacgcgccagtacacacgctcagttatggcgccgcgcgatatctgttctcgcgccggcaccgctatttatttcccgcccactattttcgcgcccgtaccccgcgcccggtacttccc

SEQ ID NO: 81934 - DNA, 1079 bp, Homo Sapiens
  misc_feature (61)..(80): n is a, c, g, or t
  misc_feature (743)..(743): n is a, c, g, or t
  misc_feature (745)..(746): n is a, c, g, or t
  misc_feature (812)..(812): n is a, c, g, or t
  misc_feature (877)..(877): n is a, c, g, or t
  misc_feature (888)..(888): n is a, c, g, or t
  misc_feature (952)..(953): n is a, c, g, or t
  misc_feature (968)..(968): n is a, c, g, or t
agtgccaagctaaaattaaccctcaactaaagggaataagcttgcggccgcctgctcaggnnnnnnnnnnnnnnnnnnnngagcagaaaggatgctttatttgcaaaagagtggtgaaacatctaaaaagttgacattgtatatgattacaaagtaaagagtactcttgtgagagaagttacatgttcattgttaaggaaattatatgtaaatcacaaagatcatggtctgtgaataatgtgccatatctcacaaaatatggtcattggaatcttattaaaattatctacaggtgacttcagtttccattctccaccctctgccttaagatacgaagccttgacatgaccacatcccagtcagcataagctccttctagatggcgggatatctcagttcctgcttcatagctacgtcggccatgaagtaagcgccagttatcaaaagtaatcacatcacctggattcatcttgaaggtaaacttggattctttgctgttcatgaggtcaacaaactccttcagagcagcataaaaaggctgaactctttcaacaggcacatcaaatattgtgtccctagttgcgttattgaagttgatgcgaaccacttggcctttatcatctaactctataattttatgttttgattgtacagaaaaatcacagtaatccactccaatgtctgtaaagtccacaaaggtagaggacaaaatctggaatgcctgaggattatttttctttagntnnttggacacattaaacccatctacaatttctgaatcacccctgtgactgtttgctttatgcagtgangaagctgaccccaggtggatgatggagggctggatatcagtgtgaaagctagcttccagttgtgntagcacattgnttgatcgatttgtctgcacttgcagtatgtcataaatgtgagaagaggaaaccatcctttccanngttgaactctctggnttgcaatgctcgggagctacatgctacttctgaggtggaagcactgatgcggtcatcaatctaaatctcaaatcaagtggtactgagtcgagccatatggatctggaaaat

SEQ ID NO: 81935 - DNA, 809 bp, Homo Sapiens
  misc_feature (630)..(630): n is a, c, g, or t
ggggctgggaaagcgcgtccccgccgcggctccgccagtttgaacttggcgggccagatgtgggcggcggggcgctgggggcctacttttccctcttcctacgccggtttctctgctgactgcagacccaggtctcggccctcctcggactcctgctcagtccctatgacgggcgcacgtgggcaggggctggaggtggtgcgctcgccgtcgccgccgctgccgctgagctgcagcaattccaccaggtcgctgttgtctccccttggccaccagagcttccagtttgacgaggacgacggtgacggggaggatgaggaagacgtggatgatgaggaagacgtggatgaagatgcccatgattcagaggccaaagtggcgagcctgagaggaatggagttacaggggtgcgccagcactcaggttgaatcagaaaataaccaagaagaacagaaacaggtgcgcttaccagaaagccgcctgacaccatgggaggtgtggtttattggcaaagaaaaagaagaacgtgaccggctgcaactgaaagctctagaggaattaaatcaacaactagaaaaaagaaaagaaatgggaagaacgtaaaaacagcctctgaaatttaaaataaantgaacatgtccggcccgccctcggccccctcgagaagcttttctagaacccattccgttttgggcgcggccgggccccagttagggtaagggtgaaacctgggcgtcatagcctggttttcccaagggaggatccctgggcacttgaaccaagtggccttgggattcctccaccacaat

SEQ ID NO: 81936 - DNA, 1380 bp, Homo Sapiens
  misc_feature (1297)..(1322): n is a, c, g, or t
tgaattcaagaaatctcgagtgctggacttcttcaggagaattgataaagaccaggatgggaaaataacgcggcaggaatttattgatggaattctttcctcaaagtttccaaccagtcgcttggagatgagcgcagttgcagacatctttgacagagatggcgatggatatggtgactactatgaatttgtagcagcccttcacccaaataaagatgcatataaacctatcacagatgccgacgaagaatcgaagatgaggtgacaaggcaggtagctaagtgtaaatgtgcaaagcgatttcaagttgagcagattggtgataataaatacaggttcttcctgggaaatcagtttggagactcccagcaactgcgactggtccggatcctgcggagtactgtgatggttcgtgttggaggtggatggatggcacttgatgagttcttagtgaaaaatgatccttgcagggccaaaggaaggacaaacatggaactgcgtgagaagttcattttagcagatggtgccagccagggtatggctgctttccgaccccgaggccgaagatcccggccatcatcacgaggcgcttcacccaacagatccacttctgtgtccagtcaggctgcgcaggcggcctccccacaggtccctgccaccaccacacccaagattctccatcctttaacacgcaattatggtaaaccatggttgacaaacagcaaaatgtcaactccttgtaaagcagcagagtgctcagactttcccgtgccatctgcagagggaacgccaatacaaggaagcaagcttcgacttccaggatatttatcagggaaaggcttccactctggggaggacagtggcttgataacaactgcagctgccagagtccgaacacagtttgctgattccaagaagactcccagccgaccaggaagtcgagctggaagcaaagctggcagcagggccagcagccgccgaggcagtgatgcatcagactttgacatttcagaaatccagtccgtgtgctcagatgtggaaactgtcccccagacacacagacctacaccccgagcaggttctcggccatccacagcgaagccttcaaaaatccccacgccccagaggaaatcacctgccagcaaattggacaagtcctcaaagagatagtgcaattggttctaccaaggcccttccttgagcatttattatttaagtttgaacgatgtaaaatatggtgtagaaattcttgtgaaatattgcaagaggcgagtttaaaattctgcagatggccttnnnnnnnnnnnnnnnnnnnnnnnnnncctgagcagcggccgcaagcttattccctttagttgagggttaattttagcttggcac

SEQ ID NO: 81937 - DNA, 1446 bp, Homo Sapiens
ctgggctccacgtccagcctgggacctggcatctctgggcctcgagggcaggccccggacacgctgagttacttggactccgtgagcctcatgtctgggaccttggagtccttggcggatgatgtgagctccatgggctcagattcagagataaacgggctggccctgcgcaagacggacaagtatggcttccttgggggcagccagtactcgggcaaaggacaagaaaacaacaggcccgaagaaatcgctaggtacgatgctgggtgttaaatcggcacgaggacatgttcagtaactgggataagtggctgtcacggcgattccagaaggtgaagctgcgctgccggaaggggatcccctcctctctcagagccaaggcctggcagtacctgtctaatagcaaggaacttctggagcagaacccaggaaagtttgaggagctggaacgggctcctggggaccccaagtggctggatgtgattgagaaggacctgcaccgccagttccctttccacgagatgtttgctgctcgaggggggcatgggcaacaggacctgtaccgaatcctgaaggcctacaccatctaccggcctgacgagggttactgccaggcccaggcccccgtggctgcggtcctgctcatgcacatgcctgcggagcaagccttttggtgcctggtgcagatctgcgacaagtacctcccaggttactacagtgcagggctggaggccattcagctggacggggagatcttttttgcactcctgcgccgggcctccccgctggcgcatcgccacctgcggcggcagcgcattgaccctgtgctctacatgacggagtggttcatgtgcatcttcgcccgcaccctgccctgggcgtcggtgctgcgtgtctgggacatgtttttctgtgaaggcgttaagatcatcttccgggtggccctggtcctgctgcgccacacgctgggctcagtggagaagctgcgctcctgccaaggcatgtatgagaccatggagcagctgcgtaacctgccccagcagtgcatgcaggaagacttcctggtgcatgaggtgaccaatctgccggtgacagaagcactgattgagcgggagaatgcagcccagctcaagaagtggcgggaaacgcggggggagctgcagtatcggccctcacggcgactgcatgggtcccgggccatccacgaggagcgccggcggcaacagccacccctgggcccctcccccagcctcctcagcctccctggcctcaagagccgaagctcccgggcagctggaggggccccgtccccgccgccccccgtccgcagagccagtgctgggcctgccccagggcctgtggtcactgctgagggactgcatccatcccttccctcacccactggcaatagcacccccttgggttccagcaaggagacccggaagc

SEQ ID NO: 81938 - DNA, 1333 bp, Homo Sapiens
  misc_feature (97)..(144): n is a, c, g, or t
  misc_feature (968)..(1193): n is a, c, g, or t
acagtttgcagaaattaataaagatgggacctcaatacccagtgaatcttcaacagaatctcttaaagatctccaggaagttaagagtaaacaaagnnnnnnnnnnnnnnnnnnnnnnnnnnnnnnnnnnnnnnnnnnnnnnnnccaagtcccatatgtggtagaaaaggaagagcagttgaggaaagaacaagcaaatccacactcagtcagtagacttataaaagatgatgcaagtgatgttcaagaggattctgcaatggaagacaagttctatagcctggatgaattgcatattctggacatgatagagcagggctcagctggcaaagtaactacagactatggagaaactgaaaaggaaaggcttgctcgtcaaaggcagctttataaattgcactatcagtgtgaagatttcaaaagacagttgagaacagtgacttttcggtggcaagaaaaccaaatgcagattaaaaagaaagacaaaattatcgcatctcttaatcaacaagttgcttttggaatcaataaggtttccaaattacagcgtcaaatccatgctaaagataatgaaatcaagaaccttaaagagcaactttctatgaaaagatctcagtgggaaatggaaaaacataatctggaaagcacaatgaaaacatacgtaagcaaactgaacgcagaaactagcagagctttaacagccgaggtgtatttcttacagtgtcgtagggattttggtttgcttcatctagagcagactgaaaaggaatgtctcaatcagcttgccagggtgactcacatggcagcaagcaacctagaatcacttcaattaaaggctgcggtagacagttggaatgccattgtggcagatgttagaaacaagattgcattcctcaggacacagtacaatgaacaaataaacaaagtcaagcaaggatttgccttgacctcgtgccgaattcttgggnnnnnnnnnnnnnnnnnnnnnnnnnnnnnnnnnnnnnnnnnnnnnnnnnnnnnnnnnnnnnnnnnnnnnnnnnnnnnnnnnnnnnnnnnnnnnnnnnnnnnnnnnnnnnnnnnnnnnnnnnnnnnnnnnnnnnnnnnnnnnnnnnnnnnnnnnnnnnnnnnnnnnnnnnnnnnnnnnnnnnnnnnnnnnnnnnnnnnnnnnnnnnnnnnnnnnnnnnnnnnnnnnnggggagagggggttgcgtattggcgctctccgcttctcgtcatgatcgctggctcgtcgttcgtgcgggacggtacagtcaccacgcggaatcggttcaagatccggatagcagatcacatgtgcaagcagacagcagac

SEQ ID NO: 81939 - DNA, 489 bp, Homo Sapiens
  misc_feature (400)..(442): n is a, c, g, or t
tctgtctctagcagcatgatcttcaaaatgcatcattgatttctatcttctgggaaatgcaatgcaggtgaacttgaggaaatcagtggtgcttcaggatattgtgaatttgggcttctgaaagcagaattctgatttaacagtataatggaattcgtgaacgtcatgatgctaatttgaaccaacaagcacccttgtgagaggaatctgcttttcctcaagtctgaagaacaccaggagaatctttctgtatggagttaccaggaatcctctgctaaggaaagtgaaagggaagatgcaatttctcctgggaaggggggatgctgatgtagagggtgacaagtaatatgccatgaaggattcagtcacctggttagatttagagttagagttatggttnnnnnnnnnnnnnnnnnnnnnnnnnnnnnnnnnnnnnnnnnnncaagaaaagataaaatttattctaagataaaatttgtgaattttgct

SEQ ID NO: 81940 - DNA, 1063 bp, Homo Sapiens
  misc_feature (319)..(613): n is a, c, g, or t
  misc_feature (991)..(1005): n is a, c, g, or t
gcgcccacaaacaaaccaacccccataaatggcagccagtctccgaggaaaactcacgagaggtacagcagcgaacaggaaaactggagacacccagggaaggaatgaacgtcaaacctacgggatcccccaatgactcacaacaccatgtatctgcacggggacggacgagtgaaaaagccaaacagaccattaaggagcctgcatgtcaggcctatgataaaaattattctcacaaatccctgatcattggagcacatatcccccccgtgagtgagctgaacccctcaccgcaccagaacgacccgggcgacaagcnnnnnnnnnnnnnnnnnnnnnnnnnnnnnnnnnnnnnnnnnnnnnnnnnnnnnnnnnnnnnnnnnnnnnnnnnnnnnnnnnnnnnnnnnnnnnnnnnnnnnnnnnnnnnnnnnnnnnnnnnnnnnnnnnnnnnnnnnnnnnnnnnnnnnnnnnnnnnnnnnnnnnnnnnnnnnnnnnnnnnnnnnnnnnnnnnnnnnnnnnnnnnnnnnnnnnnnnnnnnnnnnnnnnnnnnnnnnnnnnnnnnnnnnnnnnnnnnnnnnnnnnnnnnnnnnnnnnnnnnnnnnnnnnnnnnnnnaagaattcggcacgaggggtctggccctgcagttgggactaaacttatatgcacctgcaggtcttgttgggtgcaccgtgagcaagttctcaccccaaccacctgacccaccctctgaaacaaggacgaaagggctggcagctttcattataaggggcttctcatacccatggcatggctgaggggtgggagtcagcctgctcgatgacacgtctgcaggggatgacctaactgaaccaactcagtgtttctattcccagtggcatctcttttgcacatcttcattttggagcctgggatgactgcctaggccacttatgctagacctgttaatgccagtgtgaaatttccaactaaatacttaataaaataataacnnnnnnnnnnnnnnngcctacagccgcggccgcaagcttattccctttagtgagggtaatttcggctaggcac

SEQ ID NO: 81941 - DNA, 881 bp, Homo Sapiens
  misc_feature (822)..(830): n is a, c, g, or t
caactcgccgaggcatcctaactcacagacgacaagctaacaacacggaaactagcgtaggtggacaaataaaccatcaactcttagcaactcgaagaagaacaagctctcatccaccaccaaattaagatacagccccactgaagtccaaaattgtccacatcgtgcagcgagattctattgacataatcaggttatgccaacacgccttcctcatgactcaccaccataacaaaaagtatggcccgataaactgcaagattggacccaagcctatcttataaggttcaattcaagctttgagcctaaatgaaaatgaccacaagattgggttacccaaagtatttttttagacctggcaagtttgcaagaatttaatcagatccatgaagtctgaccctgaccactaagcagagttggttaaaagagtcaatcactggctcacatgcagtcgatggaagaaagttcagtggtgctcactctcagtcatcaaattgaaaaacaaaataaaatatcgagctgaagcctgcattaaaatgcaaaaaactattcgaatgtggctttgcaagaggagacacaaacctcgcattgatggtctggttaaggtgggcacactgaaaaaacgacttgataaatttaatgaggtagtcagtgtgttgaaagatggaaaacccgagatgaataaacagatcaagaatctggaaatttctattgatactttgatggccaaaattaagtccactatgatgacgcaggaacaaatccagaaagaatatgatgcactggttaaaagctcagaggaactcctcagtgcattacagnnnnnnnnncagcaggaagaggaagcagaaaggctgaggcgtattcaagaagaaatggaa

SEQ ID NO: 81942 - DNA, 1033 bp, Homo Sapiens
  misc_feature (43)..(57): n is a, c, g, or t
  misc_feature (80)..(126): n is a, c, g, or t
  misc_feature (267)..(283): n is a, c, g, or t
  misc_feature (301)..(840): n is a, c, g, or t
ccctcaactaaagggaataagcttgcggccgcggctgtaggcnnnnnnnnnnnnnnncaaatacagaataactcacaggnnnnnnnnnnnnnnnnnnnnnnnnnnnnnnnnnnnnnnnnnnnnnnngcctctaaggtagaattgcctcaaacattttagtgcatttagaataactgtagcttcttagcatcaaaacctttgggatatcaactgtgctctttaagtcatggcaaaattataattttacattctagtatgtaattatgnnnnnnnnnnnnnnnnncctcgtgccgaattcttnnnnnnnnnnnnnnnnnnnnnnnnnnnnnnnnnnnnnnnnnnnnnnnnnnnnnnnnnnnnnnnnnnnnnnnnnnnnnnnnnnnnnnnnnnnnnnnnnnnnnnnnnnnnnnnnnnnnnnnnnnnnnnnnnnnnnnnnnnnnnnnnnnnnnnnnnnnnnnnnnnnnnnnnnnnnnnnnnnnnnnnnnnnnnnnnnnnnnnnnnnnnnnnnnnnnnnnnnnnnnnnnnnnnnnnnnnnnnnnnnnnnnnnnnnnnnnnnnnnnnnnnnnnnnnnnnnnnnnnnnnnnnnnnnnnnnnnnnnnnnnnnnnnnnnnnnnnnnnnnnnnnnnnnnnnnnnnnnnnnnnnnnnnnnnnnnnnnnnnnnnnnnnnnnnnnnnnnnnnnnnnnnnnnnnnnnnnnnnnnnnnnnnnnnnnnnnnnnnnnnnnnnnnnnnnnnnnnnnnnnnnnnnnnnnnnnnnnnnnnnnnnnnnnnnnnnnnnnnnnnnnnnnnnnnnnnnnnnnnnnnnnnnnnnnnnnnnnnnnnnnnnnnnnnnnnnnnnnnnntcccctggagctcctcgtggctctctgttcgacctgcgcttacggaactgtcgcttctcctcgggagcggggcttctcaactagcgtagtaccatcgggtagcgtcgtcactggtggtgacaccgtcagcgcgtggctacggtatacgctgatcacgtaaacatacgcctgacactggaagataaagagaggg

SEQ ID NO: 81943 - DNA, 988 bp, Homo Sapiens
gagggcgagacgacagcagacaatacaacagcgaggacgcgtgcgcacagaagccgagaacgacgggatatgaacacagaaaccacaataagagagtgcaacgaagcaacacagatagacaaacgaaatgactagtgaccaagacgcgatggccgccccaacccaacaccctctcccgcgctgcgccacaaatatgccagagaccagccggtacccgagtggaagcggccgtgaggaaaagcaaattatgtggatagacactcttgggcacaccaggataacagttatgaacccagaacaaatagcgtttagaactgtgggcggataacaattacacacaggaaacaactttgacatgtccacgaaataataagactcaaatagagaaatgcccctcgagaccaagattacggcacgaggcaggtatctcatctgggtcaggagcatatctagggacatctgtgctgcaatcagtctagaaaacctgcttgtcatagccaagccactgctgtgagctcctggcctccagtttagaaggaaacctgctgtccaaactaagatgctgtcctgacagttcccagcttgcagctactggtccacgcttatgttcgcctgccaaactccgctcccgctctttcttctctgctgtgacaccctccaaggctgcaactttcatccgtaatggattcgtttacacttggtcaaggctctcgacaacagtgggaccaaaacccagaggttcacagaaactacaatagtcaccgtgagtcaggccagtctgcccagaggatggcctgcaggactgcccacagcatttggaggccaggcctcagctgcatctctgaagcccaggcaaaggcggccctggggaaggtggaacaccagcatttctactgatgctctggggtcctgcagaaccctgactgtgccacagaccttctgtaccgtgtccatttccatataatctaataaatccttcttacaaagg

SEQ ID NO: 81944 - DNA, 1444 bp, Homo Sapiens
gcggccgcggctcagccgtgggctctaacgcggggctgggggccggagacagacttcgcccaggtgacgggtagtaggggcggcgccgcttggcctcgtggggtgtaagacccacttgctgttgcccccggaccttgccgccacaccagccctgtcctggggcggaaccgaaggaaggtcgggccctgctgccccgccccgtccttcctccttcccgggcggtcactgtgcgtggctcacttttagagtttacttcaaccacgtggagcttccatggcggcctctcaggtcctgggggagaagattaacatcctgtcgggagagactgtcaaagctggggacagggacccgctggggaacgactgtcccgagcaagataggctcccccagcgctcctggaggcagaagtgtgcctcctacgtgttggccctgaggccctggagcttcagtgcctcactcacaccggtggccctgggcagtgcccttgcctacagatcccacggtgtcctggatcccaggctcttggtgggttgtgccgtggctgtcctggctgtgcacggggccggtaatttggtcaacacttactatgacttttccaagggcattgaccacaaaaagagtgatgacaggacacttgtggaccgaatcttggagccgcaggatgtcgtccggttcggagtcttcctctacacgttgggctgcgtctgtgccgcttgcctctactacctgtcccctctgaaactggagcacttggctcttatctactttggaggcctgtctggctcctttctctacacaggaggaattggattcaagtacgtggctctgggagacctcatcatcctcatcacttttggcccgctggctgtgatgttcgcctacgccatccaggtggggtccctggccatcttcccactggtctatgccatccccctcgccctcagcaccgaggccattctccattccaacaacaccagggacatggagtccgaccgggaggctggtatcgtcacgctgaccatcctcatcggccccacgttctcctacattctatacaacacactgctcttcctgccctacctggtcttcagcatcctggccacacactgcaccatcagcctggcactccccctgcttaccattcccatggccttctcccttgagagacagtttcgaagccaggccttcaacaaactgccccagaggactgccaagctcaacctcctgctgggacttttctatgtctttggcatcattctggcaccagcaggcagtctgcccaaaatttaaggggacaagtagctccccccacgacatgtctccctttcttagaatatattaaagtcagagtctctgaggaaggaatgtgatttggcagtcagggtactaagccatgggtgggaactcctgccttataaaaattgtttttgtgttcttaaagata

SEQ ID NO: 81945 - DNA, 1073 bp, Homo Sapiens
  misc_feature (65)..(65): n is a, c, g, or t
  misc_feature (194)..(194): n is a, c, g, or t
  misc_feature (201)..(201): n is a, c, g, or t
  misc_feature (272)..(272): n is a, c, g, or t
  misc_feature (999)..(1024): n is a, c, g, or t
ccgacggtgccgaatggattccttcccccccatgaaaggagagatccacgggccaagcaacgacnttaagcgatgatccgtgcctttactaatccagggaatagaggtgtgataccctctcagacttgacattcagagcccccagaatgacccctgagtcgagtgagtgtgtgctgaaaacgatatacatgtcnccaaatnagtgcgtactcgtctccatgacaaagccacaaccagagtacctgtcacaaaccgtgccgccaactgcaacntgcatgtgcctggtcccatggctgtgaatcagttctcaccgtccctggctaggaggcctctgttcggcctggggagctgtggcatttctcctcccctggcgggcaccagctccttagagcctggctactctcatcccttccccgctcggcacctggttccagagccccagcctgatgggaaacgtgagcctctcctaagtctcctccagcaagacagatgcctagcccgtcctcaggaatctgccgccagggagaatggcaacccaggccaaatagctggaagcacagggttgctattcaacctgcctcccggctaagtacactataagaaactaaatgtatctcgtggatctgccagtaccagccttccaaatgaaactctttcagagttaaagacacatgggaaatactcacttacaccaccaaaccactggggccacccacatcgatacctgcagcatctttagtcaagttggaggagaaagacaacacttggtctaagacacggcagcaagacatccctgcatattgttccagataaaaatgaaagctgctcacacccacttgcctccccaatctgttaaacagcttcgtgtctagtatgagctcagtacttgccctgtgaaaatcccagaagcccccgctgtcaatgttccccatccacaccctgcttgctcctgtgtaacagctcagatgatgaataataataaaactgtacttttttggnnnnnnnnnnnnnnnnnnnnnnnnnncctgagcagcggccgcaagcttattccctttaggtgagggttaatttta

SEQ ID NO: 81946 - DNA, 1103 bp, Homo Sapiens
  misc_feature (35)..(35): n is a, c, g, or t
  misc_feature (67)..(93): n is a, c, g, or t
  misc_feature (866)..(866): n is a, c, g, or t
  misc_feature (936)..(936): n is a, c, g, or t
  misc_feature (948)..(948): n is a, c, g, or t
  misc_feature (982)..(982): n is a, c, g, or t
  misc_feature (1018)..(1018): n is a, c, g, or t
  misc_feature (1026)..(1026): n is a, c, g, or t
  misc_feature (1039)..(1039): n is a, c, g, or t
  misc_feature (1073)..(1073): n is a, c, g, or t
  misc_feature (1080)..(1080): n is a, c, g, or t
cgggcagtgccaagctaaaattaaccctcactaanagggaataagcttgcggccgcctgctcaggtnnnnnnnnnnnnnnnnnnnnnnnnnnncccatttggtcccaccaaggccatttaatttctctgtaaagggtaagatgacacaaaagagccaactatggaaacggtgaggtgggagtctgaaccgatttagctgttctcagggcgcacagggtgttgacggtggttttcatctgccacctgcctccttgagacccagctggcctgagtgtgcacgaaatgggaccttctccttgggtccaccaggctgggaggcacccctaggtacccggctcctcatcacagcggcagccctctcggttccacatctggttctcctgacgaagccgctggttttcggtccggagcctctggacctcggcagccagctcctccacctggcggcaggactgctggccggtgcacgcctgcagctgctgcagcctcctagtctcctcctccgcctgcgacagccgcttctccagctccaggtagtctcgcaccagctcctgcttgctgcggccctgcaggctctcggtgtggaagcgttcgtaagtctcagagaagtccttccgctggaactcaccgtgcgctcggccccgcccatcactgtccccggcctcactctccccactggaacctgggtgggagatcccatggggcacatccaagttgggctcctccgggtccctgtcattcatcaggaactgggtggtgttgtagggggccacgggctggcctttggcgaaatctcttcgcggacccgggaggcctctggctctgctctcatccgctgttgttctcagccagctcagctcaggtanggtcgcagtgcttttgcgctcgatggcgcgacgtgttcttcgggcagacagctcgctgagcagcccctgngtctgggtcggngactctactggtcagccaagcacgacagccagangtctcatctctgatggtctcatcgcgtgtcgggganggacacanatcatacctaggngtgttgggggtcccgggcacaagtctgctctcangcatgtnactcatcagggtcggtcgatgcc

SEQ ID NO: 81947 - DNA, 1159 bp, Homo Sapiens
ggggagcgctagtcggtctggtaaggatttacaaaaggtgcaggtatgagcaggtctgaagactaacattttgtgaagttgtaaaacagaaaacctgttagaaatgtggtggtttcagcaaggcctcagtttccttccttcagcccttgtaatttggacatctgctgctttcatattttcatacattactgcagtaacactccaccatatagacccggctttaccttatatcagtgacactggtacagtagctccagaaaaatgcttatttggggcaatgctaaatattgcggcagttttatgcattgctaccatttatgttcgttataagcaagttcatgctctgagtcctgaagagaacgctatcatcaaattaaacaaggctggccttgtacttggaatactgagttgtttaggactttctattgtggcaaacttccagaaaacaaccctttttgctgcacatgtaagtggagctgtgcttacctttggtatgggctcattatatatgtttgttcagaccatcctttcctaccaaatgcagcccaaaatccatggcaaacaagtcttctggatcagactgttgttggttatctggtgtggagtaagtgcacttagcatgctgacttgctcatcagttttgcacagtggcaattttgggactgatttagaacagaaactccattggaaccccgaggacaaaggttatgtgcttcacatgatcactactgcagcagaatggtctatgtcattttccttctttggttttttcctgacttacattcgtgattttcagaaaatttctttacgggtggaagccaatttacatggattaaccctctatgacactgcaccttgccctattaacaatgaacgaacacggctactttccagagatatttgatgaaaggataaaatatttctgtaatgattatgattctcagggattggggaaaggttcacagaagttgcttattcttctctgaaattttcaaccacttaatcaaggctgacagtaacactgatgaatgctgataatcaggaaacatgaaagaagccatttgatagattattctaaaggatatcatcaagaagactattaaaaacacctatgcctatacttttttatctcagaaaataaagtcaaaagactatgaaa

SEQ ID NO: 81948 - DNA, 870 bp, Homo Sapiens
  misc_feature (36)..(36): n is a, c, g, or t
  misc_feature (40)..(40): n is a, c, g, or t
  misc_feature (86)..(86): n is a, c, g, or t
  misc_feature (91)..(91): n is a, c, g, or t
  misc_feature (94)..(94): n is a, c, g, or t
  misc_feature (106)..(106): n is a, c, g, or t
  misc_feature (143)..(143): n is a, c, g, or t
aaagcacaaattgcatcaaagctctgaattgatttntgcntggagctgttgtaccagtagctgtaattttgctacccagaatgtcntaatnttntaaatttgtttntatttctaagctcttggcaatgacaataatataaatnttaacatatcttcactgtagtcaacatgtagagtctgcttccctcattattgcattgctaaggccttttaaaaaagcttatgcttacataatatactcttttttatggacacgttatatgtttccaaatctgtgtattgtgatttttacatactaatgaatataaacaggtgattttaaaatattactgtgcttctttggttgaatgagctggtattgatgtaaaatactctgtcattgatggaccactacctgcagctaagcagtgagcagaatctccgggaaatgacttagtctggccacatgcatagcccatcttcataatgtcgcagcagaaggttctttgtggttaaaagttttaaagcctatttctttataggtaaccctctcaggtatatttacctggtagaaaaacatgtagattgtttctattacttaaatgttttaattggactgtagtttagaaattacaggaccagcttgttacagattatacactattctgttacttttatttctgaaacttaaaaacaataaattctttttctgtgtttctaggttagaacttttttattttattgcacactgaacagatactgttgcttattgaatattgtgtaaacccttctttggctttccttgcccattgcaatttaatttaagcctactagagccattgtatgtgacagctatattgtattacaaagtaaaaatatatgagtgtattg

SEQ ID NO: 81949 - DNA, 954 bp, Homo Sapiens
  misc_feature (142)..(142): n is a, c, g, or t
  misc_feature (151)..(151): n is a, c, g, or t
  misc_feature (164)..(164): n is a, c, g, or t
  misc_feature (180)..(181): n is a, c, g, or t
  misc_feature (185)..(185): n is a, c, g, or t
  misc_feature (189)..(189): n is a, c, g, or t
  misc_feature (196)..(196): n is a, c, g, or t
  misc_feature (201)..(201): n is a, c, g, or t
  misc_feature (502)..(502): n is a, c, g, or t
agttgcgatattatcactgacagaagtttccgatggaagcggcagtgggaacgcatatgtggtagtcatcatagcccccagcttacattatgctccgctcgttgtgtgtgaatgtggccgaaacaattcaccccagaaaagnttgactggntacgatttatcgnactcattagggattgnncctngagnccaagantcgcnacgaggatgtaccatgatcttgggaggtggtgtctcagtgtggagatctgacacattgttaccgtgcctcctggctggagggacttggagaacaatgcagttaagtagaatggttttaacaatacagagaaatttattcatttagataaaaatctgatttttagaactttaaaagctttgtacagtgtaaatagatttaatgtatttaacatgctttatcagcacaaataaaggattttaaaattttgtcaaaaaattaaatgttaatactatcaccattaaaaatgttcaagcaatagtntgcctccccacccccacaccattttgcacctgttccaaagctaagtacagccctaggtttggtgtgtattctccatgcatttagagaatcacatgacacagactgctgctataatgtcattttcccattcttcctttactaataaaatttttgagttttacctggacgtctggctgctcagcttaagactacttctcagcctctcttatagttaattgtggccatatgactaagttttaaacttcccaattggccctttaaagaagcagggtatgcactctccttgacattcccctttcttgctggctgggaggccaatgggagcttcagtagtgacctggcatctcaagagatggaagtgatgtgttgaggaaggagaagttggcctgccagtcttgaactgctctcctttgacctgttatttaagagtaaaataaaatactgacttgctt

SEQ ID NO: 81950 - DNA, 663 bp, Homo Sapiens
tgttgtcttttgctaagcacgaaaaagttaagatatctgcttacattgattttgtagacacattaagtcaagatttggaatttaagtcactggcaggtatctgtgcattcatagaacttataaaggtcccaggatcacttttaagggatttttattagtttaaaggtaaataaagtcagctgaatctacatgtctcttgttttatttctctctaaacttgaaaacagtaaatctgcagatactgtgaggcacaaattatactgtcaacctactgttgctatggttatatactcccacttcatacattaccaagagtcgatcactgatttaaaatttttaatttctatagttaagatttactgcataatatagaatataaagttaagttaacatactaacatttctcctttggaggaagttttaatctacttcaggatgcatattattatcaagatactttcatatacaggatagcctaattttatttgtttaaatatgcttaatatgccccagattgcaaatgcatccagtcagtaatatcactgtctgtatgtggaggacatgttcccatggatcatatgtgaagatgtcaataagcttgcattaagccacctgctttgtaagtggattgattaataaataacttatatttctataaaaaaa

SEQ ID NO: 81951 - DNA, 757 bp, Homo Sapiens
  misc_feature (476)..(538): n is a, c, g, or t
catgcgtgttcaagactgttcaagactggtgatttggagtagtttacaagattcctcattcagagtgccctcttgtgtgactggggtgatgtgcagcttccataatggatgggacagagagctggaatctaatgtacaagtgaagggcttggtcttccctgagacattccagccattggaataggagaggagcatatatggcagaggtgatggctggtgggtaaatgtgatagtaaattgtagaaacctcttctgattgattggatttccttaataaaatcggaagcaaggttaggctgagtgagggtgagtaaagaggtagaggaggtttgaggagagagaactgctcggaagacattggtagatggaccataaaaacagagttagttctctttatgacattaaatagttttacaacatatttttaatggttcacaatttcattttagggcttaaaataaattatggttctatgnnnnnnnnnnnnnnnnnnnnnnnnnnnnnnnnnnnnnnnnnnnnnnnnnnnnnnnnnnnnnnnagtgaaacaatatctcttactataccatttctaaatttagagttcgtaacttttctgttgttaaaatataagaatatttatctttctcattggtttataaactgtagtcagattatacacttgtgtgagttacaaactttaggagtgtgatggtatcattaacacaagattcaaatactaatgttccaagtacaaataataatgagattctaaatatgc

SEQ ID NO: 81952 - DNA, 1001 bp, Homo Sapiens
  misc_feature (46)..(46): n is a, c, g, or t
  misc_feature (153)..(154): n is a, c, g, or t
  misc_feature (214)..(214): n is a, c, g, or t
  misc_feature (227)..(227): n is a, c, g, or t
  misc_feature (294)..(294): n is a, c, g, or t
  misc_feature (302)..(302): n is a, c, g, or t
  misc_feature (360)..(360): n is a, c, g, or t
  misc_feature (490)..(490): n is a, c, g, or t
ggcacgcatatgtgatactcatcatagcacccagctacacttatgntccgctcgatgtgtgtgatgtgagcgatacaatttcacacagaacagctagacatgatacgatttatacgactcacatagggattgccctcgagcccaagaatcgcnnacgagcccaggttgaccgttctcaaaccgtccttcccattattctgcatccgcgccctgnatctgaaattgtngtcctgccacgccgcctcaccgcggtataagtcgtcccatcctgaatggccggtgcgcagactcaantgcgactntgaggctgtcagccgccacccggcaaccttccagtgaacaggattctgggtttctcanagctgtaattggagggccactccagaggtgttaaagctccagcacttcgagcctgcctcgtgggaaagtcttaggctgagtctgtaggtgtctgcagttaagaagccagcggtctgcatatgattgctcnaggggtggtggctgggtccaacagcattcactacaggcctgccttgaataccacctagcgcagtgctccgcatatcacaggggctggaaacctaacaatttcacttcctagacaacttgctaaaagtcacctaaagacagtctggttactgccaaagatatgctttcaaataagatttggataaagaagggaggtagatgccttttttcagcagtggagtgatgtctagaccagtagatgtacgcatctaagtgaattcatcaccagcaacaatttccagaaacttcctgacctccagattgcagcttcattagtgtgagtttaaagccaactagatgccattctcagattccacgcatatggccaagggtccaggaaataagaagaaacagggttgaggggttggtgttatggggcatttacttgaattttctatgctataattgtctcatctttaaaacggtgataataataaaattgtcagttattaaataaattaacacagtgaaaa

SEQ ID NO: 81953 - DNA, 546 bp, Homo Sapiens
cccagacatcaaagctgagctttctttgtctccggcagcctgggccactccagaggtgttaaagctccagcacttcgagcctgcctcgtgggaaagtcttaggctgagtctgggctggaaacctaacaatttcacttcctagacaacttgctaaaagtcacctaaagacagtctggttactgccaaagatatgctttcaaataagatttggataaagaagggaggtagatgccttttttcagcagtggagtgatgtctagaccagtagatgtacgcatctaagtgaattcatcaccagcaacaatttccagaaacttcctgacctccagattgcagcttcattagtgtgagtttaaagccaactagatgccattctcagattccacgcatatggccaagggtccaggaaataagaagaaacagggttgaggggttggtgttatggggcatttacttgaattttctatgctataattgtctcatctttaaaacggtgataataataaaattgtcagttattaaataaattaacccagtgaaaaaaaa

SEQ ID NO: 81954 - DNA, 601 bp, Homo Sapiens
gggagaaaagataagtttaatcaacatagtgaaatgcctcttacagcaaacaaaactcaacacttcaatgcatattacaaaacacttaaaatgtccaagcagctttatgagaggcacaactttccaaaaggaaatggagtgattgtaacagatttgaactctgatactttaagtggtcagagagagcgtgtgtaccttgttacattagaatcacagaatccttgaggggaaagagaccttaagcaagttagtctaatcaagctccacagaaacaataaaaacaggaaaatgtggtagagcagctcacaatcggctatgaatacatttgtgaatcaaatacatttaccaatatttttctctaatttttttgagatattgaaatttttcggtgaacttaactgcactattaaatgataattgtcaatgggtactcatttaaacaaatttttaaagtactttcaacttttaaaaaataactctaaggtaaaagggaaacatttaaagcacaaagacaatgactgcttataaataatgttcttaaacattatgttgttattctttgattctttgttgtactattaacatgactttctaccaaaag

SEQ ID NO: 81955 - DNA, 788 bp, Homo Sapiens
  misc_feature (550)..(580): n is a, c, g, or t
cagtcgacggtaccggacatatgcccgggaattcggccattacggccggggaaggatggaagtgggcttaccggccattaccctctttctcaccagcgccagcagccctgtggtggcgacgacgatggaccaggagccagtgggcggtgtggaacgaggagaagccgtcgcagcctcgggagctgcggccgccgcggcattcggggaatctgcagggcagatgagtaacgaaagaggctttgaaaatgtagaactgggagtcataggaaaaaagaagaaagtcccaaggagagtcatccactttgttagtggtgaaacaatggaagaatatagcacagatgaagacgaagttgatggcctggagaagaaagatgttttgcctactgttgatccgacaaaacttacctggggtccctacttatggttttacatgcttcgggctgctacatcaactctctcagtgtgtgacttccttggagagaagattgcatctgttttgggtatcagcaccccaaagtaccaatatgccattgatgaatattatcggatnnnnnnnnnnnnnnnnnnnnnnnnnnnnnnnaacaggatgtctgaagaagcagaaaaacaatatcaacagaataaattgcagactgattccattgttcagacagatcaaccagagacagtgatatccagctcatttgtgaatgtcaattttgaaatggagggagacagtgaagtaattatggaaagcaagcaaaatccagtctctgtcccaccataaaatgaaatgactatcaagcttc

SEQ ID NO: 81956 - DNA, 822 bp, Homo Sapiens
aagtcagcatttcatataatacataaaattaagacaaattaacttactgatatgtggccaatatcaacccttctcacccaacccaaacatgttctggagatagaaggacttatcctcaattatattccagtaaatttatctccataatctgttttatcccctaatgtatgatatatctcaccaaatttttctagaattgaataaaagcagtttttgcttaacttgaatttccttccacaaatacaaccttcagctcttccctctctgtttcccttttgcccacattgcaaatagtcttcataatagaaccctcactgcaaattaaaagggtcccatttcttaactcagcatttcatataccaagaacacttgcaaagatttcttcataatgtgattttttaatttttcagttccagaagcatttcctgcagttcgaacgttattttttctctcagattttcaacttgaagctttgatttgcactgaattaacttggataaaattttagtttctctcttcagctaacagatttggaagcaaattacagtatacttgaataattcaggtactacctgttgacctggaattttagtgattctgggaaagttttccagacaaagacaccaatagagtgaagggttttttccccaattactattttattgttttttaaaatgcctttttaaaacttgtgtgatgtggcaaaatagtcatatgttcaattaatttatattttattcattccttttcaattctggttattatgtaacctcaagtactttatctgttcttttaaagtattttataaaatgaacgttaact

SEQ ID NO: 81957 - DNA, 1038 bp, Homo Sapiens
  misc_feature (48)..(48): n is a, c, g, or t
  misc_feature (78)..(78): n is a, c, g, or t
  misc_feature (150)..(150): n is a, c, g, or t
  misc_feature (315)..(315): n is a, c, g, or t
  misc_feature (360)..(360): n is a, c, g, or t
gacacgtagcttctgtgtgttcatctaaagaccagtgtcgggaacagnaggaaatgtcagatattttggagtattatngggatttaagactatacatcttgagtatttatcaggggatgtggaaggttgcatgtcaagtgtttgtgtagntagatccatagggaacttaactatgacatactacaagccgtgcactttgtttctgtatgtgtgggggatcactttcacacatagcagcacatgcctccctgtgtcaggatcctttgttaggatctgtattgcccttaatttgttgaatctttttcctcttcctcntgaaaagtccaaaatatagttattgttctttcatcactaaaaatngttcctttttcactatgggcagttcacacaaggcaaaaactattgaacagttggttttagtgtgttgtataactttgctgtatatcaaactaattttgacaagttttcatcctaagcctcaaatcatgtaattaataatttgcctgtttatttatgacctaattgtgattcttttattaataaaagctaatgggaaaaggatccctgattaagctgatgactagacctacaattaattttcctgcagtatatgaagtattgtaccagagtattaaaagatatgtaatattttattgataaatctatcctttaaaaggaatacgttttaggatgtcatcattttgatgtgaatcatgtaaatgttgataatatgctgtttattatacatttagtgtttcaagagattcacttaattgcctttttgcccacgtatattatgtagtctatttgcaactgttcttaaaaaaatgacattaaaagaatagtttatgtagagaaacattagtggatgttaattgtctccccacctatatttatgggtgttagcgcaactgctttgctagttgcaaagctgtattatcagagtaaaagtgtatttgtaaactgtatgggaactaaaaattaggaataaaaccattttcttatatgatttgaaagaactgtaatttgcgcttgtca

SEQ ID NO: 81958 - DNA, 619 bp, Homo Sapiens
gacttaaaaacatttggaaatacttttttcaattcccagactggagatggggctattaaaaaatatgcagaagttttaagatacgtggacagttcaaagggctgttattgagacagcagatagagccaagctgcaacctatagctttaagctgtgtactgaatattggtgcttgtaaactgaagatgtcaaattggcagggagcaattgacagttgtttagaggctcttgaaatagacccatcaaataccaaagcattgtaccgcagagctcaaggatggcaaggattaaaagaatatgatcaagcattggctgatcttaagaaagctcaggggatagcaccagaagataaagctatccaggcagaattgctgaaagtcaaacaaaagataaaggcacagaaagataaagagaaggcagtatatgcaaaaatgtttgcttagaaaggattcagttttgcttattgtgtgttgattgtataaatgcaataagaaaatgtaaaggtttttgtctgtgaatatgatccctaatgtgtttcttttgacaccttagttccttactgtttacagtttaggagtactgataggggttcatgcttaataaacatgacaaaatacagt

SEQ ID NO: 81959 - DNA, 752 bp, Homo Sapiens
  misc_feature (597)..(597): n is a, c, g, or t
caggaaataaaaaccacactaggtatttcaaacagaggggatataagttagggactgattgtgcaggttttgcaaggctcaaaaagcaaaagtggatgttgcaaaatctcaaagttggatacttgcaggaagctgctaccacccttagggctggaaaacccagggaagctaaaaggagggtgcaacgaggctggtgttgggactgccaaaggaaacacagaatgacagctccatctctgcagacctcaaatttgaccaggcctctggctgcctgggcagcctcattgccaatgggctgaaaggttctgtcactgttcagtggtctgacttctgagttctgtgcacaccctgagctctgctcctctggcctggccaccagtccttgtctgagtgccccaggtctggttatgacttcaggcctcagcacctggttgtctcttctgcaaagaatgcattctcccccagtccacccagaacacacagcctccatccaggtactggctctgagcaggacagagagcatgcagcaggtgctcagcaatatggaaatgggaccaaacagagggagtctccacagctccccgtccctcacagcanaagccagagccgctgcagtgcccagctggtcttcatcacgtctatgagctctgcaatcgctctgcagtcacctcaactcctggtctcctctgctccttctcactgcactcgcatctcccatgtttgcactggctgttccctcgtgccgaattctt

SEQ ID NO: 81960 - DNA, 958 bp, Homo Sapiens
ttcaaggtccagagacccaaatgtggagtgccgaatctacagacctggaaaatttgcaggaacgttgcttacccacccttaggactgggagaaccccagggaagatttaagaaggaagggtcccaacgaggccttggtttttgggacttcccacaagggaaacacaaggaatggacagcgtccaatctccgcgagacgctcagatttgacaccaggcctctggctgcctggggccagcctccatttgcccaatgggcctgaaaggttctgtccactgttcaagtgtctgacttctgagttctggtgcacaaccctgagctcttgctcctcttggcctgggccaacagtcctttgtctggagtgccccaggtctggttatgacttcaggccttcagcacctggttgtctcttctgcaaagaatgcattctcccccaggtccaccccagaacacacagcctccatccaggtactggctctgagcaggacagagagcatgcagcaggtgctcagcaatatggaaatgggaccaaacagagggagtctccacagctccccgtccctcacagcagaagccagagccgctgcagtgcccagctggtcttcatcacgtctatgagctctgcaatcgctctgcagtcgcctcaactcctggtctcctctgctccttctcactgcacccgcatctcccatgtttgcactggctgttccctctgcctggaatgctccttgcccagttatcccactgtcttctttgcatctggcacacagtagatgctcaataaatgcctgtggaatgaatgagtggggaggatgcagtgcagggggcagatgagggctaggcggttgcctgggccctcacactcgtagcggagctaggctggacacccagggtggggaccaggacctccccgggtggaatgacagatgtcccctcgtgccgattgacacccaggctgc

SEQ ID NO: 81961 - DNA, 954 bp, Homo Sapiens
ttgtggttactgccctttgcagggcatcttcatttggggaaagacatgaaatgctaatggccaaaccccccctcacccccaccaccttcaggccgaacaccgcagtggggggaagatgcatagaggtgggggaagaagtgtgcaaagaaagggcctggatgggtgggggtcccaaaaggacctaagcagcaggagacccccaggagtgggctttaggcccagcagctcccccttctcaaggtgagtccagaggccattctggagtgggcctgggtaccaggccctgggtactccttttggtaccaggctggcctcctgattcctgaggcgttggctcggcaccccatgggggactgccctcctccaggcctggcacaaagccagggggctaagagcagtctgcaggacagagggcaggaccacagcagggagggggctcctatgccagctccccctcatgccatatgaggccaggcctgtggctcgaagcccctgagctgggcatgtcctgagagtctgggaccatccaggggctgcatcttcatcctcagccctgcgtagccttctgccctcctcccagggctcgtccattccttcagctccagcgcctcctccacacgtccatgccttccaccttgccacatggagcacagccgtgccccacaagccagagggaacaacaaagctgccttgacctcagcactgaagtggtgggtagcatgaaggaaagatggtgcgcccggtggtttatggacacgagggtcccggtcccgaggctctgccgggcccgcctgtctggatggcctgctgttcttgactgaccaggccaggaggtctggcgttcaccggatctccgggcgcgaagtcgatttgccgcccctttgtacggcgtattgtggggccgtgcctcaccccggctagcggcagcgacttgcgcgcgcctcctagtggcgt

SEQ ID NO: 81962 - DNA, 455 bp, Homo Sapiens
  misc_feature (302)..(331): n is a, c, g, or t
aatgactacactgaacaatgacttggcttgtatctctgtttaggtacatctagtattagggctgctcagactagtattatccaataggggaaaaaaataatagtggaaagtagagggtagaaataagtctcaccattgtaaagaggccacagtaaacagcaaagagacattccaagagtactcgaccatctaatgatcaatttctctttcaagatagttacagtttgtagatcactttactcctttatctgaaaacaggcacaagtcaagctgtttcttcaccttcaccctattccatcttnnnnnnnnnnnnnnnnnnnnnnnnnnnnnnaaacctaccttactactgacaaaaccttcagatgattcttgggttttcaggtggtgttaagtgcagcttgtaacatatctcttagttccaaacttgttacttttgtcaatgaacaagacaattg

SEQ ID NO: 81963 - DNA, 978 bp, Homo Sapiens
  misc_feature (37)..(37): n is a, c, g, or t
  misc_feature (159)..(159): n is a, c, g, or t
  misc_feature (263)..(263): n is a, c, g, or t
  misc_feature (300)..(300): n is a, c, g, or t
  misc_feature (485)..(485): n is a, c, g, or t
tggacctacccttgtgatgacctccccccacgccggnaggttatgggggagggagccccatcccaacccttcccgggtgcgatcatatcagtgcagacgtcccgatgagcggcgttgcaacgcatatgtgatagtcatcttagcacccagcttacattntctccgctgttgtgtgtgatgtagcggaaacattcacacaggaacagcttgcatgatacgaattatacgactcatataggaattgcctccgagccaggatcgcnacgaggaaattggaagagttgattatccagagacagnaacaaactttcagttcagaattgcaaacaggagtcatcaaagttttgaagaggtgcagcccagatgagcttggggcagagggcgaagctgacctgcacccctgatgtggcatatggagccacgggccaccccggtgtcatccctcccaatgccaccctcatctttgacgtggagctgctcaactnagagtgaaggcaggaaggaactcaaggtggctggagatggctgctgctcaccctcctagcctgctctgccactgggacggctcctgcttttggggctcttgatcagtgtgctaacctcactgcctcatggcatcatccattctctctgcccaagttgctctgtatgtgttcgtcagtgttcatgcgaattcttgcttgaggaaacttcggttgcagattgaagcatttcaggttgtgcattttgtgtgatgcatgtagtagcctttcctgatgacagaacacagatctcttgttcgcacaatctacactgccttaccttcacttaaaccacacacacaaggtgctcagacatgaaatgtacatggcgtaccgtacacagagggacttgagccagttacctttgctgtcactttctctcttataaattctgtcagctgctcacttaaacaatgtcctctttgagaaaatgtaaaataaaggctctgtgcttgac

SEQ ID NO: 81964 - DNA, 195 bp, Homo Sapiens
ctaagtgcaatgggaagccactcaaagggctttaagcagggaagtgacattatctgattttcgttttataaagatccctgcggctgccgtcagtgattgtaggagggcaggagtggatgcaaggacagcagacattagtgcaggagttcaggtgaaagatgataatagcttgactagagtgccagtaccgagctc

SEQ ID NO: 81965 - DNA, 1114 bp, Homo Sapiens
aatcactcctggaatcgcagagagaggcagcagcttgctcagcggacaaggatgctgggcgtgagggaccaaggcctgccctgcactcgggcctcctccagccagtgctgaccagggacttctgacctgctggccagccaggacctgtgtggggaggccctcctgctgccttggggtgacaatctcagctccaggctacagggagaccgggaggatcacagagccagcatgtacaggatcctgacagtgatcaacctatgaacagcctcgatgtcaaacccctgcgcaaaccccgtatccccatggagaccttcagaaaggtggggatccccatcatcatagcactactgagcctggcgagtatcatcattgtggttgtcctcatcaaggtgattctggataaatactacttcctctgcgggcagcctctccacttcatcccgaggaagcagctgtgtgacggagagctggactgtcccttgggggaggacgaggagcactgtgtcaagagcttccccgaagggcctgcagtggcagtccgcctctccaaggaccgatccacactgcaggtgctggactcggccacagggaactggttctctgcctgtttcgacaacttcacagaagctctcgctgagacagcctgtaggcagatgggctacagcagcaaacccactttcagagctgtggagattggcccagaccaggatctggatgttgttgaaatcacagaaaacagccaggagcttcgcatgcggaactcaagtgggtaagtgaggggacaccttctggcctacagaaggcccccacatggacgctgctcttcaggttgcaaccagctcacctggaaccccaagcagccaggggaatgtaagcagacatcaggaagaactcctagccagatggatcattcaatgccaagagctatagactcacattttggagaggttttctgtgttgacttgtttttaatacaatggacagctggacaaagtgtgttgtcctactcagagccagagggatggataatgtgacctttccatcaatctggatagtaaatagtttttgctactgctgtaggttttctaataaattgcccaataggcaagattcc

SEQ ID NO: 81966 - DNA, 1377 bp, Homo Sapiens
  misc_feature (42)..(43): n is a, c, g, or t
  misc_feature (70)..(70): n is a, c, g, or t
  misc_feature (101)..(101): n is a, c, g, or t
  misc_feature (130)..(130): n is a, c, g, or t
  misc_feature (135)..(135): n is a, c, g, or t
  misc_feature (146)..(146): n is a, c, g, or t
  misc_feature (257)..(257): n is a, c, g, or t
  misc_feature (269)..(269): n is a, c, g, or t
  misc_feature (301)..(301): n is a, c, g, or t
  misc_feature (312)..(312): n is a, c, g, or t
  misc_feature (428)..(428): n is a, c, g, or t
  misc_feature (645)..(645): n is a, c, g, or t
  misc_feature (687)..(687): n is a, c, g, or t
acattcaccaggacagtggacatgttcgaattatagactccnntaggattgccctcggccaagatcgcancgagagttctgtctggggcatgtctacctcnagaggagaaaaggctggttgactcatgcntcctnactgtgaaacncagatgtagatagaggccacacccaccctgtccagagtagaggcacctgtccacgtgccagggcccatgctgccaccctcgaggagatggaaccctgtgatgcaaaagctntgctggtgtgtntggggcataaggcactgctccccttccatctntagcagatatnatcttctcagccaattctgtaggacactgaggctcttgtttgacatggtgtgtggatgggacttgccccaagactgagcaggtctgccctttcattggggtgtatacatatcaggngaccctgaggtggcaccgtactcagtgttgtgatgcccccacctagggaggactcaatgctctttgtatgccttatgcagcgctgatctgtccctggagttcccaggttcccagctccccccctgcaagccttgaagcctccagcaacgtctatctccaggagagcagggcagccctatgcaagtgttccggcaggaccagaaaagtggccactcanacacacgtccctcaccagtcaccccaaatggagacactcgcnagacctgcagttctcagaccgaaggtgctgccttcatccctccccaccctaatgcatttttgaaaccaaaggtacctagcctcagagacagagaaggagagggggagatcttgagtctaagaggaaccctttagctgtttctgcagctgaggtcagtttcaggagggtgaagctgatccccaggaatggatcagctgccatgggcacagcctccgatttgagcctctccggctgccagccagggggcctgggccagaccagggctctgtccttccgtgactttattaaagcaacatttgccacatgtttaagccgcaaaggtattagcaatgcttgcatcattaataatcattcagttgaaggtcaagcccatagacacacactctctgctggtaagaaaccatagcccagaactgagccaataaggttgtttgaacctgagagtgtgtaatggtcatttgggccaagcctcagctagggctgctgcctggacgcctgaggggcagcttatcacagtgcaaggggacagggtaaacagcagggggtggggtgtgagcttggagggcccctcccctggatttcctccaacacctgcttggatactaggcccactgtccctgaagggaatgtcagggaagtgtgcctgtgagctgaattaaaggactggcctttccagaaaacgctttgaaa

SEQ ID NO: 81967 - DNA, 968 bp, Homo Sapiens
  misc_feature (227)..(227): n is a, c, g, or t
  misc_feature (920)..(920): n is a, c, g, or t
tgtgtgacgcacactcagctttgggccgggcgcgggcctattttccgccgcttaaatccaccgtccccccctgcggagggttccgggacgcccctgtcccacgactttggggggcgggccttacccttttcaagtgcccaggcttggggcaagagaatcgggtggggaacccggcgccacttggaagggggccgcgccactggtgaaaagccccgtatttgttaagnttgtgaaaaaaccaaccccctttcccgaggaggaaagatgttacttccattcttgtttctctcttgctaaaaaggcccatcagatcgggctgagtagaccgaaggccacttgtgcaaagacaacacagagactgcttcttagtgaagattgcattttaatgctctgacaactcccatttcttcattgtcagaataacctggatagaggccaaagcttaaaacaatttgtacatatgtaaaaagaaaagaaaaatgagaaacctaaattgccgtaagagttcagggcagcagagcagatctttctggatttggcaccagagtccctgagcctggggatgggcccgggggtcaggtccttgtttgcagagggagtctgagggccagctccgtcagatgagtcatgtctggttgtttgctttgcttcttgatgtattctagcgttttcaccatggtcctggtgtctgcacagccgtgcctctgtgccaggtgccacaggttgacggagagctggttgagcttgttgttgcgtaggtccccatgggccaagatgctgttaaagaaggaaaggcccaacgagctctggcgcttcagggcctcgtccttggccagggttttcagatgctctaggatctgagccatcaccgtctcacacagcttgttgttttctgccaggaacttggagtctccccgtanaggctgtcgttggagtccatttgtctatgtggtaaaggtacgtctcct

SEQ ID NO: 81968 - DNA, 679 bp, Homo Sapiens
taggttagtacgaagctgggtgtgtgaatcggcacgaggcatcgttgaaggacaccagctgcggaatttgcggctttggcagctgtttgttcccaccgagctgtgctttaggaagctggccagccgggcctcctttaggtgcgctgcagcctttttcaaagcgagtgaatgtggcccggcccctacagttcgccaggcccgctgtaaaagggttagatttcagtctatagacgatcagtgggaaggcctttcctaggaggtaaccagaacagagagctgtaaactccgtgaatgcaagaggctgcttctgttacctgagtggttctcactcatctttgccttccttacctcgtgatctcaccattccagattgaaatcatggcaggtccagaaagtgatgcgcaataccagttcactggtattaaaaaatatttcaactcttatactctcacaggtagaatgaactgtgtactggccacatatggaagcattgcattgattgtcttatatttcaagttaaggtccaaaaaaactccagctgtgaaagcaacataaatggattttaaactgtctacggttcttaacctcatctgttaagttcccatgcctggagaagctaatgccaactcatcatgtgataattcaatttgtacaataaattatgaacctggaaaaaaaa

SEQ ID NO: 81969 - DNA, 814 bp, Homo Sapiens
  misc_feature (605)..(605): n is a, c, g, or t
  misc_feature (609)..(609): n is a, c, g, or t
  misc_feature (611)..(617): n is a, c, g, or t
  misc_feature (619)..(625): n is a, c, g, or t
  misc_feature (630)..(632): n is a, c, g, or t
cagtcgacggtaccggacatatgcccgggaattcggccattacggccgggccgagaggtggttacattcgttgaaggacaccagctgcggaatttgcggctttggcagacccagctgagtcactgtcactgcctaccaatctcgaccggacctcgaccggctcgtctgtgctgccaatcgactcggcgtggcgtcggtcgtggtagataggcggtcatgcatacgaattttcagctcttgttctggtgaccttttgaatacgtcttgtctataaaagaaattcatgcctttgtaaaatacacagattgaaatcatggcaggtccagaaagtgatgcgcaataccagttcactggtattaaaaaatatttcaactcttatactctcacaggtagaatgaactgtgtactggccacatatggaagcattgcattgattgtcttatatttcaagttaaggtccaaaaaaactccagctgtgaaagcaacataaatggattttaaactgtctacggttcttaacctcatctgttaagttcccatgcctggagaagctaatgccaactcatcatgtgataattcaatttgtacaataaattatgaacccnaaanannnnnnnannnnnnnaaaannnaaccttggtcggcccgccctcgggcccctcgagaaagcttttctagaacccattcctttttgggcgccggcggggcccccagttagggttaaggggaaacatggggcccaataaactgggttttcccctaggggaaaaatcccgggggtcctgtgaaccaaaaggggccttttggggaattt

SEQ ID NO: 81970 - DNA, 1099 bp, Homo Sapiens
  misc_feature (612)..(624): n is a, c, g, or t
  misc_feature (626)..(635): n is a, c, g, or t
  misc_feature (673)..(683): n is a, c, g, or t
  misc_feature (714)..(723): n is a, c, g, or t
  misc_feature (832)..(860): n is a, c, g, or t
cagtcgacggtaccggacatatgcccgggaattcggccattacggccgggccgagaggtggttacattcgttgaaggacaccagctgcggaatttgcggctttggcagattgaaatcatggcaggtccagaaagtgatgcgcaataccagttcactggtattaaaaaatatttcaactcttatactctcacaggtagaatgaactgtgtactggccacatatggaagcattgcattgattgtcttatatttcaagttaaggtccaaaaaaactccagctgtgaaagcaacataaatggattttaaactgtctacggttcttaacctcatctgttaagttcccatgcctggagaagctaatgccaactcatcatgtgataattcaatttgtacaataaattatgaacctggcaaaaaacaccaagaaccccaaaacaaccttgtccggccgccctcggcccctcgagaagcctttcctagaaccattccgtttgcgcggcggcgggcccccccctagggtaaagtgaacaattgggccataggctggttttccctaaggaagaacccctgggcccatggaacatagccggctttgggaatttcctccaacccnnnnnnnnnnnnnannnnnnnnnnggggggggaataaaacccggaagcgcggtttccttggnnnnnnnnnnnctccccccacaaatgggggaacggtcccttnnnnnnnnnnccccatttttacctgggggggagttcttttattccaaagccgaggggagaggtcccccacaagggccgcgagccttttccggaaattactaccgaaaatattatagggnnnnnnnnnnnnnnnnnnnnnnnnnnnnnaactcccaaattacgagcaaaaggagaaatcgcggggcggcgggcaaacctacttccaattgataaaagagaacaatttcccctgtggcgccggagaaactagtggggggaaaaacaccccctctttctaccacataataagcccgcggcgcccctgtttaaattgagaaaacccctctcgcggcaaaaatctcccctcccccagagggggaggggggcaatatcaccagggtcacccc

SEQ ID NO: 81971 - DNA, 973 bp, Homo Sapiens
  misc_feature (42)..(42): n is a, c, g, or t
  misc_feature (120)..(120): n is a, c, g, or t
  misc_feature (137)..(137): n is a, c, g, or t
  misc_feature (161)..(161): n is a, c, g, or t
  misc_feature (183)..(183): n is a, c, g, or t
  misc_feature (187)..(187): n is a, c, g, or t
  misc_feature (218)..(218): n is a, c, g, or t
  misc_feature (244)..(244): n is a, c, g, or t
gatttatctggatttaaaatagagaaatttatagcttatgtnttaaaataattttcacacagagtgattgagttttcgcagagtagattgtttgactcatgtttattagtctgatacttnaagaacaatatgtgatntaatgtaattcccactaaatattnatattgaaaatacatggaaatnatantgtttgaaaattagaggacacagctgggaantatgaatgcttttttcttaataggtntggtgtgtgtggccttgaatggttctgctgatgcatcatggaaagacagcagggaactgtagcctgccatcaaaactgtatcaactcttttaatgagcatgtgactgtattaggtacattctgaagaatataagtactgatgataaagtctagtatgcataataggattttggaggcatttcaggaattttccttttatagtatgctttttaggcatctgtatgtgtaatatcatagtatcatttattgctgggatggatcgaaaagcactgcttttacttttctgataagtatcaaaatgattttccagtaccaacttgactggcttttaattattgtcacacacacacaaaattcaactcctcaaggtttgggaaaattgtgtatttttttgtatacaagataaaagtgtcataaaaaggaatggatgaattgttgataggaacattagcagttaatttttacctgatactgagtttactgtaaaataggaaatgcataggaaggaatacctcctaaataatatgccttatagaatgatgaaatcttaccatagttcatactgaaaatgttgtttatttaaaagtattgtggagtgttgaaaataaagatacacaataagtattttctgaagagaaaattaatgaaggtatttaatgatataggaaataagtgacaagttaaagtccattttgtttcaataaaggagttgtgcaaactcaaaaaaaa

SEQ ID NO: 81972 - DNA, 1260 bp, Homo Sapiens
attaagcactacataacacattgcatgctacataatacactgtaaccttctgtcgggtttcatcattctcacatcccatttccgctgaaccagatgcttgctagcgacaggcaaggtgaaccaagagaaagagagtcttcgacgctcttggaaaaatcaactacaaaacccaccgaaaatcagcagttccaattgcagactcctttgaactggaagaggcgggggaggaggaaacaggaaatcaacacatggatgagacagttagcttggttacagattgttaatagtacaggagtctgtggcgaaggttccttcctcagaacactgtgcgagcgtgtgtgtatggatgtggctgctgcagtgtgggcggcagggggagtggagagtctacccggcagcgtccctggctggaatggtgcctcgaggtaccagggagctgggaggccgcttgccctcctcgctccttggagtggaagggagcgggggagaagatgagagtatgtaagagacgagttcccctgtggctgcggatggagggagaaagggagggaaactgagtcacgcggccgctttgtgcttcccgccacagcacctgcacatcactccgcagtggtagcaggcccgaaggggcaggtaacagcacatacagggggccaggaaagacaaggcaataagagccatccaccggaggcaaaacttctcgtcgctagtatcgcacgagcaagggtctgtatagtctccctcggggtccgacatacagtgatagagcatgctgtccgcgcaccacatgcagctcacccggcggatgcaagttctcacggagtcgggcgcgtcctggcagtggccccggcggttctcctcgtggttgaacatgtccctgcagtacacgcaccgcgagcgctctccgtcctccttccgccgccgcgacttgccccgggaaggctgcgtcttgatcacgctgcccccgcggcctttggggtcctcgcctaggccaaagtctgaggagtccacgtaggggtagttgtagtcatgcttggggacctcgcccttggcgaagcgcacgtaggaggagtccgcgtcctccgaggggtccgggtacttgcccctgacgggtgcgtgccggtaatcctcgtaccccgtcatccagatcttctcccgggggttgatgcgcacgatctcctcgtcgtcgtccgggaagctcacctggcggtagggccttgagatcggctgatcgaggtgataagtggtctgtgaggtatg

SEQ ID NO: 81973 - DNA, 975 bp, Homo Sapiens
  misc_feature (38)..(38): n is a, c, g, or t
  misc_feature (54)..(54): n is a, c, g, or t
  misc_feature (83)..(83): n is a, c, g, or t
  misc_feature (86)..(86): n is a, c, g, or t
  misc_feature (95)..(96): n is a, c, g, or t
  misc_feature (103)..(104): n is a, c, g, or t
  misc_feature (113)..(113): n is a, c, g, or t
  misc_feature (133)..(134): n is a, c, g, or t
  misc_feature (146)..(146): n is a, c, g, or t
  misc_feature (150)..(518): n is a, c, g, or t
cacccttggacttgagcgccgatttttttgatctcgtnaaggggggcgggaccntattgaaaaaacgcccagcaacgcgcccnttntacgggtcnntgccctnntgctgcccntttgctccacatgtcttccnntgcgtatccccntgannnnnnnnnnnnnnnnnnnnnnnnnnnnnnnnnnnnnnnnnnnnnnnnnnnnnnnnnnnnnnnnnnnnnnnnnnnnnnnnnnnnnnnnnnnnnnnnnnnnnnnnnnnnnnnnnnnnnnnnnnnnnnnnnnnnnnnnnnnnnnnnnnnnnnnnnnnnnnnnnnnnnnnnnnnnnnnnnnnnnnnnnnnnnnnnnnnnnnnnnnnnnnnnnnnnnnnnnnnnnnnnnnnnnnnnnnnnnnnnnnnnnnnnnnnnnnnnnnnnnnnnnnnnnnnnnnnnnnnnnnnnnnnnnnnnnnnnnnnnnnnnnnnnnnnnnnnnnnnnnnnnnnnnnnnnnnnnnnnnnnnnnnnnnnnnnnnnnnnnnnnnnnnnnaagaattcggcacgaggactgcatggaaggggcaaaactgtaggctccaatacttgggctcttaacctccttactctgagccttctcacgcttggcatgctgttccctctgccaggaatgcctttccttcccttgattgcgtgaaaagttcctgccaggtttggtgtcatccctttgtgccccttgtagggtgaggacagaaagggtcccattggacaggtgggaaaactgaagccctaggacactcagataccattagggtggactgggaccccagcctttcctgccccctttcaggatcccaaagagatacacgggctcccctaaaaggcagagtcccagccacagcaactgctcttgtccttggcttcctccagagaaacagagatcggggagcagaagtcagatcatacatttaaagctacatgagggccgggcgcagtggctcatgcctatt

SEQ ID NO: 81974 - DNA, 967 bp, Homo Sapiens
  misc_feature (871)..(871): n is a, c, g, or t
  misc_feature (900)..(900): n is a, c, g, or t
  misc_feature (916)..(916): n is a, c, g, or t
aggacgcgaggcctggggtggcgattctcggcacgaggaaatagacgagtgctctaaaccagtatcatggctccagttcctctgacaaggattcacatggggttgcaattctgactgtgctggtgatgctggttccaggtccctcaggaacccctcccccagtctggtctgcccttgaactctatactggccccagggtatcccaggattgtcagaaaggcctggccaggattcacctgggagagggatcagcatctctgcaaagttgttggattgaaagaactttcattttgagctacatcattgaagagctttaaatctgaaaataagaaagacgttgaaccctattactcacatctctttgtcatttgaagcagatcccgaaccactcaaaaggacaaaacaaggaaatagcaatgaaattggattcagtgaatggggtaagggtattaagtgtctgaaatataagagataaaaaaattagtttttacctttttttctattttctaaatgttttggtggctagaataagatatactttgaactcaagagcaataaatgttaatatattaaaagtagctttatgaaatatggaaagtatctttatttcaaaatacttcaaagtaatcatctgaatatttatcagaaatattaagacaacttattaaatccctggtattaaaatgattgcttattacttttttgtttatactactcagaagtgattctcttccacatttttagatttttcagagtaaaaaggatataattttagaactttcaattgaatataaactgggggtttttccacacgaatttgttggacatgggctggtcctgatggttgactctttacgtaatttatggctanaaaatgctatttttgggggatccctgggnaaatgggacttctganatttaaatttattttatttaatttaattagataaatcaatttctggaggcg

SEQ ID NO: 81975 - DNA, 980 bp, Homo Sapiens
  misc_feature (20)..(20): n is a, c, g, or t
  misc_feature (185)..(185): n is a, c, g, or t
  misc_feature (188)..(188): n is a, c, g, or t
  misc_feature (233)..(233): n is a, c, g, or t
  misc_feature (243)..(243): n is a, c, g, or t
  misc_feature (260)..(260): n is a, c, g, or t
  misc_feature (272)..(334): n is a, c, g, or t
  misc_feature (375)..(375): n is a, c, g, or t
  misc_feature (474)..(474): n is a, c, g, or t
tttatatacaccacagcacnttagagagatattttcccatataactgcagatataaaataagtcaccagtattttctacccttctatgttatactatccaactaaatgtagaatgcctatctaaatgtttttacatcttgtttaatttctcagtaacaagtaatatcaccaaaatctcattcctnttntgaaatcaaaacaaaagcccaagttcctagaaatatatacagggnataaatgagncactgaaggtgggaganccatgaaattannnnnnnnnnnnnnnnnnnnnnnnnnnnnnnnnnnnnnnnnnnnnnnnnnnnnnnnnnnnnnntgtaagtatattggaaaatttttttgagatttgtggcaatntgaaaaaacaaaccatgtagcctagaaatatagaaaaattaaaaagttatatagatactagcctattttatcatttactataaaatacacacaaatctnttataaaaagttaaaatttataaaaacatacaaacaaactgtacatggcaccattcatggttgagagaaatgtaaacaaagatacagtattaaatcataactgcataaaattaactgtagtacatactgagctactataattattttgtagttacctcctgttgctattgtggtgaactcaagtgtcaaaagatctgtttaaaacaccatgtgatgctaatcatctctgtgtgagcagttcatctctccataaaccgtggatcacagtaaaaagtgatcccttgcggttcttgcatatttttcatggttagtgcaatactgtaaaccttgaggacataaaaactgcaggacccatatgaagcaccaccagtcatagaagtgctcccaagaagcacagaagagtcatgacattacaagaaaaagttgagttgcttgataccatagattggggtctgtggttgcccaccatttcaagataaatgagtccagcataaggaccattgtaa

SEQ ID NO: 81976 - DNA, 1079 bp, Homo Sapiens
  misc_feature (64)..(64): n is a, c, g, or t
  misc_feature (69)..(69): n is a, c, g, or t
  misc_feature (90)..(91): n is a, c, g, or t
  misc_feature (95)..(518): n is a, c, g, or t
  misc_feature (576)..(606): n is a, c, g, or t
  misc_feature (658)..(716): n is a, c, g, or t
ttatagtctgtccggttcgcacctctgactgagctcgattttgtatctcgtcagggggcggacntatgnaaaacgccagcacgcgccctnntacnnnnnnnnnnnnnnnnnnnnnnnnnnnnnnnnnnnnnnnnnnnnnnnnnnnnnnnnnnnnnnnnnnnnnnnnnnnnnnnnnnnnnnnnnnnnnnnnnnnnnnnnnnnnnnnnnnnnnnnnnnnnnnnnnnnnnnnnnnnnnnnnnnnnnnnnnnnnnnnnnnnnnnnnnnnnnnnnnnnnnnnnnnnnnnnnnnnnnnnnnnnnnnnnnnnnnnnnnnnnnnnnnnnnnnnnnnnnnnnnnnnnnnnnnnnnnnnnnnnnnnnnnnnnnnnnnnnnnnnnnnnnnnnnnnnnnnnnnnnnnnnnnnnnnnnnnnnnnnnnnnnnnnnnnnnnnnnnnnnnnnnnnnnnnnnnnnnnnnnnnnnnnnnnnnnnnnnnnnnnnnnnnnnnnnnnnnnnnnnnnnnnnnnnnnnnnnnnnnnnnnnnaagaattcggcacgaggaccattctgatgttggagcggcccgcggctgtaggccttgnnnnnnnnnnnnnnnnnnnnnnnnnnnnnnnctgcagtcaccggctgccaacataatctgcaccaactggagatcagaaaccnnnnnnnnnnnnnnnnnnnnnnnnnnnnnnnnnnnnnnnnnnnnnnnnnnnnnnnnnnnagacctaaaaccagacagccaaacagctcagaggcacacagttacctgctgccgggtaaccaggcgcgctcccaaggccaaaagcgcgagcgtagtggggccactggcacacctcataccaggagacacgcacacggagcgctacacagccagaagcaccgcaccaccgcactgcagcacatatgtgaggaggtgacaacatggagggacactacccacttcatacacctttatttccacttttctgatatcttctgaggacagaacatctgtgagccatttttgatttaatcaaaatattgacttttataaacattcgtttaacaaacttgtacggatgtgtaccgtgacttcatttatgac

SEQ ID NO: 81977 - DNA, 997 bp, Homo Sapiens
  misc_feature (24)..(24): n is a, c, g, or t
  misc_feature (99)..(99): n is a, c, g, or t
  misc_feature (101)..(101): n is a, c, g, or t
  misc_feature (161)..(161): n is a, c, g, or t
  misc_feature (229)..(229): n is a, c, g, or t
  misc_feature (279)..(280): n is a, c, g, or t
  misc_feature (318)..(318): n is a, c, g, or t
tccaagtaggatatctgacacctnttccaaaggatattcagcagtgtatagcgagagacatctgtgtccagagcattcgagagcaggtgagtgatcttntnagtggcagcccagaaagagacaccagaaccttaacagtgtgactctgacaaaggagactncccgtagcatgacccctgtggatgtgccagtgacaaatccagcagccaccatactgccagtacacgtntaccctctgcctcagcagatgcgagtgccttctcagcagccagacctctnnatctggcccctggaactttagacccaccctattgtgtntgatcttcttctgaacaacttaggagaaacttttgatcttcagcttggtagatttaattgcccagtgaatggcacttacgttttcatttttcacatgctaaagctggcagtgaatgtgccactgtatgtcaacctcatgaagaatgaagaggtcttggtatcagcctatgccaatgatggtgctccagaccatgaaactgctagcaatcatgcaattcttcagctcttccagggagaccagatatggttacgtctgcacaggggagcaatttatggaagtagctggaaatattctacgttttcaggctatcttctttatcaagattgaaagtcagtacagtattgacaataaaaggatggtgttctaattagtgggattgaaggaaaagtagtctttgccctcatgactgattggtttaggaaaatgtttttgttcctagagggaggaggtccttacttttttgttttccttcctgaggtgaaaaatcaagctgaatgacaattagcactaatctggcactttataaattgtgatgtagcctcgctagtcaagctgtgaatgtatattgtttgcacttaatccttaactgtattaacgttcagcttactaaactgactgcctcaagtccaggcaagttacaatgccttgttgtgcctcaataaaaaagttacatgcaaa

SEQ ID NO: 81978 - DNA, 663 bp, Homo Sapiens
ctggaggccatttgtgcctgcctctgtgctgccgcaggagggcaggccgcaagtggggttggtgggggtcgagcgggcagcacggtgcagcggtgcagtggcaaggggggctacttgtgtggcataagctagaggagccggtgccgcctgaatgccgagctaactgttgccactctcctccccagactatgaaatccctggagaatttttggtgacatgcactgagccaaggtgatggactgtatatttgaggaaagacaaacaaagaaacaaaattaaaatggaattggaggccgaacgctgcacagctgccctctctctcacccagtaaatgcagaaagctcttaggacagacagaaaacctgccatggggctgcttccctccctcgcagggctggcggaggctccgcatcgcctctctcctaggatacagaaaccatggcaacgaaagtagaatgtaaaactcgcagcagatatcagtgggaagggctgggggagggggcacccagctgcctttcctccctcacaggagccaccaccagccacctctcaggagaagccagaggccctggccaaagataggaggaagaaagagaactctccatagaatgtaatttatagatgcgtgtatatgtatatatatctatttatatgtaaataggc

SEQ ID NO: 81979 - DNA, 2389 bp, Homo Sapiens
  misc_feature (179)..(471): n is a, c, g, or t
  misc_feature (1016)..(1031): n is a, c, g, or t
  misc_feature (1260)..(1277): n is a, c, g, or t
  misc_feature (1464)..(1464): n is a, c, g, or t
  misc_feature (1471)..(1471): n is a, c, g, or t
  misc_feature (1623)..(1623): n is a, c, g, or t
  misc_feature (1720)..(1720): n is a, c, g, or t
  misc_feature (1796)..(1796): n is a, c, g, or t
  misc_feature (1855)..(1855): n is a, c, g, or t
  misc_feature (1878)..(1878): n is a, c, g, or t
  misc_feature (2142)..(2142): n is a, c, g, or t
  misc_feature (2152)..(2152): n is a, c, g, or t
  misc_feature (2314)..(2314): n is a, c, g, or t
attagctcattttgtatctcttgaggggccgacctatgaaaaacccagcacccgcttttaacgttcgtgcttttgctgcctttgcacacatgttcttcctgcttatcccgtgattgtgtgataaccgtataccgctttgaagtgactgataccgctcccccacccgaacgaccggcgannnnnnnnnnnnnnnnnnnnnnnnnnnnnnnnnnnnnnnnnnnnnnnnnnnnnnnnnnnnnnnnnnnnnnnnnnnnnnnnnnnnnnnnnnnnnnnnnnnnnnnnnnnnnnnnnnnnnnnnnnnnnnnnnnnnnnnnnnnnnnnnnnnnnnnnnnnnnnnnnnnnnnnnnnnnnnnnnnnnnnnnnnnnnnnnnnnnnnnnnnnnnnnnnnnnnnnnnnnnnnnnnnnnnnnnnnnnnnnnnnnnnnnnnnnnnnnnnnnnnnnnnnnnnnnnnnnnnnnnnnnnnnnnnnnnncccaagaattcggcacgaggcaaacctactgaatcagaatttctagggatgaagcctaggaatgtgttgttgttttcagagcttccctggtgattgtgataagcctggtttggaaaccattgctggagaactttgtaaagatacagagacccagaccttttgtatttacatttaaatacaaatacaaatcctgggtttctatatgttctgttagcttttcaggtgattctgctacacagacgttgaaaaccactgccctaagaaagagatcagaggccacatatcagagagaaaagggaccaaaccttcggtggtttgttgtgtgtcgttttaatgccaattattttaacttgcacagtcttctgaaaccttgtattaatagttctcttttgtattaccattttcaggtagggttttgatcactatgattctgaagataatagtgaaatagtgaatttcattgatatgaagagataattgattttcattcattggtttgaacacctgcaaaatcacaaataaatgagaactaagtcttgtattcnnnnnnnnnnnnnnnncaaacagaaaaaccaaccatttttgtccaccacaaacgcaaaagaacaagcacgaacaaacaaggaaaagaacacctcccccctccccgagcccggaggcgaacatctagaatttgtcacgttcggccggcggcccccacgaagccggcagaaaaccccttaaaagacggtaacccgccacacaacaggaacgagcgagccgacccccatcaaacctttcacccgtgannnnnnnnnnnnnnnnnntctagtataccccacctcccataaagcaaaccgagatcacaatgaattcccgccccaacgaactaatcgcaccgacgacggttctagacagacgggaccatgcgaggggcgagcaccgacaggcggcccaaccgcgcccgcgacccgccggccgccctacgcggcccgccgcgcacactcaccgctnctacagngttatagcatcgcgcgacgtggcccgcggccgtgcctgtgtcgggcggaggacaactgtgtgtcgggagaacatgtcgtgtgtgagaggtgtcgtactcgctgcacgcacacgctctccacgtcacactcgcacgcctaatgtacgcgcgcnctccctgcctcagaacagatatatgatcgtacgtgcattctatgctacaccatatcgcggtgtctgcggcgcgctatcctctgccgctgtcgacgcnacatctcacagtatagcgtactccttcccgtcgacgactacgatgacctgctatgctcgcacgtcagagcgtactnaacggctgctgaatcctcacgccgcccctcacatcgcacacagcgtaggtatcataaanctcagtctgtgatagtgtgacgntcaggattgtgagatatgtatacgggttgagccgacgttacatcgaggacgaggtgtcgacggaccatcatcgtccgctactgtcgtggctatccggctgcctccggaatatataactatacgctatctgtctcgctgcacatcagaccgacgtcgacacctgaggacgccgcaagcacggctctcgttcaccgatctcgagatgtccccgctgcacaccactccagcccgccagtacagcgacgctgcgcaggacgcgtgtcncgagtggtgntcatcgatgtgcagatcacccacagatcataccacgatatgccccatcatctgatgcgcctaacagtcaccatactaaagctgtgtcaccgaggaatatagatgcaggagtatagatggacgcctagtatgttgcctatgccatagcgcggagaacgagtancacgcccagcggcctgatcgcagcaccataagactggatatgtctagaaatctggaagacatgccatcgccctgg

SEQ ID NO: 81980 - DNA, 1830 bp, Homo Sapiens
  misc_feature (131)..(131): n is a, c, g, or t
  misc_feature (135)..(135): n is a, c, g, or t
  misc_feature (141)..(317): n is a, c, g, or t
  misc_feature (1424)..(1424): n is a, c, g, or t
ataccgttacccttgatgactatacgctccccaccgacgacgagcgaggatagtgaggagaagcgaaggcgccatacgcaccgctttccccggcgtgccgatcattatgcagctgcaggacagtttccganctgnaaagcnnnnnnnnnnnnnnnnnnnnnnnnnnnnnnnnnnnnnnnnnnnnnnnnnnnnnnnnnnnnnnnnnnnnnnnnnnnnnnnnnnnnnnnnnnnnnnnnnnnnnnnnnnnnnnnnnnnnnnnnnnnnnnnnnnnnnnnnnnnnnnnnnnnnnnnnnnnnnnnnnnnnnnnnnnnnnnnnnaagaattcggcacggagggtattttaatttttaaaatttgaacaattcaagtaaaagtcagctagataacataaatacagagtaaatgcacataatttacagccatgtacataaatgcaagataccaaacctcacatgaatagtcaaaagttaacacttttgaggttcactatttagctatgactgataggtcataattcttcacataaacggggtacacattccaaaagtttataaacacaaaaactgagtcaaaccagaattttgtttctacaaggagtagcataaaaatcagtgtgtaggttaatgggaaatactaagtacatgatggagaagagatctgagtgggcagaaagtttgtacattgtattttatgtattaaaattcctcaaatttaaatcattcagaaatacctatattcttaggaatgttaaagtcattatatatttgaggagaaaaggctgaactgtacttatcagctccaaagggggtccctagattactaacagtctgggcagaagagcatgtaaacaacaaaaggcaggcatggacaattattgaagggcaagaaatggattgatttttagcacttaaatccttcaaatccgaataaatatttttagtgatttaaaaccaacctaaaaatgctgaaatgtctgtaacccagtaatagagcaaacattatttttaccaacccaaactctgctggtcctaacatagtaatgctatctcacagataatctaatgatattctatcctgacttcaaagttacaaattcactgtggtggacccatctagaaaggatggttctacaaagttacataatgagaatcaaacgaacttttgttgatagtttttttcctgggattaaaaccactgcatggtatcccgaaatcacaaacgctaattcttcagatttgaactttgaaatttaaaagtacaacaaactaaataatgtggactctacaccagaaataaaaaagtcatgataaacagatgaaaacaagttaaaaaagtccatgctctgaatatgtgtttttgtttttaaacatgagtcaattttttaaaaacttcaaagaaatatttcagagacaactttatatacnacttttatatatagttttcctttttgaattatctctgtcatacataaactattgcagattgtgcttagggaaaaatacaactgaaataaacttcattgctcctttctagttgttgcacaaataaacaatgtccaagactctaagatttctttgctttccagtacatacataatactgttaaaagctgaatataatgcactaaaggtcaacacaagttttacttgctaaatacaaatagagaatatatgtttatccttgaaggacacttgttatgaatatgctacaactaaataataagatgttccttagctgctggttttcatatcattcttaatcatttgtggggtactgagatccccggccgtaatggccgaattcccgggcatatgtccggtaccgtcgactg

SEQ ID NO: 81981 - DNA, 1206 bp, Homo Sapiens
  misc_feature (214)..(223): n is a, c, g, or t
  misc_feature (646)..(646): n is a, c, g, or t
  misc_feature (780)..(780): n is a, c, g, or t
  misc_feature (789)..(995): n is a, c, g, or t
  misc_feature (997)..(997): n is a, c, g, or t
cttctaggagcaagcaaataaaaatatagccatatacatgtaattttacatgtatttatagttatatgctgagcaaggagatctagcaagagatagctagtgttagatgttcagctttgctattgcaatattttgtcatttttgtacacaaggccaaggtcttgggccacagacaaggctatagatcctacgttccagcttagagcattcagcnnnnnnnnnnctgttcttctccaacatggaatgtcacacagccttgcttcagtcactgttaatactagaacaaaataggctttcctgcagttttttcttggacgtaagaagtaaaacgttttagaaatttaggatactctcgctttgccactgcccttaacactgaggctggtgcccatcctccagggttcacattagctacatatgtaatcttgcatagaatgttgtccctgctaatttcctggtttccctctggtgggcttaccaaggtttgacaaatcatagcaacatttattttggcacggacacatcggttgtttagaggagcactgtcatgatccacagaaaaattacaaactatccaagtttcagggtcattttcagtcaaggctggtatctttcgaatgacagaaagatataatacgtctcgctnagaagcaggccacaccctcttgtgtgtttgataaatgatgattgcattatcagctaatgtttccaccacatgaaagttttctatagttgtttcccagtcattgcgaacgtcaacattccagaaatcctcgttcncgaatcttnnnnnnnnnnnnnnnnnnnnnnnnnnnnnnnnnnnnnnnnnnnnnnnnnnnnnnnnnnnnnnnnnnnnnnnnnnnnnnnnnnnnnnnnnnnnnnnnnnnnnnnnnnnnnnnnnnnnnnnnnnnnnnnnnnnnnnnnnnnnnnnnnnnnnnnnnnnnnnnnnnnnnnnnnnnnnnnnnnnnnnnnnnnnnnnnnnnnnnnnnnnnnnnanctgcataatgatcggcacgccgggagaggcgtttgcgtatggcgctctcgctctcgctcactatgctcgccggcgtcggtgcggacggacactcatcaaggcgataggtatccaaatccggaagcagaagaagtggcaaggcgaaagcagactaaaagggtgtggtttcatagtcgccccacaaaaaaatactatcaaggggacgccga

SEQ ID NO: 81982 - DNA, 556 bp, Homo Sapiens
atcagcgagacgtattatatctttctgtcattcgaaagataccagccttgactgaaaatgaccctgaaacttggatagtttgtaatttttctgtggatcatgacagtgctcctctaaacaaccgatgtgtccgtgccaaaataaatgttgctatgatttgtcaaaccttggtaagcccaccagagggaaaccaggaaattagcagggacaacattctatgcaagattacatatgtagctaatgtgaaccctggaggatgggcaccagcctcagtgttaagggcagtggcaaagcgagagtatcctaaatttctaaaacgttttacttcttacgtccaagaaaaaactgcaggaaagcctattttgttctagtattaacagctcagaggatgaaacaggaaactgagtcataaaacactactacaaacaagcccaaggattttatcccagattttcaacccaaggatgagctgcaatataactatcactgttttgttggctgcctgccacagaatgaccactgaggaaataaagcgagctttggattcactgcaaaa

SEQ ID NO: 81983 - DNA, 489 bp, Homo Sapiens
attctgcagattaaagacactcaatctttaaccttgaagggcaggcaaaaggtcggctatgctgtcaacatagaagtcagggaccattttcttcttagacacgcagtcactttcctgattattcttcacatcccctagagtggagactccggtgagggtcaggatggtcttcaggccacaggtggcgcctaggaggatgtctgtgtccaggcggtctcccaccatgacggtgcgctcggggttgatgccgtattcctgggacacgcagtcgaaaatgaagcggctgggcttcccgatgatgtcggcctggcgctgggcggccatctccacggctcggaccagacacccggtacccgcgatgaagcggccgttctcaagcggaagccggttgtccatgttggtgcccacgagcaggcagccgggctgctgcaggtagcgcagggccttggtgagcttcatgtagctgaagtgcgggtcaaagcccaccac

SEQ ID NO: 81984 - DNA, 1064 bp, Homo Sapiens
  misc_feature (801)..(810): n is a, c, g, or t
aaagcggtcatcctaagacagaagtaagccatagtccaacattgtttggtcaccatgggggtccttttgtaactgccttatgactcaacattaccaataaagtgatgatcctggtctgcgtttatacatacgcttgttcggtcctgttcctgacacgtgggttgagtcaccacagctctgtgtggggaacgtgggagacaggagtggctcctgccgggggaagctgggcctgccattggccctgtgtctatcatgaggggagagctaagaaagaaattctcctaggaagagctcatggcccagtacatcctagtaattattttaattagtttttgttctgacagcttgtcaggaagggcacagaatgggacagagataaaccagacagtcattttgatctgctctctacggtttttcaagtcagaggcaattgatgcttgtctaatgcatccacacactgcatgtctgactggcgatgccacgctcctaagtagttctgccatgaaacataaaagacaaaggaaaagccgttacacatcacacagagaacattttcgggtcccacagcggtggtggcaggaagctcactctcgcgtcaatattagagtgtgtgtgtgggtctcggggatctcggtggctcccatcttccttcattgttctgaacatcctgtattgtaaaccatggctggggtgctaaagtgcctgtgaatccccatggggaaaaagctggaagtggaaagctcaccataccatgtatttacttttaaaaacagaaaaaaagacatgtatggatatgtctannnnnnnnnnattggcacattgtatttttgtgttgacttgtttttagaaatgatgtgtccacacacgtacccgtgtctcttctgcatttctgtgtcatggttctgtttcttaatcacgtgcggcggtgtctaagtggtgttaccagtgtacgcgcagtgaccttggatgacagtggctctttctcacagcctcccctgagctgtgagaaacagctttctctgtacatatgcaactcctaataaaaggcatatttcttcctgtta

SEQ ID NO: 81985 - DNA, 1041 bp, Homo Sapiens
  misc_feature (40)..(40): n is a, c, g, or t
  misc_feature (81)..(81): n is a, c, g, or t
  misc_feature (90)..(575): n is a, c, g, or t
  misc_feature (593)..(615): n is a, c, g, or t
  misc_feature (699)..(723): n is a, c, g, or t
  misc_feature (967)..(979): n is a, c, g, or t
cagttccgtagcgcaggtcgaacagaggccccgaggactnccaggggaaccctgtatttttagtctgtccgttcgcacctntgactgagnnnnnnnnnnnnnnnnnnnnnnnnnnnnnnnnnnnnnnnnnnnnnnnnnnnnnnnnnnnnnnnnnnnnnnnnnnnnnnnnnnnnnnnnnnnnnnnnnnnnnnnnnnnnnnnnnnnnnnnnnnnnnnnnnnnnnnnnnnnnnnnnnnnnnnnnnnnnnnnnnnnnnnnnnnnnnnnnnnnnnnnnnnnnnnnnnnnnnnnnnnnnnnnnnnnnnnnnnnnnnnnnnnnnnnnnnnnnnnnnnnnnnnnnnnnnnnnnnnnnnnnnnnnnnnnnnnnnnnnnnnnnnnnnnnnnnnnnnnnnnnnnnnnnnnnnnnnnnnnnnnnnnnnnnnnnnnnnnnnnnnnnnnnnnnnnnnnnnnnnnnnnnnnnnnnnnnnnnnnnnnnnnnnnnnnnnnnnnnnnnnnnnnnnnnnnnnnnnnnnnnnnnnnnnnnnnnnnnnnnnnnnnnnnnnnnnnnnnnnnnnnnnnnnnnnnnnnnnnnnnnnnnnaagaattcggcacgaggnnnnnnnnnnnnnnnnnnnnnnncacatgtgaaaaaaattctttattaatttctcacatttcattacaaaatgtatgttgcaaacaacttgaataacctactttggnnnnnnnnnnnnnnnnnnnnnnnnnaaacccttggcttcaaggactcagggtctccctatctcttatgaagtattgggaaacactgattactggagtcaataggttatcattttgctatttattttcttctctcaagctctgaaaaaaatgtcctctgtataaattaaacaacaacaaaaaatgttgtaaattctatgtcattacagtcaacagaattataataatgcatccaaaatgtgcggccacaaaatatcaggtatatgtttgnnnnnnnnnnnnntgacattctagccttgttaaaaggataatggtcccatatttttattaacaggttagcaaaac

SEQ ID NO: 81986 - DNA, 1012 bp, Homo Sapiens
  misc_feature (29)..(30): n is a, c, g, or t
  misc_feature (262)..(262): n is a, c, g, or t
  misc_feature (293)..(294): n is a, c, g, or t
  misc_feature (306)..(306): n is a, c, g, or t
  misc_feature (313)..(313): n is a, c, g, or t
gggaagtgcatggttggattacggccccnnagaatggcctgggcaaaatccagggggaattgatttcggagaaggattgggaacccctgataaagttgaaagtggataacattgggacagagcactaaagtttttagcagagatccagcccgagtgccagaaggactggagtgtaatggatttaaactgaaaaaagagcccatggagttagcgcacggccccacaaggggtcatatggcttagtttcctcaagcatatgtgntatatgcacaccacacacacattccatgacnncaggtctgcttngtgtccncaggcaccagtagtttgagccccccctcaaaagacatgaagggggttggggtctgtgtgagtagtggggaggtgcatgtgtatccacatgtgtgcatacactcttaagttgggtgggaagtggattccttgttggtttctggttcagagtgctctcccaccaccagagacaagtgggtaaaaaggtcagtccattgcaggaatatatatccgggagagctaggtcccttggggctctggatgctgggtaacccagaggtaatgtgggtaccctttctgaagctgtcagggctgtgactagcacccttatcacccctcactgccttgtgggaatagtagagggtttttttcctccagaccccctggcctttcagttcttaactatttccctccaggccagaaagttttctttgaggaaggagaggagagggtggcaatgatgcctttgatctggaattggacatttctctgtcagagcacagaggaggctcatatcacctcttccctctcctacttggcccagctgcttggaggaccgaccccatggctgagaatatgacggcaagaggaacagagtttgctccaagtgggaaagggtcccaagcagtccagagaagatgtctgtgtggctttccctccctgcctcccccagctcccacactggcctttgtaaataaatggcgtggtctttgttgtaaaa

SEQ ID NO: 81987 - DNA, 1233 bp, Homo Sapiens
cggtccggaattcccgggatatcgtcgacccacgcgtccgagaccttgcagaccgaggcccctgggctggtacccagccttggctcctttgggatgtcccggaccccagcaccctcagcaggcagcaacgcagggtctacgcccgaggcccccacttcctcaccagccacgccagccacatcttctccaacaggggcttccagcgcccagcagcaactcatgcagcagatgatccagcttttggctggaagtggaaactcacaggtgcagacgccagaagtgagatttcagcagcagctggagcagctcaactccatgggcttcatcaatcgtgaggctaacctgcaggccctgattgccacaggaggggacatcaacgcagctatcgagagactgctgggctcccagctctcctaatccctcggcccatgcctcctgcctctcccctccctcgatgtcagcattcggttcttctgtcaatccttaccctctgcagcttgtcctcccttccgtcttctccctcatcctttccaaacagcagggtgactttagaggcatgggctccaaccccttagctctgtctgagaattatggttttactgctacgtctctaacagactcttctctcctggtctccttgagcagtgctacttaaacagttttcacagtttcattgattgactctacctccttgccccacaccacttttgcaatctttaaactttcagtgggctgtgcagagtccagggaggaaacagctctctggtttactggaacatagtcttccatctataccactaagggtttggctaatggttacttttggaaactcccttccttcctttttctccctaccccccaacccctagcccaaccaaggctaaaaattcctgctctgaaggaggagcaggtgaaacaggtggtaattttccttctcggccctattctggttcattcagcacttttggtgggaactgttggaaattccagggtaaggaggaagatgcctgtttctccctgtcttgaagagggagatgagaccagctctctgggacaggaattaacaaaacgctggagcagcccagaggaaattcgtgttaacacaagcccgcaatgaccacttatcggacgaccgcatgcgcggacaacacgcctgataaaggcttggaacttggattacctgggggaccaaacctcataccttttaggacaaaatccgccccacggcaaaac

SEQ ID NO: 81988 - DNA, 980 bp, Homo Sapiens
  misc_feature (33)..(33): n is a, c, g, or t
  misc_feature (35)..(35): n is a, c, g, or t
  misc_feature (50)..(50): n is a, c, g, or t
  misc_feature (81)..(81): n is a, c, g, or t
  misc_feature (149)..(149): n is a, c, g, or t
  misc_feature (154)..(154): n is a, c, g, or t
  misc_feature (169)..(169): n is a, c, g, or t
  misc_feature (176)..(176): n is a, c, g, or t
  misc_feature (223)..(224): n is a, c, g, or t
  misc_feature (239)..(239): n is a, c, g, or t
  misc_feature (247)..(247): n is a, c, g, or t
  misc_feature (259)..(259): n is a, c, g, or t
  misc_feature (305)..(305): n is a, c, g, or t
gggccgggtgggatgccccatgtcgcactgccnantagtagcttttgcanagtcttgtgccacacccaggtaaattctgtntgcaggtgtttgtagtatgcagcctccctcagttactctttttccacttctcactcctcctataggcntgccntgacatgttctcgangggtgcnagcacaccgggagggatgctggacaagttctgggcctacattctganntagccctctcattcntccctccntgggcttctgcncaggctccaggatcagggatatacttctcaacccgcacttctcctntactgaacccactggcatcacctgatgccactaatttgtgaacaaccaagaaatcatttccccattggttggagtattccctcagcctatagcatcaaagcagaccagtggccaacagccccaaggggagcccaattaaatacctgggttcagtatcctaacctgttatgtcctgacagcaatggtaaccccagtaattctgtaatgttgtaatttccgcatggccctgagctcccttttcctcaactcagtgaggccaggatttgctctccaaaaggctttgctagtgtgttcaatgggacctgctgtggggagtcctaagacagacatctaattattctctctttttccccccctctctatgtgtatatttctaatggatctataagaacagcaacaagagagttctaacaattctagtgtgaagccaaatagtgatcttttagtgctttggggatggggtgggctggggtggatggatgggcaacagtgactttgattacccttgctgctctgcatttgccagtttattcttttgtttcttttatctgactgactctgtcaaacaagtgtcaaagttgtgtgttaaaaaatgtttaacaaaaaaaatgttgtaatgacacaaagccttatgaaaatatttatggagttcaataaaagaagtaaaaagacaaa

SEQ ID NO: 81989 - DNA, 700 bp, Homo Sapiens
  misc_feature (51)..(67): n is a, c, g, or t
  misc_feature (117)..(117): n is a, c, g, or t
gtgtgcaataaagcagaaagaaaatgtcagcccagaagtgaaagactagtnnnnnnnnnnnnnnnnntatttgtacatatgatctaatttagaaagtccagaattggcttcatacangaaaagtgattactttcattttacaaattactttaaaattttggtaaagtttctgttaggcttctggtctacagtgaggtattttaaaaataaaggttatattagaatcctcaacagatctctttaaaattacctcctgtgtaaccaccaccaaatcctatcttctaccacaattaccccttcccccaatgccaagaccaaagcacaataatgaatatttttattgaagttcgatattcataaataagttgcaaaataagagttggatatatttttaattcacaatagaaaaagttgacaacatagaaaatgctgctttgcactgaaatacttaaaattatgaaagttttcaagtaaagaaattaaagccttttataaaatccaaccaacattcttgatttttcatttttatgaacttgatcagaaaaattcatcttttttaaccctgccctaatttttcttgaggaattaaatagagcaaactattttcaggttatgcttacaataaaatatacttaagaaaatgactgaagatgtatgtttttgaatgttttgattaaataaatgtacacatttagaacac

SEQ ID NO: 81990 - DNA, 1120 bp, Homo Sapiens
  misc_feature (62)..(62): n is a, c, g, or t
  misc_feature (71)..(450): n is a, c, g, or t
  misc_feature (492)..(509): n is a, c, g, or t
  misc_feature (890)..(890): n is a, c, g, or t
gctatgaaaacgccagcacgcgccttttacgttcctgcctttgctggctttgtcacatgtcnttcctgcgnnnnnnnnnnnnnnnnnnnnnnnnnnnnnnnnnnnnnnnnnnnnnnnnnnnnnnnnnnnnnnnnnnnnnnnnnnnnnnnnnnnnnnnnnnnnnnnnnnnnnnnnnnnnnnnnnnnnnnnnnnnnnnnnnnnnnnnnnnnnnnnnnnnnnnnnnnnnnnnnnnnnnnnnnnnnnnnnnnnnnnnnnnnnnnnnnnnnnnnnnnnnnnnnnnnnnnnnnnnnnnnnnnnnnnnnnnnnnnnnnnnnnnnnnnnnnnnnnnnnnnnnnnnnnnnnnnnnnnnnnnnnnnnnnnnnnnnnnnnnnnnnnnnnnnnnnnnnnnnnnnnnnnnnnnnnnnnnnnnnnnnnnnnnnnnnnnnnnnnnnnnnnnnnnnnnnnnnnnnnaagaattcggcacgagggttggagcggccgcggctgtaggcnnnnnnnnnnnnnnnnnngtctcagaagtggctctctcatacctccagaagacgctgctggacacagagtgacaagctgaagggcgcacgggaggatgaacagtggcttgctgcaggagctggatggagctgagaaatgcaagccgacaaagaccaaagctgctcaaacagcggaagatgccatgcagataatggaacagatgaccaaagagaagactgagactctggcctccttggaggacaccaagcaaacaaatgcaaaactacagaatgaattggacacacttaaagaaaacaacttgaaaaatgtggaagagctgaacaaatcaaaagaactcctgactgtagagaatcagaaaaatggaagaatttaggaaagaaatcagaaaccctcaaagncaggctaaagcagctcagaatgtcccagcagcgtttcaagcgttgcaagacagagaacgttgaacacttgcttgagagagcgtggggagcaagcacgggaacgaatgtcacatagtcgatcagaaaggctggacagaagaacagaatctgatgctcatataactcagtctgttagcacaatgatccaaacagcagaacatccaagtttcattaaacagaacgcagaatga

SEQ ID NO: 81991 - DNA, 985 bp, Homo Sapiens
agaaacttagacagcagcttgaggcagctgagaaacagattaaacatttagagattgaaaagaatgctgaaagtagcaaggctagtagcattaccagagagctccaggggagagagctaaagcttactaaccttcaggaaaatttgagtgaagtcagtcaagtgaaagagactttggaaaaagaacttcagattttgaaagaaaagtttgctgaagcttcagaggaggcagtctctgttcagagaagtatgcaagaaactgtaaataagttacaccaaaaggaggaacagtttaacatgctgtcttctgacttggagaagctgagagaaaacttagcagatatggaggcaaaatttagagagaaagatgagagagaagagcagctgataaaggcaaaggaaaaactggaaaatgacattgcagaaataatgaagatgtcaggagataactcttctcagctgacaaaaatgaacgatgaattacgtctgaaagaaagagatgtagaagaattacagctaaaacttacaaaggctaatgaaaatgcaagttttctgcaaaaaagtattgaggacatgactgtcaaagctgaacagagccagcaagaagcagctaaaaagcatgaggaagaaaagaaagaattggagaggaaattgtcggacctggaaaagaaaatggaaacaagccacaaccagtgtcaggagctgaaagccaggtatgagagagccacttctgagacaaaaaccaagcatgaagaaatcctacagaacctccagaagacgctgctggacacagaggacaagctgaagggcgcacgggaggagaacagtggcttgctgcaggagctggaggagctgagaaaagcagccgacaaagccaaagctgctcaaacagccggaagatgccatgcagataatgggaacagatgacccaaagagaagactggaaactctgggcctcccttgggagggacaccaaagcaaaacaa

SEQ ID NO: 81992 - DNA, 1117 bp, Homo Sapiens
  misc_feature (64)..(140): n is a, c, g, or t
  misc_feature (1024)..(1066): n is a, c, g, or t
cgtgcccatgcatctggaaatctaatttagagttgtaggtgaattttcttttcctccaattcannnnnnnnnnnnnnnnnnnnnnnnnnnnnnnnnnnnnnnnnnnnnnnnnnnnnnnnnnnnnnnnnnnnnnnnnnnnnaagaggctctgggatagatggttaagaagtagaaaatttagtttagggaaagccctcccacaggtgggaaattgctctcccctctgtggcttggacttacgtttattgtcaaggggagtttttacatggaaatgacaatgggaaaattcagatattttcttagtagtgcagacctttacccctagtctatgaaaaaacaaaccaaaatatgctcttgcgcccaggccagtggtgagttagaggtatgctatcactgtttgtaagcatctggggaggtactgaactgtaagaacatgcttggacacttagtcattgttctgtgtttttattaatgaagaaaagggaagacagacttccaagagttactgtccacccggtggtgtggccccatagcgaagtctaaatgcctgtagagatagagctagctggtgtggttgcagtgaccttgtagaggaaatcagttcattactttgacatcattcagtgagctctcctttcctaaggaagtttaaatgtccttagttagggactgactttcttaagtaagtttaaatttactacatattgtgaagagacaggatcaagttcagaatccttaaatgtctgattaggcatcacttggatgaggaggtgggcgatttggctctgacagctggagatgaaggcacactcataccacatacaagggaggatttggagcttttaagccagtttcagatttactctgaaatgtggagcattcctgcaagactgtgcagctcacggaatatagaagacatggcattttactcagaagtcataagtttttgcccccctcatttacctcgtattaccaagaaagaaaatgttatcgatactaaacaccatcagttcagagggaggannnnnnnnnnnnnnnnnnnnnnnnnnnnnnnnnnnnnnnnnnnacatagctttaaaagaagacattcaaaatttgatgtgctacaagcctcatg

SEQ ID NO: 81993 - DNA, 262 bp, Homo Sapiens
cacattgtatgcatatatcgaaacatcacatgaaaaaatatgtgcaactattatgtatcaactaaaatggcctggatcgttcctcttcctcccctcgcccccttatgttcagggaactggctcaaacacaattaccatttcaggttgggcactacagtgagaaattccttcctaactccaagccgaccaaataagtctaagatgggagattaagaaaatttacatttccagccggggcaacatagcgcgacctcatctctac

SEQ ID NO: 81994 - DNA, 954 bp, Homo Sapiens
  misc_feature (598)..(598): n is a, c, g, or t
  misc_feature (608)..(608): n is a, c, g, or t
  misc_feature (678)..(678): n is a, c, g, or t
  misc_feature (683)..(684): n is a, c, g, or t
  misc_feature (686)..(687): n is a, c, g, or t
  misc_feature (707)..(707): n is a, c, g, or t
  misc_feature (711)..(711): n is a, c, g, or t
  misc_feature (713)..(713): n is a, c, g, or t
  misc_feature (715)..(715): n is a, c, g, or t
acgacgaccaatacacccaatggactgccccagccaaatgcccgaggttcccccgaatattggctttcccacgcaactcaagggtcgggctccatgcaacgggggtgcgggcacgagcccgcaacccccacggccgtgcaagtacgggctccctcgtctagcccccccctccctggaacgtcttagcccggttgggaaccggaatgaggagccccccaaagccctcctacctgttggaaccccttggttgatgagccccggagaacctgctgaaacagggcctgcaccgcacgggaaccgagtgcaggtggtcagcagaggacgatcccatgccataattctcttgtgagccctcccggccagggagcaccttctctacccacctcccgatcaggactcaccaggcggcagcagaggtccaccaggccagcaccaggaatcctccatcatcaatgaggacacagagctgcggcggtagaagctggcattgaagggctcagggttctctgtccagtcctcagctgccctggagcacccaagaggcagactggctgggtgatgcctacgtgttgagatcctggtccctccacacacgctntaccagctgntgcgtgatgcccgtgtccaagaaccaggttgtgcagaaggaagttgttgcctggaacaggaggggagggntgggnntnngggcatcttcttgcagctcnttgncnancctcacaccccaaccttaaggctccaccaggagcctcctccatgacctggccctggcccaggcccagcccttagcttgtgcctgcttatttccacacctgcccggcctctgggttcctctgggctggccccatgctgcctgggcactgcccagagccagctgccctgccaggcactcacactgcttggagtctggagtcactttctccatgagctcaataaagtttttcaggaactcgg

SEQ ID NO: 81995 - DNA, 640 bp, Homo Sapiens
  misc_feature (14)..(14): n is a, c, g, or t
  misc_feature (88)..(88): n is a, c, g, or t
  misc_feature (117)..(117): n is a, c, g, or t
ttggggggtgactnccaaggacgtaaggggatcaagttcctgtgtaaggctctgaggcaaccctggtgcaacttgagatgtctgtggntgtggggatgtcccatccctccgctcagntgtgaagacttcggtttgccctcagctgcaaccagagcctcgtcactctggacctgggtcagaatcccttggggtctagtggagtgaagatgctgtttgaaaccttgacatgttccagtggcaccctccggacactcaggttgaaaatcgatgactttaatgatgaactcaataagctgctggaagaaatagaagaaaaaaacccacaactgattattgatactgagaaacatcatccctgggaagaaaggccttcttctcatgacttcatgatctgaatccccccgagtcattcattctccatgaagtcatcgattttccaggtgtgggtgaactgcctgtgactcctctcctcccccgcccctacccctcagggataatgagttcattgctgggctagatgttttagccatgattctgcctctgttttatacctgcacacgtccttatctttgttacatatgaaatatctgtatcacgggtatattgagagaaataaaggtgagagcattcacaaatgaaa

SEQ ID NO: 81996 - DNA, 1067 bp, Homo Sapiens
cccaggtcatacttttgtatgtatgtaaaagctttagcattttagggaaaaaaatcaatctgtatttcaaaaataaactttgaggtttgaaaataataacaatattaataatggtagtattaacatctattatgtataacttaatctcaacataatttattgaattagaatgaacctggaacactttttgatgaattggtatcctagaggctgtttccttgggccttaactgctggaggattaggtaatcagggattccaagtgttgtgatcttttttctgatgatgccacagtcttcagtgtaaaagttcagaagcctaaaagaacaagtgatcctgaaagtagctgattccagacaagaaaattatattagaactcatgatatggttttttaaagtatttgttattactcagaagggttcatgaatcagtttccactacctctattccttctattgaagctttcctcaaatctacttgtgattcctgatagctcactggcaactgtaccaaggtggccactgtatcatctactgatccttctgcacctagcactcttggctccagataacgcacagaaacctattttctcaccagctgtcatttcttctagggcatgcagttctatgttcacagttcatgtgtaaaaataaaaccaaattcctggattatcaatatcagttctttacctgtgcataaaagaatatcatgaagtaattgaacttatctgttgatataaaaacacagatccaattcgtgtctgtggatgctgcaaggactggctcactggagccaaaccatgtggcggaaactcctgaaattggtggaaaaagtggaatatggcagattgggtaggtaggagaacaattttggagattttgtttctcatgttaaagtgtctgcattttatttgctgtaccctgcctactctggttttaaggattttttgacttcttcgaaaagcactgaataatctcttttccgggtctagattttttgatgagtactgtgtaaaattgtcaatattcaatggattatttaataataaattaagaattacactcata

SEQ ID NO: 81997 - DNA, 777 bp, Homo Sapiens
cagaaagtcatcgagaggaccgtttgtctggagggaatgtcctgcgtctgcgtttgatggcatacgagtcgtgatagtcttgatctgcagatgcggtatctgctgatttatctatctcacactgataggatcgtgatatgcgctcatcactccacatagaaagcctgtcagaaaggttgtatactatactacatgtatgacctaaattgacttgtttatttagtttctgttatagctgtaaaatttcaggcagagccataacattgtacagagtgtagcacttgtgattaaacctagcctgttaaatcctgaaaccttcaaccattacttctgtgaatactttagccctgggatttgggtttttctgttccggtgttgtgtctgttgccggcaatggacacaccatatctgctgctggcccaaggaacgtcattaatttttctttccaaattaagtattatgtgctagtcagtgtatagtaaagcacttctcttttttattactaaaaagctggcattagatttgcattataaatacctctctaggaactttatactccttttccttcttcaacaggtattgcccttaaatcttatcttttggccttgaaagtttatagctattgtttttcagttgttcgttgttttgttttgtttcactttagttctgtagtacctgcccattaatatttttgctttgattctagcaatgtgtatgtatctgtataaaaaataaaataatgaaagcaacctaaaaataggatgcaccaatagcaaa

SEQ ID NO: 81998 - DNA, 1011 bp, Homo Sapiens
  misc_feature (47)..(47): n is a, c, g, or t
  misc_feature (65)..(65): n is a, c, g, or t
  misc_feature (120)..(120): n is a, c, g, or t
  misc_feature (158)..(158): n is a, c, g, or t
  misc_feature (228)..(228): n is a, c, g, or t
  misc_feature (352)..(352): n is a, c, g, or t
  misc_feature (726)..(739): n is a, c, g, or t
ggcgatacattcacacaggacagttgacatgatcgattatcgactcnttagggattgcctcgagnccagaatcgcacgagtcagatcgcatagtcatttgttattcactgagtataggtntataaatgtcttgaggggaaaagcacaagccattttcntatgatcaaaaaatctttctttcctctgagtgagagtatctatatctgaggctaaagttaccctgcttanataataaattgccacatcatgcagaagagtatcctcatgctggggttaatagaatatgtcagtttatcacttgtcgcttatttagctttaaaataaaaattaataggcaaagcaatggaatatntgcagtttcacctaaagagcagcataaggaggcgggaatccaaagtgaagttgtttgatatggtctacttcttttttggaatttcctgaccattaattaaagaattggatttgcaagtttgaaaactggaaaagcaagagatgggatgccataatagtaaacagcccttgtgttggatgtaacccaatcccagatttgagtgtgtgttgattatttttttgtcttccacttttctattatgtgtaaatcacttttatttctgcagacattttcctctcaaataggatgacattttgttttgtattattttgtctttcctcatgaatgcactgataatattttaaatgctctattttaagatctcttgaatctgnnnnnnnnnnnnnnaatttgggggttctgtaaggtctttatttcccataagtaaatattgccatgggaggggggtggaggtggcaaggaaggggtgaagtgctagtatgcaagtgggcagcaattatttttgtgttaatcagcagtacaatttgatcgttggcatggttaaaaaatggaatataagattagctgttttgtattttgatgaccaattacgctgtattttaacacgatgtatgtctgtttttgtggtgctctagtggtaaataaattatttcgatgat

SEQ ID NO: 81999 - DNA, 1036 bp, Homo Sapiens
  misc_feature (59)..(79): n is a, c, g, or t
  misc_feature (752)..(752): n is a, c, g, or t
  misc_feature (832)..(832): n is a, c, g, or t
  misc_feature (836)..(836): n is a, c, g, or t
  misc_feature (846)..(846): n is a, c, g, or t
  misc_feature (893)..(893): n is a, c, g, or t
  misc_feature (997)..(997): n is a, c, g, or t
gtgccatgctaaaattaccctcactaaagggaattagcttgcggccgcggctgtaggcnnnnnnnnnnnnnnnnnnnnnaaaaagacatttcctggccaatttttttgcttgaagatgattgtctggttatacaagacatcaatctgaaggtaacaacttattttaacttaactactggcataaccattgccagcagtgaacttgcactagtccaagccaactcaaaaacacacattataaacatttgaatgtcatttttaaaagcgatgtcacagtttgtttcctaagaaatttaaaagcttttatttgaaaacgtatcttcagtttaaccctcagagttaagaaatattttttagatcattaaattcaattgtggttgacgtgctttaactaccgttctctaagttgtgtgctatacctagcctgtgggactccatagcttctctgagtcctaaagtggaggattctgttccaatgcttgtgagcaagaaggatcctcaaatgtctaggtttccaatattccaacactgctttactgggcagtgctgtgtatggaagttttgttttgttttcaaaggaccaagtaacttgacaccatattaaagacagcaaacattttttgtagaagtttacagcctgtatacattattccgccaaatttaagaactttaaatggattttaatatggatatgataatgacagccattaaaagatgctatttcttttactaacatttccccaaatgggcanaatagaggcatcatgtgccattggttctgtcatactggcctttgactgtgttggggaagtatcacacaaaagtgccatanacanagaggcagcngtgaactagaaagggtggactgttgatcaattgaaggagtattctanatctttctaatactgagaggaatgagggcactgagtggcctcacgcgtctgagtaataatcaacgtcgtaaatacagaagtgtgacgcccaatcaacagtctanagattgtgaacaaaacaacatatctgacgatcttggtaa

SEQ ID NO: 82000 - DNA, 1649 bp, Homo Sapiens
  misc_feature (88)..(88): n is a, c, g, or t
  misc_feature (112)..(113): n is a, c, g, or t
  misc_feature (116)..(116): n is a, c, g, or t
  misc_feature (138)..(138): n is a, c, g, or t
  misc_feature (152)..(152): n is a, c, g, or t
  misc_feature (220)..(220): n is a, c, g, or t
  misc_feature (225)..(225): n is a, c, g, or t
  misc_feature (235)..(235): n is a, c, g, or t
  misc_feature (252)..(252): n is a, c, g, or t
  misc_feature (505)..(505): n is a, c, g, or t
  misc_feature (960)..(1005): n is a, c, g, or t
  misc_feature (1047)..(1331): n is a, c, g, or t
ggttagattgcacagatgtgtgagatgtgttagacatcagagtctgtggatagagtcctttgacatgcatccagaccaaccacttgcntgttatcagcaaaatagtacattnntcntccttgtcccacgtactggctntgagtaaagttcancctgaagtacatcaggaagaattgaaaacgtcagagtagatgtgagttcatcgttgtcatcaggattntatcncctgagaacntgctagagagtccaccntcaccctagccactggtcctcaacttaatactttaaaaattcatttgtttctgttggaattgggatactaaggtccagaggtgtccttctaaagctggtagaggtttcacgagtcatcagggacccagaacccttctcttttgctgtccctttgtcctagtgcatggtttccacactgtggtgcaagatgtctcctcaagctctaggcattacatctgctatcctgcggtcagaaaaaaggaaggggaaaagnaagatcatttccttctctttaaggacatttcccagaagtcacacagaacatttccatttatattactttggccagaacttggtcatatggccacatttagttccagaatgattaggaaatgcagtcttttattgatccctgtgcccaggaaaatattggaggcctttttcaaggaaaaaggggaaaacagatattggttgacaaatagcagtctctgccatactgtccctggatacatgtctttgagtgaatgtcccttatttaccattctgattacttgttggatattttcaatatgtgttacaatatggttccaaaattgtatgtgatattccaacagcaagttggatgcaatgtgtcataaaaatgacctcagtgtcaaccagcatttgaataccgtgtctcaatgctgtgcaccaataaagaacacagaaagtcagagttttccataaatnnnnnnnnnnnnnnnnnnnnnnnnnnnnnnnnnnnnnnnnnnnnnngcctacagccgcggccgctccaaccctcgtgccgaattcttnnnnnnnnnnnnnnnnnnnnnnnnnnnnnnnnnnnnnnnnnnnnnnnnnnnnnnnnnnnnnnnnnnnnnnnnnnnnnnnnnnnnnnnnnnnnnnnnnnnnnnnnnnnnnnnnnnnnnnnnnnnnnnnnnnnnnnnnnnnnnnnnnnnnnnnnnnnnnnnnnnnnnnnnnnnnnnnnnnnnnnnnnnnnnnnnnnnnnnnnnnnnnnnnnnnnnnnnnnnnnnnnnnnnnnnnnnnnnnnnnnnnnnnnnnnnnnnnnnnnnnnnnnnnnnnnnnnnnnnnnnnnntgttaatgaaacgccttgctcgttctttcggttgctgtgatcgttaccatctcactcaatggcggcaacacggtttttcaaaaattcaggcgaaacgtcatgattatttcttgttcacacggccaccataatggcttggaccgtcacaacggttgtgttttgtgcgtttttttattggctccgcccccctaataatatacaaaaccgtccccaattcaaagtggcatacctgtatgatatgttaactcaggttccccgtgatctcccctgttctcctgttctcctgctttatcggaactgttcgtttcccttttgaag

SEQ ID NO: 82001 - DNA, 936 bp, Homo Sapiens
cagtcgacgggaccggacatatgcccgggaattcggccattacggccgggggagcgcggccatggcgctcctgctttcggtgctgcgtgtactgctgggcggcttcttcgcgctcgtggggttggccaagctctcggaggagatctcggctccagtttcggagcggatgaatgccctgttcgtgcagtttgctgaggtgttcccgctgaaggtatttggctaccagccagatcccctgaactaccaaatagctgtgggctttctggaactgctggctgggttgctgctggtcatgggcccaccgatgctgcaagagatcagtaacttgttcttgattctgctcatgatgggggctatcttcaccttggcagctctgaaagagtcactaagcacctgtatcccagccattgtctgcctggggttcctgctgctgctgaatgtcggccagctcttagcccagactaagaaggtggtcagacccactaggaagaagactctaagtacattcaaggaatcctggaagtagagcatctctgtctctttatgccatgcagctgtcacagcaggaacatggtagaacacagagtctatcatcttgttaccagtataatatccagggtcagccagtgttgaaagagacattttgtctacctggcactgctttctctttttagctttactactcttttgtgaggagtacatgttatgcatattaacattcctcatgtcatatgaaaatacaaaataagcagaaaagaaatttaaatcaaccaaaattctgatgccccaaataaccacttttaatgccttggtgtaagtatacctctgaacttttttctgtgcctttaaacagatatatactttttttaaatgaaaataaaaccatatatcctattttatttcctccttttaaaaccttataaactataacactgt

SEQ ID NO: 82002 - DNA, 1082 bp, Homo Sapiens
  misc_feature (85)..(85): n is a, c, g, or t
  misc_feature (88)..(88): n is a, c, g, or t
  misc_feature (144)..(144): n is a, c, g, or t
  misc_feature (187)..(187): n is a, c, g, or t
  misc_feature (259)..(259): n is a, c, g, or t
  misc_feature (265)..(265): n is a, c, g, or t
gccggcaaaggactccaaagaaaagaggaaagagcttttcactatgttgattcagagtatggattgctagcgtaattaaattgtntanacgtttgcctcctggattgtattatatcttgcatatcacactttccattgacattntgtattggaccatatcctctgcatatattgtatgtgctgtaangtaagtataatcatcttgtacttgataccatgccccaagtatagctatttgttatactaaacacatcatttnggtatntggtctctgtgttttggctagtgtactacttcataagttcattgtaaaatggctttactgccatcaacatgggtcatctacctagcagttaatgagtattgctgaatcaggtgtccaccttccaatgatgaagcaaggtaaggggtaatgttttgctcttgacacagagaaatttaatagctttatgtactaaaatataatatcttttaaagatagtgaaattcttcagttttttaaatctctagggattttttttcaatgttgtagaagatgcagctgcttaatggtcttgactaggactttttaaatgaatggtgtctgcaggtagatgatcatgaaaatatctctaacaaagttttactcttctatgaaatgcagaatttctagtacctgcctcctttgtttttgtaataattaaaatacttcttgtataaagagattagttcagcctgttagtaagtctgcagagatgatgctgagttggttgtgatttttagaatagactcctgggttgttttacaaatgtgccatattggcatgtcttacagtgatacctcaaacacagaaatttttatttaggaagatagctaaatctttattagaactgatttttattgtattcagtataaattttatgaagcttgtttctatgagtactgtggaaaattttataaatgtgagcatatatatttattttgtctgacataatttgtagttttaaagcaagtttcacactgaacttaacgttttcataaatgaccagtttgggatgtttctctcttttactttagtggcaaactcaagagtaaaaagtgtc

SEQ ID NO: 82003 - DNA, 1055 bp, Homo Sapiens
  misc_feature (117)..(117): n is a, c, g, or t
  misc_feature (181)..(181): n is a, c, g, or t
  misc_feature (183)..(183): n is a, c, g, or t
  misc_feature (201)..(201): n is a, c, g, or t
  misc_feature (228)..(228): n is a, c, g, or t
  misc_feature (232)..(232): n is a, c, g, or t
  misc_feature (567)..(598): n is a, c, g, or t
  misc_feature (976)..(995): n is a, c, g, or t
ctttgtggagtgaaggcacgcttcccaaatttgcaattagtcggattgcctggcggactcagcacgccagggagatataggctccctcaccacatgacatgttccaagctgagtatntgacttcccatgagacatgaaagctggtgggacaggattcacccatagtatcctaaagtactcntnataggaccaggagacaanacaccctcattagattattatgtattnaacntgtgagagacaagtgaggtctgctcagaccttgtaggcttctatcaaaacagcaccctgcttgctcaccaggcctagagaatggctgtaggtggccgctgacaagtgcctttagttgaagagcacatttctttcatctctcttgtccatacctgatagacacattcctctctgccaccttccttcagggaggacccgccctctgcagactgggcttagcgtgagcaggcacttcccatgtacgtgccaagggtaagctggcctgctgagcccagggcgacagaggggcactggtttacactttgccgggaccatcagggccgccaagcaggtcannnnnnnnnnnnnnnnnnnnnnnnnnnnnnnnttgctttctctgggtcttcaattagaatgtggctggcccatattggtttgtgtttaaatgctgtacttactacaagaaggatcttttttcaagctgtacatttataaaaacagatcatatactgtatatataaaaatcttgagatggtagaaacatgtatgaatgtactaagtagtattccactgtactcattcataaggtaggttttcttacaaaactcacaccaggtacttaaagatgtgctctgcttttttccaactacggagtgtcactgctttctagctcagtccctgcagactcttctcaactctttccctataggaaacttactccgcgtcctgcccccacctcctaaataaataaaggaatcggcgaacnnnnnnnnnnnnnnnnnnnnacctgagcaggcggccgcaagcttattccctttagttgagggttaattttagcttggcac

SEQ ID NO: 82004 - DNA, 662 bp, Homo Sapiens
  misc_feature (99)..(131): n is a, c, g, or t
cattacgtgccaagggtaagctggcttgctgagcccagggcgacagaggggcactggtttacactttgccgggaccatcagggccgccaagcaggtcannnnnnnnnnnnnnnnnnnnnnnnnnnnnnnnntgctttctctgggtcttcaattagaatgtggctggcccatattggtttgtgtttaaatgctgtacttactacaagaaggatcttttttcaagctgtacatttataaaaacagatcatatactgtatatataaaaatcttgagatggtagaaacatgtatgaatgtactaagtagtattccactgtactcattcataaggtaggttttcttacaaaactcacaccaggtacttaaagatgtgctctgcttttttccaactacggagtgtcactgctttctaggtcagtccctgcagactcttctcaactctttccctataggaaacttactccgcgtcctgcccccacctcctaaataaataaaggaatcggcgaacaccttcttcttttatgacatttgttatgggttgaattgtgtgcctccaaagaagatgttggagtcccagccaccagtacctcacaatatgaccttatttggaaatagagtctttatggagcaaacaaacaaaactaattaaaatgaagtcattag

SEQ ID NO: 82005 - DNA, 1154 bp, Homo Sapiens
  misc_feature (75)..(109): n is a, c, g, or t
aaactgaagatcactataggggctagccgtgagcgaacgacgagcgcagcgagtagtgagcgaggaagcggccgnnnnnnnnnnnnnnnnnnnnnnnnnnnnnnnnnnncagtcgacggtaccggacatatgcccgggaattcggccattacggccggggggaagtgacgacaggcgtgcccttgacaggcagggagggctaggctgtgcatccctccgctcgcatgcagggagatggctcagcgacttcttctgaggaggttcctggcctctgtcatctccaggaagccctctcagggtcagtggccacccctcacttccagagccctgcagaccccacaatgcagtcctggtggcctgactgtaacacccaacccagcccggacaatatacaccacgaggatctccttgacaacctttaatatccaggatggacctgactttcaagaccgagtggtcaacagtgagacaccagtggttgtggatttccacgcacagtggtgtggaccctgcaagatcctggggccgaggttagagaagatggtggccaagcagcacgggaaggtggtgatggccaaggtggatattgatgaccacacagacctcgccattgagtatgaggtgtcagcggtgcccactgtgctggccatgaagaatggggacgtggtggacaagtttgtgggcatcaaggatgaggatcagttggaggccttcctgaagaagctgattggctgacaagcagggatgagtcctggttcccttgcccgcgtgggaccccaatagaactcagcccttccatgccagcccttcctgctgcctccctcctgtctggctcctggggcccatgcttagagcccaggctccagccctgagtgcttccgagctggcggactgcccaggggccatcagaggatggtggtgctgctgctgatccggggaccgctgtcttccctcccatacgcctttcatccctccttctagggcctatggcagttctcccaggatgtgtggcgagagcctgggccagcccacagcgttcctagtcaggcagccacaccttggtcctcatcttggtcccttccaatctgaaacctcgtgcctggctcgtctgccacctacatttctctttccagctgctgttttgtaaaaagaaa

SEQ ID NO: 82006 - DNA, 1016 bp, Homo Sapiens
  misc_feature (28)..(28): n is a, c, g, or t
  misc_feature (48)..(48): n is a, c, g, or t
  misc_feature (71)..(71): n is a, c, g, or t
  misc_feature (73)..(73): n is a, c, g, or t
  misc_feature (89)..(89): n is a, c, g, or t
  misc_feature (142)..(142): n is a, c, g, or t
  misc_feature (223)..(223): n is a, c, g, or t
  misc_feature (249)..(249): n is a, c, g, or t
ttcctgcagagtcgagggcagatcatcntgccaagaaacccgctctgntcatgatcagcgtgggaactctncntattgacgcgaggcancctgtgtgtgtacagtgccttctgcgttgttaggcttgcccaccagacgtacntaccatgtaccgtcagtgctggcagacgcaccacggcagtacgacaagccctccgttcttggcccaacgacgagggatgcntatgacacaacccctacatccgcgcnttgtggacgctgtgctaccaagaaagctaccagaagacggttctggagatcgacacccccaaagtggagcaggtgcccatcgtggacatcatgttcaatgacctcggtgaagcgtcacagaaatttggatttgaagtggggccggcttgcttcatgggctaggagccgccgagcccgggctcccgagagcaacctcgtgacctcagcatgccattcgttcgtgagtgtcccgtgcacgtcctgatcctggacagtgaaggcttctccctcccctcccacctgacttcatctacgcctcggcaccacggggtgtgggaccccagcccggagagaacagagggaaggagccgcgcccccacctggagctgaatcacatgacctagctgcaccccagcgcctgggcccgccccacgctctgtccacacccacgcgccccgggagcggggccatgcctccagccccccagctcgcccgacccatcctgttcgtgaataggtctcaggggttgggggagggactgccagatttggacactatatttttttctaaattcaacttgaagatgtgtatttcccctgaccttcaaaaaatgttccaaggtaagcctcgtaaaggtcatcccaccatcaccaaagcctccgtttttaacaacctccaacacgatccatttagaggccaaatgtcattctgcaggtgccttcccgatggattaaaggtgcttatgtttttgtgagttttaagtaaatatttgtattgtattgttataa

SEQ ID NO: 82007 - DNA, 721 bp, Homo Sapiens
  misc_feature (154)..(163): n is a, c, g, or t
  misc_feature (644)..(661): n is a, c, g, or t
agagaaaaatagtaagctggtttagaaactgacgagggcaaacagccaggacgcattggagaggaatgtgccaaagatctaccctgagataacgcctgtccagtgtcttcaccacgtgaataaccagcgctccaaaagtgtttttctgctttgnnnnnnnnnnttccacaagcttttaaaggtgcatttaagaatccatgtgactttagaatggaactgccggccctggcaactgtcacgtgtgctagaaggttcgatgcctctggaatgcatgtgatactcatctccattttgtttccttgattgcatttttgttcttttagcagatctgtccctgtgggtggtgtctaagaagtcggacaccttggtttttgtgttagattgagctgggcagctgcaatcagcttctttatatgcaaattaggcacgacccatctgtggttcctggttggtggctaatgaagtgaggggagggagggatgtcaccccaaaagtaggccctcccattggctttggccaggccagacacttcacatcgtttacatggttctgtgtaattttaaagtttatgtgtataaagcgaagctgtttctgtgaaactgtatattttgtaaataaatatattgctactttgaggttcatgnnnnnnnnnnnnnnnnnngcctacagccgcggccgcaagcttattccctttagttgagggttaattttagcttggcac

SEQ ID NO: 82008 - DNA, 1069 bp, Homo Sapiens
  misc_feature (438)..(460): n is a, c, g, or t
  misc_feature (499)..(987): n is a, c, g, or t
  misc_feature (1036)..(1036): n is a, c, g, or t
  misc_feature (1038)..(1038): n is a, c, g, or t
gcggccgccgccgccgccgccttctcctcgtacgtgatgttggaagctccatcagcctgggtcccagattgaggacaacgaggagcacagatctctgctgacccttgatggatttgtactcctctcttctagatcaagtcatgtgacaagttcttgccaatgaatggaacatgacaggaagtgatatgtgttatttccgggcaacagcaattaagaaatgggtgcatcttctccaccctctctttcccctcccacagcttgctgcagaggaacccagccacttggaagccatgtgttgaagataaaaggaccacaagatggaatacatccggtttcctgatgtattttcctccaaatacatcatttggaggaaagccaactccaatgcgtagtgctcattttggacttgataaataaactttcattgtctttaagtcnnnnnnnnnnnnnnnnnnnnnnngcctacagccgcggccgctcccctcgtgccgaattcttnnnnnnnnnnnnnnnnnnnnnnnnnnnnnnnnnnnnnnnnnnnnnnnnnnnnnnnnnnnnnnnnnnnnnnnnnnnnnnnnnnnnnnnnnnnnnnnnnnnnnnnnnnnnnnnnnnnnnnnnnnnnnnnnnnnnnnnnnnnnnnnnnnnnnnnnnnnnnnnnnnnnnnnnnnnnnnnnnnnnnnnnnnnnnnnnnnnnnnnnnnnnnnnnnnnnnnnnnnnnnnnnnnnnnnnnnnnnnnnnnnnnnnnnnnnnnnnnnnnnnnnnnnnnnnnnnnnnnnnnnnnnnnnnnnnnnnnnnnnnnnnnnnnnnnnnnnnnnnnnnnnnnnnnnnnnnnnnnnnnnnnnnnnnnnnnnnnnnnnnnnnnnnnnnnnnnnnnnnnnnnnnnnnnnnnnnnnnnnnnnnnnnnnnnnnnnnnnnnnnnnnnnnnnnnnnnnnnnnnnnnnnnnnnnnnnnnnnnnnnnnnnnnnnnnnnnnnnnnnnnnnnnnnnnctcatgtcagagtgcgaaccgacagactataagaacaggcgttccctgnanctctcgtggctcctgttcgcctgcgctacga

SEQ ID NO: 82009 - DNA, 809 bp, Homo Sapiens
  misc_feature (356)..(411): n is a, c, g, or t
  misc_feature (461)..(508): n is a, c, g, or t
gcgaacacgggagcatgatggcgattccgggcaggcagtatgggcttattttgccaaagaaaacacagcagttgcaccctgttttgcaaaaaccatcagtgtttgggaatgattctgatgatgatgatgagacctctgtgagtgaaagccttcagagggaagctgctaagaagcaggccatgaaacagaccaaactggaaatccagaaggcccttgcagaagatgctactgtgtatgaatatgacagtatttatgatgaaatgcagaaaaaaaaggaggaaaataatcccaaattgctttaggggaaagacagaaagcccaagtatattcacaacttgctaaaagcagttgagatnnnnnnnnnnnnnnnnnnnnnnnnnnnnnnnnnnnnnnnnnnnnnnnnnnnnnnnntggaaaagggggagtttgatgataaagaagcatttgtgacatctgcatannnnnnnnnnnnnnnnnnnnnnnnnnnnnnnnnnnnnnnnnnnnnnnnggctgctgcactggaagcatgtttggatgtaaccaagcagaaagatctcagtggattttataggcacctattaaatcaagcagttggtgaagaggaagtacctaaatgcagctttcgtgaagccagatctggtattaaagggaagaaaaactcaaggggcttctccaatgaagtaagttcaaaaaacagaatacacaagagaaatgcattcttcaaactggatgtgaaagtaggaggaaaagccagatgcagacagtgacttcgatgctaagagcagtgcgggatgatgagatagacagag

SEQ ID NO: 82010 - DNA, 1021 bp, Homo Sapiens
  misc_feature (64)..(64): n is a, c, g, or t
  misc_feature (100)..(100): n is a, c, g, or t
  misc_feature (112)..(112): n is a, c, g, or t
  misc_feature (123)..(553): n is a, c, g, or t
  misc_feature (705)..(721): n is a, c, g, or t
cgcagtcgaacagagagcagaggactccaggggaaccttgtatttattctgtcggttcgcactntgattagctcgattttgatgctgtcaggggcgagcntatgaaaacgcnagcacgcgccnnnnnnnnnnnnnnnnnnnnnnnnnnnnnnnnnnnnnnnnnnnnnnnnnnnnnnnnnnnnnnnnnnnnnnnnnnnnnnnnnnnnnnnnnnnnnnnnnnnnnnnnnnnnnnnnnnnnnnnnnnnnnnnnnnnnnnnnnnnnnnnnnnnnnnnnnnnnnnnnnnnnnnnnnnnnnnnnnnnnnnnnnnnnnnnnnnnnnnnnnnnnnnnnnnnnnnnnnnnnnnnnnnnnnnnnnnnnnnnnnnnnnnnnnnnnnnnnnnnnnnnnnnnnnnnnnnnnnnnnnnnnnnnnnnnnnnnnnnnnnnnnnnnnnnnnnnnnnnnnnnnnnnnnnnnnnnnnnnnnnnnnnnnnnnnnnnnnnnnnnnnnnnnnnnnnnnnnnnnnnnnnnnnnnnnnnnnnnnnnnnnnnnnnnnnnnnnnnnnnnnnnnnnnnnnaagaattcggcacgagggagaagttggattctacatagctggtggccttgtagctgtgtcaaaaaaaagaactggctaaatacagacatttgtaaaacatagtcatgcttaagagactagggaaatgagtaacagtagaagaatttgtcttnnnnnnnnnnnnnnnnntttttttccttcactttgttctggaatttaaaaagtgtctagagcccattactttagccttagctttttggacagcgttatcttataactttccttgaagtgagctgctaagcagaagaaaacttgtttctttttctttttaacctttaccacaattctgtgggccaaagggatcaggagacagacatagagcagtagaaaacctgagacagagaaaagaagaatgagagagactcataacagatggtaaagtagaggaggggtgagggatttgccaagaggtgacaaaagtgaaaaaaa

SEQ ID NO: 82011 - DNA, 1021 bp, Homo Sapiens
  misc_feature (26)..(26): n is a, c, g, or t
  misc_feature (65)..(65): n is a, c, g, or t
  misc_feature (73)..(73): n is a, c, g, or t
  misc_feature (105)..(106): n is a, c, g, or t
  misc_feature (134)..(134): n is a, c, g, or t
  misc_feature (136)..(136): n is a, c, g, or t
  misc_feature (143)..(143): n is a, c, g, or t
  misc_feature (154)..(154): n is a, c, g, or t
  misc_feature (184)..(184): n is a, c, g, or t
  misc_feature (232)..(232): n is a, c, g, or t
  misc_feature (251)..(251): n is a, c, g, or t
  misc_feature (267)..(267): n is a, c, g, or t
  misc_feature (295)..(295): n is a, c, g, or t
  misc_feature (335)..(335): n is a, c, g, or t
  misc_feature (344)..(344): n is a, c, g, or t
tcgatcatataggattgccctcgagnccagaatcgcacgagttgaagtatcgagcacagaatgtnccatgagnaatgcagtgatcagtctttatacatcatctanncagcagtctccagagtgcgcaacagatntntctttcntaaaagttgtntgtagatacaggaagttctcagtacttatnaaatggagcagagtaatccaaacgtgaaccagagaatgagtaaccaancagcaccctctgttcttancagcagtataagaatntcatgtcatccatttgtaacagtctttntgaagcattgtttcctgaatcttcctactcgactagattntcagcttanaccattttaggttcaatagctgaagtttttcatgtcccagaaggcagaatttatacagtatatcagctgagtcatgatattgatgttggtcgtttccaaacactaatggaatgttttaccagcacttttgaagacgtgaaaattttagcatttgatcttctgatgaagttatcaaaaacagctgtacattttcaggattcggggaaactgcaaggcttatttcaggcagcattggagctcagcacaagcaccaaaccatacgactgtgtgacagcttcctacctgctgaacttcttaatctggcaggatgctctaccgtcatccttgtctgcctacttaactcagcaagttgcatgtgataatggagataggcctgctgctgtggtggaaaggaacacattaatggttatcaaatgcttgatggaaaatcttgaggaagaagtatctcaggctgaaaattctctgcttcaggcagcagcagcatttccaatgtatgggcgagtccactgtataacaggagctttgcagaagttatctctaaagtaaggatttccacagctgcctcctgtctcagaaatccattcatttctgagctttaacctctggttggaatgtgtcctgggaaaggaatgcagtctattgctttgaataaaattgaaaatcagatttaaaaacat

SEQ ID NO: 82012 - DNA, 1007 bp, Homo Sapiens
  misc_feature (133)..(133): n is a, c, g, or t
  misc_feature (135)..(343): n is a, c, g, or t
cgtaccctgatcttgatacctatacgcttgagtgagtgtacgctccccagccgacgaccggcgcacgatcatgaggaggagcgagagcgccatacgcaaacgcctctcccgcggttgccgatcataatgcagntnnnnnnnnnnnnnnnnnnnnnnnnnnnnnnnnnnnnnnnnnnnnnnnnnnnnnnnnnnnnnnnnnnnnnnnnnnnnnnnnnnnnnnnnnnnnnnnnnnnnnnnnnnnnnnnnnnnnnnnnnnnnnnnnnnnnnnnnnnnnnnnnnnnnnnnnnnnnnnnnnnnnnnnnnnnnnnnnnnnnnnnnnnnnnnnnnnnnnnnnnnnnnnnnnaagaattcggcacgaggcagaagaattactggtttatgatatttgtaaatatcggtggtgtgaaaacattggaagagcccataagagtaataatataatgattctggttgatctgaaaaatgaagtttggtatcaaaaatgtcatgaccctgtatgtaaagcagaaaacttcaaatctgactgtttcccattacctgctgaagtatgtctcctgtttcttttcaaagaggaagaagagtttacaacagatgaagcagatgaaactaggagcaatgaaacccagaatcctcataaaccatcacctagcaggctgtcaacaggtgcatctgctgatgctgtctgggataatggcattgatgatgcttattttttagaagctactgaagatgctgaattagctgaagctgcagagaacagtcttctcagttataacagtgaagtggatgaaattcctgatgaactaattatagaagtattacaagagtaactaattcactatgaacacttttgtcaccaggctataatttgcctgatgtctgtgagatttgataaatatatcattcaacctgtttatataaactaagttttattactttgctttccaatttttgttttttacttctgtaaaccaatttcattaaaaattagctttggtgtaaaaaaa

SEQ ID NO: 82013 - DNA, 1151 bp, Homo Sapiens
  misc_feature (401)..(430): n is a, c, g, or t
  misc_feature (633)..(647): n is a, c, g, or t
  misc_feature (882)..(882): n is a, c, g, or t
  misc_feature (945)..(945): n is a, c, g, or t
  misc_feature (947)..(947): n is a, c, g, or t
  misc_feature (956)..(956): n is a, c, g, or t
  misc_feature (969)..(969): n is a, c, g, or t
  misc_feature (971)..(971): n is a, c, g, or t
  misc_feature (973)..(981): n is a, c, g, or t
ggaaaatatttactcaggatatgtgatttaaccttatactctatgttgaagtaaggtattaagtgacagatactaaagtgaatatgcaggaggaatgctgtctccgatatctcaccgtgggaatgagtgcactgattcaaacgttgctgcactgaagctcagacacacttgaaactccaaatttgaaattacctacagttctgtgcacatacttttcaatactccccgacggaagagcaagggtggatttaattttttaacaagtggacagtccagctgaagacaaatcagaagataaatttgctatcttgacaatggacttagtacccatgctttaaattttaaagtatttagcaaatcgtaaacatggattgaaaaaagattaaaaacagttgccacgnnnnnnnnnnnnnnnnnnnnnnnnnnnnnncgccgcactcccgaccaatagtatgaaacgacccctgctcggccgccctcggccccctccagaaggtttctctaaacccattcgttttgggcgcggcgggccccacgtagggtaaggtgaaccatgcctcataccctggtttccctagggaagaatccctgggcccatgaacctaggtggcctttggggattccctccacccnnnnnnnnnnnnnnnccccccctgggccggtgccaaaaccccgaaaggccgtttttctttgcaaacacaaaaatttccccacgaaagtggggggatcgctctcctgtggaaaggggcgccccattgttaactgtgggggcaattcacaatatctccaaatatagggggaaagtatcccccgcagcggccgcggaggccccctccggaaatatatttccacaagatgttttaaccggcccctccccgcgcncccctctggggccccccatcttatctattctggggaaaggagaaaaggttgggtgtgggtgcnanttctcctanccaggtatcgcgncncnnnnnnnnncgggcccccccagactcatgttgtgaaaaaccccctctatttctccccaacaaaagcgcgcgctatttgtcccacgaaaaaacctccttgggaaagattctcgccccccacgccgggggctcactctccaaagaaacaccccctttggtgcgccgccccctattggcgcg

SEQ ID NO: 82014 - DNA, 945 bp, Homo Sapiens
  misc_feature (87)..(87): n is a, c, g, or t
  misc_feature (158)..(158): n is a, c, g, or t
  misc_feature (173)..(173): n is a, c, g, or t
  misc_feature (183)..(183): n is a, c, g, or t
  misc_feature (275)..(275): n is a, c, g, or t
  misc_feature (843)..(892): n is a, c, g, or t
aattcttgacacacatatgcagggaacgtgtgacagagaatgtagagagctattcttccggagcagtatcatcaaagtggagtggancaggtctgtgtgcaccacccgcaccagacggggagtgggtacccccagctgagtgccgtcattgagtgtcngactctgcccatgcnttgaaggccnacatcatctctgatggaggctgtacgtgtccaggggatgtcgccaaagcctttggagctggagcagattttgtcatgctgggaggaatgttntcgggtcatacggagtgtgctggagaagtgattgagaggaacggacggaagctcaagctcttctacgggatgagctctgacaccgccatgaacaagcacgcaggaggagttgctgagtacagagcctctgagggtaagactggggaagttccttacaaaggagatgtggaaaacactatcctggatattctcgggggactgaggtccacgtgcacctacgtgggggccgccaaactcaaggagctcagcaggagggcaacattcatccgggtgacccagcagcacaacaccgtgttcagctaaccctggggacaaagcagcgtctggctcgagtggaagcgtccaaacctgcttttcccatctccccccaagtctgttccgtcagagcttctggctgctcctgaatggtggaatgctgtgtcctctcttctgtctcctgccgcctggaggcttcggggctctcccgcctgccttgtcggggcccagacgcaaggcaccgattgggccaacatcagagccctgctgcccagaactcataacctcattgttcaaaccaacacttgcaccnnnnnnnnnnnnnnnnnnnnnnnnnnnnnnnnnnnnnnnnnnnnnnnnnnaaaagaagatggtttcactttaatataatgctattatcttaagacttaaaaaa

SEQ ID NO: 82015 - DNA, 1707 bp, Homo Sapiens
gctccgagtgtgtgtgtatttgggtatcggcggtcccgcaggtcccggatgttgcggacagtatgaggcaagcgcagggggacggggaccagcagctgtcgccgccgctctcagggtgaagagggaacagaaatctttgccccctgactttggaaatctcgtttaaccttcaaactggcgatgtcaagggttccaagtcctccacctccggcagaaatgtcgagtggccccgtagctgagagttggtgctacacacagatcaaggtagtgaaattctcctacatgtggaccatcaataactttagcttttgccgggaggaaatgggtgaagtcattaaaagttctacattttcatcaggagcaaatgataaactgaaatggtgtttgcgagtaaaccccaaagggttagatgaagaaagcaaagattacctgtcactttacctgttactggtcagctgtccaaagagtgaagttcgggcaaaattcaaattctccatcctgaatgccaagggagaagaaaccaaagctatggagagtcaacgggcatataggtttgtgcaaggcaaagactggggattcaagaaattcatccgtagagattttcttttggatgaggccaacgggcttctccctgatgacaagcttaccctcttctgcgaggtgagtgttgtgcaagattctgtcaacatttctggccagaataccatgaacatggtaaaggttcctgagtgccggctggcagatgagttaggaggactgtgggagaattcccggttcacagactgctgcttgtgtgttgccggccaggaattccaggctcacaaggctatcttagcagctcgttctccggtttttagtgccatgtttgaacatgaaatggaggagagcaaaaagaatcgagttgaaatcaatgatgtggagcctgaagtttttaaggaaatgatgtgcttcatttacacggggaaggctccaaacctcgacaaaatggctgatgatttgctggcagctgctgacaagtatgccctggagcgcttaaaggtcatgtgtgaggatgccctctgcagtaacctgtccgtggagaacgctgcagaaattctcatcctggccgacctccacagtgcagatcagttgaaaactcaggcagtggatttcatcaactatcatgcttcggatgtcttggagacctctgggtggaagtcaatggtggtgtcacatccccacttggtggctgaggcataccgctctctggcttcagcacagtgcccttttctgggacccccacgcaaacgcctgaagcaatcctaagatcctgcttgttgtaagactccgtttaatttccagaagcagcagccactgttgctgccactgaccaccaggtagacagcgcaatctgtggagcttttactctgttgtgaggggaagagactgcattgtggccccagacttttaaaacagcactaaataacttgggggaaacggggggagggaaaatgaaatgaaaaccctgttgctgcgtcactgtgttccctttggcctggctgagtttgatactgtggggattcagtttaggcgctggcccgaggatatcccagcggtggtacttcggagacacctgtctgcatctgactgagcagaacaaatcgtcaggtgcctggagcaaaaaggaacaaaaaacagaaaggcccttgagtttaacacaccggggaa

SEQ ID NO: 82016 - DNA, 1011 bp, Homo Sapiens
taaactataggctaggtgcgaggctgggtgttgaattcggcacgaggcggacagtatgaggcaagcgcaggtggacggggaccagcagctgtcgccgcgctctcagggtgaagagggaacagaaatctttgccccctgactttggaaatctcgtttaaccttcaaactggcgatgtcaagggttccaagtcctccacctccggcagaaatgtcgagtggccccgtagctgagagttggtgctacacacagatcaaggtagtgaaattctcctacatgtggaccatcaataactttagcttttgccgggaggaaatgggtgaagtcattaaaagttctacattttcatcaggagcaaatgataaactgaaatggtgtttgcgagtaaaccccaaagggttagatgaagaaagcaaagattacctgtcactttacctgttactggtcagctgtccaaagagtgaagttcgggcaaaattcaaattctccatcctgaatgccaagggagaagaaaccaaagctatggagagtcaacgggcatataggtttgtgcaaggcaaagactggggattcaagaaattcatccgtagagattttcttttggatgaggccaacgggcttctccctgatgacaagcttaccctcttctgcgaggtgagtgttgtgcaagattctgtcaacatttctggccagaataccatgaacatggtaaaggttcctgagtgccggctggcagatgagttaggaggactgtgggagaattccggttcacagactgctgcttgtgtgttgccggccagggaattccaggctccacaagggtatcttaacaggtccgtctccggttttagtgccacgtgttggaccttacatgggggagaaccaaagaatccagtttgaatcacgatgttgagccgagagttttacggaaatgagtgctcacattaacgcggaaaggtcccaactccacaaaggggtaattgtcggacgttacaatgccctgaacaagacag

SEQ ID NO: 82017 - DNA, 1095 bp, Homo Sapiens
aaacaggtgtactctttatcatggttggtatgatggaccattctttggggcggaggattgattatgttactctctttaaaatctgttcccatattgaacaggcagattggaaaagctatggttcgatttctcagaagaaatgtttaggtcttagtcaatagttttaactatgccatttgtttaaatgagtgcatttgcttcgagggtagtgtcttactaaaagttaggaacagagacctagtggtgtgtccaaggccgtgtcactttccccttcagcacaccccagcttctgacctcagagcccaggagctgcgtggacagtgtggggtgccaggaggaggggcggtggctggtcctcaggcacgctgcactcccagccagacatggtctttccgtttcttaagtagcaagtgtaggtttcagctggcagttccacctgcatgttctctgcttcgctgccttggaagggcccacattccccattcctcttctccttacagcgcctgcctcctttttcaagcaggcggaaagctgctgtttctcacgtttcagggagaggggtgagcggagggagacctgtgtccgtgccgtccggctccctgggtgggaacaggcaagggatcagatgcccctgacaccacgcctctggccacaccagatgcctctgcagtcctcgacagcctcttcagtgtccctcctgcggtgatgtccttactgtccccagccagggccggggaccggtgtttcactgaggacctgcattagaaacattttttaaattgttgtacaggaagagatgtgtctaaaacagcatcttaaagctgagtgtatttctttgcacaaggggtcatgctgatgaattcttctttcattctgatctttgttcagccaacaggagcgtccttttctaatgtcttccattcctaccccccacccaaaaacaaaagaaatatttgtagcttgctatctgtatttgaatttttagcaattttatatttagatactttgaaaaatgtaaatgactaatttggtcattaaatcttgtgacatattcgatattaaaatgatattaaaataaaagtcatataaatacac

SEQ ID NO: 82018 - DNA, 1298 bp, Homo Sapiens
  misc_feature (113)..(223): n is a, c, g, or t
  misc_feature (819)..(932): n is a, c, g, or t
  misc_feature (964)..(984): n is a, c, g, or t
  misc_feature (1028)..(1066): n is a, c, g, or t
  misc_feature (1220)..(1220): n is a, c, g, or t
aagaattcggcacgagggaaaataataaataatagctgattagggtaatcatttatttaatcagaataaagattatatccataaaatttacttgcagagaagtactttctttnnnnnnnnnnnnnnnnnnnnnnnnnnnnnnnnnnnnnnnnnnnnnnnnnnnnnnnnnnnnnnnnnnnnnnnnnnnnnnnnnnnnnnnnnnnnnnnnnnnnnnnnnnnnnnnaggaattatgccaccatgcccggctagttgagaagtactttcaaatagcaacatgaagcctttcctttaccatttgaaaataaaacatagttgtaaacataaaccagtatgtctttgtaaagccaataatatattattttataggagcattgtcttcttgtgtttttcaagttgactatgtagttcaatgtcagtctccattttaatatcttgtttgtttatcagcctgagcatatttcattttaaaatgtatttgttgagaagtcatggtggttttttgtttttcacaagtcaagtagcttgaacactatcacttgtccaatgggaaagttgatgcttatctttatggcaaatgcttggttgaataatatatttgcaaagatgttaattctacagagagctaaataaagttaagatacctgtaaaacagtttctccagatgactttaaaataagccttatttttgtaaatttatgttaaaattttaggtgttaagttgtgaaatacctaatgatgtgggcctaaatttgcctcattcacactgagacagggcctgctaaaattcatttctagccaataacctgtgctataacttnnnnnnnnnnnnnnnnnnnnnnnnnnnnnnnnnnnnnnnnnnnnnnnnnnnnnnnnnnnnnnnnnnnnnnnnnnnnnnnnnnnnnnnnnnnnnnnnnnnnnnnnnnnnnnnnnngagcgcaaaaccataaacaacctcgtgtcggnnnnnnnnnnnnnnnnnnnnntcaaaaaaacttcctccatcaacaacctcctccttacgcttctnnnnnnnnnnnnnnnnnnnnnnnnnnnnnnnnnnnnnnngtccaaaaccgctcggtccccatcagaaaacccatcctccccgccaagaaccacaaagggaccccccagtctcttcaccccacacaaaaacacaaaacccccacccgcgcgcgcaaaccgccacacggcctctcctctgggacaccaccacacnggcaactaccacacagcacctcccacgcgggcccccgttacaggccggccggactccacacccgcgacacccccaccg

SEQ ID NO: 82019 - DNA, 570 bp, Homo Sapiens
  misc_feature (216)..(271): n is a, c, g, or t
tgcggccgccaacactgcatttgcatatatctgaccaaactttatgcgacataggcaggtctctggcacttcaaaaatgaatgttaaatagaaaataataaataatagctgattagggtaatcatttatttaatcagaataaagattatatccataaaatttacttgcagagaagtactttctttttgttttaaagacagggtctcactctgtcannnnnnnnnnnnnnnnnnnnnnnnnnnnnnnnnnnnnnnnnnnnnnnnnnnnnnnnctcaaggggatgatcctcctacttcaggaattatgccaccatgcccggctagttgagaagtactttcaaatagcaacatgaagcctttcctttaccatttgaaaataaaacatagttgtaaacataaaccagtatgtctttgtaaagccaataatatatcattttataggagcattgtcttcttgtgtttttcaagttgactatgtagttcaatgtcagtctccattctaatatcttgtttgtttatcagcctgagcatatttcattgtaaaatgtatctgttgagaagtcatggtggt

SEQ ID NO: 82020 - DNA, 926 bp, Homo Sapiens
  misc_feature (97)..(110): n is a, c, g, or t
  misc_feature (129)..(246): n is a, c, g, or t
  misc_feature (253)..(375): n is a, c, g, or t
  misc_feature (720)..(775): n is a, c, g, or t
ctggaccggtccggattcccgggatcaccattctcttagctagtgactccactaaatagtgctagccgctgagatggttttgaccctttaacagccnnnnnnnnnnnnnngagacagagtttcactctnnnnnnnnnnnnnnnnnnnnnnnnnnnnnnnnnnnnnnnnnnnnnnnnnnnnnnnnnnnnnnnnnnnnnnnnnnnnnnnnnnnnnnnnnnnnnnnnnnnnnnnnnnnnnnnnnnnnnnatcacgnnnnnnnnnnnnnnnnnnnnnnnnnnnnnnnnnnnnnnnnnnnnnnnnnnnnnnnnnnnnnnnnnnnnnnnnnnnnnnnnnnnnnnnnnnnnnnnnnnnnnnnnnnnnnnnnnnnnnnnnnnntgagccaccgcgactggcctacacagcttttaattgcttgatttatactttattaaagagaggaagcacaatgagcagtgatactaaaatataactaatatggcatgtgaaagtgatcattattcagatgatcttcaccaacactgcatttgcatatatctgaccaaactttatgcgacataggcaggtctctggcacttcaaaaatgaatgttaaatagaaaataataaataatagctgattagggtaatcatttatttaatcagaataaagattatatccataaaatttacttgcagagaagtactttctttttgttttaaagacagggtctcactctgtcannnnnnnnnnnnnnnnnnnnnnnnnnnnnnnnnnnnnnnnnnnnnnnnnnnnnnnnctcaaggggatgatcctcctacttcaggaattatgccaccatgcccggctaattgagaagtactttccaatagcaacatgaaggcttttcctttaccattttgaaaataaaacatagttgtaaaacataaaccagtatgtcctttgtaaaa

SEQ ID NO: 82021 - DNA, 1001 bp, Homo Sapiens
  misc_feature (47)..(47): n is a, c, g, or t
  misc_feature (78)..(78): n is a, c, g, or t
  misc_feature (81)..(82): n is a, c, g, or t
  misc_feature (115)..(115): n is a, c, g, or t
  misc_feature (154)..(154): n is a, c, g, or t
  misc_feature (171)..(171): n is a, c, g, or t
  misc_feature (174)..(174): n is a, c, g, or t
  misc_feature (188)..(188): n is a, c, g, or t
  misc_feature (196)..(196): n is a, c, g, or t
  misc_feature (204)..(204): n is a, c, g, or t
  misc_feature (215)..(215): n is a, c, g, or t
  misc_feature (221)..(221): n is a, c, g, or t
  misc_feature (241)..(241): n is a, c, g, or t
  misc_feature (361)..(361): n is a, c, g, or t
  misc_feature (780)..(780): n is a, c, g, or t
tatgtgggcctggatcactaagacttttaggagagagatcccagtcnagatattttttaggcagtgtgtgattacctnaanncagagacacttgacacagaagtattagtgcaanggcaaaaagactcctctgagcacgatggtgtgaagtgcngctgcccaggcccagangantatgactctgcccntggtctanccagaganggaatggagcntgggcncaggatgctatacatttccntgtctggagacagagctgggtgacctctcaggaccctctcagtctataactccacagcccactagggttgggtcttcatggcttgtaactggagatttgctaaaagcaggtgctactgcnaaagttgtgagtgcaaacaggcttctttctgcaaaacgctcagatctgagattcaacaattgctatcgagccctctgacccagccagtagccagcctgcaggggactgtttctgaagcatttacaccgggcgccaggtgaacaaggaggctgacagcctagctgagctccagaagctctggcatttggagaacatcttcccttatttaatgcttagcctgtgcctaaactgacacaccttacgtcaggatagggtggttgggcaagtgggtgtgtgtagaggttgctgtacaagtcaaatgacattttctgcctgaaggagatcacagaattagggaatgttgagttcaaaattcctacagaacaatctgcctgctgtaccagcgtgtcatttccccattctccttccccttctccaantactgttcagtctgtaccccattaacctgcctttgcttttcttcatttttttatgattacctgtaattatcttatttgttggcttttttatttatcagctgtttccccaatcccaatataaggttcatgaaagcaggggccttgcctgtctgtgccccaggcacccagtgcctggctggtaagcacatattgaataataaatgagcatcccatgaaaaaaa

SEQ ID NO: 82022 - DNA, 1007 bp, Homo Sapiens
  misc_feature (152)..(152): n is a, c, g, or t
  misc_feature (208)..(209): n is a, c, g, or t
  misc_feature (249)..(249): n is a, c, g, or t
  misc_feature (301)..(301): n is a, c, g, or t
  misc_feature (305)..(305): n is a, c, g, or t
  misc_feature (322)..(322): n is a, c, g, or t
  misc_feature (419)..(419): n is a, c, g, or t
cgcaccattgcccggattgtttagttgtcagacagaggctgcgagtgagaggagctcctcccggctgccctcagtgatgtatccacagtccagctgcacgatgagtcactcctacatcagttgcttcagttcccataccgtcgcagttcctngaaacacatgctacgtagtggaaagatgctaaggttgattcttttatacggagtgnngaggggatttgcgagcattgggggtgattaaatatcattnccaaggtgcaagtgttattttcaaaatctataagtacatagttccaccattntgcnacaagacaaaatactcntgctaagcaaaggaagagaaagacaaagccagtttttgttgcttttctaaagcaacaaataattctccaaagaaggggatgaaaatgctagttcctntaagcacttactgactgtaaagttggtccctgcttaaattcatacccatagttttgagtcggtatgacaccactgcagtgtgagcaaggtgaatccgtgtgccatgcatggaccaccttgggataccgcagcaccatcaacatccgccttgctgatggaagccacacacgctgcccagcccacagcagtcgcacgcagccgatgggctcggactcttagctggcaggctaggacacacagtgaacattaatgtactgtgaatcgttcctgataagtgaataaaacattgtgaccaaacaatcagcttattcacttatcaggaatcgactgttctgctaatttgctgttgttgtttttcatctctgttgtagttcactatttttgctgtgttctgttttctcctctcatgcttgggcaaatcactgggaatattatcttcatgtgaccatgaaacgtttctattgagtgaaaatgatatcttaacaaaatctatgcacttgctatcaggaacacaatactggatgtgtcttatatatattgaactatatagtactcgatttcttaaataaagcttaagaaaggaaaaaa

SEQ ID NO: 82023 - DNA, 1099 bp, Homo Sapiens
tttttagacgagatgagcaattcagttagtagcgtggtgatactcaagacaagtgtctcaatcattcatctggacagctgtacgaaagaatctgactgaaatgcacctataggtgtagcaccagacaaaacatgcgtcatgcagttatccagtcagtcctgtggctgagttcttgatacagagggaagcattcagaaactgtttagaaaaatatgcaccaagtgagaatgggccaaatgggattagtgctgaggtcatggacacttacgttaaaagctgtgctggatattgcgtgatcacctatatacttggagttggagacaggcacctggataacctttgctaacaaaaacaggcaaactcttccacatagactttggatatattttgggtcgggatccaaagcctcttcctccaccaatgaagctgaataaagaaatggtagaaggaatggggggcacacagagtgagcagtaccaagagttccgtaaacagtgttacacggctttcctccacctgcgaaggtattctaatctgattttgaacttgttttccttgatggttgatgcaaacattccagatattgcacttgaaccagataaaactgtgaaaaaggttcaggataaattccgcttagacctgtcggatgaagaggctgtgcattacatgcagagtctgattgatgagagtgtccatgctctttttgctgcagtggtggaacagattcacaagtttgcccagtactggagaaaatgaaactgggattgacccatcaagatgcttggctcaataagaaaaccacgttaggagcaacctttgtatattggagacttcagagtaaccagcaaggaagagaaatcttaatcttcaagttaccatattttccaaatattacatggtacctgagttctgcttccttggatgtcattgcttaaatatagtcttgaagggcttgttttgaaatattgtatatattttttcaaatgtatacattgttaataaattaagaaatgagaaacattcttatttatgtacatgttatgagagttctggaggaagtaatatgttgaaatagtaaaacattttagtttttgagttt

SEQ ID NO: 82024 - DNA, 661 bp, Homo Sapiens
  misc_feature (14)..(14): n is a, c, g, or t
gcgaccgccgcctngccgggcctcccctcgccgcggccggccgccgcgctcccgcccgggcgcccagctatgtactccccgtactgcctcacccaggatgagttccacccgttcatcgaggcactgctgcctcacgtccgcgctttctcctacacctggttcaacctgcaggcgcggaagcgcaagtacttcaagaagcatgaaaagcggatgtcgaaggacgaggagcgggcggtgaaggacgagctgctgggcgagaagcccgagatcaagcagaagtgggcatcccggctgctggccaagctgcgcaaggacatccggcccgagttccgcgaggacttcgtgctgaccatcacgggcaagaagcccccctgctgcgtgctctccaaccccgaccagaagggcaagatccggcggattgactgcctgcgccaggctgacaaggtgtggcggctggacctggtcatggtgattttgtttaaggggatccccctggaaagtactgatggggagccggctctacaagtcgactcagtgctcgaaccccggcctgtgcgtgcaccacatcacatggagtcacagtcaaggactggacgtgtcttgctgatagtcccgctccgaatcgggcgacagaggtcaaccggcagagaacggcttcgac

SEQ ID NO: 82025 - DNA, 1184 bp, Homo Sapiens
  misc_feature (113)..(113): n is a, c, g, or t
  misc_feature (242)..(242): n is a, c, g, or t
gagaatgggctgcttctggggcccgcggggtccccgggctggaggagagaagggctgagtggctgacgacgtgtaattttgcttttcggtggggctgggctgggctgggggantttccattctcaaaattcttctcccccctttcgaggaacctcttcttctcattttgttgtttcttttgtcgatcttatcagaggaaccaggactgagactgctgtgggatgttcagaaaagttgccgtncccggggtccgatgctgacaaacccggttggcagaggaggcgcctgtcgttgcgaatgctgtccggtggcctggcccgagccatccgagcacacaaactgcacaaactccttcagtgagtcctgcccgtggtggtggtggtagcggatggtcgggtgcgtgaaatacgggctcgactgctggatgatggacgtggaggggaagtgcagggctgatgctgtggcccgggggctccctggtctgactccagcaagcacaggcagcgggtggtgggtgaaagccatgcgcggggagctgccctgagaggagagggcactgcagaagtccagctttcctgacttctttagagaagccgggcctgcatccacatcgttgggccacccgctggactggctgctgccagctgctggggaacggcctgtcccgggatagaacacgtcatcaacagggctctccatctcactgtcatcgatggacttggggcgcttggtggtgctggtggaaggaggggaggtgatggaccgccgccccagggtcacctggttgatgttgtagtagctgggactctccaggtccgccagggagaagttgggccctgatgctgttgcaacaggagtctgtgatactctcaccagctccgtcacattccagaccccggaagtcacaaaacagtcctggaaacttaagtgcccgttgggcagtggtttgatgtccgcatctccttgctggtttgaactatctgattgtccggattccggagtgtggacaaagtaagccagataaagatccagttctttgattgtgactccaatgtgatgtggctggacgcacaggccggggttcgagcactgaggcgacttgtagagccgctccccatcagtactttccagggggatccccttaaacaaaatcaccatgaccaggtccaaccgcatcacccgtt

SEQ ID NO: 82026 - DNA, 1476 bp, Homo Sapiens
tgggtggcgaattcggcacgaggatgagttccacccgttcatcgaggccctgctgcctcacgtccgcgccttcgcctacacctggttcaacctgcaggcgcggaagcgcaagtacttcaagaagcacgagaagcggatgtcgaaggacgaggagcgtgcggtcaaggacgagctgctgggcgagaagcccgaggtcaagcagaagtgggcgtcgcggctgctggccaagctgcgcaaggacatccggcccgagtgccgcgaggacttcgtgctgagcatcaccggcaagaaggcgccgggctgcgtgctctccaaccccgaccagaagggcaagatgcggcgcatcgactgtctccggcaggcggacaaggtgtggcggctggacctggtcatggtcatcctgttcaagggcatcccgctggagagcaccgacggcgagcgcctggtcaaggctgcgcagtgcggtcacccggtcctgtgcgtgcagccgcaccacattggcgtggccgtcaaggagctggacctctacctggcctacttcgtgcgtgagcgagatgcagagcaaagcggcagtccccggacagggatgggctctgaccaggaggacagcaagcccatcacgctggacacgaccgacttccaggagagctttgtcacctccggcgtgttcagcgtcactgagctcatccaagtgtcccggacacccgtggtgactggaacaggacccaacttctccctgggggagctgcaggggcacctggcatacgacctgaacccagccagcactggcctcagaagaacgctgcccagcacctccttcagtgggagcaagcggcacaaatcgggctcgatggaggaagacgtggacacgagccctggcggcgattactacacttcgcccagctcgcccacgagtagcagccgcaactggacggaaggacatggaaggaggcatctcgtccccggtgaagaagacagagatggacaagtcaccattcaacagcccgtccccccaggactctccccgcctctccagcttcacccagcaccaccggcccgtcatcgccgtgcacagcgggatcacccggagcccacacccgtcctccgctctgcatttccctacgacgtccatcctaccccagacggcctccacctacttcccccacacggccatccgctacccacctcatctcaacccccaggacccgctcaaagatcttgtctcgctggcctgcgacccagccagccagcaacctggaccgtcctggtatctgggatagcaaaggtcttcttccctcgccccttctccatcgtcccaggaatcccagggggcagcacagccggcccccggcccacgttttcggtggaaaattagagtgaacaagaacacccctgccgactcccagcccggccaaaaagacaaaacacatagacgcacacactcaggaggaaaagaaaaaacaaaggcagaagaaa

SEQ ID NO: 82027 - DNA, 1011 bp, Homo Sapiens
  misc_feature (53)..(53): n is a, c, g, or t
  misc_feature (96)..(116): n is a, c, g, or t
  misc_feature (179)..(179): n is a, c, g, or t
  misc_feature (193)..(193): n is a, c, g, or t
  misc_feature (201)..(201): n is a, c, g, or t
  misc_feature (335)..(335): n is a, c, g, or t
  misc_feature (581)..(581): n is a, c, g, or t
  misc_feature (964)..(964): n is a, c, g, or t
tggtgtccccaacctacttccccccagttacacccccagttcaacccactgcntgacttgggccaatgggcagagcactggggatggtgacatcannnnnnnnnnnnnnnnnnnnnactatctggaggcggaacttcgtggcccagctgggagcacagcagagttgagccgaggcccantgcggagcagcccngagttccnagagagggacacgtggacgtgaaaccagacaaaaggctgcagagaggcgtgccccccttccaggccctcagcccctctgcggggagctcatatgcgggcccagccacgctgcaccctatctggggctccctggngactggaggagacgccgtcggtcggaggggcagattctgtggcgcccttgcacccccccggagctgcggtaagggcgaccctgcggacaggccctgggctggctggtcgggtggccggggcatccaccgagaacaccttccactgcctagcactccagcttggccctacggggtagagaaatccttttccacgtggagagcatccacgcctcgttattaaaggttttagaggctttcgggaccctntgcgtgctctgtgctcaccacacctgcagtgatgggccctcggtggatgagacccacgtgcttatttcatgacagccatgccccgtgccgctgtgcccagcccacctcctagggcgcttccttacagtcccatcagctcggattcgactttttcttctgctactgagtgttttcatccggggtttccaacgagcagtgcccactgcctggtgcccaagggacccagcagctgctgaagccctgggcttgagggcctcgtgctggcgtgggctgcgctgtaggaccctcctggctggggggcttggcagggcagctggaggggctggtgcagccatgggaactgagtgtggactcagaagtgggggacccccgtttgccgcttnatcattgtctgttgattttcttcaaaagaacaggttttgagcattgg

SEQ ID NO: 82028 - DNA, 1048 bp, Homo Sapiens
  misc_feature (22)..(22): n is a, c, g, or t
  misc_feature (64)..(64): n is a, c, g, or t
  misc_feature (74)..(74): n is a, c, g, or t
  misc_feature (112)..(112): n is a, c, g, or t
  misc_feature (173)..(174): n is a, c, g, or t
  misc_feature (181)..(182): n is a, c, g, or t
  misc_feature (191)..(191): n is a, c, g, or t
  misc_feature (256)..(257): n is a, c, g, or t
catcggattcctcatacagtcngagctatgggattcaggaatatacaggttgtctcattcgtcngaattggacngaaatcagtgacgagtgcgttgtagggtatgatgtccncagtagttccagcagagtagggaaactgcattgcataaaactactctgacatgatgtcatnntacaaannaatccatanttaccagccctcacccagcccatgtggataggattatgtaggagaaacttgatttcaataaattnntaaatgtatctcttgcctaaaggactatatacatctaataaagtaacactgtgtcatcttctggagttatcaaaaattgtatacaatcaagacaacaccaagaattattttatttttgagtgcaaatacaggtactgttggagttgatgggcaccatgctttctcatgaagtagcatttccctaccatcaagccattgttttgtgccattcaggagaggaaaaaaagaaattaatgctgtacatttcagttcagtgtatgaccaaaaccaatatgtttataagaagatgtttgacatactaataattttatatcatttaaaccatactgtagcaacataatatatggagctaatttgtagaattatttttacgatttccaaacaaatgtactgtactgttatataatttattgtgaggaccttctcatggaagccattaggaaaacaaactagaggtaaatatcacattaatctgtattatcaatttctcatagacactgtgctaatgtgaattttaaatgacctgcatcaagtcttctgatctcagataactcagtacagatagcaattagtcagctgatttgattacaatggagtaaccgacaatatatttatttataaagcacatattcataataacgagaagaattcagaaaaccacttaagcaagacccttctgaaataaaaaatgttgctttttaaatagtttgtcctaaggtgtttaaaacatgtcaaccttatgtaaggaaaaatttcctggtccaaataaagttgaagtttaagaaaaattg

SEQ ID NO: 82029 - DNA, 1018 bp, Homo Sapiens
  misc_feature (44)..(45): n is a, c, g, or t
  misc_feature (76)..(76): n is a, c, g, or t
  misc_feature (115)..(115): n is a, c, g, or t
  misc_feature (127)..(127): n is a, c, g, or t
  misc_feature (155)..(155): n is a, c, g, or t
  misc_feature (167)..(167): n is a, c, g, or t
  misc_feature (175)..(175): n is a, c, g, or t
  misc_feature (180)..(180): n is a, c, g, or t
  misc_feature (204)..(205): n is a, c, g, or t
  misc_feature (218)..(218): n is a, c, g, or t
  misc_feature (258)..(259): n is a, c, g, or t
  misc_feature (305)..(305): n is a, c, g, or t
gagaaggatgtaaatgaaactcatgcaaagaggagcagagaganngatgtaaccccttaagcagatggttggcccntatgagaccaggatctgcggtgtcagggatgcccctctngacagagactanggtttagactgagcttcctgcaggtgtncgcatgcccttntccgttcncctcnagaccttctggggagaagagtggnnaggagggagaaangacttttcatcttatctgaaatcctggagcagctgaagtnntctcttgagtcaggatgcagtgtaatgcattaaccagcaagtgtgnccaaggataatgaaaaagtggaaaggaagtcctcctcctccctgattgtagcatccagcagtctctgtagccaggttactcaagaaccacatttgatttcctggccctttgccttggcagtgatggcatttttatttcactgtgttttaaagtcttcatttatttttataacatgggttagggagaagggccacaaatggagggattgtcctttcaagcaccacagcttcagataaaattagtactttcaaatattgtccactttaacttaaaaaattctagagggattatattggagactcaactgcccttggttttagtttataaaatggcctagtactgtggaattttaattttagaaagtcttagcatcagatcataaacattcattaaaagaactcacatcccatctgaaacttcccaggggagttgggattcttagtagattggtagaaaggggctcattttctactgcatttcccatttttggtatcttgttcagcatgttttatttttatttcttgtctgcagaacatcctatatttatgagaacattctttaagaagaccaccacatagaataccccttcctatcagctcgctctgatttagccttaattttgttaaattttttagagatgaatgaagtgctgctgtggaaagaaatgtacatatactatttctgtatcattaaaattacatttttatggttaa

SEQ ID NO: 82030 - DNA, 387 bp, Homo Sapiens
aggactaactcccttccccctcccctcccccaatacaaggtttttgacatgagtgtactcctgcttagttcctcttgtggggctgcatttgcggtgctttgccctccccactgtgagtgaggggccaagggatctcctcaatcctgtctccccagcggctctgtttcctccttccttccttggcctctgtcctttgctgacttcctcttccttacccagcagaactcaccctggggtcggggcagtggggaggggcctatccactgctcttcctagtccttggcagctggcctaggtgggcagactataggagggactggttaggagtctgcattgctttgacttccctctccttggttaataaacacaaatgcttgtttctcaagg

SEQ ID NO: 82031 - DNA, 1087 bp, Homo Sapiens
ccgcgcgtaaatcggcacgagggcgggtggacgtcgcccctgcccgctcgcctgcccggcctgcccatcacccggcctgccgccgcctccagcccagcccggccgcgggtttgcaacgctccaagtcggacttgagcgagcgcttttctagggcagccgctgatctcgagcgcttttttaacttctgcgggctggacccggaggaggcgagagggttgggtgtggcccacctggcacgggccagctcggatatcgtgtccctggcaggccccagtgctgggccgggcagctctgaagggggctgctcccgccgcagctcggtgactgttgaggagcgggcccgggagcgcgttccctatggcgtgtcggtggtggagcgcaatgcccgcgtgatcaagtggttgtatgggctaaggcaggctcgggagagcccagcagctgaaggctaggcgccactgggcctggaattcgccacaggacggatcttacagaggcaagtggtccctggacctctcttgcatccattctctagacggccgtgtcagaggctccaccctgttgtgaacttggtatggaggcaaaggcttagaggctggaccagcattgttgggcaaggactgactctccaagggtttagttcttggctttggacacctgagaaccccctcctcccctcccccaatacaaggtttttgacatgagtgtactcctgcttagttcctcttgtggggctgcatttgcggtgctttgcctccccactgtgagtgaggggccaaggtatctcctcaatcctgtctccccagcggctctgtttcctccttccttccttggctctgtccttttgctgacttcctcttccttagccagcagaactcaccctggggtcggggcagtggggaggggcctatccacgtgtcttcctagtccttggcagttggcctaggtgggcagactataggagggactggttaggaagtcatgcattggtttgacttcgctttcctggttaataagacaaatgcttgtgtctcagaaagcaaagaaaaaattcgcgggatatattgaggggggggaaaaaaggtacgga

SEQ ID NO: 82032 - DNA, 735 bp, Homo Sapiens
tggatctatgctcagggaagagcaggcagagccttggagtgctgaaggaggtgctgttccctgttccatcttaccactttctcttctgagatgtctgtaaggattttacccagatgccatttgtctgtttcattttcagactcaccatcaattaccaaggcccttgcatctccccagatcgtttcccaagtttggcgatttgctgtcggtgcctcagccacatatgaccaatggttacaactcagggctccagacctcagctaaaaagagaagacgctgccctcctgggcacgaacgtttagaatgctcaactcctctattgtgaccacaggaaggtggccctgaagatgcaccgaagacagctgggaggtgactgctgtactgtcagcctctctgtggaggcattcgtgcagtgccagctaaaagggaggtgaagggggatatcggacccagcgagggagttgctggtagaaggaaagctcttctcagtgtggctggattaagagcagcctagcagcttgggcacctccactctgtgcggtctgatggccccagcaaggtcgctgcagggacttcctgaggacttggtttggtttttttctggggttggaaatctgagccaatattgtgtctgttccatttgggtatgaagaggaagtctggatcacttaaactgactagttatttccgggtcataattttaaattaaagacatatcacttttttatacacaaa

SEQ ID NO: 82033 - DNA, 1532 bp, Homo Sapiens
  misc_feature (57)..(100): n is a, c, g, or t
  misc_feature (642)..(655): n is a, c, g, or t
aagtagagacaaggtctcactacattgcccaggttggtctcaaactcctgagctcannnnnnnnnnnnnnnnnnnnnnnnnnnnnnnnnnnnnnnnnnnnatgaaccactgtcaggctcttttgtcagtcctatcaacctctaacatcctcgcaccagacaggacaggtgtctgtattgaaactttattacaaaattataaagcagagctctgtaacaaaataatacacatttgggtttgctttaacctccaagtaagtctgagaaaatcttaataaaagccacttgaagtaacaattcacatccaagagatttccacaaatttatacaatgtatattgagcactagttcctgtacagcttattcttattagtttggatccaactattccaatgtattatgaaccagtcagctatctgtcttttgaaacaagtcttaactgaaatctcagagtaatcagcaaaagctacggaataattctaagaattagatgtttccatatcattaaaaccaaggatccatgaggggcagaagggaggattcaaagatttaaaaaaaatcaaattttagaccttggttaaatattaactggaatgggatcttggaactcccaactttaatttggtgtaataaaaatgatgcnnnnnnnnnnnnnntcagggttgtttgacaccttttttcctaaagggaaaccttcaccaaaaggggataaaagatttaaagccaaaatgagtaaacaacctcagttttaattcttactgaggttactaaccagctatcagtatattattttcgatttgtgtctaggagggaaactgaagaggaggtaaggcttcagcagagaaagcaggttgtaagtagagagccagcttctgcccttaagttactgctagatcttagctgaattgcacatacatagacctgttttacagaggaactgagtagctgaatgaatgatcctttgctaattggtaggcattgtaaactatagtatttactgcccatgacaaaagtggaaagggatgtcttcatgagcaaatctgattcccccaactcctgcaaaggctgtggttcagaatcaaatcatccaggactttgtataacattgaggtaagtggcccagtgttcagttgactagtttatgcagttatttcattcctcccaaaggggtttagtggttggtgatggaagaaagcataaatatgtctgtaccaatgtaataagtccctttagaggtttccctctgccatccagagtcatgattggttctagtctcagatttttcagctgcatgggaggggtaaggggtgggaggtgtctgccaaggcgtttagggtttgcatagttcatccattggtaatgggaaaacactctgctttcctgatcatgtgttttgtgcttggccacgcttctgcagcaaactcttaagtcctccagctcctctagggatgtaaagactgtgagggctcaaatacatcacctactcattgcatggtccttcctaaagagcctagaaaatggtttctcctgctg

SEQ ID NO: 82034 - DNA, 615 bp, Homo Sapiens
  misc_feature (63)..(63): n is a, c, g, or t
tggtcactgtgtggcagttactaggggaattctgcctctgactgttctttttcttttggtctntaaacaccctgtcgtgggatgtgctcactgatttgtggctatgttgaaggtatcacttgtcttgagggttttcaatatttcaggatcatgctggtggcaaaaggactccacgcctctgtggaatcatgtccacagggggacctgcctcccgtgatgtcccacctttccttcaaggtctgtcatatgagtcctccccttttacaacacttattatggtatttttcaagttattcttcttagatttgcagtacctactgaaatttgtgtttttatagttgaagttaggaaaatgctatttgatttgtatttagatatttaagtcacttgtccaatgatgtgtatgtctaagcctcatgtaccgatttgaagtcagacttaaaaatgtatttacagattcacttgagactttttaatcggttcttcaaatatttcatgtttacattaaaaatttccagagaagcataaaagtattcactttcctgccttgtcatttctggaaagattttggggagatattttattgcatattaattaataaattgttctactagg

SEQ ID NO: 82035 - DNA, 1094 bp, Homo Sapiens
  misc_feature (801)..(801): n is a, c, g, or t
ggaccggtccggaattcccgggatatcgtcgacccacgcgtccggtcaccgggatccctacgcgacctccgtgggccacctcatagaaaaggctacatttgctggagttcagactgaagattggggccagttcatgcacatctgtgacataattaacactacccaggatgggccaaaagatgcagtgaaagctttgaagaaaaggatttccaaaaactacaatcataaagaaatccaacttaccttgtcacttattgacatgtgtgtgcagaactgtggtccaagtttccagtctctgattgtgaagaaggaatttgttaaagagaatttagttaagctactgaatcccagatacaacttgccattagacattcagaatagaatcttgaatttcattaagacttggtcacagggcttcccaggaggtgtggatgtaagcgaagtcaaagaagtatacctcgacctggttaagaaaggcgttcagtttcctccctcagaagcagaggctgaaacagcaagacaagagactgctcaaatctcatcaaatcctccaacatctgtccctactgcaccagctctttcttctgtaattgctccaaagaactcgactgttacattggtcccagaacagattggaaaactgcacagtgaattggatatggtgaaaatgaatgtgcgagtgatgtccgccatattgatggagaatactcctgggtctgaaaaccatgaagacatagagcttctgcagaaactctataaaacaggtcgggagatgcaggagaggatcatggacctgcttgntggtgggtggagaacgaagatgtaactgttgagctaattcaggtgaatgaggatttgaataatgctatccttgggatattgagaggtttactagaaaccaacaaagggattttgggagcaaaataagaaccacgaaggaagccaccaatactaccagtgagccttctgccccatctcaagatctcctcgacctaagtcccagtccccggatgcctagggccactttgggagaactcaacaccatgaataatcaactttcagcctctggagttgtctggtcaatgtcctgtcgg

SEQ ID NO: 82036 - DNA, 1029 bp, Homo Sapiens
  misc_feature (649)..(649): n is a, c, g, or t
  misc_feature (734)..(734): n is a, c, g, or t
  misc_feature (800)..(800): n is a, c, g, or t
  misc_feature (806)..(806): n is a, c, g, or t
  misc_feature (810)..(940): n is a, c, g, or t
ttttcacatcatctgtttccactttagctttgatttctaatggagtcaggaaagcagttgtatttgctttagaagcactggaaggtgttgaaaggtacacagatggctttggagagtagcatgtatctttttttaattcagatggcttcaggttggcactgtcttcttcttttggtaacttcaagattttttcggggctgtgagttggagaatgtccaccattgaaacggcccggcaaccttcttccaggcatctttggtctatttgcagtgagatgaagcaagttttctgaggaagctatgtcatcaaaatttacaacatctgtttctttggaggtccttactgtaagtgaatcaaagtctactgattttggtctaaggggcagctgttcagaatctagctttagttttgatactggctcagtttcaaattttgatgaaatgctagaaacttccccattaatcttggctataggaggtggtggaggaactggtttttcaggtcgctttgggtacactgttccagaagatctcaataaattactggctttggtaggtggagtaggtttcttgggtgggacttgtggagctgctggtttagaaggtttctgttccagtgttgatttttcatccttttcttcaggctttanagaaaaatatttcttctctgcagctatcagttcaggctttggagctggagccttagcaggaggtggtggtttctttggttttggnaagtctttatcaagttcatttatctggacagcaaaatgtccctcgtgccgaattcctgggctcgangggcantttnnnnnnnnnnnnnnnnnnnnnnnnnnnnnnnnnnnnnnnnnnnnnnnnnnnnnnnnnnnnnnnnnnnnnnnnnnnnnnnnnnnnnnnnnnnnnnnnnnnnnnnnnnnnnnnnnnnnnnnnnnnnnnnnnnnctcacattattgcgttgcgctcactgcccgctttcagtcgggaaactgtcgtgcagctgcattatgaatcggcacgcgcggggagaggg

SEQ ID NO: 82037 - DNA, 1792 bp, Homo Sapiens
  misc_feature (1184)..(1223): n is a, c, g, or t
gtgaatatgacacgtgtgtacacaaaagcaggctgggtacggtccggaattcccgggatatcgtcgacccacgcgtccgatagattctctgactgtgaagatcatcctgcctgaaggagccaagaacattgaaattgatagtccctatgaaatcagccgtgccccagatgagctgcactacacctatctggacacatttggccgccctgtgattgttgcctacaagaaaaatctggtagaacagcacattcaggacattgtggtccactacacgttcaacaaggtgctcatgctgcaggagcccctgctggtggtggcggccttctacatcctgttcttcaccgttatcatctatgttcggctggacttctccatcaccaaggatccagccgcagaagccaggatgaaggtagcctgcatcacagagcaggtcttgaccctggtcaacaagagaataggcctttaccgtcactttgacgagaccgtcaataggtacaagcaatcccgggacatctccaccctcaacagtggcaagaagagcctggagactgaacacaaggccttgaccagtgagattgcactgctgcagtccaggctgaagacagagggctctgatctgtgcgacagagtgagcgaaatgcagaagctggatgcacaggtcaaggagctggtgctgaagtcggcggtggaggctgagcgcctggtggctggcaagctcaagaaagacacgtacattgagaatgagaagctcatctcaggaaagcgccaggagctggtcaccaagatcgaccacatcctggatgccctgtagcccctgcccgcatcctccagggggcccagggtgcctgcactttgctgtggcaggcagattgggtggtagtgggaggttgtgcatggaggccagtgaaagctgacatctgtaaaaggccttcaaggaagagaaaccaggccctgcgtcaggcagtgtgagtttgccgtttgtccttaactttctttttatttttatttaaaaaaagaaaagtttaaaacaaatctccgctttaaagacggaataccgatcgttgggtgtctggcaacaagggtaatttccaacttattgcgtatgaggttattctgttcgtgcaaggtctcaggatatttttcgagccctataagaggcccccgtgagttttatgccctttctnnnnnnnnnnnnnnnnnnnnnnnnnnnnnnnnnnnnnnnngagagagggctggccgcgacctccccatgagagacgtacacacgccacgagagtgagaggacccccaaatggttgatcagtggcacatgaccccaccgcgattgttgtcgggccacagagaggggtgggcacccacctaaacagctggagagcaccagacgtctataataaaaacgccacaaagagcaacacgcgaacgcgaacaacaagctaatccaacaaaaacgaaatcgacgaagacaagagtgagacgacacaaaggaccgtgctgcaagatgagcgatgatgttgcgcacaaaatcatacgccgtaggagagagggccgcagagcgacaacacactcaaagcacaaacaggcgagaggcggtgcgtccacagacgccacaaaacgatgatgtacgaacagaagacaccaactgccacgctcctctcacaccaggccagaggaaagatcaatccgcgagcacgaggttagagcaacacgacgaagcgcgaagtgacctcatgaacaacaagcccaggtaaggcaacaaacacacctgcgtgcacaccctaacccatgcagacgt

SEQ ID NO: 82038 - DNA, 1031 bp, Homo Sapiens
  misc_feature (85)..(85): n is a, c, g, or t
  misc_feature (89)..(89): n is a, c, g, or t
  misc_feature (91)..(91): n is a, c, g, or t
  misc_feature (97)..(97): n is a, c, g, or t
  misc_feature (170)..(170): n is a, c, g, or t
  misc_feature (195)..(195): n is a, c, g, or t
  misc_feature (207)..(207): n is a, c, g, or t
  misc_feature (212)..(212): n is a, c, g, or t
tatgcaaggaaccgatatgtgctcgcgtcccaaacccggcatgggcaccgatgcttctcgtaaatcccctattgtctctgagcantaangnaagcangggagggaaacatgcgcccaagctcgttcgcaggaacatgttcgcgtgtctgcgcctgtgtgcgcagccagtntctgggctgaggatcgctcgccaantacagacatcanccgcncaggaccccgtgccacactcacccagaagacgaaactccacaggagcgagaagaggagtccatttctccgtcggctcggcacggcacggggatgcaggcccctgattcagtacgttctgtgaaagtggagcgagaagccaagacgtggatcgagaagccccgtggggcgggtctcagggtggcccaaaagacccctgttcacgccactaccagcctaactttaggaactgtcgtccacctggcttttattatactgccttaaacatattcacttttttgagactctagaaatttcacaagttttggggtagagcacactgggctttgggtgtgtttctcatgagggcactgacgctgaatggtgcagtgagaaaggacggtagaaaccactgcctttgcttttaccattgaagaaactgaggtcctgtgactttcccgaggtcatcggaatctgccttgcacaggagacttaaaatagttgccagcagataaaagaatgagcaaaaccacatctactccaatttgttaagtctgaaagaaagtaattgaggggggattcctctttggggaaatatttatttcctgcattgaaaatagtttaatgttagtaaacatataaaaagtattttaaattcaagttattctttatttcttatgttacataaggtactgaagttagccaaggttgcttttgtgttataatgatgcagctgctgccaaccagaagtacatttacggtctgtcagtaaagaaaacaaaaactgcctgttggtaaaaatctattagaaaatatttgtcagtaaatttgtcacaataaaa

SEQ ID NO: 82039 - DNA, 591 bp, Homo Sapiens
  misc_feature (48)..(66): n is a, c, g, or t
  misc_feature (85)..(369): n is a, c, g, or t
  misc_feature (509)..(548): n is a, c, g, or t
aagaattcggcacgaggctgatgttggagcggccgcggctgtagggcnnnnnnnnnnnnnnnnnnnggtggttttatttatttannnnnnnnnnnnnnnnnnnnnnnnnnnnnnnnnnnnnnnnnnnnnnnnnnnnnnnnnnnnnnnnnnnnnnnnnnnnnnnnnnnnnnnnnnnnnnnnnnnnnnnnnnnnnnnnnnnnnnnnnnnnnnnnnnnnnnnnnnnnnnnnnnnnnnnnnnnnnnnnnnnnnnnnnnnnnnnnnnnnnnnnnnnnnnnnnnnnnnnnnnnnnnnnnnnnnnnnnnnnnnnnnnnnnnnnnnnnnnnnnnnnnnnnnnnnnnnnnnnnnnnnnnnnnnnnnnnnnnnnnnnnngcatcaaaataacttggaaagtaggaataattgcttgttgttcctgaaaactgtctcttcgacacttttcagactctgttacatgatcatgacaaaatatacacaaatagacatacagatacacatcagttaaaacctcnnnnnnnnnnnnnnnnnnnnnnnnnnnnnnnnnnnnnnnngaccgcgtatgcggccgcaagcattattccctttagttgaggg

SEQ ID NO: 82040 - DNA, 1035 bp, Homo Sapiens
  misc_feature (183)..(183): n is a, c, g, or t
  misc_feature (193)..(193): n is a, c, g, or t
  misc_feature (226)..(226): n is a, c, g, or t
  misc_feature (241)..(276): n is a, c, g, or t
  misc_feature (333)..(333): n is a, c, g, or t
tagccccagttacattatgtccgttgttgtgttgattgacggtacaattcacccagaacactagactgatacgattaatagaccccttagggaattgccctcgagccaggattcgcacgagccgccatggccgtggtgcagtgccaccaagacctcctgcacagggcaccagcaggtgacgcntatggacccnagaggtcatcccagctccagacgtggacacatnttcttccaatgatgnnnnnnnnnnnnnnnnnnnnnnnnnnnnnnnnnnnnagagacccgttcagagtcctacagtggcagactggtcttctgaggacctctgccctntacacagcggcctcttcaggtgcagggaggaaatggaagcacgttctatgctggttccaccccaggcatctgtgtgcttcgaggatgtggctatggcattcacacaggaggagtgggaacagctggacctggcccagaggacactgtaccgagaggtgacactggagacctgggagcatattgtctccctggggcttttcctttccaaatctgatgtgatctctcagctggagcaagaagaggacctgtgcagggcagagcaggaggccccccgagagaaggggatgctgcctgggagctttttgggactcccaatagaagacagatttagtctcctggaaggctgcctgatccagttcccacagcagctgccacttgctcaggaacgaggcccagcaaaaagcagagacggtacagggccagaaggatctgagagagtgtggccagcttgagcccctcaggagtcggccagaaggatctgagagagtgtggccagcttgagcccctcgggagtcagctcctccgtccccactggtaacgtcttcaccccttcaacacggtgtgaagggccatgtcatggttgatcttcagtccctcagactacaccatcagccccatgggggtgagcaaataacaagtaactatactgttccctgctatgtgtctggctcttggtaaaatttaaaaaagttaaaaattaaa

SEQ ID NO: 82041 - DNA, 987 bp, Homo Sapiens
  misc_feature (24)..(24): n is a, c, g, or t
  misc_feature (53)..(53): n is a, c, g, or t
  misc_feature (97)..(97): n is a, c, g, or t
  misc_feature (141)..(141): n is a, c, g, or t
  misc_feature (151)..(151): n is a, c, g, or t
  misc_feature (207)..(207): n is a, c, g, or t
taccatgacatcttgccgtgagtntgcagcaacagcctgagtcgcatcagtcntcttcccgtctctcccagctgagcaacccatcgtccatatactnggcctctgctggggcaggcggacccacagccagatcagcatcantcgccagccntggctgagcgctgagccagtgtcacttcgtgaggtctagagatgtgcctcagcccnttgaaacccacctgactagtaggggggtcagtgttctcagaggccagccggtctgtgggctcagcctccaggcagaagggcgctggaaggtatctctaagggacagcagtctggaggctgaccacgttattagtgccattccagcttcagtgctcagtgagctgctccctgctgaggctgcccctctggctcgtgccctgagtgccatcactgcagtgtctgtagctgtggtgaatctgcagtaccaaggagcccatctgcctgtccagggatttggacatttggtgccatcttcagaagatccaggagtcctgggaatcgtgtatgactcagttgctttccctgagcaggacgggagcccccctggcctcagagtgactgtgatgctgggaggttcctggttacagacactggaggctagtggctgtgtcttatctcaggagctgtttcaacagcgggcccaggaagcagctgctacacaattaggactgaaggagatgccgagccactgcttggtccatctacacaagaactgcattccccagtatacactaggtcactggcaaaaactagagtcagctaggcaattcctgactgctcacaggttgcccctgactctggctggagcctcctatgagggagttgctgttaatgactgtatagagagtgggcgccaggcagcagtcagtgtcctgggcacagaacctaacagctgatccccaactctcattcatgaaaataaaaattgctggagcttgaaaacacactacataagacaac

SEQ ID NO: 82042 - DNA, 821 bp, Homo Sapiens
  misc_feature (659)..(659): n is a, c, g, or t
  misc_feature (669)..(669): n is a, c, g, or t
  misc_feature (676)..(763): n is a, c, g, or t
  misc_feature (771)..(771): n is a, c, g, or t
gggacccacggccggccgcggagccgagtgctgacccgggtgagaggttcccgcggctcagggaagatggcggcagccgtggtgctggctgctgggttgcgcgcggcgcgcagacgccgtggcggccacgggggtgcgcggggggcaggtccgaggagctgcaggtgtgactgatgggaatgaagtggccaaggcccagcaggcaactcctgggggagcagccccaaccatcttctcccggatcctggacaagagcctcccagctgacattctctatgaggaccagcagtgtcttgtgttccgtgatgtggcccctcaggctcctgtgcacttcctggtcattcctaagaagcccattcctcggattagccaggctgaagaagaagaccagcagcttctaggacacctactccttgtggccaagcagacagcaaaggctgagggcctgggagatggataccgacttgtgatcaacgatgggaagctgggtgcacaatctgtgtatcatctgcacattcatgtacttgggggccggcagctccagtggcctccaggttgaacctgccaactgattaaaggacaccagactctggatgcttggatggaaagggaaaaatggaccctgtgatgctaataaaactgttctcccttaaaaaaanaaaccccaanaaaaaannnnnnnnnnnnnnnnnnnnnnnnnnnnnnnnnnnnnnnnnnnnnnnnnnnnnnnnnnnnnnnnnnnnnnnnnnnnnnnnnnnnnnnnggattccntcatcacctgtacgccctctagagttactcttagcccgttacctctgcgt

SEQ ID NO: 82043 - DNA, 1144 bp, Homo Sapiens
  misc_feature (67)..(67): n is a, c, g, or t
  misc_feature (107)..(107): n is a, c, g, or t
  misc_feature (135)..(135): n is a, c, g, or t
  misc_feature (137)..(137): n is a, c, g, or t
  misc_feature (148)..(148): n is a, c, g, or t
  misc_feature (311)..(311): n is a, c, g, or t
  misc_feature (318)..(318): n is a, c, g, or t
  misc_feature (831)..(849): n is a, c, g, or t
  misc_feature (1040)..(1071): n is a, c, g, or t
gcgtacgcacgcattattgagtagtcatcctagcaccccagcttacaattatgctccggctcgtatntgtgtgattgtgacggatacaatttcacacagaaacagtntgacatgttacgaatttatacgactcantntagggattggncctcgagccagaaatcgggcacgaggcgttattaaacgattgattagtgtcttaaacaaaagcacgggtgaagtcacaaagaaaaagcctaagttttgactaaaggccagaatgcattgtagagctacagacacaaagaccaatagctcttgagctatataangacttanaagagctggggagttcatgctacgttacggtggtctacaatagctgctggtgttgtcactgagataaaagaatgatgggtcagaatttctaccacgtttctggatacagtgaaatagctaacctctgtttcaagaatgcagttattaagtcaaaggaacaatgtgcaattgatatgtttttagatgagagagaaaaattaaagctaaaattagctgcaaagaagtattaataatcacctctgcaaaaattctaagttgccaactggcaaagaaagtctaatgttaaaaacaactttgcctttgaaacgttaataaatggatttactttgctaagatttatggcaagtgtcaaaaatagtatctgaagatactgaatcatcatgaaatgaactctacttctggccaaagcacaatgtatttgcagttttctcttttgattcaattatactgcacatgttttaaggaaaagtaacttaattgggtttttcaggcagttgatatttgacctaagcnnnnnnnnnnnnnnnnnnnccagttaatgctaagaaaagatttggggaaggttataataaaagtattttgtggtgaccataagaatgtccctccccaaacaagtaaacttgtgaaagtttaatttggaattagtggaagctgttcctttgaaagccaagatattatttaagttgtaaagccagctaataaaatgccttagtttgagcatnnnnnnnnnnnnnnnnnnnnnnnnnnnnnnnnggctacagccgcgcccgcaagctttttccctttagtgagggttaatttcggcatggcactggccgtcgttaaa

SEQ ID NO: 82044 - DNA, 1548 bp, Homo Sapiens
  misc_feature (1050)..(1065): n is a, c, g, or t
  misc_feature (1294)..(1303): n is a, c, g, or t
ttctcaaccagaaatttaatactttctaaaatattttttaaatttagcttgtgcttttgaattacaggagaagggaatcataatttaataaaacgcttactagaaagaccattacagatcccaaacacgtgggtttggtgaccctgtctttcttatatgaccctacaataaacatttgaaggcagcataggatggcagacagtaggaacattgtttcacttggcggcatgtttttgaaacctgctttatagtaactgggtgattgccattgtggtagagcttccactgctgtttataatctgagagagttaatctcagaggatgcttttttccttttaatctgctatgaatcagtacccagatgtttaattactgtacttattaaatcatgagggcaaaagagtgtagaatggaaaaaagtctcttgtatctagatactttaaatatgggaggccctttaacttaattgcctttagtcaaccactggatttgaatttgcatcaagtattttaaataatattgaatttaaaaaaatgtattgcagtagtgcgtcagtaccttattgttaaagtgagtcagataaatcttcaattcctggctatttgggcaattgaatcatcatggactgtataatgcaatcagattattttgtttctagacatccttgaattacaccaaagaacatgaaacttagttgtggttacattatttatttatttcatgcattcattttatttcccttaaggtctggatgagacttctttggggagcctctaaaaaaatttttcactgggggccacgtgggtcattagaagccagagctctcctccaggctccttcccagtgcctagaggtgctataggaaacatagatccagccaggggcttccctaaagcagtgcagcaccggcccagggcatcactagacaggccctaattaagttttttttaaaaagcctgtgtatttattttagaatcatgtttttctgtatattaacttgggggatatcgttaatatttaggatataagatttgaggtcagccatcttcnnnnnnnnnnnnnnnnttgactcaagaaagtacaagtaaactatacacctttttttcataagttttaggaactgtagtaatgtggcttagaaagtataatggcctaaatgttttcaaaatgtaagttcctgtggagaagaattgtttatattgcaaacggggggactgaggggaacctgtaggtttaaaacagtatgtttgtcagccaactgatttaaaaggcctttaactgttttggttgttgnnnnnnnnnnaagccactctccccttcctatgaggaagaattgagaggggcacctatttctgtaaaatccccaaattggtgttgatgattttgagcttgaatgttttcatacctgattaaaacttggtttattctaatttctgtatcatatcatctgaggtttacgtggtaactagtcttataacatggatgtatcttttttttgttgttcatctaaagctttttaatccaaataaatacagagtttgcaaagtg

SEQ ID NO: 82045 - DNA, 608 bp, Homo Sapiens
ccaaagccttccaacagcaacatgaagttggcagccttcctcctcctgtgatcctcatcatcttcagcctagaggtacaagagcttcaggctgcaggagaccggcttttggatactgctaatcagtcctagcactctttctctttgaacctggacaaggtgtctgacccttctcaacacagcatcagacagccacctctattgactgaagttgacaatggagaataaaactcattacccctgctgaatccaggggcccctttttacagatgagaaaagttccagaaagacccagagacataatcaggtacctgcgtcgagctctgcacaggtgactgggactgcaaccccggagaccactgtgtcagcaatgggtgtggccatgagtgtgttgcagggtaaggacagatgaagagttatcttaaggatcatctttccctaagatcgtcatcccttcctggagttcctatcttccaagatgtgactgtctggagttccttgactaggaagatggatgaaaacagcaagcctgtggatggagactacaggggatatgggaggcagggaagaggggttgtttcttttaataaatcatcattgttaaaagcc

SEQ ID NO: 82046 - DNA, 1017 bp, Homo Sapiens
  misc_feature (20)..(20): n is a, c, g, or t
  misc_feature (45)..(45): n is a, c, g, or t
  misc_feature (68)..(68): n is a, c, g, or t
  misc_feature (117)..(148): n is a, c, g, or t
  misc_feature (176)..(176): n is a, c, g, or t
  misc_feature (272)..(273): n is a, c, g, or t
  misc_feature (282)..(282): n is a, c, g, or t
  misc_feature (297)..(298): n is a, c, g, or t
  misc_feature (366)..(366): n is a, c, g, or t
  misc_feature (407)..(407): n is a, c, g, or t
  misc_feature (435)..(435): n is a, c, g, or t
tacattcacaccggaacagnttgactgatcgaatttatcgactcnttagggatttgccctcgagccangatcggcacgaggacattttgatgttgagcgcccgcgctgtagcttttnnnnnnnnnnnnnnnnnnnnnnnnnnnnnnnntgagacagagtctcactgcactccagcntgggtgacagagcaggactccgtctcaaaaaagatggccatgctgccaaaggctgggctcataggaaatatctgtagtaggatgaaaggatctgcnntagggagcnccggactcggttacnntaccccgtactcatcccactcatctgtctaccctagtgtccatcatgccctggatgaatcataggtgngagggacagaagccgagaacaccaggcacacggggtggggngaatggggggagcccaggtgatcccctntggaaagtggattgatcctctcccctgtggaatgacagcttaacctgattaacccactggggcttgctattttatgagcatttttaaacagaaaggaaagatgatatcccagtgcaggtagactttatttttgaaagcatcgtggcccctcgcctctccctctcccccagaaccttggccagaattgagtcttcgcgttggggaggccacgctggaaccattgctctagggctgaaggtggaagtagggccactgccgcagcttcagccagagccctcgctgcttcgcagaatttaacaagcacacgactgggattcctttggatatgagaaaggaaggcaagtgcgggcaaagggaagctcctcccgtttttcataaacagaagtaagatgtcctctttcccaggtttgcacaatcacttctggcaaattaattgaaggtccttgaattcagccagtgcacgaaacctttgcatgttcttctgaaactgtacttcttccctattctgtctacccacactctgcgaactttgccttttccttaaacacattccagaccaaacactgttcagtttgataaaaa

SEQ ID NO: 82047 - DNA, 1629 bp, Homo Sapiens
  misc_feature (42)..(84): n is a, c, g, or t
  misc_feature (88)..(122): n is a, c, g, or t
  misc_feature (1031)..(1055): n is a, c, g, or t
  misc_feature (1466)..(1474): n is a, c, g, or t
  misc_feature (1520)..(1520): n is a, c, g, or t
  misc_feature (1589)..(1589): n is a, c, g, or t
aaaatcgtatagactcactatagggcgctagcgtcgtctttnnnnnnnnnnnnnnnnnnnnnnnnnnnnnnnnnnnnnnnnnnnccgnnnnnnnnnnnnnnnnnnnnnnnnnnnnnnnnnnncagtcgacggtaccggacatatgcccgggaattcggccattacggccgggggtccttgtccagtgaaacaccctcggctgggaagtcagttcgttctctcctctcctctcttcttgtttgaacatggtgcggactaaagcagacagtgttccaggcacttacagaaaagtggtggctgctcgagcccccagaaaggtgcttggttcttccacctctgccactaattcgacatcagtttcatcgaggaaagctgaaaataaatatgcaggagggaaccccgtttgcgtgcgcccaactcccaagtggcaaaaaggaattggagaattctttaggttgtcccctaaagattctgaaaaagagaatcagattcctgaagaggcaggaagcagtggcttaggaaaagcaaagagaaaagcatgtcctttgcaacctgatcacacaaatgatgaaaaagaatagaactttctcattcatctttgaataacgtctccttgtttaccctggtattctagaatgtaaatttacataaatgtgtttgttccaattagctttgttgaacaggcatttaattaaaaaatttaggtttaaatttagatgttcaaaagtagttgtgaaatttgagaatttgtaagactaattatggtaacttagcttagtattcaatataatgcattgtttggtttcttttaccaaattaagtgtctagttcttgctaaaatcaagtcattgcattgtgttctaattacaagtatgttgtatttgagatttgcttagattgttgtactgctgccatttttattggtgtttgattattggaatggtgccatattgtcactccttctacttgctttaaaaagcagagttagatttttgcacattaaaaaattcagtattaattaaacacccgtnnnnnnnnnnnnnnnnnnnnnnnnncacttgtcggccgcctcggcccctcgagaaggctttctaaaacccatttcgtttgggcgccccgggggccccagttaggaaaagaagaaacatgggcccataaaacattgttttccctaaggaaaaatccctggggatcataggaactagtggggactttgggcaatttcctccccccgaaatataaacaaaaccgctccccgggcgggggcaaaactgcgaagaccggttctctttgaaaacaaagatccccaagaaatggggagattttttctggggaggggctctatttaacctcggggaaatctgttattctccacaccacggggagattccctcgaagtccccggacgacctctcctattatatgtgcctgagattttacggcccccctgacaagcgcccacatgnnnnnnnnntttcccttctctcccgacaagtgtgaatcgggggggctgggggtancgattttccgacatgttaaaaagggcgcatgttttatttatgccttcgcgtaaacaattggtcgggtanaaaacgcgtgacatataacaccatacaaaacctggtgggg

SEQ ID NO: 82048 - DNA, 827 bp, Homo Sapiens
  misc_feature (689)..(717): n is a, c, g, or t
gggccttgtccagtgaaacaccctcggctgggaagtcagttcgttctctcctctcctctcttcttgtttgaacatggtgcggactaaagcagacagtgttccaggcacttacagaaaagtggtggctgctcgagcccccagaaaggtgcttggttcttccacctctgccactaattcgacatcagtttcatcgaggaaagagcatgtcctttgcaacctgatcacacaaatgatgaaaaagaatagaactttctcattcatctttgaataacgtctccttgtttaccctggtattctagaatgtaaatttacataaatgtgtttgttccaattagctttgttgaacaggcatttaattaaaaaatttaggtttaaatttagatgttcaaaagtagttgtgaaatttgagaatttgtaagactaattatggtaacttagcttagtattcaatataatgcattgtttggtttcttttaccaaattaagtgtctagttcttgctaaaatcaagtcattgcattgtgttctaattacaagtatgttgtatttgagatttgcttagattgttgtactgctgccatttttattggtgtttgattattggaatggtgccatattgtcactccttctacttgctttaaaaagcagagttagatttttgcacattaaaaaattcagtattaattaacnnnnnnnnnnnnnnnnnnnnnnnnnnnnnccttgtggggcggcctcgggccctctagaagctttctaaaaccttttttttgggggcgcggcgccccccaggaaatgaaaaagggccatacaggttttcccaggggatcc

SEQ ID NO: 82049 - DNA, 1571 bp, Homo Sapiens
  misc_feature (280)..(344): n is a, c, g, or t
  misc_feature (914)..(914): n is a, c, g, or t
agatggaataaaaaggcctacctcattgggctcgtgtgggtgaggagaactgaagagtctgagagcgcggcacgagccagaggctacggaaaacactgccctcctacactccaccttggagagacccagaaaagaacaagcttcatttgtaaaaaaggaaaacaactcaggcaatgggggtggcttaaaggcactctacagtgtgcagatgccttccacttcttccatctgccctgtctctccaagaacccctatggccccggtctcagaacagagctgnnnnnnnnnnnnnnnnnnnnnnnnnnnnnnnnnnnnnnnnnnnnnnnnnnnnnnnnnnnnnnnnntggtaaaatccttctccaggaaaaatctgtccttggcccaatgtgtaaacacttgctgaggaacttggaataacttgcagtgtcttgcagtattgtgaaaccagcaacttgttcacaattcttctgaatttcttgggaaatttgaagtggagtacctgtaccaacatgaaatgacacgaatttaagtgacgctcaacaacgaaaagcaaaaagaaccaaagaggaagcaactgaaacaacatctggatgtatttaaaaatatacaatgcctccaaaatcaggtgtcattaatgaaaattctgaagaaatgccaccggacatagccaacgcacctacgctgttgttattcatttcctgcttttcacagaaaacaattttgttgcatggaagatcgtgaacttcaaagggcagaggggaaactgtcccttggcctctacccctccaaggccccactttttcgtcaacactccttggacgcagcagaagtatgaacataatatggtcctgaatgaggctgagtctttgggcgcagaagacccgggttaataaaaataggaagtggaaactccnccaggagtttggatgcttcatctctgctgagacccagtgcctggcactgaaggtgctcaggaaataccttctgaatgatcggaagcccctgccatctgctaaactggatctatgatgacagaagccgaggaatgtgaggttcatctagagagttcttgtgaattttccaagggaggcacctgttgaattcaggcatcggcatgtgacttgatttggtcaatgaaatgtgagagaagtgacatccactttgaggcaggcactttccgatttcagtctctagagattccagagtctgggatctggactggggtgaagggaggcatggttttgccacagcctgccctgtactgctgaattctcctgcgcgtgctcaagtgcttgcaaatgaaaggtcatctgggccttgatcagtcgtgtggcctgtggatgatgccatcaagctgagatgtgaagcggaagtgaggcagaggctcccttccctttgtttggcgcagttttctgtgagagagcagaggtgggagatgaggggacctctgccccagtgtttctgcatccaagctccagccttgttgaaggttgccccgacggccactctccatactgctgccagaagaaccttgaaatatcgctctttttaattaaaaagcaaaactcttc

SEQ ID NO: 82050 - DNA, 605 bp, Homo Sapiens
  misc_feature (32)..(32): n is a, c, g, or t
  misc_feature (50)..(50): n is a, c, g, or t
  misc_feature (77)..(77): n is a, c, g, or t
cattttagaatccttaataatggatgctgggngccttcaagcccttccantttgatttgcttgggaggctcacaggnctcagctttttgtcatactcaatggctatggtttaccacaccgaaagatccagggcaaactcagcaaaaggctcaaacccaagtccagaggaaaccaggcacaatctttgagaatcttaatgaaatcacacaggatgtgcttcattgaagctccatctgggacttaaaacaacacacgtgagatgtgttccaggaagtcgtcttgagcacccattgctcagagtttatattggacttgctttctagcacataccacaattgtagacctccagaagaacaggaggtgttcagcgtaagacaatttaggcacacggagctacttctcattactgggaacaatgggaaacttcccaaaacctaaagtacagactccagccaaggatgaaccttgcaagatcaaagaatagcagtctctggcctgctctgttctctttttcacagtaacttaaatggaaaaatgctgagttagcttaagtttctgtaacaaacattaagcaaataaaattttctataacagaaataaaaaaa

SEQ ID NO: 82051 - DNA, 880 bp, Homo Sapiens
  misc_feature (790)..(827): n is a, c, g, or t
aaggaaatttatgttttattcaagccttttaaaatcagcacacccaccttgcagaagtaattaataacccatgattattaattatgtttgccaagttaattttcatccagtattacttgcagggaaagtttgaaattgatgaatcatctcccttttgagatgtcacttgtagaactaaaggctacctataatttctgtaattgttactctttaatggaactttaaacttctaagaaaaatatttcaatatattgttaaattgacttcaatgactaagattgtggtggagaggatatttccccaaactaactctttctctgacacttaggggttcattgtaatagtaacagcccgtgctagcaaccatctgctagtgattcgctcaggggaagaagaaagggctaaggaaatttaggtttgatcacctttttcagagtttctggggaaagcaaaaccttctctctactactcactgcaaacaagcatgttgtgcaagctactgctgccaaccaggtcacatccattagtgaagtcaatgctgtggagagagacattcaaacctgggtcactgatagtatcattttcaatttctgacccaatcaattctggggcttccaattcctctctccatggtcttatgtgaaataatacattttttaaactgttgaagtcatattgagctgaaatttcccttaattacaactcttaatattttaactatttatgctaagtttctttgttccagaaaaagtactttaactcggccgggcgcggtggctcacgcctgcannnnnnnnnnnnnnnnnnnnnnnnnnnnnnnnnnnnnnggatcacgaggtcaggagatcgaggaccatcctggctaacacggtgaaacccc

SEQ ID NO: 82052 - DNA, 1021 bp, Homo Sapiens
  misc_feature (142)..(142): n is a, c, g, or t
  misc_feature (148)..(149): n is a, c, g, or t
  misc_feature (161)..(161): n is a, c, g, or t
  misc_feature (182)..(225): n is a, c, g, or t
  misc_feature (235)..(235): n is a, c, g, or t
  misc_feature (253)..(253): n is a, c, g, or t
  misc_feature (286)..(286): n is a, c, g, or t
ccttatggaaatgacatgatattgaccatctattctctaagtcatattagatgatattatcttacagattctattatccatagatagtatcttacatacacatctcagtgcatctatcccactctcataatccatcatgtcntaaatnntgtatctactgntaaaaaaagtgcactgacttnnnnnnnnnnnnnnnnnnnnnnnnnnnnnnnnnnnnnnnnnnnntgatatatcntatattctgttaaaatcnaaaagtgaacgaaagcatttaactggccagttntgattgcaaatgctgtaaagatatagaatgaagtcctgtgaggccttcctatctccaagtctatgtattttctggagaccaaaccagataccagataatcacaaagaaagcttttttaataaggcttaaaccaagaccttgtctagatatttttagtttgttgccaaggtagcactgtgagaaatctcacttggatgttatgtaaggggtgagacacaacagtctgactatgagtgaggaaaatatctgggtcttttcgtcagtttggtgcatttgctgctgctgttgctactgtttgcctcaaacgctgtgtttaaacaacgttaaactcttagcctacaaggtggctcttatgtacatagttgttaatacatccaattaatgatgtctgacatgctatttttgtagggagaaaatatgtgctaatgatattttgagttaaaatatcttttggggaggatttgctgaaaagttgcacttttgttacaatgcttatgcttggtacaagcttatgctgtcttaaattattttaaaaaaataaatactgtctgtgagaaaccagctggtttagaaaagtttagtatgtgacgataaactagaaattacctttatattctagtattttcagcactccataaattctattacctaaatattgccacactattttgtgatttaaaaattcttactaaggaataaaaactttaatatacgatatgatattgtctaataatt

SEQ ID NO: 82053 - DNA, 698 bp, Homo Sapiens
  misc_feature (561)..(589): n is a, c, g, or t
tctttaatttcccacctcaacagagccactggtggccgcagaagacagtccacgtgtcttaaccaggcttacaagactccaaaggtctggcttctccccacccctactccctgtcttgtctctcccacactcccccaacagcttctctggagccaagtcagccagcctccttccagcttcaggcctttgaacatgctgttctttccacctaaaaagctccctgcacttcccccagcctagttccctgcttgtatagattgttcctctaatgtgactcctggaaaagccttccttgcctctcaggctagagcagagcccccattaacagctctcacaccagcctatctttctcctccactgcatttgtcacatcctgtgatcctgtgtgcatcctgttcaatgtctgtctccacacataaaatgtaaactccaaaaggataggaactgtgtctgactcgcttcctttcatgtcccttgtgcctagatgggtgccttgtatcaagcaggtgctcaacaaatgtctgctgaaaaaatgatgcagggtgcggtggctcacgcagnnnnnnnnnnnnnnnnnnnnnnnnnnnnnctattctactttatttttatccattgcccttatcagagataaatatttttgcttgtttttatctttattctcctgctataagttccataaaaaggaaactttgcaggag

SEQ ID NO: 82054 - DNA, 1049 bp, Homo Sapiens
  misc_feature (76)..(77): n is a, c, g, or t
  misc_feature (114)..(114): n is a, c, g, or t
  misc_feature (123)..(123): n is a, c, g, or t
  misc_feature (128)..(129): n is a, c, g, or t
  misc_feature (167)..(167): n is a, c, g, or t
  misc_feature (337)..(337): n is a, c, g, or t
ccaggaatcgcacgaggggggatcccgttgcgcagccatctgtcatggacgacattgaggtgtgctcagaccgacnntgaagggtgatgatctggaggaggtgtcacaagtgangagttgatnaatcnntgaggaaagaccaaagctgctgaaatggttcccgaccntcccctcgccccccatggaggctcctgccccaacctcaaacccttctggccggaaaaagccaaagcggtcaaaggatgccctcttcgccctgtgagcaactctgtggtttgcctccccaaatgcggggtccccgcttgcaccccgtggacaccgggcactggccactccntaaatccccagctccacacggcctgcacacctgtgtttccatggaaatgccaccgtgtctgctcccaggcctcccactagtcaggaccagcttcagccacttcttttctctgagtggtgggacaactgcagccaaaaactctctcccctcccaccatgggcccctctgcccatgtttcctcccaggaagagcgggcagagtggcccagccccaggcagtgcttcctgagcagaccacccggactgtctttcctccacccgcccatggagaaagagcacgcccggccccgccctgtgctcacctctgcctggctcagtgaccttctcaggcattctgccctcctgggcccctctctccctgaaggggctttgtggcatctctggaagagcagggtgtgctgcactcatgggcctggtctcactccttggacttgtcaccttgtgacatttggcttaccagcatttgagaaggctctgctgggtctccatggtgggggtctctcaccttcttgaccctctctccatcattcagctgccagcccaggcttcacacccaagctggctcagcagccgagcctggcaccgagggtccctgcaggctccctgggcagggagagggccaaggacaattgggagggcagcaggcagcccgcagatggtggccatgtggcacgctgctgagacgacactaccaataaaccaaactgccacgc

SEQ ID NO: 82055 - DNA, 1468 bp, Homo Sapiens
  misc_feature (100)..(100): n is a, c, g, or t
  misc_feature (103)..(103): n is a, c, g, or t
  misc_feature (112)..(113): n is a, c, g, or t
  misc_feature (124)..(124): n is a, c, g, or t
  misc_feature (139)..(139): n is a, c, g, or t
  misc_feature (163)..(163): n is a, c, g, or t
  misc_feature (176)..(177): n is a, c, g, or t
  misc_feature (200)..(200): n is a, c, g, or t
  misc_feature (254)..(254): n is a, c, g, or t
  misc_feature (279)..(279): n is a, c, g, or t
  misc_feature (391)..(391): n is a, c, g, or t
tagatcatatagaattgcctgagcaagaatcgcacgagcgctctagggtctggagctcgcaccttccttccggggtcttgttcccaccctccgccccccnacngtgcgtctnncaggttggccngtgccgcggtgcttntaattttcccccagctcagaatcntgctgctcgcccnncaggagagcaacaactcaacggnaacgatgtggaagtgtcagctctgctcttcgtttgggaagcgcgtcgctctggntcctgcagaaaggagccagcacagnccagccagaagatgacactgagactacaggtttggaaggcggcgttgccatgccaggtgccgaagatgatgtggtactccaggaaccagcgaagaccgctataagtctggcntgacaactctggtggcaacaagtgtcaacagtgtaacaggcattcgcatcgaggatctgccaacttcagaaagcacagtccacgcgcaagaacaaagtccaagcgccacagcctcaaacgtggccaccagtcactccacggagaaagtggatggagacacacagacaacagttgagaaagatggtttgtcaacagtgaccctggttggaatcatagttggggtcttactagccatcggcttcattggtggaatcatcgttgtggttatgcgaaaaatgtcgggaaggtactcgccctaaagagctgaagggttacgccctgctgccaacgtgcttaaaaaaagaccgtttctgactctgtgccctgtccctgagctcgtgggagaagatgacccgtggaacacttgcctggcccactcagaatccacggtgacctctccgcttgccaaaataaccgaaggaaagaccgttcaccagacttggctcctctaaacatttgctgttcaaacatgtttttgaatatacattctataaaagattatttgaaagacaaaattcatagaaaatggagcaaaactgtataaactgatttgtaactaacactggaccattggatcgatattacatgctgtaaccatgtgtctccgtctgaccattcttgttattgttaaaatgcagaggaatctggaaatatttatatccacggagtccttggatccagtgctacgtcagtaaatagcaccagcattttgcaattgctgatctgctgaaatgtacacattctggtctagtttggtctatcttttaaagcctgatctggtgtgaataatcaactaggaaatctaaacttggataacacgtggtgaacaactgcctttagctggtccagattaatcatttcaaagacatccattttagatcacaagcaggaagtcgatagtctcaaaggcactttgtttctcccaagtaggccaccaggcagcctctaagaagttgctttacccaaatccttctccagccatgacttggtgactctaagcttgctccaactggccccctcaattccctcagatgatga

SEQ ID NO: 82056 - DNA, 1822 bp, Homo Sapiens
  misc_feature (31)..(31): n is a, c, g, or t
  misc_feature (47)..(47): n is a, c, g, or t
  misc_feature (66)..(67): n is a, c, g, or t
  misc_feature (82)..(82): n is a, c, g, or t
  misc_feature (95)..(95): n is a, c, g, or t
  misc_feature (99)..(99): n is a, c, g, or t
  misc_feature (156)..(156): n is a, c, g, or t
  misc_feature (175)..(175): n is a, c, g, or t
  misc_feature (186)..(186): n is a, c, g, or t
  misc_feature (191)..(191): n is a, c, g, or t
  misc_feature (216)..(216): n is a, c, g, or t
  misc_feature (224)..(224): n is a, c, g, or t
  misc_feature (239)..(239): n is a, c, g, or t
  misc_feature (250)..(250): n is a, c, g, or t
  misc_feature (285)..(285): n is a, c, g, or t
  misc_feature (289)..(289): n is a, c, g, or t
  misc_feature (296)..(296): n is a, c, g, or t
  misc_feature (303)..(303): n is a, c, g, or t
  misc_feature (1056)..(1070): n is a, c, g, or t
  misc_feature (1103)..(1752): n is a, c, g, or t
gccgagggatgaaggagattgatatttgctnggatggtggaaggacnttgaccaccagcctaccanntgcagaaccatttcntccagccgttgtntccnttgctgtcgtctcccagatgtcagtgacagtgaagagctgagtagcctgcagtcctnagatgcagacacctttccntttgctgtgcntcggnccgctggggcttgtgacacccccgncagaagtnggcacgtttgagatncgcagccctgnccctggtctggtggagagagatggtgtgctgaagntggnagctggnaccaggnccctgggcccagcattgccagccttggctcagatgggcgtctttgtcttcttgacccccgggatctctgccatcctgtgagctcagtccagtgcccagtatccgtacctagccctgacccagagctgctgcgagtgacttgggccccaggccggaagaattgcttggccatctcaggttttgatggtacagtccaggtctatgatgccacatcttgggatggaacacggagccaagatggaacacggagccaagtagaacctctcttcactcacaagaggtcacatcttcctagatggaaatgggatggaccctgctcctttgggtcaccacccacacctgagcatccctggcaagaccaaggactttgttatcagcaacaaatgatgcctctctggcatgtgtgggactgggtggacctttgtgccccccgctgacaccagcatctttccatctaggcctctagaaaggggaggagctgctgtagtagcaagggtgctcatgtaggactcaagtgactaccagtccctgttaccagctgtgtggccttgggcaagtctgccagcgtcacttagcctcagtttccttatctgtaaaatgaggatagtaagaactacctcgtagtgatattgcgaaggttagaagaaacgcatggcataattacttggtagctattgttagatctgggagtgtgaaatggtagcgttttgtccctgtcttcacactatcatagggagaatcaaaagagctaacnnnnnnnnnnnnnnngcctacagccgcggccctcgtgccgaattcttnnnnnnnnnnnnnnnnnnnnnnnnnnnnnnnnnnnnnnnnnnnnnnnnnnnnnnnnnnnnnnnnnnnnnnnnnnnnnnnnnnnnnnnnnnnnnnnnnnnnnnnnnnnnnnnnnnnnnnnnnnnnnnnnnnnnnnnnnnnnnnnnnnnnnnnnnnnnnnnnnnnnnnnnnnnnnnnnnnnnnnnnnnnnnnnnnnnnnnnnnnnnnnnnnnnnnnnnnnnnnnnnnnnnnnnnnnnnnnnnnnnnnnnnnnnnnnnnnnnnnnnnnnnnnnnnnnnnnnnnnnnnnnnnnnnnnnnnnnnnnnnnnnnnnnnnnnnnnnnnnnnnnnnnnnnnnnnnnnnnnnnnnnnnnnnnnnnnnnnnnnnnnnnnnnnnnnnnnnnnnnnnnnnnnnnnnnnnnnnnnnnnnnnnnnnnnnnnnnnnnnnnnnnnnnnnnnnnnnnnnnnnnnnnnnnnnnnnnnnnnnnnnnnnnnnnnnnnnnnnnnnnnnnnnnnnnnnnnnnnnnnnnnnnnnnnnnnnnnnnnnnnnnnnnnnnnnnnnnnnnnnnnnnnnnnnnnnnnnnnnnnnnnnnnnnnnnnnnnnnnnnnnnnnnnnnnnnnnnnnnnnnnnnnnnnnnnnnnnnnnnnnnnnnnnnnnnnnnnnnnnnnnnnnnngctgttagtacccagttcgggtaggtcttcgctcaagctggctgtttgacgatccccgtccatctgacgt

SEQ ID NO: 82057 - DNA, 1289 bp, Homo Sapiens
  misc_feature (179)..(179): n is a, c, g, or t
  misc_feature (231)..(231): n is a, c, g, or t
  misc_feature (281)..(281): n is a, c, g, or t
  misc_feature (291)..(291): n is a, c, g, or t
  misc_feature (293)..(293): n is a, c, g, or t
  misc_feature (331)..(331): n is a, c, g, or t
cttccgccgtgcgatcatatcagtgccgcagttccgatggagcgcagtggcgcaccaatatgtggtagctcatcatagcacccagcttacctttatctccggctcgttgtgtgtgaatgtgagcgatacaattccacacaggaacagctatacatgatacgaattataccgactcactntaggaatttgcccctcgaggccaggaatcggcacgagggagatcgcagcccntgcccctggtctgtggggagagagatggtgtgctgaagttgagagctggnaccaggaccntnggcccagcattgccagccttggctcagatgggcgtctntgtcttcttgacccccgggatctctgccatcctgtgagctcagtccagtgcccagtatccgtacctagccctgacccagagctgctgcgagtgacttgggccccaggcctgaagaattgcttggccatctcaggttttgatggtacagtccaggtctatgatgccacatcttgggatggaacacggaaccaaatagaacctctcttcactcacagaggtcacatcttcctagatggaaatgggatggaccctgctcctttggtcaccacccacacctggcatccctgcagaccaaggactttgttatcagcaacaaatgatgcctctctgcatgtgtgggactgggtggacctttgtgccccccgctgacaccagcatctttccatctaggcctctagaaaggggaggagctgctgtagtagcaagggtgctgatgtaggactcaagtgactaccagtccctgttaccagctgtgtggccttgggcaagtctgccagcgtcacttagcctcagtttccttatctgtaaaatgaggatagtaagaactacctcgtagtgatattgcgaaggttagaagaaacgcatggcataattacttggtagctattgttagatctgggagtgtgaaatggtagcgttttgtccctgtcttcacactatcatagggagaatcaaaagagctaacaaatataaacatgctttgtgaatttttttaaagaaaaaaatgtagaggggccaataaacatgaaaaaatcccagccctagtagcaattaaggaaatagcaaaacaggatttctgctcctcttgagtgggtctcatgggaacacaggtgcactttcccacacttgtccccccaggtgactaggttcaagagacatttgcttttggtggccccacaaacatttccttttgagggcccatagtgaatattaaagtgtgctggacatggtggctcat

SEQ ID NO: 82058 - DNA, 1048 bp, Homo Sapiens
  misc_feature (81)..(492): n is a, c, g, or t
  misc_feature (545)..(569): n is a, c, g, or t
ccctctgactgagctcgatttgtgatctcgtcagggggcggactatggaaaacgccagcacgcgccctttacgggtctgcnnnnnnnnnnnnnnnnnnnnnnnnnnnnnnnnnnnnnnnnnnnnnnnnnnnnnnnnnnnnnnnnnnnnnnnnnnnnnnnnnnnnnnnnnnnnnnnnnnnnnnnnnnnnnnnnnnnnnnnnnnnnnnnnnnnnnnnnnnnnnnnnnnnnnnnnnnnnnnnnnnnnnnnnnnnnnnnnnnnnnnnnnnnnnnnnnnnnnnnnnnnnnnnnnnnnnnnnnnnnnnnnnnnnnnnnnnnnnnnnnnnnnnnnnnnnnnnnnnnnnnnnnnnnnnnnnnnnnnnnnnnnnnnnnnnnnnnnnnnnnnnnnnnnnnnnnnnnnnnnnnnnnnnnnnnnnnnnnnnnnnnnnnnnnnnnnnnnnnnnnnnnnnnnnnnnnnnnnnnnnnnnnnnnnnnnnnnnnnnnnnnnnnnnnnnnaagaattcggcacgaggaccattttgatgttggagcggccgcggctgtaggcnnnnnnnnnnnnnnnnnnnnnnnnnggaatcttttccaataaccagctaaagatttgcactgaaatacaacttgtatgccttttgcatttttaaagcctgcttcctggatttaagcagagtgatagtgttcaaagagccagttcagcctgtaacatatttgaaaaagatatgtctgcactttgaggtcccttttgaatgccattcactagacctctcaagcattttgtttcattgctacatccaagcgcctcacaagtccacaatgcgggacagcatcaaaagctcaagactttggaaaaagcttgtgggcttgcactgggggagggaagggaacaaaatttgtgtacttctttgtttaatttagaaataaggcatccaagagatgccattattttctgtgtttcaattgttgtgcctttgagttaaactgcatttttgtcttttggttgaaatctgaaatgtactgtcccaatataaaacagtaattatttgacctttgaaaa

SEQ ID NO: 82059 - DNA, 2329 bp, Homo Sapiens
  misc_feature (49)..(83): n is a, c, g, or t
  misc_feature (685)..(685): n is a, c, g, or t
  misc_feature (976)..(997): n is a, c, g, or t
gaaaaaaacgacagagcgcagcggacggatttgagcgaggaagcggcgnnnnnnnnnnnnnnnnnnnnnnnnnnnnnnnnnnncagtcgacggtaccggacatatgcccgggaattcggccattacggccgggggcggcggcgcggtgtaccctgggatagggagcgatctccgagcgaggcggcaagatggacgcgggatttttccgcggaacaagtgcagaacaggataatcggttcagcaacaaacagaagaaactactgaagcagctgaaatttgcagaatgcctagaaaaaaaggtggacatgagcaaagtaaatttggaggttataaagccttggataacaaaaagagtaacggaaatccttgggtttgaagatgatgttgtgattgagtttatattcaaccagctggaagtgaagaatccagactccaaaatgatgcaaatcaacctgactggatttttgaatggaaaaaatgctcgagaatttatgggagaactgtggcccctgctgctaagtgcacaagaaaacatcgcgggaatcccttctgctttcctagaactgaagaaagaagaaataaaacaaagacagattgaacaagaaaaactggcatctatgaaaaagcaagatgaagacaaagataaaagagataaggaagaaaaagaaagcagcagagacaaaangggagcggtctcgtagcccaagaaagacgcaaatccagatctccttcccctagaagacgatcttcccctgtcaggagagagagaaagcgcagtcattctcgatctccccgtcacagaaccaagagccggagtccttcccctgcttccagaaaagaaggaaaaaactccagagctcccagaaccttcagtggaagtaaaagaaccttcagtacaagaggctacttctactagtgacattctgaaagttcccaaacctgaacctataccagagcctaaagaaccttctccggnnnnnnnnnnnnnnnnnnnnnnggagaaggagaagacccgaccacgatctcggtcacgctccaaatcaagatcccggacgcggtcccgctctccttctcacactcgacctagacggcgccatagatcccgatcaagatcgtattcacctagaaggcggccaagcccaagaaggcggccatctcctcgaagaagaactccgccaagaagaatgcctcctccaccaaggcatagaaggagtagatctccagtaagacgaagaagacgttcgtcagcatccttgtctgggagtagctcatcatcctcttcatctcgttcacggtcaccaccaaagaagcctcccaagaggacatccagcccccctcggaaaactcgtaggttatctccttcagcaagtcctccaaggcgaaggcacaggccatcacctcctgcaactccaccacccaaaactcggcattcccctacaccccagcagtcaaaccgtacaagaaaaagtcgtgtttctgtgtctccagggagaacttcaggtaaagtgacaaaacataaaggtactgagaaaagagaatccccttcaccagcaccgaagcctagaaaagtagagttatctgaatcggaagaagataaaggtggcaaaatggctgcagcagattctgtgcagcagagacgccaatacagacgacaaaaccagcagtcttcatctgactctggctcctcctcctcctcagaagatgaacgacccaagagatcccatgtgaagaagtggtgaggttggcaggcggcggagacattccccttcccggagtgcttctccatcaccacgaaagcgccaaaaaaagagacgttcccctcggatgcagatgggaaagcgatggcaatcgccagtgactaaaagtggtagacggaggagaagtccatcccagcaccacagaaggcgacggtctcccttctgcccgcccctctcctcgaggggccggactccagacaccaccaagacgaagggactccttctgctccccacgtcgcgcgcctcaacttctcctagaaagatactctcctcgcagtacgacggagaatactcccctcccagcctccaaacgaagaagaacggcttcaccgtccatccccctcctaaacgaagagcatcccatctcacccacaaggcgccgggtcccaatctcaccccccaacaaagaagtcccccggcagcagaaacaaggtaccttactatcaccaacattgaaggcctaccagcgccaccggcggccgatagacacaacaagggtcgccacaaggaccagccgagacacacaaaccccagtaaaggcggggccccaaaggaccacgaaccagccagag

SEQ ID NO: 82060 - DNA, 1028 bp, Homo Sapiens
  misc_feature (91)..(91): n is a, c, g, or t
  misc_feature (133)..(133): n is a, c, g, or t
  misc_feature (216)..(237): n is a, c, g, or t
  misc_feature (243)..(243): n is a, c, g, or t
  misc_feature (526)..(589): n is a, c, g, or t
cccttcaagcctggtgaagaagcaatcttcttggcggaagtccttcttcgaagaagatggccgccttcttgggcttggcccgccttctagntgaatacgatcttgatcgggatctatggcgccgtctaggtcnagtgtgagaaggagagcgggaccgcgtccgggatcttgatttggagcgtgaccgagatcgtggtcgggtcttctccttctccnnnnnnnnnnnnnnnnnnnnnnccgganaaggttctttaggctctggtataggttcaggtttgggaactttcagaatgtcactagtagaagtagcctcttgtactgaaggttcttttactttcactgaaggttctgggagctctggagttttttccttcttttctggagcaggggaaggactccggctcttggttctgtgacggggagatcgagaatgactgcgctttctctctctcctgacaggggaagatcgtcttctaggggaaggagatctggatttgcgtcttcttgggctacgagaccgctcccnnnnnnnnnnnnnnnnnnnnnnnnnnnnnnnnnnnnnnnnnnnnnnnnnnnnnnnnnnnnnnnncatagatgccagtttttcttgttcaatctgtctttgttttatttcttctttcttcagttctaggaaagcagaagggattcccgcgatgttttcttgtgcacttagcagcaggggccacagttctcccataaattctcgagcattttttccattcaaaaatccagtcaggttgatttgcatcattttggagtctggattctgcaaaaagacacgacaggaagaaaaacaggttacttcaaaaccaaccaaccaacaaatcaaccaacctaaaactcatttaaattagtattttttaagtctaccataggggcttagacatatatatagtccttactattttacaaatagtcttccctagtagcttctcagcaatataatctctaacagattaccaaattctctctcactctaccaaaagcatcagagcagcctgttaatc

SEQ ID NO: 82061 - DNA, 1203 bp, Homo Sapiens
  misc_feature (24)..(24): n is a, c, g, or t
  misc_feature (35)..(35): n is a, c, g, or t
  misc_feature (63)..(63): n is a, c, g, or t
  misc_feature (72)..(72): n is a, c, g, or t
  misc_feature (81)..(81): n is a, c, g, or t
  misc_feature (96)..(96): n is a, c, g, or t
  misc_feature (260)..(260): n is a, c, g, or t
  misc_feature (671)..(671): n is a, c, g, or t
  misc_feature (842)..(872): n is a, c, g, or t
  misc_feature (1038)..(1049): n is a, c, g, or t
ctattatcaaaacaacatgactcntcggtgactgntatccaaatcacggagagtgaaagggtntgtaaacgnttagattcnaactctcatgaactntgacctgatgagagagagaaagggagttcagtgcacaatgctcgacaaagcatacctcatgctggagagcagcctaaaatatacgcagcagagcagagatgataagtgatgggagatagagaggagcacttcaggtcatgagaagtcaaaacgaaatcagactntaccgagtggcagcacagatgaatgaaagtgtgacgtcatggattcatcgctattgctgtccaaagtacaaagatcgaccacaaattgcaagagtagtgcagaaaaccagcagtggttcagtgttcagtggatggcaggctcctacagtggctcctggactgaggctaagcgccgtgatggccgcaaactggtgccttgggtagacactattaaagagtcagacattatttacaaaaaaattgctctaacgagtgctaataagctgactaataaagttgttcagactttacgatccctgtatgccgccaaggatgggacttccagctaatgaatttgtacatgcagccaaatttacaggaatttttttaaaaggcagaaaaacttgaaataccaacattctggcaaaaaanaatcagttttatgaagagtaagtggaacctgggatgcaggaacaaaagaaggaaatgttgggcaaacatttttgtgggagctcccttcgctgttgtgcagcagaaacagattctcagttcatttttactcccactgtattatagtttaacaaaaattgtttatatcttggnnnnnnnnnnnnnnnnnnnnnnnnnnnnnnnaagtgaatgttggaaattagtctgttaatgttcttaataaagtgttcttggagtttaacctagcagcggatggctttctttagcttagcccagtttccagggaagcattgttttttccaggctgtaaaatggcagaatctcctggatatataatttattctgttgnnnnnnnnnnnngcatgcagtatctatgacctatctgcagaaggagtttttgtaaatgtagattttgatgtattaggtcaccctgaaaacaatacaagaaaagggatccccaggtaatctggtggagcgaatactgcaataaatttttttacttctctttgttaaa

SEQ ID NO: 82062 - DNA, 917 bp, Homo Sapiens
  misc_feature (39)..(39): n is a, c, g, or t
  misc_feature (56)..(58): n is a, c, g, or t
  misc_feature (227)..(227): n is a, c, g, or t
  misc_feature (242)..(242): n is a, c, g, or t
  misc_feature (651)..(662): n is a, c, g, or t
  misc_feature (831)..(861): n is a, c, g, or t
aaagggttgtaaacagattgattcaactttcatgacatntgacctgtgagagagannngagggagttcagtagcacaatctcgacaaagcatactcactgctggaggagcagcctaaattatacgcagcaggacagagatgtgaagtgatgggagatagagaggagcacttcagggtgagcggaggggagtcaacgtattcgcagcgtatactcattgagaagtcanaacgaattcagactntacggagttgcagcacagatgaatgaaagtgttgacgtcatggatgtcatcgctatttgctgtccaaagtacaaagatcgaccacaaattgcaagagtagtgcagaaaaccagcagtggcttcagtgttcagtggatggcaggctcctacagtggctcctggactgaggctaagcgccgtgatggccgcaaactggtgccttgggtagacactattaaagagtcagacattatttacaaaaaaattgctctaacgagtgctaataagctgactaataaagttgttcagactttacgatccctgtatgccgccaaggatgggacttccagctaatgaatttgtacatgcagccaaatttacaggaatttttttaaaaggcagaaaaacttgaaataccaacattctggcnnnnnnnnnnnntcagttttatgaagagtaagtggaacctgggatgcaggaacaaaagaaggaaatgttgggcaaacatttttgtgggagctcccttcgctgttgtgcagcagaaacagattctcagttcatttttactcccactgtattatagtttaacaaaaattgtttatatcttggnnnnnnnnnnnnnnnnnnnnnnnnnnnnnnnaagtgaatgttggaaattagtctgttaatgttcttaataaagtgttcttggagttt

SEQ ID NO: 82063 - DNA, 1355 bp, Homo Sapiens
  misc_feature (82)..(319): n is a, c, g, or t
  misc_feature (324)..(725): n is a, c, g, or t
agtaatcccgtaaggccacgtcggataacggggatctgcaacagccacgtgagcgacgctacacccgagtagtacttacgcnnnnnnnnnnnnnnnnnnnnnnnnnnnnnnnnnnnnnnnnnnnnnnnnnnnnnnnnnnnnnnnnnnnnnnnnnnnnnnnnnnnnnnnnnnnnnnnnnnnnnnnnnnnnnnnnnnnnnnnnnnnnnnnnnnnnnnnnnnnnnnnnnnnnnnnnnnnnnnnnnnnnnnnnnnnnnnnnnnnnnnnnnnnnnnnnnnnnnnnnnnnnnnnnnnnnnnnnnnnnnnnnnnnnnnnnnnnnnngttannnnnnnnnnnnnnnnnnnnnnnnnnnnnnnnnnnnnnnnnnnnnnnnnnnnnnnnnnnnnnnnnnnnnnnnnnnnnnnnnnnnnnnnnnnnnnnnnnnnnnnnnnnnnnnnnnnnnnnnnnnnnnnnnnnnnnnnnnnnnnnnnnnnnnnnnnnnnnnnnnnnnnnnnnnnnnnnnnnnnnnnnnnnnnnnnnnnnnnnnnnnnnnnnnnnnnnnnnnnnnnnnnnnnnnnnnnnnnnnnnnnnnnnnnnnnnnnnnnnnnnnnnnnnnnnnnnnnnnnnnnnnnnnnnnnnnnnnnnnnnnnnnnnnnnnnnnnnnnnnnnnnnnnnnnnnnnnnnnnnnnnnnnnnnnnnnnnnnnnnnnnnnnnnnnnnnnnnnnnnnnnnnnnnnnnnnnnnnnnnnaagaattcggcacgagggtcactggaattgaggtagcagtgagaagcatcatatgatttaaaataaagctttgggtcaatatttactgaagtattacatcaatatatttcctgtttcgctgacaagagttaatagctgattttaaacttgtttatctttgctcctagacaaaagttttgttcgaggagattctaaattacgtatttctttcttgatactgctatggaggtgaagcacatagcaagccactttatcttatattttgtattggtaaaaaattttataaattctatgtaagaatacaaaaaaattaaaagaccactgttttttgtcaatcacttgtccttactcttaatggttttatatagtttgcatgtatatactagattgggttatgattttgaaagtagagactccctattataatgaaatactgagaatgcagaaaatatcatagcacaatactctcattgttccagggagttatgttacttaactaaacctggatgtcgttgtatggagattaacagtattaaaaggggtatgccacatggtttgatcagtaataaacctcacctctaaataatgggcattttaaaatgcactgaattaaacatctttatgtctgac

SEQ ID NO: 82064 - DNA, 1076 bp, Homo Sapiens
  misc_feature (32)..(32): n is a, c, g, or t
  misc_feature (36)..(36): n is a, c, g, or t
  misc_feature (41)..(41): n is a, c, g, or t
  misc_feature (64)..(446): n is a, c, g, or t
ctatgaaaacgccagcacgcgctttttacgtnctgnacctntgctgccctttgctcacatgtcnnnnnnnnnnnnnnnnnnnnnnnnnnnnnnnnnnnnnnnnnnnnnnnnnnnnnnnnnnnnnnnnnnnnnnnnnnnnnnnnnnnnnnnnnnnnnnnnnnnnnnnnnnnnnnnnnnnnnnnnnnnnnnnnnnnnnnnnnnnnnnnnnnnnnnnnnnnnnnnnnnnnnnnnnnnnnnnnnnnnnnnnnnnnnnnnnnnnnnnnnnnnnnnnnnnnnnnnnnnnnnnnnnnnnnnnnnnnnnnnnnnnnnnnnnnnnnnnnnnnnnnnnnnnnnnnnnnnnnnnnnnnnnnnnnnnnnnnnnnnnnnnnnnnnnnnnnnnnnnnnnnnnnnnnnnnnnnnnnnnnnnnnnnnnnnnnnnnnnnnnnnnnnnnnnnnnnnnnnnnnnnaagaattcggcacgaggcgtttggttgatccacgcccaccactttgccctcagtttgggggctgatctcattcttaacatcttcctgtattctgacccagtttaaagaattgtatatctgttttctatttttgtaacagttgaaataactcataatttaaacacttggtgagttttgctcttttctgtcttgagtatgttatgaaacacggccatgtttttctatttaattattttttacttttccttattgtgatgatacattatagcgttccagctgacaatgtatttttgtgtataatcgcccatttcgcccatatttcgacagtagaatagggaagacaaccctattcttaaggtacccttagcaatcttcactcatttttgaagtcctcaatctcgttttactaatgaatagtgacccagagttacatggtaatcaatggctacattagttactatccattaattactattttgatttcttggcattttagtaagcaatgtttggatcaaaacagtttttaagtttcaatctaagtctgctccagggagataatgggctgttcttttgggtgagagctgctgctttgacaattgtatttcttataaataaatttaataaattagt

SEQ ID NO: 82065 - DNA, 443 bp, Homo Sapiens
  misc_feature (352)..(352): n is a, c, g, or t
gtagattcttgtgaatatcccctcacagtcaccgtatttttattaatggatttagtagctttatcattagatgctgcctttgatgaccttgtactcatgcgtgtttccaattctggctgatttattttactttcactggaagatttagcctgtgattttatagtctcctttggacctgatttttttgctagattcttttgagaatcctgaatttctgtttctgaattcttatcgtcactttttttagtaactttggaggaattctcttttgatttctcctgaatggacatcattcctgagtaatgactttcttttctgagtagttttgaagaggatttttgtgtcctggtangcgtgaatgctgactagctagtattattactgaggagcaggtctgaaaatcaacttaactgatgctgtatacatcttcacaaaatactagt

SEQ ID NO: 82066 - DNA, 951 bp, Homo Sapiens
  misc_feature (135)..(146): n is a, c, g, or t
cggtccggaattcccgggatcggcggccgcagcagaagcagctgagtgtctcctgatacccggatgtgaggcgatccgctggcgctagtctgaccctccgccaggcaaaaggaagattgtctttggctatagagnnnnnnnnnnnnaaagattactaaacatacaggaagtgataagaagtatcattcatcagaagcatcattcatcaatcaacttgaagaaaaaggtgatatattatttctttaaggtgctgtgtgatgtgttaagagcatattagaaggaatggttttgtctaattttcttcatgagttatggtggctgagacatcgagtctatattttggggcaaaaactaaacggcagcacaaaaggaaatctatattaatagaatattttgttgaacaaaggaggttagataagaactgcaaaccaacagactcagcaaacaaggaaagaaacgtgttagccataagacatgtttcaagtgaatcgaagtccaataactgtagacttcagaagaaaaaagttttcaaaaattttatcaaaacaggtcactgataaataactcctccagtaatagagctaggcctgaaaccaaaattaattaaaaaattaacaaaacagattgaacctgaattaaatttcttttgataaaaaaacttattaaaaataatcaaaattttcctcaaatttttattaccttgcccaaagtaaagcaagtggccttttagcattcatgccaggcttttctcatgtttctaggaaaggcagaaaaccttaccttggaagcaaaactaataattttttgttggaaaatggaatattccagcatcagttaaaaggttgaatttttcaaaacctgcctccctcagtaaataaaaactaagctaagtcggcaattctcgcgcctacccagggaaaccaaaattccctccttcaaaaccttcctccg

SEQ ID NO: 82067 - DNA, 1042 bp, Homo Sapiens
cgccaccgctaccatatatccgctctatgtttgatgtgacgatacattccccggaacaattgcctggtcgattctcgcatcatataggagttggcctgaggccaagaatcgcacagagagttgtgctaaacaaatacgtcagatgttgtgtctgaggaataatgtcccaaggctgtgtcttaataaaataattgaggtcagaaggtaagagaaagtgaaggaaaggaaaggtaagtagcagtgcctgaggctcggagttctggatgtgcgcagcaggagaagtgaatgaggaaactgaagaaagtaaaagaaagatgaaggatgtctgcatgcagtgggattgttagaggcatttaaaacaaatatctagacattcaaaaagatgtgccaataactagcctagattatctcctatgaaatgagatgttgaaggtgctactagggctaccttagtcttagagagtggagacagattaataagacattttactaatgtgcatttgagtagagagagtaagacagccctgtttaaaagggcttccttatatgttttatctgatttctctccaagtcttcagtgctactaaatgtaatactcaacagtaaaagcactttaacaatgttagctgctattattataaggcatagtaattttattactccctccttggatttttatagaatgttataacctctgagtcacataaaataaaagcttaccattcttaaggaaaaagtaacttcaaatgagtatctgccacatacccatggtttcaaagagttctgaaatgaatccagcagattatgcctgtttatatgtgatgcattgtataaacatccttgaccagtgtatatttctggaggtggatttccagaattgataagtgccagccttgctatctgtattgtcttcattcctttttctgcctttttttgcttgataaaaaatcacttaagcaaatgtatgtggctaattgactcaagtagcacgttggaaactttttgtcttgttcgttaaacaaaaaataaaataccacaaaac

SEQ ID NO: 82068 - DNA, 1005 bp, Homo Sapiens
  misc_feature (99)..(99): n is a, c, g, or t
  misc_feature (109)..(109): n is a, c, g, or t
  misc_feature (120)..(120): n is a, c, g, or t
  misc_feature (153)..(154): n is a, c, g, or t
  misc_feature (158)..(158): n is a, c, g, or t
  misc_feature (193)..(193): n is a, c, g, or t
  misc_feature (252)..(252): n is a, c, g, or t
  misc_feature (274)..(274): n is a, c, g, or t
atcatagcacccagttacattatctccggtcgttgtgttggatgtgacggatacattcacacaggaacagtatgacagatacgatttatcgactcactntaggaattgncctcgagccangatcgcacgagggggagtccagaaccagtgagnnctgnaaagccagtgagatagaggggagctggggaaccanggagacaaaagtcagattgagagaaaggtgaggactgtgataggaccacagcctgggcnaaaggggaccagcaagttgtcntgaatctccagggttcctgactagctgtctcctctgcagcatgagcagctgtagtgcccaactctataggctttggccctccagcttctctctttgactgtgggaggcactgccttggttggtttacctgaacttgtctccgacacaaagcacttatctcttaggagattcccaagaaagtcaacaagatcttgttcccagggagtgggtcattggccaaagggaacataaggtaggcagaaaacttaaaagagtttgttaaagtgaagactggagaaattcctcccttcctctgagctgtgaatctctcttcatgaaagccaaaggtagagacagggaggacagggccaggttagggccttccacacacaaacacttctagagttgcccattcctgttatgttcttggaccctaagatacctcctgtcccttttaaatccagattaagagaaacgtccaggaagagctctttgaagccctcaatatttgttggagggactggactcctctccagctccccaccctctgcctccagtcaccatgtgcaagagaggtcctgtacagatctctctgggctctcctttctcctttggaataacttgttcctatttcaggaaagggaaatggtgtcactcaggccctgggactgcttctccagccaggctggggccacaggtcccactctagtgaaggtcaatgtctcagaataaaagctgtatattaacacata

SEQ ID NO: 82069 - DNA, 988 bp, Homo Sapiens
  misc_feature (298)..(309): n is a, c, g, or t
  misc_feature (453)..(814): n is a, c, g, or t
  misc_feature (824)..(824): n is a, c, g, or t
  misc_feature (874)..(874): n is a, c, g, or t
  misc_feature (975)..(975): n is a, c, g, or t
gcattttaagtaatgaaaacaggtcatgttaattttcccttacactaatgaggtaggaatttctctgtaaaagttgaccttttgagcaaacttatcttatgaagagggctctggtgtttacgcagccagcttgcctgaagggacctttaaaccatccagaagggagagtatttactagggttttattaagactctaatggttataaatgaaatatcttaagatttttcacttctgggactgttaagccatctggaatagctattttggagaaaaatcttcaaccaaaataaaactgtnnnnnnnnnnnntaggcctttatacaagctgtagccagaaatctgggataatttttacaagcactttagtaatgttataattgagacctaagttttgatagagccaaaattttttagatctattaaatacattttaaccctcgtgccgaattcttnnnnnnnnnnnnnnnnnnnnnnnnnnnnnnnnnnnnnnnnnnnnnnnnnnnnnnnnnnnnnnnnnnnnnnnnnnnnnnnnnnnnnnnnnnnnnnnnnnnnnnnnnnnnnnnnnnnnnnnnnnnnnnnnnnnnnnnnnnnnnnnnnnnnnnnnnnnnnnnnnnnnnnnnnnnnnnnnnnnnnnnnnnnnnnnnnnnnnnnnnnnnnnnnnnnnnnnnnnnnnnnnnnnnnnnnnnnnnnnnnnnnnnnnnnnnnnnnnnnnnnnnnnnnnnnnnnnnnnnnnnnnnnnnnnnnnnnnnnnnnnnnnnnnnnnnnnnnnnnnnnnnnnnnnnnnnnnnnnnnnnnnnnnnnnnnnnnnnnnnnnacaagatcanggggatacgcagaagacatgtgagcaaaggcagcaaaggcaggaacgtanaaggcgcgtgctgcgttttcaatagtcgcccctgacagcatcaaaatcgagctaatcagagggcgaaccgcagactatagatcaaggtttcccctggagtntcgtggtctctgt

SEQ ID NO: 82070 - DNA, 1187 bp, Homo Sapiens
atgatcacaaatatttttattaagcccaagacataatagcgcattacaggaagaacccaactacatttcattagagataaaagtatggatataacaacaacaacaataacaacaaaaaaagaaacagcctatcattgaaaatacattaatacagaaaacatgagatatccattatgagattttaaaaggtaaaattcctaacaatttgaataactgatttgggtatagtgatgtacaaggaggtagtattaacacatgaagactccttttagccctgtaatggtaaaatatattcagtctgttcaatataccatcaagactggggttaagccgtgagttctcagtctttaatatctaaataatcactgtaagagttttatttgccttccaaatccagagggtcgtactacctagcatcttagcaagttaggatgctttgaaaagcatgatttccaaaaattaacaaatctttgatttataaataagtttatttataatgatatttacataataaaaacaaaacacatggaactcacaagttatacaaagaaactgatgtataataaaaacagcaatatagactgacaggcagaaatttaaagaaagatttaataaagagttaaatatcaaatagacaacttcacttctaaatttcactttgtcactcacactgaattggaattgaacaatggctctctcttcaggcggtcctgtactggaaattctggaaactggtaaaatatattttgataagagtttcaagttaatgacctatttccatgcagtacctaatgctgcctttagatgaagtcacattcagtctgctttgaaatgaaatagctttaagtaatctgttctgccaggctagaaaaatgtcaccaacattttgctgatgcatggagatgtggcagtaataaactactatttagagaggaagagaattggagcagaagtgactgggcaacagtttcaagagaagcaaaagccgggagagggaaatcaatgaaaacatgcacaagattaggcagagtaatatgcacaattagtgcagttggaaaatgaacagaaggaattaatccatggagcaaggtaggggcttctttagttactattcactggaaaacaacttagtgcctagccaaataaatttgtttcagcagaagtacttgagaggacctgggggatgt

SEQ ID NO: 82071 - DNA, 1055 bp, Homo Sapiens
  misc_feature (739)..(739): n is a, c, g, or t
  misc_feature (747)..(747): n is a, c, g, or t
  misc_feature (750)..(750): n is a, c, g, or t
  misc_feature (777)..(777): n is a, c, g, or t
  misc_feature (849)..(849): n is a, c, g, or t
  misc_feature (906)..(906): n is a, c, g, or t
  misc_feature (908)..(908): n is a, c, g, or t
  misc_feature (933)..(933): n is a, c, g, or t
  misc_feature (940)..(941): n is a, c, g, or t
  misc_feature (955)..(955): n is a, c, g, or t
  misc_feature (957)..(957): n is a, c, g, or t
  misc_feature (1017)..(1017): n is a, c, g, or t
aaaaaaaagcatgaaataatcgattcaaaagccaactaacagcgcataaataaaatatttactttctaagaaaaactgtagcttatcatcaaattgtttacttgtcctttacgtttattcaggcaaacaaaactgcccctcaatgcacttgatcttggtaagcataagcatgtcatattctccttagagaaaaatctgtacagaatttcactgtatctaccacactttaaaatttcctcttccacttagaaaatgacttcaccacagatttaattgtgtactggtattaaaacattgacactccaagaactgattcatccataattgaagctggatcaaagaaatcaggcttcagttctgttctctctcgtctgttctttgatggtggcaaatctatatccatggtgtcaaaatccattccctcattaagatcctcaatcctcccttctgaggacatcataacatcttccacaattggctcttcatcatcttccattaggcttgtgccacgccgattataatcaagaggtgtttgatgatgttcagtctgcattggataaacactcatgaagctatcctcaggccgtaatcttttgggctctctcataatagtggaggtgagttgtggtgtctgcatcataacaggggtgtgcagtgttggttctctgcttaaccacatactgtcactactactactttcttcagtgagtgaaagtgcatgcctcaccactttccgttntcctgtanatngttttgattttttactccgtactgttnaccccggctgctgatcccactatgactgacatggtgtcatcatcaccacccagctagcaagacttcgggtanacatcagtgggagcacacatcctctctcggagtgacatctgaagtcatgacttttcnangtaacaacactgtctttgtctgtcnaatattnnagagaaatcatcananatcagaatgccatttaaggtgatgtctcctttgcgatagtctaaagcattcagcaccttngtacaggatggtctctgttcacgttatccaagtagaag

SEQ ID NO: 82072 - DNA, 1073 bp, Homo Sapiens
  misc_feature (33)..(33): n is a, c, g, or t
  misc_feature (43)..(43): n is a, c, g, or t
  misc_feature (51)..(51): n is a, c, g, or t
  misc_feature (70)..(70): n is a, c, g, or t
  misc_feature (133)..(133): n is a, c, g, or t
  misc_feature (156)..(245): n is a, c, g, or t
  misc_feature (249)..(249): n is a, c, g, or t
  misc_feature (252)..(252): n is a, c, g, or t
  misc_feature (264)..(265): n is a, c, g, or t
  misc_feature (273)..(273): n is a, c, g, or t
  misc_feature (282)..(283): n is a, c, g, or t
cgcggaggacgcccaatacgcaacgccttgtcnccgcgcgtgncgatcatnaatgcagctgcacgacagnttccgactgggaagcgggcatgagcgcacgcaaataatgtgagtagctcactcataggcaccnccagcttacacttatgctccggnnnnnnnnnnnnnnnnnnnnnnnnnnnnnnnnnnnnnnnnnnnnnnnnnnnnnnnnnnnnnnnnnnnnnnnnnnnnnnnnnnnnnnnnnnaatntgnccctcgagccanngaatcgcnacgaggctnntcatcatcactcccttagcaaacgtttcgtaagtaccctctgtctgtttgctactatatgaggtgctgcgaaattagtgggcgtggcttttaatatttttcattcgtgtgtagcctaagtaaggtgactcaagatgatacaccgagagaaaaatgcaaaatatatttggttctcatttctgttgctgtcgtttcctttttaaagacgatttatcaactgctgccatttggaacttcctataagaaactaaaaatgatctatttcagtgttcctttcgcctttcctctgctttctgaataaatggtttcagtaacccatgctgttctctccctattctacgtctttctccctatgttgaaaaaagattcccacagtttctgatgtgtgtgtttatagtcttcaatgtatgttaacatgttaggaactgagtatcttaagagatgtcttagaatgctttagttttcataatttgtcctttatgtatttttcattgtatttgctgttttgacatggaagtaatttaaaaagttggtgcaggaaaggactctttactgttgcacattttggttttctgatatgtaataaattcatggcttggcagctgacatgatgtttcccagagagaaggagatgtatttctgcagggtccagaccaaaagagccatttacagcatgttctcccatgttccattatcagcctgatgaaacctgccctgccaaggcataaacttttgtactagctgtctccatattatgttcaataaattctgtgctctgaatatatttaaaa

SEQ ID NO: 82073 - DNA, 1029 bp, Homo Sapiens
  misc_feature (117)..(117): n is a, c, g, or t
  misc_feature (155)..(155): n is a, c, g, or t
  misc_feature (179)..(179): n is a, c, g, or t
  misc_feature (229)..(262): n is a, c, g, or t
  misc_feature (265)..(265): n is a, c, g, or t
  misc_feature (280)..(281): n is a, c, g, or t
  misc_feature (357)..(357): n is a, c, g, or t
tatgatcattagattgctgagccagatcgccgagtctgcacataatgatgatttgtattcatagcatatcacagtcaatctgcctacagttgctgctgatagtcaccatatacagcntatgtacttgagtgattgctatgaagtgagatccatantattcatgttaaagttcaaatctngggaaccagtccaaacattgcagaaccataagcagtacatattaggtttnnnnnnnnnnnnnnnnnnnnnnnnnnnnnnnnnnggnccaaaatactacacnntgcaaaggaataaagatgtgagagtatgtctccagtgttcactgtagcatagggatagataagatcctgctttatnttggacttggcgcagataatgtatatatttagcaactttgcactatgtaaagtaccttatatattgcactttaaatttctctcctgatgggtactttaatatgaaatgcactttatggacagttatgtcttataacttgattgaaaatgacaactttttgcacccatgtcacagaatacttgttacgcattgttcaaactgaaggaaatttctaataatcccgaataatgaacatagaaatctatctccataaattgagagaagaagaaggtgataagtgttgaaaattaaatgtgataacctttgaaccttgaattttggagatgtattcccaacagcagaatgcaactgtgggcatttcttgtcttatttctttccagagaacgtggttttcatttatttttccctcaaaagagagtcaaatactgacagattcgttctaaatatattgtttctgtcataaaattattgtgatttcctgatgagtcatattactgtgattttcataataatgaagacaccatgaatatactttttttctatatagttcagcaatggcctgaatagaagcaaccaggcaccatctcagcaatgttttctcttgtttgtaattatttgctcctttgaaaattaaatcactattaattacattaaaaatcaaattggataaaa

SEQ ID NO: 82074 - DNA, 1087 bp, Homo Sapiens
  misc_feature (47)..(47): n is a, c, g, or t
  misc_feature (67)..(67): n is a, c, g, or t
  misc_feature (69)..(69): n is a, c, g, or t
  misc_feature (124)..(125): n is a, c, g, or t
  misc_feature (150)..(150): n is a, c, g, or t
  misc_feature (177)..(177): n is a, c, g, or t
  misc_feature (189)..(189): n is a, c, g, or t
  misc_feature (227)..(227): n is a, c, g, or t
  misc_feature (276)..(276): n is a, c, g, or t
  misc_feature (340)..(340): n is a, c, g, or t
cctctggtaaccataccccaaagtgagaggggtgcagatgcactcancctgtgaaaaagatcaagcncntttgtccttaatgagctgacaaaagcttctgaagttgtcacagttcagaaaacannggaagatctatgatgtctgtgcttntgatgatggagttgacctatgataccntacctctgacgncaagaaaaaatggaaagactgtaagatcagagtatcanttgtgaaaagataaccagaatagaccatgaccggagagcgatgctactnttgcttagcaagtcccggatagacttttctgatatcatggttctagggagatatcataccaaanccaaaggaaagaaaatattatagcttttgaggaaatcattgagccatacagacttcatgaagatgataaagagcaagatattgcagataaaatgaaagaagatgaaccatggcgaataacagataatgagcttgaacttaataagaccaagacataccggcagatcaggttaaatgagttattaaaggaacattcaagcacagctaatattattgtcatgagtctcccagttgcacgaaaaaggtgctgtgtctagtgctctctacatggcatggttagaagctctatctaaggacctaccaccaatcctcctagttcgtgggaatcatcagagtgtccttaccttctattcataaatgttctatacagtggacagccctccagaatggtacttcagtgcctagtgtagtaactgaaatcttcaatgacacattaacatcacaatggcgaatggtgacttttctttcacgatttcattaatttgaaagcacacaggaaagttgctccattgataacgtgtatggagacttcggttttagtcaattccatatctcaatcttaatggtgattcttctctgttgaactgaagtttgtgagagtagttttcctttgctacttgaatagcaataaaagcgtgttaactttttgattgatgaaagaagtacaaaaagcctttagccttgaggtgccttctgaaattaaccaaatttcatccatatatcctcttttataaacttatagaatgtc

SEQ ID NO: 82075 - DNA, 1553 bp, Homo Sapiens
  misc_feature (109)..(110): n is a, c, g, or t
  misc_feature (115)..(116): n is a, c, g, or t
  misc_feature (119)..(122): n is a, c, g, or t
  misc_feature (124)..(124): n is a, c, g, or t
  misc_feature (127)..(129): n is a, c, g, or t
  misc_feature (146)..(147): n is a, c, g, or t
  misc_feature (150)..(152): n is a, c, g, or t
  misc_feature (154)..(168): n is a, c, g, or t
  misc_feature (170)..(175): n is a, c, g, or t
  misc_feature (178)..(181): n is a, c, g, or t
  misc_feature (183)..(185): n is a, c, g, or t
  misc_feature (187)..(191): n is a, c, g, or t
  misc_feature (193)..(198): n is a, c, g, or t
  misc_feature (200)..(202): n is a, c, g, or t
  misc_feature (204)..(209): n is a, c, g, or t
  misc_feature (212)..(216): n is a, c, g, or t
  misc_feature (218)..(221): n is a, c, g, or t
  misc_feature (223)..(242): n is a, c, g, or t
  misc_feature (244)..(244): n is a, c, g, or t
  misc_feature (246)..(247): n is a, c, g, or t
  misc_feature (249)..(260): n is a, c, g, or t
  misc_feature (262)..(267): n is a, c, g, or t
  misc_feature (269)..(479): n is a, c, g, or t
  misc_feature (481)..(499): n is a, c, g, or t
  misc_feature (980)..(980): n is a, c, g, or t
  misc_feature (1034)..(1034): n is a, c, g, or t
  misc_feature (1048)..(1096): n is a, c, g, or t
  misc_feature (1157)..(1393): n is a, c, g, or t
  misc_feature (1396)..(1396): n is a, c, g, or t
  misc_feature (1419)..(1489): n is a, c, g, or t
  misc_feature (1504)..(1504): n is a, c, g, or t
  misc_feature (1514)..(1514): n is a, c, g, or t
  misc_feature (1532)..(1532): n is a, c, g, or t
tggggggggagacacttcttggtgtaggagggtagacaccgactatttgtctgcggcttgttcaccgttctgtggtgttgggggcttgggtgctttcagacatattttnngcaannctnnnngnggnnngaagggcggggggaggnncgnnnannnnnnnnnnnnnnngnnnnnnctnnnngnnngnnnnntnnnnnnannncnnnnnnctnnnnncnnnncnnnnnnnnnnnnnnnnnnnnanannannnnnnnnnnnntnnnnnngnnnnnnnnnnnnnnnnnnnnnnnnnnnnnnnnnnnnnnnnnnnnnnnnnnnnnnnnnnnnnnnnnnnnnnnnnnnnnnnnnnnnnnnnnnnnnnnnnnnnnnnnnnnnnnnnnnnnnnnnnnnnnnnnnnnnnnnnnnnnnnnnnnnnnnnnnnnnnnnnnnnnnnnnnnnnnnnnnnnnnnnnnnnnnnnnnnnnnnnnnnnnnnnnnnngnnnnnnnnnnnnnnnnnnngaatagtcaaacgtttataataaacatattttccaatctcgaaacgactgtcagtggtaacaatgatcaacgtaacatagatgtaacaggaacatcacgacgttcgactatacttacaggaaacacaagctacagtgaaatactatctcacgcctaccaggtctgcaaaatccagcttgggcaagggtgtcgccggccccctcttatgctggtgggggagggcgatttggtaccacccctttaggggcctaaatacagccctcgcacttctgcaccaaggaatttaacctaagaaaatagtccgacttgggcaaaaaacggtttgtacaagcaatagtcaagctagcattgttcgttataaaagacagcaaaaaccctaaatttctacaggaaaggggataaagtctggtgctataaaactccgtttccggaggaatcccacctgtatctgaatgcatggggcgctctccgagctacgttnagtataagagccccaagtaaagtaactgaccttttgcagaaacgcacgtagatnttcctgcatagacnnnnnnnnnnnnnnnnnnnnnnnnnnnnnnnnnnnnnnnnnnnnnnnnnactgggccttggaggttaggactgggaaaaacacatcaagcctcgtgccgaattcttgggnnnnnnnnnnnnnnnnnnnnnnnnnnnnnnnnnnnnnnnnnnnnnnnnnnnnnnnnnnnnnnnnnnnnnnnnnnnnnnnnnnnnnnnnnnnnnnnnnnnnnnnnnnnnnnnnnnnnnnnnnnnnnnnnnnnnnnnnnnnnnnnnnnnnnnnnnnnnnnnnnnnnnnnnnnnnnnnnnnnnnnnnnnnnnnnnnnnnnnnnnnnnnnnnnnnnnnnnnnnnnnnnnnnnnnnnnnnnnggnggagacggcggttttgcgtatgnnnnnnnnnnnnnnnnnnnnnnnnnnnnnnnnnnnnnnnnnnnnnnnnnnnnnnnnnnnnnnnnnnnnnnntccaaggcgtatacnggtatcaagnatcagggatacgcaggangacatgtgagcaaaggcagca

SEQ ID NO: 82076 - DNA, 1644 bp, Homo Sapiens
gggacgtgtttggagctggagacggcctgggtgctggcgaagcggaggccggagttaatacacgaggaactcatgcaaaggaggggactttcggaaatccaaacttagagtgccttgtatttagaatccggaaggaaaaggaaatgaaatgtgaagaaactcatgcaccaaactcgaactggtaagaagactgttagaatgccctcggtaacacagaggctgagagatcctgacataaatccttgtttgtcggaatctgatgcttccaccagatgtctggatgaaaataactatgacagggaaaggtgttccacttacttcttgaggtacaaaaactgccggagattctggaattctatcgtgatgcagagaagaaagaacggagtgaagccatttatgcctacggcagcagaaagagatgaaatcttgagagcagtgggaaatatgccctattgaatgtttgcattaaaagtgtttatataacttagaagcagatgaatatttctaataaatgattgctgtaatatttaagactgtacacccctcacccagacagaccttaagttcttcaagtggagacagtgaagtcaccccgtgtcctttttgcttgctctcagtgccatgccgatggtatgttgctgttggctgtgttgtggcatgagtttgcatgactttctggaggcatggagttaggtaaggctacatgagaaattgagcttttccactgggttttgaaagaagagtatgatgtgaacaagtaaagactgaatggggctgagatgaaggcaatgtttccaaggaaaggaaatgttatgagcaagagtgtgaggcaagagaagctggaaccacattcagagagtatcctgtagattgctccacctagaatctcaggtgggtggagcagtggtgggagaagactggaaaggtaagttgaaggtaaggaatgtgtggtgggcctcagatcccaggctcattcctcaaatcacttcgtacttccctcacttatctttgtttaaataaggttagtacattcactaggggcaaatgggtttttctaaataaatgacataaaaaagaactggttgtctttctttaaagaaagtcttagttacaggattctgtgattaaaatccttaaatattgggttgccttctgcagctgtagtatcagtttttgaaccacagtaatgggaagaaagacaaatggattcccttagaagtaagatttctatttgcaggatgagttgggcagggaaaagggtcagggttcatcaggtgaactcaacactgggatgagactagaacttcactttatgatataaacacaatacgattattcaatgtggtgactggggtagactgtgaagcagccctccttatgcccactgccttttagaatcgtttgttttattcatggtagttttatgaagacatactattattgaatgaaatttaatgtgtacttgaaaacattgcttttgtcccttctcttcatctggtcttgggtcaagaacattgttttaatggctgccgacaatgaactgtctgtctgagtctaaaaccaagctcaggtttctaagccacatgaccttgattgttaaatgtagttatatttgaataaaaaatgaatcatttccaaaaaaaa

SEQ ID NO: 82077 - DNA, 780 bp, Homo Sapiens
ggggtttggagctggagacggcctgggtgctggcgaagcggaggccggagttaatacacgaggaactcatgcaaaggaggggactttcggaaatccaaacttagagtgccttgtatttagaatccggaaggaaaaggaaatgaaatgtgaagaaactcatgcaccaaactcgaactggtaagaagactgttagaatgccctcggtaacacagaggctgagagatcctgacataaatccttgtttgtcgatcctgttctaccttttaaatgatgcctctcttatatctgtaaggaatctgatgcttccaccagatgtctggatgaaaataactatgacagggaaaggtgttccacttacttcttgagatacaaaaactgccggagattctggaattctatcgtgatgcagagaagaaagaacggagtgaagccatttatgcctacggcagcagaaagagatgaaatcttgagagcagtgggaaatatgccctattgaatgtttgcattaaaagtgtttatataacttagaagcagatgaatatttctaataaatgattgctgtaatatttaagactgtacacccctcacccagacagaccttaagttctttcagtggagacagtgaagtcacccccgtggtcttttttgcttgctctcagtgccatgccgatggtatgttgctgttggctgtgttgtggcatgagtttgcatgactttctggaggcatggaggttaggtaaggctaccatgagaaattgagctttttcccctggggttttg

SEQ ID NO: 82078 - DNA, 1026 bp, Homo Sapiens
  misc_feature (88)..(88): n is a, c, g, or t
  misc_feature (194)..(194): n is a, c, g, or t
  misc_feature (202)..(202): n is a, c, g, or t
acagctacatatgtccgcttatttttgatttgacgatacattccacagaacagtttactgatacgattatagactcatatgggattgncctgagccagaatcggcacgagcactctaaatgtaaaggcttaacaatatgtataagtgatctctcagcctgagtatacagatcattgcctcagatgctgtggatntaaaattntaaatatctgctaagtaatttgctatgtcttctcccacactatcaatatgcctgcttctaacaggctccccactttcttctaatgtgctgtaatgagctttggacatgagataaccgtgcctgttcagagtgtctacagtaagagctggacaaactctgggggggacacagtctttgagacagctcttttggttgctttccacttttctgaaaggttcacagtaaccttctaagataatagaaactcccagttaaagcctaggctagcaattttttttagttgcaactaagtaagatatactacaaactaaggatgctgctagactaaggaataaacagcaaggtaccaaagtacagcaaagcaacaacaaaggctctgtatttgcagaggggtctatcatgcttttaagaaaaaagaagagtacaggaaaaaaattcagatagacataagagtattttggatgccattaaactttgtcaataaccattaaaacataggcttaaattatcacgtattgttacaaagacacagttttgtctcattataaaataagattatatgaaatttatattctagaaatgattccaaatcatgtcctaagaatttctcccattcaaatgataatggaaattactgtcaaaaggaaaatctcaaagttaccattacgctgctctcttgtaaatgaactagggataaagatatgggttttatcaaaagccctaaggaatatatctcacattcacctcctatatgtatgtgtatatataaatgccactataaatgaaaatgtcacccagagataataaaataatttttaaagttt

SEQ ID NO: 82079 - DNA, 1028 bp, Homo Sapiens
  misc_feature (47)..(47): n is a, c, g, or t
  misc_feature (91)..(91): n is a, c, g, or t
  misc_feature (123)..(123): n is a, c, g, or t
  misc_feature (127)..(127): n is a, c, g, or t
  misc_feature (180)..(180): n is a, c, g, or t
  misc_feature (218)..(218): n is a, c, g, or t
  misc_feature (234)..(288): n is a, c, g, or t
tgtaccgatccccttgatgagtgtacgttccgcaccgacgaccagcnagcggtagtagcgagagcggagacgccatacgcaccgcttctcncggcgtgcgatcataatgcagtgcacgacagnttcngatggaagcggcagttgcgcacgcagtatgtgagtagtcactcattagcaccncagcttacacttatgcttccgctcgtatttgttggaangtgagcgataacatgnnnnnnnnnnnnnnnnnnnnnnnnnnnnnnnnnnnnnnnnnnnnnnnnnnnnnnntggccctcgagccaaagattcggcacgagctcacaccagtcaaaatcctctttctaaaaagtcaaaaaataacagctagtaaggttgtggagaaaagggaacatttatacactattgatgggagtgtaaattagttcaaccactgtggaaagcagtgtggcaactcctcatagtgctaaaaacagaactgccattccacccagcaatcccattactgggtacatacccagaggaatataaatcattctaccataaagacacatgcatgcaaatgtccactgcagcactattcacaatagcaaagatacagaatcaacctaagtgcccatcagtaacagattggataaagaaaatatggtacacatacaccatggaatagtatgcagccataagaaacaatgagatcatgtctcaggaacatggatagagctggaggctattatccttagcaaactaattcaggaacagaaaaccaaataccacaggttctcagttgtgagtgggagctaaatgatgagaactcatgaacacaatgaagggaacagacactagggtctacttgagggtggaagatgggaagagggagaggagcagaaaaagtacctattggtgatgaagtactctgtacaacaaacccgtgacaagagtttccctatataacaaaccttcacatatacccctgaacctaaaagtttttttaattgtaaataaatggatcattaaaaaaaattttaataata

SEQ ID NO: 82080 - DNA, 1683 bp, Homo Sapiens
gtgctactgggagctgatgtggtgcttcacctacaagggccagtggaagatgtcctacttctacgccgacctgctcagcaaggagaactgctggtccaaggccacctacatttacatgaaggccgcctacctcagcatgtttgggaaggaggaccacaagccgttcggggacgacgaagtggaattatttcgagctgtgccaggcctgaagctcaagattgctgggaaatctctacccacagagaagtttgccatccggaagtcccggcgctacttctcctccaaccctatctcgctgccagtgcctgctctggaaatgatgtacatctggaacggctacgccgtgattgggaagcagccgaaactcacggatgggatacttgagattatcactaaggctgaagagatgctggagaaaggcccagagaacgagtactcagtggatgacgagtgcttggtgaaattgttgaaaggcctgtgtctgaaatacctgggccgtgtccaggaggccgaggagaattttaggagcatctctgccaatgaaaagaagattaaatatgaccactacttgatcccaaacgccctgctggagctggccctgctgcttatggagcaagacagaaacgaagaggccatcaaacttttggaatctgccaagcaaaactacaagaattactccatggagtcaaggacacactttcgaatccaggcagccacactccaagccaagtcttccctagagaacagcagcagatccatggtctcatcagtgtccttgtagctttgtgcagcagttccgggctggaagacagagacagctggacagagctcctgaaaacatttcaaaataccccctccccctgccctgccctgcctttggggtccaccggcactccagttggatggcacaacatagtgtatccgtgcagaagccgagctggcattttcaccagtgtagccaagggcctttgccaagggcagagcaggtggagccctctgcctgccctatcacacatacgggtacttgcttttcactgtgatgtttaagagaatgtatgaacagtttacattttccttagaaatacattgatgggatcacagttggctttaaaaaccaacaacaatcaaccacctgtaagtctttgtcttcacctattatcatctggaggtaaatctctttatatgatgatgccaaagggcaaattgcttttcaaattcagcaagttctcagcttgtgtgacggaaggtccttcagaggacctgaggaatgcctgggagaggctaagcctcaggcttcaatgcttctggggttgggcatgaggatgtacacagacacccactaccttactactcacacttcatttcactccttttgtaaatttccaatttaaaaatcaagcacgtctttttagtgagataaaatctgagctcttctgtagaaaaatcaatctctaccagtagaaaatgccagggcttgatggaagagctgtgtagccctttctatgccaaagccaggaaatttggggggcaggaggaggttctcagaatccagtctgtatctttgctgtatgccaaactgaaaccactgggaataatttatgaaacataaaaatcttctgtacttcactccaaggtacatttgcttactgacagcatttttgttaaaactgttattcttgaaaa

SEQ ID NO: 82081 - DNA, 913 bp, Homo Sapiens
  misc_feature (53)..(53): n is a, c, g, or t
  misc_feature (60)..(60): n is a, c, g, or t
ctcctggtctcagatgatattctataatcttagtactgtatatcaaaaatgtnacttcanggaaaactacagccatgcaaagaaacagtaaaattgaccatactcaggaaaaaaagcagacaatagaaatgcttctcagtaggctatatgttgatttagcaggcaaagacttcagaggccttttaataagtatattcaaagaattacaggaaaatatgaaaacaagaagtagagaatctcaataatgaaaacccaaatggaatttctggtgagaagtacaatgcacaaatttaaaattaactgagtaagttaattagcagatttaagatgatgaaagagacaatagaaaaacattaagattaatagaaattatccattctgaagaacagagaagaaaaaagattgaagaaatactatcagagcctcagaaatgtgtggaaccaccatcatgtgcactgaaatatgtataatgggaatcccagaaggaaaggagagaggaatagaggcagaaaaaatatttgaagaaataatcactgaaaacctcccaaatttgatgagagacaatttgcagattcaagaagcttaacaaaatccaaataaaataaacacaaaagttccacatatagacacaacatagtcacattgttaaaagacaaagacaaaaaatcttgaaagcaacaagagatcaacaactaatgtagagggcagtagcaatagtattaacagttagcttatcagaaatagtggagtccagaagacagtggaatgacatattcagtgaaagtcaacaaaatggccaaccaagaattacaaatttaataagattatcttccaaagatgaaggtgtaaaaaaccattaccagagaaacaaaaaggaaaaatttggagaatgtgttgctagatctcccatacc

SEQ ID NO: 82082 - DNA, 1073 bp, Homo Sapiens
  misc_feature (29)..(29): n is a, c, g, or t
  misc_feature (37)..(37): n is a, c, g, or t
  misc_feature (44)..(44): n is a, c, g, or t
  misc_feature (47)..(47): n is a, c, g, or t
  misc_feature (79)..(79): n is a, c, g, or t
  misc_feature (95)..(95): n is a, c, g, or t
  misc_feature (120)..(120): n is a, c, g, or t
  misc_feature (132)..(132): n is a, c, g, or t
  misc_feature (135)..(135): n is a, c, g, or t
  misc_feature (156)..(157): n is a, c, g, or t
  misc_feature (196)..(196): n is a, c, g, or t
  misc_feature (226)..(227): n is a, c, g, or t
ttaggaatggcctggccagaatcgcaganggattgtncaagtcntanttcccaataatagtgtacatatcagcagattntcagagattgatatgntatgaaaccttgctcacactcattnccaaattatatntcnaaaggaatttgtacagagtcnntaaaaaagggatcatgatgccagtgtatgcctcactgantgctaaatgaagaggactatactgagcatnncaaagaacgtgatgtcctctggagcaactgaaggattgctatctgacttatgcatgtaaaacctccaaagtgaaagtttgtctggaatggcttaggcaaaccagactgggttggattgagaattgaatgtatacataaaatgtggtttggtcagatgagaacaccaaatgtggtagctagctcacctttatttatgagatttttattgggttgatttgtcttgaaagaatcaaatctaagagaaatgtttggaatggctagatgatcctaacagaagaaatcttacaggtctttactgctaaacctaaggagatgagagtaaacagtaagtggccaactcaaagaagcatgaactatgttgaaacatggactatagctgcaatttcccagtggtgcagttttcaagcgctttaccccaggagagaaaaaaataaataaatgaaaagtagccatttcaccattcagaggatactgttgcccagtgaaaactgcatgaattatgtaatagttttatgcttgtttcccccactcaccattccaaaactgtaagacttcaagatagaacaggaggtatgaaattttaacagcacataaaaaaatagtgaacattctatccccgcacttcattgccattactaaggctaaggcaggactgagtttagaatgcagcaaagctttgaaatgtataagagataatatctctaatattcaaatacaccataaactcaaaacttagaatcaatcctatttttaaaatactgaatgtgacaagaaacgttataaaagttttcaagatatcagtatatgatagaaagagatgtattgctttagcacaaatcattctac

SEQ ID NO: 82083 - DNA, 1034 bp, Homo Sapiens
  misc_feature (35)..(35): n is a, c, g, or t
  misc_feature (108)..(108): n is a, c, g, or t
  misc_feature (115)..(115): n is a, c, g, or t
  misc_feature (131)..(131): n is a, c, g, or t
  misc_feature (135)..(135): n is a, c, g, or t
  misc_feature (139)..(139): n is a, c, g, or t
  misc_feature (164)..(164): n is a, c, g, or t
  misc_feature (173)..(173): n is a, c, g, or t
  misc_feature (196)..(196): n is a, c, g, or t
  misc_feature (211)..(211): n is a, c, g, or t
  misc_feature (229)..(229): n is a, c, g, or t
  misc_feature (235)..(235): n is a, c, g, or t
  misc_feature (241)..(241): n is a, c, g, or t
  misc_feature (268)..(268): n is a, c, g, or t
  misc_feature (275)..(275): n is a, c, g, or t
  misc_feature (301)..(301): n is a, c, g, or t
  misc_feature (310)..(310): n is a, c, g, or t
  misc_feature (466)..(478): n is a, c, g, or t
gcctgagattatgtgtggttattgggggatgaatntgtcttaacatgaaatgtgacatattacaaactattacatcgacaatgcctttgtaccgtaggtaacattgtntggattntgtgtttgtggaaatntgtntagncagtcagtatgatgagctgatcatntgctctttnttcctccagaaggagtgcatcancaaagtaaatgtatntatgtatgtaaatagatntaagcntcatantaaaatttgtaatgcctatacttttcntcaattnttctgtgtgtgttctaaaggactttntcttaggtntgcgtaaacactgtagggaaaaaaatgcttctttctactttgtttattgtagactttaaaatgagctacttcttattcacttgtgtaaacagctaatagcatggttccaattttttgtaagttcactttttttgttctaggggaaatgaatgtgcnnnnnnnnnnnnngaactgttggttatttgtgttattctggatgtataaaaatcaatggaaaaaaataaactttcaaattgaaatgacggtataacacatctactgaaaaagcaacgggaaatgtggtcctatttaagccagcccccacctagggtctatttgtgtggcagttattgggtttggtcacaaaacatcctgaaaattcgtgcgtgggcttctttctccctggtacaaacgtatggaatgcttcttaaaggggaactgtcaagctggtgtcttcagccagatgacatgagagaatatcccagaaccctctctccaaggtgtttctagatagcacaggagagcaggcactgcactgtccacagtccacggtacacagtcgggtgggccgcctcccctctcctgggagcattcgtcgtgcccagcctgagcagggcagctggactgctgctgttcaggagccaccagagccttcctctctttgtaccacagtttcttctgtaaatccagtgttacaatcagtgtgaatggcaaataaacagtttgacaagtacatacaccattc

SEQ ID NO: 82084 - DNA, 1105 bp, Homo Sapiens
  misc_feature (158)..(158): n is a, c, g, or t
  misc_feature (200)..(200): n is a, c, g, or t
  misc_feature (209)..(209): n is a, c, g, or t
  misc_feature (211)..(612): n is a, c, g, or t
  misc_feature (657)..(674): n is a, c, g, or t
ggtctacgctagtaggaagccccgctccgacgagaagcgacagtatcgtagcgcagtcgaacagagaccacgagagctccagggaacgcttgtatttatagtctgtcggttcgcactctgacttagcgtgattttgtgatctcgtcaggggcggagcntatgaaaacgccagcaacgcgccttttacggttcctgacatntgctgcctngnnnnnnnnnnnnnnnnnnnnnnnnnnnnnnnnnnnnnnnnnnnnnnnnnnnnnnnnnnnnnnnnnnnnnnnnnnnnnnnnnnnnnnnnnnnnnnnnnnnnnnnnnnnnnnnnnnnnnnnnnnnnnnnnnnnnnnnnnnnnnnnnnnnnnnnnnnnnnnnnnnnnnnnnnnnnnnnnnnnnnnnnnnnnnnnnnnnnnnnnnnnnnnnnnnnnnnnnnnnnnnnnnnnnnnnnnnnnnnnnnnnnnnnnnnnnnnnnnnnnnnnnnnnnnnnnnnnnnnnnnnnnnnnnnnnnnnnnnnnnnnnnnnnnnnnnnnnnnnnnnnnnnnnnnnnnnnnnnnnnnnnnnnnnnnnnnnnnnnnnnnnnnnnnnnnnnnnnnnnnnnnnnnnnnnnnnnnnnnnnnnaagaattcggcacgagggatgttggagcggccgcggctgtaggcnnnnnnnnnnnnnnnnnnaaattaagagaagctctcttctgtgtagaacagttgttccaaaatagcttagtgttttgttttcctgttgcatgacagatttaactattctttccagcagtggaggtgctgtcagagtccagtgttctagaagaggcagtgtctaaagcctaattttccttttctaattctggtagctattaccaggaatttttgaaagttttgtttaagtagtctaatattttttatgtaaagagcattaaattttgctatgtataaatttttgtaacctaacagtgaatcaatattttctatcagtgccaagggcttcctgtagttctattcaagtgttacaataaatatttgtagataatagtcaatacttgtgtatgcttattttaaagatctatttaggtggaaatagttgtggatgtactaagagtaatgaaata

SEQ ID NO: 82085 - DNA, 753 bp, Homo Sapiens
  misc_feature (53)..(64): n is a, c, g, or t
aatagacagttcgccatgcactgcagcctgggctacaaaagcgaaactgtctnnnnnnnnnnnnggaaaataaataaagttatgctttttcctctattcctagttaaatcacaacaagttagtaatccataaatgatgtgtcctgtttctctttagtagaaattatatttttggctaccagttaagaaacttgtactcctttgtcccttatgttactataaactcaagatgatgagttttgtggtatttgacttcataggcaaaatcaaaatttttactttgttgctattctgttttatgaaataaacttctgtctatgcatttgaactaagtttcagcaaattcaatctaaattgaataattccagctcccagttttatcctatgttgctcataaaacagttccaagtatactgcattatcttgagatttgaagatatggtgcccacggggattatactaggcaaatgcgttaagcagctctggcctaggtgttgtattttaagagactctatcttaggagagcttaagtgattgggctgcaggaagaagacattgtaacccaggaattaaaaatggattcagattgcctgattttaacactttagtttcaccataggctaattatgtgacattgggcaagagacataattcttctgtaccttagtttctacatttgtaaaatagagatgatttggtaacttattaataagatttttgtgagagataaataaaacaaatacattttgtaaaa

SEQ ID NO: 82086 - DNA, 1406 bp, Homo Sapiens
gcggccgcgcggcctcccgggcgggcctacagccatgtcccgggacccggggtcgggcggctgggaggaggccccgcgcgcagctgccgcgctctgcaccctgtaccacgaggccggacagcggctgcgccgcctgcaggaccagctcgctgcccgcgacgccctcatcgctcgcctccgcgcccgcctggccgcgctggagggggacgccgcgccgtccctagtggacgcgctgctggagcaggttgcgcgcttccgggagcagctgcgaaggcaggagggcggcgccgccgaggcccagatgcgccaggaaattgagaggctgactgagcgactagaagaaaaagagagggagatgcagcagctgctgagccagccccaacacgagcgagagaaggaagtcgtcctgctacggaggagcatggcagaaggggagcgcgcccgggccgccagtgacgtcctgtgccgctccttggccaacgagacccatcagctgcggaggacgctgaccgccaccgcccacatgtgtcagcatctggccaagtgtctggatgaacgacagcatgcacaaaggaatgtgggggagagaagtcctgaccagtcggaacacacagatgggcacacctctgtccagagtgttattgagaagttgcaggaagaaaatcgactgttaaaacagaaggtgactcacgttgaagacctcaatgccaagtggcagcgctacaacgccagcagggacgaatacgtgagggggctccatgcgcagctcagggggctgcagatcccccacgagcccgagctgatgaggaaggagatctcccggctcaacagacagttggaagagaaaataaatgactgtgccgaagtgaagcaggagctggcggcctccaggacggcccgggatgctgcgttggagcgggtgcagatgctggaacagcagattctcgcttacaaggatgacttcatgtcagaaagggccgatcgggaacgggctcaaagtaggattcaagaactggaggaaaaggtcgcctctttgctgcaccaggtgtcctggagacaggattctcgagagccagacgccggccggattcacgctgggagcaaaactgccaagtatttggccgccgacgcattagagcttatggtgcctggtggctggaggcctgggactgggtcccagccagccagaaccccctgcagagggcgggcatcctggcgcggtccagagaggccaggggaccttcagtgccctcactgcctgcagtgcttcagtgacgagcaaggggaagagctcctcaggcatgtggccgagtgctgccagtgaccgagactcacccgtgcccttgcggctcctggccggtgcagctgccctcagggacaggtgggtgctctcagatgccatgggt

SEQ ID NO: 82087 - DNA, 1273 bp, Homo Sapiens
  misc_feature (1031)..(1036): n is a, c, g, or t
  misc_feature (1038)..(1086): n is a, c, g, or t
  misc_feature (1088)..(1095): n is a, c, g, or t
  misc_feature (1097)..(1118): n is a, c, g, or t
  misc_feature (1120)..(1120): n is a, c, g, or t
  misc_feature (1125)..(1125): n is a, c, g, or t
aggccgccgcgcgcacacaccgggcccggctcctgagggcgccagcgcggccccggggagcgcgaggagccggcgaagcgcgcggcctgccgttggcggcctggtccgcagcgccctgcgcccacccgccccggacgtggggcccaagcccccgtgaagatggtgtcctggatgatctccagagccgtggtgctggtgtttggaatgctttatcctgcatattattcatacaaagctgtgaaaacaaaaaacgtgaaggaatatgttcgatggatgatgtactggattgtttttgctctctatactgtgattgaaacagtagccgatcaaacagttgcttggtttcccctgtactatgagctgaagattgcttttgtcatatggctgctttctccctataccaaaggagcaagtttaatatatagaaaattccttcatccacttctttcttcaaaggaaagggagattgatgattatattgtacaagcaaaggaacgaggctatgaaaccatggtaaactttggacggcaaggtttaaaccttgcagctactgctgctgttactgcagcagtaaagagccaaggagcaataactgaacgtttaagaagcttcagtatgcatgatttaacaactatccaaggtgatgagcctgtgggacaaagaccataccaacctctaccagaagcaaaaaagaaaagtaaaccagcccccagtgaatcagcaggttatggaattccacttgaaagacggagatgagaaaacagatgaagaagcagaggggccatattcagataatgagatgttaacacacaaagggcttcgaagatcgcaaagcatgaaatctgtgaaaaccaccaaaggccgcaaagaggtgcggtacgggtcactaaaatacaaagtgaagaaacgaccacaagtgtatttttagtcatctacacgtcaaatatcccaagacagattatgctaaatacatcgacttcatcttctaacatgatatattcaggatttacacattaaaatgattatttaannnnnnannnnnnnnnnnnnnnnnnnnnnnnnnnnnnnnnnnnnnnnnnnnnnnnnannnnnnnnannnnnnnnnnnnnnnnnnnnnnanttgtngggcggcctcgggccctaaaaaaatttttcaaaaacatttcttttgggccccggggccccatagggggaaagggaaaagggggcctaaactgttttccccaaaaagaaaacccgggccaaaaacaaaagggctggggattccccccac

SEQ ID NO: 82088 - DNA, 596 bp, Homo Sapiens
tggacctaaacagagaaaataatgcttatgtatctgaagaaaaggtcagatctattggaaatgacagcccgatacttgagcctcctctttaaaaggtatccagccctgatattttgtgtaaataaaatgtttttaaaacctgttagttaaaacacttaggtgatgggcactgctgcttataaattcatcttttggttgaatcctcactatgctatttggtacctaaaaatattctccaaacccttgctgccagttcctctttgataaatatatagttaattcgaaataaaatccattgcaattcatttatgagttatcttacatatcacaaagaccaattagaattagtcattattcttgatgaagagtctgtttttaatcataaaaatcatgacagttactcagacccaggcatttcaacagagctaacaccaccttcagataggcacaccatgcataactcttgggaagttgagctttgctaaataaaagatatttctgctgatcaaagatgatcaagctttctgtgtattggaacagaaagtaacaaagaggaatgagccaggagaacaaactaattcctttaaataaataaa

SEQ ID NO: 82089 - DNA, 948 bp, Homo Sapiens
  misc_feature (610)..(610): n is a, c, g, or t
  misc_feature (724)..(734): n is a, c, g, or t
  misc_feature (831)..(831): n is a, c, g, or t
  misc_feature (905)..(905): n is a, c, g, or t
cttccacaaaccactttaattgggtgctcatcaccgacttcagaatctaagagaactttgacacttgtttttgacaccccattgccttctcatcagtctaactccaagaccttcctccgagtggtaggctctggtaattcagcgaaagcaaggcgctaacaggcgagtgtgaagccaaagggctcccagtgacatccttgacatctttttgccagctattcacatgcatttaatatacagcacttccctgtgactgtctgcagccttttctaccagcaattcctcctgatttatccttctccagcaattcccagttgccttgcctttctaatagatgttgcagtctgacaaaagacctttgccttcatgctggtgttgttaaaggactgattataaccgtaaggaatgggaaataagaagctattccttgtaagtttgctaatcttatctgttcagaaaaataaaagttctctgtcaaagacttaggaagggagatttcatcccccaggcttgctagtcctactctttgtgcattcttaagacaggaggcaagtgctttccattctccttggaaaaactgaggctgaatatgcagctggtcatgcagttntgctgaagacagagagagggtcaaaaattcaaaaactcaattgctctagggcaggggggttgggagcaaagccaataataaatgggtggtaaaatgctttcaggaaggggtgannnnnnnnnnntgttttacaaaagcttggcagtcagcttgagtctctggaaaggaagtgagctccaggcagcagccatgaatctccataggtgagtgtggggaaaganacagacaagagttctgaaatttctcctcctctctctggacgtgggaataataacagatctggtttgaatggctnagattttatcgggagaagaggaaggtgttccccagatcgcatt

SEQ ID NO: 82090 - DNA, 1023 bp, Homo Sapiens
  misc_feature (194)..(276): n is a, c, g, or t
tttttgaagggataattagtttataatgatcctttgtccccaccacagattaaattgaaattctcagaagcctggactctggccaggcgaaagctattggaaagcagaggcctttttttcttcttcttaaatttctaccattccagatcccacgacgactgagaagaagacaaacatttcagaaggaaggttcnnnnnnnnnnnnnnnnnnnnnnnnnnnnnnnnnnnnnnnnnnnnnnnnnnnnnnnnnnnnnnnnnnnnnnnnnnnnnnnnnnngcttggtgtgactcttaaggtgattttccactgcaccaccgagcgatcgtgccctcccgcagtgaaggcgtagcagccatcataggaaacggccatgccggccaccccgttcgggtggcaaacaatagcagatgtcttatgtggattgccgtcaactggtaagatctgaagtcccaacttgtctctgttaataaacaccaagtagcgtttctgtagctccgccatgcttctcactgggaggacttgtgtctgctcaataggggaaccataagctggccccagaagcgtctttctgcacattttggtagtagcattaaaaagcttcactttgtagccactgttgcaaataagcaggaagagttccctggtgagtggtgggtaccagaccatgcaggtgggatagcagccctggtcggtgtggtgaaatgtccaggacttccaggtggtctttgtagctcctgagaagatcatactctatcaagagcctgtctgtcccaaggctcagcagtctaggctcattgctgtccaggtaaaccccaaacaggagacttcgaatgcttttgcgatgagagcgaagtcttgctaagtactcccagaccctctgtccatttctgaccaccagcatgtaaacagccacagtaaaacttctatcagcagttgccatatactgggagtcatgggaaaagcttatatgagtcacactggttctggaatatttgaaaggctctgggctttcattttctaaag

SEQ ID NO: 82091 - DNA, 995 bp, Homo Sapiens
  misc_feature (41)..(41): n is a, c, g, or t
  misc_feature (115)..(115): n is a, c, g, or t
  misc_feature (136)..(136): n is a, c, g, or t
  misc_feature (149)..(149): n is a, c, g, or t
  misc_feature (483)..(495): n is a, c, g, or t
  misc_feature (568)..(577): n is a, c, g, or t
ggtacattccccagaagttgactgatcgattatcgatcctnaggattgctcgagccagatcgcagagctttcccctcaagacattataaacctatactcagtaatcacaaatgantatgtgcctgactttttcccntttgaaaatcgantaaattatatcttcaatgtccccttgatatttaaaaacctgactaaagaaaaagatgtttcctatgaaagtgtcctctttgtaataacaataggattttacaaaaatattgataaaaccaaggtagagaaacttttcttaactcaataaagatcctgagttttagttagaaccctaaatccttgctaaaatgaaaacattttacttcaattttctatgtatctataacattcctccttttcctaacataaaaatttgttaacgtctgacttggttagtaatgatgcttggaagatgaagaccactgaactcgaacccatcttttctgtgaaacnnnnnnnnnnnnngacaagtggacccaggtagcttatgtcataataatgaaagaaacacaaagcacaagtagggcaaatgttattnnnnnnnnnntgcatttgtagtgcaagtcaaactataggggctttactcaaaagtactggccagctaaaagaaacatacatttgtgagtgatcattaaaaagagcccaaatttaagtcaatctaaatcatagttgacattattacagaatataaaaaatatggtaaaaatttacacattacacataaagtagttaatgttttgatttaatagtttgcaaaagagatctgcagatgtgttttcaattatgctggcttctatatccatctattttaataatataggtatggttacatataccaaaacaaaggaaaaaacctatagcatagctatacagcaatattttaaggtctgaagtttgaccagtacatgtcaaaacatttcaacatttcactggtttactaaactgacaaagaaccatttacaatt

SEQ ID NO: 82092 - DNA, 726 bp, Homo Sapiens
  misc_feature (69)..(86): n is a, c, g, or t
  misc_feature (100)..(117): n is a, c, g, or t
gggccaagtgccaaagctaaaattaaccctcaactaaagggaataagcttgcggccgcggctgtaggcnnnnnnnnnnnnnnnnnngaaactccgtctcnnnnnnnnnnnnnnnnnngatgtttttcatttttttcatgttatctatccaagcactgttccatggtcagcaagtcatatttcataatgtggattttccaaaataattattgaatacagctattctatggctacttttagtgtttttgtggtatgtggtgtgggagtgtttatggaattaccagtatcttaaattttcaaaggaaccttggaagtctatcactctaaatgaaagtctgtcactctacatgaattatgtgctcaaatttgaccaactcagtttaagacacaaaacagtaatttgaagaaggaaaaatgaagagagtttctagtttaatgggttaaatttttgttgttgcaatagtaagtttagtcttcttataatatttctaaatgaaaaatcataggtatttgttaccatgtgtgaagattactttgttaaaagcaaaagtggtcgtgtgatatgctaaatgttaattactgattttatatgtttaaatcacgccaaacaaattatgtctgtgccatccagggtctgttgttaatctttttctgagtacttggattgggataaagggcttgtactatgcactttttattaatgaataaatagaaaacgttagtaaaa

SEQ ID NO: 82093 - DNA, 1000 bp, Homo Sapiens
  misc_feature (351)..(351): n is a, c, g, or t
  misc_feature (554)..(786): n is a, c, g, or t
  misc_feature (811)..(811): n is a, c, g, or t
  misc_feature (844)..(844): n is a, c, g, or t
  misc_feature (862)..(862): n is a, c, g, or t
  misc_feature (886)..(886): n is a, c, g, or t
  misc_feature (917)..(917): n is a, c, g, or t
  misc_feature (937)..(937): n is a, c, g, or t
caaatggaaacagtgttactgacttcttcatattggataacaaaataagggtaactctggtcatcattaaaaatgacaaaaatctgaggctcaaagaaattatccacacaagagtcataaaggtcactggtgacactgccaggattgactggcgggggccttctcatgccatgactgcccattgtgtatctgcccgtcagcactttggccagaaacatgaagtggactcctttggaggacttcttagaaaagttatgagagtagcttgccttctttgcaaaataactgccttgtccaaacattgtagcatgctttccacagactcgagggtcaaagttgtgtttgcagatnccatctaccacatcctgggatgttccatgaaataaatgtctctcatttattatcctgtcacggccaaacattttcctgttcatatatccctttttccttttatatttctcccaaagaaactggttttggactctcaatatctgcaaaattctgtatttaaactcaggcacagtcttatgaaaaagcctcgtgccgaattcttnnnnnnnnnnnnnnnnnnnnnnnnnnnnnnnnnnnnnnnnnnnnnnnnnnnnnnnnnnnnnnnnnnnnnnnnnnnnnnnnnnnnnnnnnnnnnnnnnnnnnnnnnnnnnnnnnnnnnnnnnnnnnnnnnnnnnnnnnnnnnnnnnnnnnnnnnnnnnnnnnnnnnnnnnnnnnnnnnnnnnnnnnnnnnnnnnnnnnnnnnnnnnnnnnnnnnnnnnnnnnnnnnnnnnnnnnacgcgcgggagaggcggtttgcgtnatggcgctctccgctcctcgctcatgatcgctncctcggtcgtcggctgcngcaagcgtacagctactcaaaggngtatacggtatccaagatcaggggataccangaagacatgtgacaaaggcnacaaaggcagacgtaaagcgcgtgctgggttttcatagtccgccctaagaaacaaaaacagta

SEQ ID NO: 82094 - DNA, 997 bp, Homo Sapiens
  misc_feature (38)..(38): n is a, c, g, or t
  misc_feature (108)..(108): n is a, c, g, or t
  misc_feature (129)..(129): n is a, c, g, or t
  misc_feature (158)..(158): n is a, c, g, or t
  misc_feature (161)..(161): n is a, c, g, or t
  misc_feature (219)..(219): n is a, c, g, or t
  misc_feature (312)..(312): n is a, c, g, or t
cgtacatcaccagacattgactgtccgattatcgatcnttgggattgcctgagccagatcgccgagcacgagacacccagccagtgcccctcagagaggacatgtacntgcctgagacccgctgactcnccacttcccacccatacctccgtccgatntgntccctcttgacacatgtgattctctcttctcattgttgtcatgaggggttgttgtgtntcatcatgtcttgtaagcacaaatatctgcctaaaggggctctggtcgggaatcttgagcctgggtcccctccctctcttcttccctccttcnccgctccctgtgcagaagggctgatatcaaaccaaaaactagagggggcagggccagggcagggaggcttccagcctgtgttcccctcacttggaggaaccagcactctccatcctttcagaaagtctccaagccaagttcaggctcactgacctggctctgacgaggaccccaggccactctgagaagaccttggagtagggacaaggctgcagggcctctttcgggtttccttggacagtgccatggttccagtgctctggtgtcacccaggacacagccactcggggccccgctgccccagctgatccccactcattccacacctcttctcatcctcagtgatgtgaaggtgggaaggaaaggagcttggcattgggagcccttcaagaaggtaccagaaggaaccctccagtcctgctctctggccacacctgtgcaggcagctgagaggcagcgtgcagccctactgtcccttactggggcagcagagggcttcggaggcagaagtgaggcctggggtttggggggaaaggtcagctcagtgctgttccaccttttagggaggatactgaggggaccaggatgggagaatgaggagtaaaatgctcacggcaaagtcagcagcactggtaagccaagactgagaaatacaaggttgcttgtataaccccaatctgcttga

SEQ ID NO: 82095 - DNA, 1153 bp, Homo Sapiens
aacacaggtggggttaaggctgaacaccctgatcagccaagatggggctgactttgacatcttcctgcatgaattacaagaggcagcttcagaggcctggtctttgccctaagcctgatgctgacttgaaggcatgggagagggcgaatcctggaccagggtcttcagagcaagtgaaaccctctccaagtgttgaccttggaggctgtctcttcccagcccttccctgttctcataactaactaaggcagcccacactggaaatgaggtgtaggcagggtccctgaacatctgggccccagtccagggcacctccctctggagataaccctgacctttgggcaaggcacttaatgccctgtggggcacccagtctcctcacctggtgaaatgagaagtctggcccacccaccctccagggtgcattagggttctaaaatcctgcgagtccataagaaaggacacaggtgaccccagttcaattcccaagctcaaggttctgagagatctggggagagatgagttagaccgtgtatactgcacatgccaggacaacatggcaggacccaaagcttataatagcaggtcaataaatatctggtgaatgagtgagtcaatgagtgaattatgtgagtagggtaggaagacaaatgagagaagcagagtcaggtttcaagcagattggggtcagacaagcaaccttgtatttctcagtcttggcttaccagtgctgctgactttgccgtgagcattttactcctcattctcccatcctggtcccctcagtatcctccctctgagatcatcttcttcatctccaggtgggtcttggggacaccaagcttctccatcatcctctttaaagacatcaggtcaatctcgccttcattgttcaggtcaaactccatgtacttctctttgaaggctgtgagcttttctggaaggttctcttcatcactgtacttctggtcacacagaaactcccggttgatctcggccagcctcctctcctgccgggctttgagcaagccgaacgccttccctccttggaacctgttgctgagctcgcccgacatggcgagcgcggggctcccgccggctccaggcttcgcggacgcggcgagggacgaggaggaggcacaggcgcctgtcc

SEQ ID NO: 82096 - DNA, 801 bp, Homo Sapiens
  misc_feature (713)..(713): n is a, c, g, or t
gaccaggtggacatggaatccccggggtcggccccgagcggggatggagtctcctctgcggtggccgaggcccagcgcgagcccctcagctcggctttcagccgtaagctcaacgtcaacgccaagcccttcgtgcctaacgtacacgccgcggagttcgtgccgtccttcctgcggggcccgactcagccgcccaccctcccggccggctccggcagcaacgatgaaacctgcaccggcgcgggataccctcaaggtaaaaggatgggacggggggcacctgtggaaccttcccgagaggaaccgttagtgtcgcttgaaggttccaattcagccgttaccatggaactttcagaacctgttgtagaaaatggagaggtggaaatggccctagaagaatcatgggagcacagtaaagaagtaagtgaagccgagcctgggggtggttcctcgggagattcagggcccccagaagaaagtggccaggaaatgatggaggaaaaagaggaaataagaaaatccaaatttgtgatcgtaccctcaggtgcacctaagaaagaacacgtaaatgtagtattcattggccatgtagacgctggcaagtcaaccatcggaggacagataatgtttttgactggaatggttgacaaaagaacactggagaaatatgaaagagaagctaaggaaaaaaacagagaaacctggtatttgtnctgggccttagatacaaatcaggaggaacgagacaagggtaaaacagtcgaagtgggtcgtgcctattttgaaacagaaaggaaacat

SEQ ID NO: 82097 - DNA, 1634 bp, Homo Sapiens
  misc_feature (123)..(123): n is a, c, g, or t
  misc_feature (199)..(199): n is a, c, g, or t
  misc_feature (239)..(239): n is a, c, g, or t
  misc_feature (245)..(245): n is a, c, g, or t
  misc_feature (253)..(254): n is a, c, g, or t
  misc_feature (324)..(324): n is a, c, g, or t
  misc_feature (348)..(348): n is a, c, g, or t
  misc_feature (1135)..(1172): n is a, c, g, or t
cgttgctgtcacattagggcctatcacatgatcggactcacacttgtaaaacagctcaacagtagaattggagattgagtatagttcacagatatgttcttaacatactgtatctgttgtctntgcggtccagtaaacataattgtgatatattacttgatatgcagcagtgcaaaaattgcactacaatcttgctccnccagatgtccaacagcagtattatcaaagtattcagcacntacttngagatgcnntgacagaattgatcactgtcattaaacaagctgtgcagaagttttaggaagttttctcttaaacattctntgtcccttttggacttggagcaanaactaaaagaaatcagaaatctcgttgagcagcataagtcttcttctgggattaataaagatggatccaaacctttattatgccattatatgatgccagatgaagaaactccattagcagtgcaggcctgtggactttctcctcgagacattaccactattaaacttctcaatgaaactagagacatgttggaaagcccagattttagtacagttttgaatacctgtttaaaccgaggttttagtagacttctagacaatatggctgagttctttcgacctactgaacaggacctgcaacatggtaactctatgaatagtctttccagtgtcagcctgcctttagctaagataattccaatagtaaacggacagatccattcagtttgcagtgaaacacctagtcattttgttcaggatctgttgacaatggagcaagtgaaagactttgctgctaatgtgtatgaagcttttagtacccctcagcaactggagaaatgatttttccttcaagaaaaactacagtgggattcatttactttttaaaatacactgggtaaatcacctatacttagagtaacagtttgttatcaaaatgcctgataaaatatattcttaataaaagtcttcatttcataatgaaatcaatttatgtggcatcttaatatatttttttagattcatcaacagaccagtttttgtgggcatatatatatacacgtgcaaatatcagaattgttaataatttgttacacatggacatttgttccaaactgactaaaaatcannnnnnnnnnnnnnnnnnnnnnnnnnnnnnnnnnnnnncaaaattcagtgtactttaccatattaatactgaggaaaaatctgttggagacataggtctaggatgtgtgaagtttggaaaaatatgctatttaattataatgttccctagactgctgtaaacagaagtgaatcagacttttctccagctacctttcaaaataataaattatttgtctcaaatataccttgatggaggacttttttattcttatggaaatggtgaattccaacaactatgatgaactatgttctttgctatttcttcactatattttttaaggttttattaaaaagccttagaaagttacatattggtttagaggctaaaattgtgttgatgctgtttactcacctaattacatagttttaatcatttgtacataattttaaaaacttactttgtattgattttgaatacagtgaaaatcttattgcaataaactattttagtaaaataaa

SEQ ID NO: 82098 - DNA, 1053 bp, Homo Sapiens
  misc_feature (597)..(612): n is a, c, g, or t
  misc_feature (648)..(991): n is a, c, g, or t
  misc_feature (1028)..(1028): n is a, c, g, or t
  misc_feature (1033)..(1033): n is a, c, g, or t
acttgtggaatgaatttattaactggtttagaaggaggactgggaggtaaaatggaactgagaaattcgcagtgcagtgggacattttccctcatcaaaggggcactttctgagctcagagaagtagcttgtggcagacaagcctgaggaagcccacgtgtggcagagagcaatgccaagcttgtgatgggagcttcttgaagggttcctgtggtcttggggtaatttctgggcacaagctcagagttcagctgttgactgagagggaggtctccaagccaaggtcttatgcagagctggagcctatgagcaacatcacccgtcagtctcagctttgtcctgggacaggggagggctttgcaaatgcagttttgatctttcagggtctgccccatgaagcctccttaccatggctactttggcctgagaagaagaaatgattcagaacaaggaagagagtagaggaaaaggcttagctgggaatttttagacagtcaggttaaagccaccatcttctacaatggctgagagcaccacctccctttggatatggagttggttattacaatggggtcagggaagggcagaatgtggcannnnnnnnnnnnnnnngcctacagccgcggccgccctcgtgccgaattcttnnnnnnnnnnnnnnnnnnnnnnnnnnnnnnnnnnnnnnnnnnnnnnnnnnnnnnnnnnnnnnnnnnnnnnnnnnnnnnnnnnnnnnnnnnnnnnnnnnnnnnnnnnnnnnnnnnnnnnnnnnnnnnnnnnnnnnnnnnnnnnnnnnnnnnnnnnnnnnnnnnnnnnnnnnnnnnnnnnnnnnnnnnnnnnnnnnnnnnnnnnnnnnnnnnnnnnnnnnnnnnnnnnnnnnnnnnnnnnnnnnnnnnnnnnnnnnnnnnnnnnnnnnnnnnnnnnnnnnnnnnnnnnnnnnnnnnnnnnnnnnnnnnnnnnnnnnnnnnnnnnnnnnnnnnnnnnnnnnnnnnnncggtatacgggtatccacagatcagggggatacgcanggaanaacaggttagcaaaaggcaa

SEQ ID NO: 82099 - DNA, 1049 bp, Homo Sapiens
  misc_feature (97)..(98): n is a, c, g, or t
  misc_feature (169)..(324): n is a, c, g, or t
  misc_feature (332)..(461): n is a, c, g, or t
  misc_feature (470)..(470): n is a, c, g, or t
  misc_feature (573)..(573): n is a, c, g, or t
cccccctgattagctgattttttctgtaggggccgactaatgaaaaccaagcacgcgctttaacgtctgcctttgctgccttgcaaaactttcttcnngcgtatcccctgatgtgtgataccgtataccccttgagtgagtgaacccctcccccaccgaacgaccgagnnnnnnnnnnnnnnnnnnnnnnnnnnnnnnnnnnnnnnnnnnnnnnnnnnnnnnnnnnnnnnnnnnnnnnnnnnnnnnnnnnnnnnnnnnnnnnnnnnnnnnnnnnnnnnnnnnnnnnnnnnnnnnnnnnnnnnnnnnnnnnnnnnnnnnnnnnnnagcacccnnnnnnnnnnnnnnnnnnnnnnnnnnnnnnnnnnnnnnnnnnnnnnnnnnnnnnnnnnnnnnnnnnnnnnnnnnnnnnnnnnnnnnnnnnnnnnnnnnnnnnnnnnnnnnnnnnnnnnnnnnnnnnnnnncccaagatntcggcacgaggcttccagacctggccttcagcctaatatgattagggtgtttttctgagtgtctgtcaaattatgctggctaatttcaatgagaaaagatttnagagtcacagtgaacccatccataaaaggactaaaagctctctctggtccctgagatccacaacccctgagagaagccagaactacaaatgcattgtctagactttgaagaagcagggtatgattcttaatatagctcacccatcgctaagtcaagcctagactctaatatttttctataacaggagaagcctccctgactggagactagagtctcacatcttctgccaccacatgaatagactaaaaagaaaggagagtcccacatcaggccaagtggtgacctgtggctatttcagctcaaaatgtcagcctctgaagcatcaggtttgaatgactttggtgtcatgggattctgtccattgtccgtttgagtctgctgacatgcttcctctggaaagtgcagtttggcatggatgagtcagtggttttttattttggggtgttttttaaaaaataaaaatgaattgctttgag

SEQ ID NO: 82100 - DNA, 1881 bp, Homo Sapiens
  misc_feature (208)..(208): n is a, c, g, or t
  misc_feature (248)..(248): n is a, c, g, or t
  misc_feature (261)..(261): n is a, c, g, or t
ttacatttgctccgctgttgtgttgaattggcgaaacattcaacagaaacagttgactgatcgaattatagaccccttaggattgccctcgagccaagaatcgcacgagcctgcacttgaagtgacagacaccagcccacagtcaggacacaagatgaaggatgtgcacagtgacctgttcactcctcccaacaaccacgggaagatntggcagtggagcccctcctagggggaggtcattgcccacnacaggagtgtctnactcaggacagacctgctgctatccacagaagctcctgtttctcactggttcagtcttcccagagggatcgtgtttctgtgggacagagctgtggtttcagtggaaagcaaagcacaagtagccaggaggccagctcagcatctgagcccagacgcgcacctgatggtacagacccaccccctccacacacatctgacactcaggcctgcagcagggagctggtcaatggctctgtgcgcgccccaggccacggcgagccttcccaccctccaggagggtctggcacagaaagccacattctcctagaaagagaggaaaagcccagtgtgttctctacagatggaaatgaaacagacagtatttggccacccagcatttttgggccgaagaaaaaattcaaacctgttgtccagagaccagtcccaaaagacacatccctgcactctgccctgatggaagccatccactctgcgggagggaaggacagactacgcaagacggcagaacacaccggggagggcaggccagcgaaactgtcctacacggaggcagagggcgaacgatctgcactgctggcagctatccgcgggcacagcggcacctgcagcctgaggaaggtggcatcctctgcttctgaggagctccagagcttccgagatgccgcactctctgcacagggctcggaaagtcctctgctagaagaccttggtcttctgtccccaccagccattcccccaccaccccctccaccctcccaggctctctctgcaccaaggacggcctccaggttcagcacgggcaccctcagcaacaccgcagacgcaaggcaagccttgatggacgccatccgctccggcacaggggctgcgagactgagaaaggtgcccttgctcgtgtgaatgaacagaggccagagaattgcagaaacccacctgtaatatgcccacaggcgtcactcaaggagtctgcatagccaggaacatcaagttttggtgttactttcttgtctacaggccaaaatgcgcacagttgattttcggtgtgttcctgtataacggcttgaaaggaaaggagaagatgctgtgtcgctgcgcagctcgtgtgccaaggaaatgtgttttgcctctgaatatcttaagttgctaataaacgattcttgttggcaggttaatgggactataaatgctggagcccagcactcacacttaattatatttatgggcaaagtaaaaagaatcatgcccttacactgattttggaccctttgaagactttttaccaccatccggatggatggaaactacttactggatttaaaatctttttgaaattttagaaaaaaaccctatggaatcaggatgggaaccaatctggaatgggaatatgcctcccatgaatggctgggggtgtttttggttaagtaacgaaaaaacaaaattggggaaggctttttttccaaggggggccttttggttcaggtagaaaaaacctggctgggaattcctcccttcctcccaaaataattttggggggcttaacacctttcccacaaggggtccccaacgcccctgtaatctttgacccaacttaaacccttttttaaagaaatccaccttact

SEQ ID NO: 82101 - DNA, 1005 bp, Homo Sapiens
  misc_feature (98)..(154): n is a, c, g, or t
  misc_feature (173)..(173): n is a, c, g, or t
caacgcattaattgagtagccactcatagccccccagcctaacacttatgctccggtcgtatgtgtgtgaatttgacggataacatttcacacagaannnnnnnnnnnnnnnnnnnnnnnnnnnnnnnnnnnnnnnnnnnnnnnnnnnnnnnnnaagaatcggcacgagggcntgccagacagtacatgggggagaaggactttcaggggagaggaacagcatggcaaagtatgggaggcatgcaaacatctccctcttctctccctaactttccaagcaagtaaggtacgctttccatggggattctggcctgtgtggtaggaagggatctcccttgctcccatgttgctggctgtccgttacatcaccctgtcccctgcaaggagggggctacaggcccatctccctccggtaggcctcttgactcccctccacttttgggccctccagcttatctcgggcaggggaccattgcagcatcctcccctccttcggactcaaggtgctgaggtataagccctgggccccagatccctggtgacaccttcctgggagaagactctcaaaagtgactgtatatttgagttcaccagcaataactccccacactcgaagcaggtccaaacccaggatctcagggtccttgggctctgtggcactgtcttcccaagatccttcctgttgcacaatgggaaacctaagaggaaaaagacaggggcctgcttgcccagccatgcgagggattccatgcccacctgccctctgtctgcctcgctggaatgtgggcccctgctccccgtcaggttgtgctgtctctgacctatgtttacatccccgaggggtttctgcctcctccccacccaggtcagggtgtggtccagcagcttgctgtggggtgctgacatgtgtcaccactgccccccttgcccccgggggggtcatggtctcctcctggatgctgctccttgaatcttttttcttgataaaccttttacaattaagat

SEQ ID NO: 82102 - DNA, 887 bp, Homo Sapiens
  misc_feature (37)..(37): n is a, c, g, or t
gagttattgctggtgaactcaaatatacagtcacttntgagagtcttctccaggaaggtgtcaccagggatctggggcccagggcttatacctcagcaccttgagtccgaggaggggaggatgctgcaatggtcccctgcccgagataagctgagggcccaaaagtggaggggagtcagaggcctacaggagggagatggcctgtagccccctcctgcaggggacagggtgatgtacggacagccagcaacatgggagcaagggagatcccttcctaccacacaggccagaatccccatggaaagcgtacctaacttgcttggaaagtaagggagagaagagggagatgtttgcatgcctccataactttgcccatgctgttcctctcccctgaaagtccttctcccccatgtactgtctggcaggcccttgtcattcttcaaaacactgcccaaatgttgcctactctatggagtcttccctgaccagtggaatgctgtggtcccttctatgagcttccagaaatccctcacttaaacatcagtcatactgcattgactctgtctgtgtctgaccccgaccttcactgaggactcctgaagagcaggcatgtcacagccctgggtgcccagcatccgacccaagggtgcagcaggcctcggtgtctgctgaatggataaggcagcagtggccaggtgagcaagcaaaataggctctaggggaggctgagaccctggcctgaccttcactgactgaccggcagcccagcttctggaattccttgcggaagccccccacatgtttacgcaccagctctgatgccacagtgctgagctgcaggacgctgtcgtccatcttcttactgaaggccttgaaagtgtccaccc

SEQ ID NO: 82103 - DNA, 1000 bp, Homo Sapiens
tgcttcgaacgctcggttaagattaatcccatgcagctcggggtgtggttttctctcggttgtgcctatttggccttggaagactatcaaggttcagcaaaggcatttcagcgctgtgtgactctagaacccgataatgctgaagcttggaacaatttgtcaacttcctatatccgattaaaacaaaaagtaaaagcttttagaactttacaagaagctctcaagtgtaactatgaacactggcagatttgggaaaactacatcctcaccagcactgacgttggggaattttcagaagccattaaagcttatcaccggctcttggacttacgtgacaaatacaaagatgttcaggtccttaaaattctagtcagggcagtgattgatgggatgactgatcgaagtggagatgttgcaactggcctcaaaggaaagctgcaggagttatttggcagagtgacttcaagagtgacaaatgatggagaaatctggaggctgtatgcccacgtatatggaaatgggcagagtgaaaagcctgatgaaaatgaaaaggcattccagtgcctctcaaaggcatacaagtgtgacacccagtccaattgttgggagaaagatattacatcatttaaggaagttgttcaaagagccttaggacttgcacatgtggccataaaatgcagtaaaaacaaatccagttcccaagaagctgtacaaatgctttcttctgttcgactcaatttacggggcttgttatctaaagcaaagcaactttttacagatgtggcaactggagaaatgtccagggaattagctgatgacataacagctatggacaccttagtgacagagctccaagacctaagcaaccagtttcgaaatcagtattgattctgctggaagcagattctggaaaaggtgctttcacctgctggtaaaagatacatctgtatatctgaaatgcaagatattgatttttaaaataaatttgttttatgactta

SEQ ID NO: 82104 - DNA, 592 bp, Homo Sapiens
  misc_feature (83)..(83): n is a, c, g, or t
  misc_feature (91)..(91): n is a, c, g, or t
  misc_feature (103)..(103): n is a, c, g, or t
  misc_feature (115)..(115): n is a, c, g, or t
  misc_feature (128)..(128): n is a, c, g, or t
tttcagcgctgtgtgactctagaaccgaatatggctgaagcttggaccgattttgtcacctttcctatatcgatttaaaccanaagagtanaagcttttagancttacaagaagnctctcaagtgtanctatgaacactggcagattgggaaaaactacatcctcaccagcactgacgttggggaattttcagaagccattaaagcttatcaccggctcttggacttacgtgacaaatacaaagatgttcagtggccataaaatgcagtaaaaacaaatccagttcccaagaagctgtacaaatgctttcttctgttcgactcaatttacggggcttgttatctaaagcaaagcaactttttacagatgtggcaactggagaaatgtccagggaattagctgatgacataacagctatggacaccttagtgacagagctccaagacctaagcaaccagtttcgaaatcagtattgattctgctggaagcagattctggaaaaggtgctttcacctgctggtaaaagatacatctgtatatctgaaatgcaagatattgatttttaaaataaatttgttttatgacttaaaaa

SEQ ID NO: 82105 - DNA, 1022 bp, Homo Sapiens
  misc_feature (42)..(42): n is a, c, g, or t
  misc_feature (73)..(74): n is a, c, g, or t
  misc_feature (76)..(76): n is a, c, g, or t
  misc_feature (82)..(82): n is a, c, g, or t
  misc_feature (85)..(85): n is a, c, g, or t
  misc_feature (104)..(104): n is a, c, g, or t
  misc_feature (112)..(485): n is a, c, g, or t
  misc_feature (517)..(525): n is a, c, g, or t
cctctgactgagctcgatttttgtctcgtcagggggccgacntatgaaaaacccagcacgccgcctttacgtnncntgcctntgntgcttttgctcacatgtcnttctgcgnnnnnnnnnnnnnnnnnnnnnnnnnnnnnnnnnnnnnnnnnnnnnnnnnnnnnnnnnnnnnnnnnnnnnnnnnnnnnnnnnnnnnnnnnnnnnnnnnnnnnnnnnnnnnnnnnnnnnnnnnnnnnnnnnnnnnnnnnnnnnnnnnnnnnnnnnnnnnnnnnnnnnnnnnnnnnnnnnnnnnnnnnnnnnnnnnnnnnnnnnnnnnnnnnnnnnnnnnnnnnnnnnnnnnnnnnnnnnnnnnnnnnnnnnnnnnnnnnnnnnnnnnnnnnnnnnnnnnnnnnnnnnnnnnnnnnnnnnnnnnnnnnnnnnnnnnnnnnnnnnnnnnnnnnnnnnnnnnnnnnnnnnnnnnnnnnnnnnnnnnnnnnnnnnnnnnnaagaattcggcacgaggccgcggctgtaggcnnnnnnnnngtagaagaatcagaaaacaatttactaacctccctgtttgatattaaaaataggaagaattttaatattttctgttagtacaagttgaacttgattgtgccaactgaaaccccagaggtttgtatatcagtagaatgcaagaacattgttaaaggtgcttacgatcttttttgttttcctttccactccattgtatcaattttttgagtaacttttaaatggctagaaaatggtctttttgctttgcccttttaaagctgaaataaccagctccattcttttcatgaatagtaagttgatatatttatttatcaggtatcttgcagttgtcaccaaatactgtagttttcttatgttgtatggaaattatagttcaattattttaatgtgatggagtgcaacaagtcattgtagaacttttcacctgttaatgttgaagttatacctctgaatttctgctgtggatatcaaggaaataataaagcagaaaccccaag

SEQ ID NO: 82106 - DNA, 659 bp, Homo Sapiens
tcacttcctgaaataaaagggagccgctaccaacaaataaatgatgtatgtgcaatctgctatcatgagtttacaacatctgctcgtattacaccgtgtaatcattatttccatgcactttgccttcggaaatggctgtacattcaagatacttgtccaatgtgccatcagaaagtatacatcgaagatgatatcaaggataattcaaaatgtatctaacaacaagggatttattccacccaatgaaactccagaggaagctgtaagagaagctgctgctgaatctgacagggaattgaacgaagatgacagtacagattgtgatgatgatgttcaaagagaaagaaatggagtgattcagcacacaggcgcagcagctgaagaatttaatgatgatactgactgatgaaaatagcatttattaatgattgaggtatttgtttaaaattcagttcatccaaaatggagtaatatccttcaccttcagtgtgtaaccaagcacaaaaacagtatcaatgttgaatctgtgaatggttttccgtttactgtgatgtgctactgtaaatatacctctttaattacttctggtctctttggtgacctgtttaaatttgtgtacattattgtacatagaataaaatgttttcacatttttatga

SEQ ID NO: 82107 - DNA, 1006 bp, Homo Sapiens
  misc_feature (130)..(130): n is a, c, g, or t
  misc_feature (163)..(163): n is a, c, g, or t
  misc_feature (169)..(169): n is a, c, g, or t
  misc_feature (174)..(174): n is a, c, g, or t
  misc_feature (247)..(247): n is a, c, g, or t
  misc_feature (256)..(256): n is a, c, g, or t
  misc_feature (263)..(263): n is a, c, g, or t
  misc_feature (353)..(353): n is a, c, g, or t
  misc_feature (383)..(383): n is a, c, g, or t
gagagaccagacgactcttttagccttgttagggtttaacttgaagacctaaggcagtcccagtccataagatttgggttttgatgaaggcatcattccatccatcctgatccccatacagctgttctgntgtggatcagagcagtttaaaaagaaatcagcncctccnaaccntcagccttgattccagatccttccacagaatgggggaggcttggcagaccaggagagatcgggcccagtcccnttatcccantgtgccnccaaaccatcagatgcaggctggagacgaagaccatttaggtcacccctactgatcccaggtcgggggaggtgaggaggtcttgcttccnacagccaggcgtgggtaagcagagccactnttgccccaagcaaatcaattaaaggtcttggccaagcctgtttgagttggtgagagcccaagtgggaattccaatctgccgtgttgctctgcaggcgaatagagccaaacagaaatgctgctttgtgactttgtgccaaatatccatcagcttgctctgccagcagtgctgggccggccctgtaaacgtcacctctgcccccaccagctctctgctctctgaaagccttcttcttgtgcccttaaagtcagcttgccttttgatacaatttggatgtgtgtcccctccaaatctcatgttgaaatgtgactcccaatgttggaggtggagactagtgggaggtgttggatcatgggggcggctcccttgtgaacggcttggtgcccccacttcgtgatgagtgagagctcactctgttagttcactcgggagctggttgtttaaaagagtctggtagccctcctcccctctctcttgctccttctctcaccacatgacacacacgggctctgctttgccttccaccatgagtaggagcttcttgaggcctcaccagaagcaggtgctgccatgcctcctggacagcctgcagaaccatgagccaaataaacctcttttctttt

SEQ ID NO: 82108 - DNA, 1023 bp, Homo Sapiens
  misc_feature (157)..(157): n is a, c, g, or t
  misc_feature (259)..(259): n is a, c, g, or t
  misc_feature (494)..(542): n is a, c, g, or t
tatatcatgcagcagtccgatgagcgcgtggcgaccatatgtggtgctcatcatagccccagcttacattatctccgctgttgtgttggatgtggcgatacattccacagaacagttgacagatacgattatagactccttagggattgcctcgagnccagattcgcacgagcggacgagatattcatagattaaaaacccaataagatggattaaaatcactgtggaaaagagtattgagttacaaactgagaagaanaaagcaggaagttccctaataatctggaatattctacatggcttgataacatagcaaacaagaccaagatttagggctgtctttaacatcactgccgtcttgaagcagggtacacacgttaggtattgtgaagaacatcaatccgaacttttcttctgttgtttgcactgatgcgattttttgttcttttatgtttatacaacgtatctatgttgtgtaggggaaattttttcannnnnnnnnnnnnnnnnnnnnnnnnnnnnnnnnnnnnnnnnnnnnnnnngctaagtagaggacatggactagttgtagcaaacagaacatgctgtttgctcttgccaaaggtcagtgagtgagtgcatttgctgcagtggtggcacgtagagaactagatggtaataaagatttaaaactatgaagaaggttacagtgtaactattttggtactagaaccagttcatgctggccgaaacgacaatggtttatggacttgcatccattttgtatttttgtaatatttgtaaatatgaactttttaaattgctgcaaagatggtttcttttgtaagatgttttcaacgtttacattcaatccaagcctttgtatattttagagctgtgcaacactttaagtcttgtatttatttttagtaaaaatggtgacagtttcattgtgaacccctctcaaaaaaaatgtatcagaaaagtttgattacctagaaagtgtgtatagaaactgcaaataaacgtgactgcaattaaaaa

SEQ ID NO: 82109 - DNA, 1039 bp, Homo Sapiens
  misc_feature (480)..(489): n is a, c, g, or t
  misc_feature (521)..(544): n is a, c, g, or t
  misc_feature (586)..(823): n is a, c, g, or t
  misc_feature (852)..(852): n is a, c, g, or t
  misc_feature (886)..(886): n is a, c, g, or t
  misc_feature (901)..(901): n is a, c, g, or t
  misc_feature (910)..(910): n is a, c, g, or t
  misc_feature (929)..(929): n is a, c, g, or t
aaaaatcaagttttttattttaaaatattttcaaaggctaaggccatagcaaaacaacccaagggtggttgaatcaaactcagggaattagaggagcatcagccaatgcaagcaggtctatataaaatacacatcatttataaatgcacacagcagaaagcacagtggccccagaggaccaggcagggggacaacagagagaaacagagcactatctggagggacaggcacacccgcaacactcaaagccctgggccccaagtgcacctccaaagtcacctacgctgcagcatggctcttgccctttctgagcctgggtatagctgaagaccaagttcaccagcatcttggcacatccacctataactggcacctctcatggcctctgacaaccaagcaaggctcagagaatggatttttatctctgtctttcagcaaggaccagggagaagtgctgaagcaagaagggttattttcctnnnnnnnnnngacggatgaaagggtgaaaggggctggttccnnnnnnnnnnnnnnnnnnnnnnnngcctacagccgcggccgctccaaccctcgtgccgaattcttnnnnnnnnnnnnnnnnnnnnnnnnnnnnnnnnnnnnnnnnnnnnnnnnnnnnnnnnnnnnnnnnnnnnnnnnnnnnnnnnnnnnnnnnnnnnnnnnnnnnnnnnnnnnnnnnnnnnnnnnnnnnnnnnnnnnnnnnnnnnnnnnnnnnnnnnnnnnnnnnnnnnnnnnnnnnnnnnnnnnnnnnnnnnnnnnnnnnnnnnnnnnnnnnnnnnnnnnnnnnnnnnnnnnnnnnnnnnnngggagaggcgtttgctatgggcgtctccngctctcgctcatgatcgctgcgccggtcgtcggntgcggcagcgtatcnctcatcaanggcgtatacggtatcacanatcagggatacgcagaagacagtgatcaaaggcacaaaagcaggacgtaaaggcgggtgctgcgttttcatagctcgcccctgacacacaaaatcgcctactcaaggtgg

SEQ ID NO: 82110 - DNA, 805 bp, Homo Sapiens
ggtggtcttctccttccaggaaatccagcaattggaattttaaaatataaagaaaaatattacacattcaatagtaaagatgctgcatattcatttgcagaaaatcctgaacattatattgacatagttagagaaaagcccaaaaaaaatacagagttaattcaactattggaacttcatcaacagtttgaaacatttattccatattctcagatgagagatgctgacaaacattatataaaaccaattacaaaatgtgaaagtagcacacagacgaatacacacatactgccaccaacgattgtgagatcatatgagtggaatgaatgggaattaagaagaaaagctataaaattggctaatttgcgccagaaagttactcactcagtacaaactgatcttagtcacttgagaagagaaaattgttcccaagtgtaccctccaaaggacactagcacccagtccatgagggaagacagcactggggtgcccaggcctcagatttacttggctggtcttcgtggaggaaagagcgaaatcaccgatgaggtcaaggtgaacttaactagagatgtggatgaaacctaattacagacaacgttttaaaatagatgctactcaattatgaacaatagcaagtacttaaaggtatattaacatctatacaaattaattttgtaggggtggcacattcattggttgtgtgactgtttattgggttcccatattttatcaaactgttttctgtaacacatttttcattctgttgaaattgaaaaataaaactgtccatttatcttttaaa

SEQ ID NO: 82111 - DNA, 950 bp, Homo Sapiens
  misc_feature (204)..(204): n is a, c, g, or t
  misc_feature (265)..(265): n is a, c, g, or t
  misc_feature (320)..(320): n is a, c, g, or t
ccctccacaacacggcaggtatcgagaggagcccacccacccttccgggtgcgatatatcatgcagaagtccgatgagcgcgtagccaccatatgtgatactcatcaagccccagctacattatctccgctgttgtgttgatgtgacgaacattcacacagaaaagttgacagatacgattatacgctccttagggattgcctncgagccagaattcgcacgagcacaactagtggtgagacacatgaaacaaatcctgtaagcntaggccttgatcatccagaaataccataaaaagaatgctatggtagagcaatgcntaagtcagaaccaggcaccgaggaattttcacagatgcagtagctctgaagagaaaacagccttttgtaagatacgggtgagggtaaagaccttcatcttagaagaaacagcacaagccaaggcagaatatgcagtaaggaaaggatagagagaaatttctaagaaagctggacagtgggtgtgtggttaggaataaaaggagtgtggcagagaatagactgaaaaggtaggatgcaactatttaatcttttacccattaataagaaatactgataaattccacacttcctagtctttttgaaaagtagtcattaaagaaaagaacaattaactgtgagaagttaagcacaaagctggagtgattgggtgaacacagatagccttgctctagtgttcgatggcacctgaagatggattgtcacacagcctgtgtgtatgtgtgtgcactaccggtggatctgctggtttcgacctggccagagcccttgcccaagaacacctgcaatttgcaagtcttcttaaatctgttttaccatcctgcagaggtaagagttggataatttatgccctatgacttcacagtcctctggggaggctgccaaggaaagcatgttttggatagaaatctt

SEQ ID NO: 82112 - DNA, 1072 bp, Homo Sapiens
  misc_feature (71)..(71): n is a, c, g, or t
  misc_feature (113)..(113): n is a, c, g, or t
  misc_feature (119)..(119): n is a, c, g, or t
  misc_feature (130)..(130): n is a, c, g, or t
  misc_feature (132)..(132): n is a, c, g, or t
  misc_feature (135)..(135): n is a, c, g, or t
  misc_feature (143)..(143): n is a, c, g, or t
  misc_feature (149)..(149): n is a, c, g, or t
  misc_feature (166)..(166): n is a, c, g, or t
  misc_feature (179)..(180): n is a, c, g, or t
  misc_feature (193)..(193): n is a, c, g, or t
  misc_feature (226)..(226): n is a, c, g, or t
  misc_feature (363)..(363): n is a, c, g, or t
  misc_feature (387)..(387): n is a, c, g, or t
  misc_feature (409)..(409): n is a, c, g, or t
  misc_feature (458)..(458): n is a, c, g, or t
cacattgcatcacgctctttttggggttcatcccagcctgcaggtggtgcacagtgaagcgcttccagctntcaaaaatgcctcctgagcatggtgcccgacttgtgtcaccncagtcntttccttttcntntantcatcctntggccngatattgcctagcccancaggagctcgtcnntgatccctctggntccccctgtcctgcttgtagccacagacgcacntgtgcctgggaaggcactgtgtcctttcaacgcctcggtgcctcctttcggctgcctgcatcagggggcctggtgcctggcctggagtacctggagcagtggtccatgcccctgtgctcccaagcacacccacccantacacactcctcttcactcacacntacatgcccccccggcacctcntacacctcccaggcctgggggcaccagtggaggtggtggacatgggggngactgaggactgggccctgtgccaaaccctgaaaagcttcaccagacaaccagcctgccaagtggctggtgggccatggctctgccgcctctttgtggtaacccctggcaccaccaggcgtgccgtggagaagtgcagcttccccttcaagaatgaaacacttttatttccccatctgaccctggaggatccaccagccctgtcctccttgctgagtggggcttggagggaccacctcagtcttcacattgtggagctgggggaagaaacctgacaatatgacagagcacccactgcccaagactcagccatagaagatgccgccccaccttctacttgggtagctgggctgggacgctgggacaggaccccgtcctccttcatgactcccactgctgcctctcctgggcatggctgttagctgttctgccttctgggtgagctggcactcttctccctgagaccaaagatttgacctgtcggtcttgatgtcaaggtccccaaagaccaggttaagtgacgacacctgtctgttcctgccctgttgcttccagccactgtgatgtttgaaatatgtgatagtacctggttgtgaaaaaagacaatgaactgct

SEQ ID NO: 82113 - DNA, 2032 bp, Homo Sapiens
  misc_feature (75)..(109): n is a, c, g, or t
aggactattgatacatggggctggcgtatttccgaacgacgagcgcagcgaagtcagtgagcgaggaagcggcgnnnnnnnnnnnnnnnnnnnnnnnnnnnnnnnnnnncagtcgacggtaccggacatatgcccgggaattcggccattacggccgggcaagcgtggggggcccgcgcgtccgggagccccgaggcggcagcgcgcgtttccacgccgcggtcccgcgggaaagccgggggcggcggcctggctgaggccaagctcggatccggtgccgagccaagcggggccgtgcgtcgccggggcttcgccttcgctcgcgtgacctccgccgtcctccccaaccctcgtcctctggccgcgcctgcggccgcacgcccagcgcccctcgcctaacctcgcgcccgggccgcgcctcctcctcctcctgctccccgccgcttccgtttctcgagggaaaggctgctgcctcctgctctgtcctcatccccggcttagctgacggcccagagggtgggtgccaattccaccagcagctgcaactgaaaagcaaggttcagaaatgtcagatatcctccgggagctgctctgtgtctctgagaaggctgctaacattgcccgggcgtgcagacagcaggaagccctcttccagctgctgatcgaagaaaagaaagagggagaaaagaacaagaagtttgcagttgacttcaagacgctggctgatgtactggtacaggaagttataaaacagaatatggagaacaagtttccaggcttggaaaaaaatatttttggagaagaatccaatgagtttactaatgactggggggaaaagattaccttgaggttgtgttcaacagaggaggaaacagcagagcttcttagcaaagtcctcaatggtaacaaggtggcatctgaagcattagccagggttgttcatcaggatgttgcctttactgacccaactctggattccacagagatcaatgttccacaggacattttgggaatttgggtggaccccatagattcaacttatcagtatataaaaggttctgctgacattaaatccaaccagggaatcttcccctgtggacttcagtgtgtcaccattttaattggtgtctatgacatacagacaggggttcccctgatgggagtcatcaatcaacctttttgtgtcacgagattccaaacaccctcaggtggaaaaggacagggctattgggggcctttcctacatgggggaccaacatgcattcactacagctcaccatctctagaagaaacggcagtgaaacacacactggaaacaccggctctgaggcagcattctcccccagtttttcagccgtaattagtacaagtgaaaaggagactatcaaagctgcattgtcacgtgtgtgtggagatcgcatatttggggcagctggggctggttataagagcctatgtgttgtccaaggcctcgttgacatttacatcttttcagaagataccacattcaaatgggactcttgtgctgctcatgccatactgcgggccatgggtgggggaatagtagacttgaaagaatgcttagaaagaaatccagaaacagggcttgatttgccacagttggtgtaccacgtggaaaatgagggtgctgctggggtggatcggtgggccaacaagggaggactcattgcatacagatccaggaagcggctggagacattcctgagcctcctggtccaaaacctggcacctgcagagacgcatacctagaggaactctaaccccggtgtacctgtataaactgaactgtgaaactgtttcggttatctctgtcttttgaggatggctttgtcctgttgctggttaacattcaccttcctcttttgaggagtatttttccattatgtattcataataatgttaatttcaataaatgacattcatgcagcaattatattggtgtatgaaattcttacagtgaatattgtgctgttagtgctgcttgaaacatttcaataaaatattggccagg

SEQ ID NO: 82114 - DNA, 324 bp, Homo Sapiens
tgcggccgcaggcgcggccagaggacgagggttggggaggacggcggaggtcacgcgagcgaaggcgaagccccggcgacgcacggccccgcttggctcggcaccggatccgagcttggcctcagccaggccgccgcccccggctttcccgcgggaccgcggcgtggaaacgcgcgctgccgcctcggggctcccgggacgcgcgggccccccacgcttgcccgagccgggcgtccgcgacgtcacaagtggagcgcgatgattcagagggagggccaggaagggaagggctctggggtcagcttggccacggctgctgtttcc

SEQ ID NO: 82115 - DNA, 1573 bp, Homo Sapiens
ggactggatgttccgggttttggaggtggaccaaacaatttaagtgggccatcgggatttggagggggccctcagaattttggaaatggccctggtagcttaggcggtcccccggggtttggaagtggccctcctggtcttggaagtgcccctgggcatttgggtgggccacaagcttttgggcctggccccggccccggccccggccctggccaaatccatattgggggtcccccgggctttgcaactaattctggaaaaccaggaccgaaagtaattaaagtgcaaaacatgccctttactgtgtctattgatgagattttagatttcttttatggctatcaagtaaccccaggctcagtgtgtttaaaatacaatgaaaaaggtatccccacaggtgaagccatggtggcctttgagtctcgggatgaagccacagctgctgtcatgactttaaatgacaggcctataggttcaagaaaagtaaaacttgtattagggtagccattcacatcattttttatagggtagatcttcatattgctgtgattaatgcatccagattgttttcctagtatttccaggttagaacctgtggattgtttcaattgcatatagcttggtttccataacatagagcattggttgactgtttacagaagactcactcaccaggataaacattgctgtatgttacagtaaagctatctggagagaacacataaatgattttggcataccattagagaaaccatttgtaaaactcaaatgaccacataaagcttatcaaggagtctagattggttttgttttataccatatgggatgaagaaaatagaaatgtcagtagaactcattgagggtgctcttgccagctgctgaaaatagaagttggctactctcagaatttggtttaaagctggacagatttgctttgttatagggtaaagctttgtctaaagtcctcattttcttttaaaattgaataaaatttctgtatacagattcattgtatgtacctttattgcttcttaagggtccttgctgtatagacagtcctgcttcagaagttgctgctttgtttgtctaattgactcatttgtaaatgagcagaactgttttgttggtttttttccctaaatataaaagtccacacttcgtttgtgctataacctcaaactttgatttctaatgtcacacttaaaactgtgtggaataagacttttgccataaaaataaactatggagtcctttatctaccagagcctttttggtttgaccgccacgatttaggttagtcagtttaaaaattgttcatgttgtttggatggtatcgaaaaccagaaaccacttttaataatgtgtttaagatacttgatttgaagtccttttcatatggactaattgtagtatcaatttcctcctgtcccgattatgtgaaattttggcctttaaacaaagaggggcccattcataagaaagtgttatatctaggtttttaaaactgaagttgaaattatctttgttagcagtagtagtatagaataaaagatccgtatgctggttcgtaaaa

SEQ ID NO: 82116 - DNA, 1081 bp, Homo Sapiens
  misc_feature (115)..(115): n is a, c, g, or t
  misc_feature (139)..(139): n is a, c, g, or t
  misc_feature (152)..(152): n is a, c, g, or t
  misc_feature (154)..(154): n is a, c, g, or t
  misc_feature (174)..(174): n is a, c, g, or t
  misc_feature (200)..(200): n is a, c, g, or t
  misc_feature (207)..(207): n is a, c, g, or t
  misc_feature (233)..(233): n is a, c, g, or t
  misc_feature (240)..(241): n is a, c, g, or t
  misc_feature (254)..(254): n is a, c, g, or t
  misc_feature (279)..(279): n is a, c, g, or t
  misc_feature (284)..(284): n is a, c, g, or t
  misc_feature (288)..(288): n is a, c, g, or t
  misc_feature (346)..(346): n is a, c, g, or t
  misc_feature (363)..(363): n is a, c, g, or t
  misc_feature (366)..(498): n is a, c, g, or t
atatctttgatgcataaaaatcatagtacactggtgctcctgtcagacatacgagaaaataactatccttccaggtcacaaatcttaatggtgttatagtagagcttctgtcccntgggcaaagagctcagatttcccntagcctctcagtntntggggaaagtgtgctaaacnaaattccaggtttctcgggcttaccntcctcantaaataccagtgatagagtctgaganggaccanngtaggaaaaagtnggtacagtgggaaacttaggatctntcatntgtnatctgtgtgtaaaatatggaagtaaagagtaaaaaaattaggagatgaggcctcagtntgaagatacaattgatntgnnnnnnnnnnnnnnnnnnnnnnnnnnnnnnnnnnnnnnnnnnnnnnnnnnnnnnnnnnnnnnnnnnnnnnnnnnnnnnnnnnnnnnnnnnnnnnnnnnnnnnnnnnnnnnnnnnnnnnnnnnnnnnnnnnnnngcaacagttttatataccttgagaaggttaaagggaagtccaagaagattaaagttttgctgttgctatctagagctcttgaaagcttctgccacttgtgatccaagaacaggaatgcatgttatttgtgtttgggagcaataacacatctatttgagtctatttcaactcgaactagaggaaaacagaatccccaataatttcagtttgtgccttttacagtttttcctcatttattttatttagcgagtttgtgttacacctactcagtgttgtaaaactgccatttcaggacaaatcattttgagttaagaggttctagacttttatggaaaataaagagcactggctgcccgagacaagttccaaagtgaaaatgtaaatgtctcttgatttctccatcgcctcccaggctggattaggccccttctgtgccaagtgataactgtttcttgcctgtctctaactgcatgtttgtactttatctgccaggacaatgtgatctcctcgagggcagggtctgtctttcagatttctatatccacagattagaggttctcataataaatacatttaatgaagt

SEQ ID NO: 82117 - DNA, 961 bp, Homo Sapiens
  misc_feature (235)..(235): n is a, c, g, or t
  misc_feature (275)..(277): n is a, c, g, or t
  misc_feature (286)..(287): n is a, c, g, or t
  misc_feature (296)..(296): n is a, c, g, or t
acgcatttattatttatattatgaacatgtagtgccgatttatatactttaatgagattgttctgctagccaaactgtgcattataatataaaataatgtctggccatttatcccccaaagtgcatgtacttcccaaatacatttaaaacctcggctgtgacactcatgctttgtttgcaaatatttgatactgaagattatttcaaatgaagagcagatgaagagggagtaganttgagtttcatttgcccatagatagcttatataatatatnnntatctcttnntaagaattntcaagaaatgattcctgcctttgaattttcagactgctgatcatcatcctgataattgtgttggacatgggatttgctctctatagaaggttctttgttcctgaagatgggtctccggtttgctttaagaaatagtgctcccttcagaatggaagaatttatctgcctcttatttgatgtggatcagagctaagatggctgactaaataaacatgggggactggaatctccttggagatactctggaggaagttcacatccactccaccatgattggaaatatctggctcaccatcctgttcatatttccaacgcttgttctgggtgtagcacctgaagatgtccggaatgatgagcagtctggcttcatctgcaatacagaacaaccacggccgcagaaatgtatgctacgaccaggcctttcctatctccctcattagacactgggttctgcaggtgatatttgtgtcttcaccatccctggtctacatgggccatgcattgtaccgactgagagttcttgaggaagagaggcaaaggatgaaagctcagttaagagtagaactggaggaggtagagtttgaaatgcctagggatcggaggagattggagcaagagctttgtcagctggagaaaaggaaactaaataaagctccactcagagg

SEQ ID NO: 82118 - DNA, 429 bp, Homo Sapiens
tttcatggcgaccaggacgctctgcatccccagtagcaggctgagccgagggaggctgcgtatgcccgcccctctggctgtcggagccgcacctcttcctcttccggcccccgtagcaattaggtttctttgcaggagatgaagccagactgctcatcattccagacatcttcagctgctacacccagaacaagcattcgaaatatgaacaggatggtgagccagatctttccaatcatggtggagtggatgtgaacttcctccagagtatctccaaggagattccagtcccccatgtttatttagtcagccatcttagctctgatccacatcaaataagaggcagataaattcttccattctgaagggagcactatttcttaaagcaaacctatggtgaaaatataacaatatgtcacttctaaaaaa

SEQ ID NO: 82119 - DNA, 504 bp, Homo Sapiens
ttttttttccctttctacattaagaagccccttccttaaatcctaaggtccttttataggcaatctttgcaactgatgagtttaatgctgttttgtcctctatataaaattgttagccttttctgagacttctctgtttcttcatagagtcttccttttttttattatttcctccagatggctctttttattaattgacttacaataggggcaggtcagtttgctggagataggaaaatgttgaaaaacacagcaaataagacacaagctaaatatgcagcaattgctatccaaaaccttggatctttcagcagtgctttatcaaagcagctaaacaccgtgtagccaatggacattccagcaaatccacctgcaatgtgagctgcaaaagacaccttgggagaaaaggagggaaaatggaaataagtgaagacaatgctaattgtgtatttcagttgcatctctcttattcaaacacaaataccgtcacagttaaacaagcgt

SEQ ID NO: 82120 - DNA, 1222 bp, Homo Sapiens
  misc_feature (70)..(70): n is a, c, g, or t
  misc_feature (87)..(87): n is a, c, g, or t
  misc_feature (127)..(127): n is a, c, g, or t
  misc_feature (142)..(142): n is a, c, g, or t
  misc_feature (155)..(155): n is a, c, g, or t
  misc_feature (188)..(188): n is a, c, g, or t
  misc_feature (205)..(205): n is a, c, g, or t
  misc_feature (226)..(226): n is a, c, g, or t
  misc_feature (296)..(296): n is a, c, g, or t
  misc_feature (359)..(359): n is a, c, g, or t
  misc_feature (415)..(415): n is a, c, g, or t
gccctcgaggcagaaatcgcccgaggagatcagattgacccgtcatgtgaataaagagtctccttgtacntgatatacccaacgatnccaccccaggtctgctttggggctatcagaactccttttntaaggagcactaganttgagaatcatgnttgttcgatcgtttcacatctgtatatcagctntaaagcagagatgtatnatggtgatactccaaggtgcnatagccattcattacaaactcccagatttgagctgcctggaggaatccatatcagctctgcataagatantatacaaagctgtcactcacaaaaggctggatgtgctttcatccaactggaagcttatttctnccaagttcattcatactcaaagaggccagtactttgccatccttgcacttctgtantcagggcccaaataacagtggcaagctaccaactaagttgtattttaataaagattccatgggttgaacaagccacgttgcagaaaaagagcttcccctaacctgggttgttgcagagtaaatcccacgacataagctggtatcagtggttcgggggaaatagttccattctatgactcttgtctcctcctccaggaggactgttctaactagtaatcttggccctattcattacatcctctgcttgtcattctgctaatttatgaagatagtttattatagtctgtacttcagttctcatcttgtaaataatgcttaacataaacttgtacttacactgaaatccaaaatagtcatgtttctgcagtattctgtagccaacttaaacctgtgctttcatgtttaagaaatgagaaattgtgccaaagatagcagaagagtagataagtgctcagtattgacgacctacatctgaaatctacaacataatgatactgaattgttatgtaaacatcataaatagtaaataatgattcaatgtgaattttaaaatgcaaatattgctattgtttataggaaataaatctaaatataaatgaaattgaatcagtaatttatcttgggctaaatggttctaccccttactaggttgccccaattagtggcactagttggcagagctgttcatgagctgccagttatcattttggagtcagtttgaaaccagcctcttaacacactgctgttaactcataaaagagaagagtgttccatttcagtctcaataaacacttccctcattctttc

SEQ ID NO: 82121 - DNA, 1022 bp, Homo Sapiens
  misc_feature (100)..(203): n is a, c, g, or t
  misc_feature (241)..(284): n is a, c, g, or t
  misc_feature (314)..(422): n is a, c, g, or t
  misc_feature (463)..(482): n is a, c, g, or t
  misc_feature (713)..(713): n is a, c, g, or t
ctttgtatcgctcttcagtggcacaacttttggctttatttactgatggccctatgagagagagagactttttcttatttctgcaggagaaagggagctnnnnnnnnnnnnnnnnnnnnnnnnnnnnnnnnnnnnnnnnnnnnnnnnnnnnnnnnnnnnnnnnnnnnnnnnnnnnnnnnnnnnnnnnnnnnnnnnnnnnnnnnctccctctcttttggagatgggctctttgctttcttcnnnnnnnnnnnnnnnnnnnnnnnnnnnnnnnnnnnnnnnnnnnnaagcccacccttctgggctcaagcaagctnnnnnnnnnnnnnnnnnnnnnnnnnnnnnnnnnnnnnnnnnnnnnnnnnnnnnnnnnnnnnnnnnnnnnnnnnnnnnnnnnnnnnnnnnnnnnnnnnnnnnnnnnnnnnaaacgattctcctgtctcagccttccaaagtgctcatctcnnnnnnnnnnnnnnnnnnnncttaaaaggaactagtatattagattgtaatagaactactttctatcccccggagatgataaaaactagtatattagattgtaatagaactactttctatcccccggagatgataaaaagcccctcattttcttaatcttctacttcagtgcttcaatttagtgacaaagctataaatgaagcaaatcagtattgttctttcaaccgtgggtcatttttgtgcaaggtganagtggccatagaagtaaaaggatcaaggacagtctcgagatgaagaaaggcagcaagcactttgctaagaaacgggaaatccatgaggggacataaaaagctgttctgcagcactgctggtgtgagagctggctgccagatggactccttcatctcagtggcagggaggagctgccctgcctgctgacactcagatccattcaaggactggctccaggcctttgtgaagcagacagatcaggcctccagaaaaaacatcgacaacttcctaataaagtagtctgcaccatcatgaatcccctggatggg

SEQ ID NO: 82122 - DNA, 1074 bp, Homo Sapiens
  misc_feature (56)..(56): n is a, c, g, or t
  misc_feature (72)..(601): n is a, c, g, or t
  misc_feature (1015)..(1032): n is a, c, g, or t
ggagaaagcgacagtatcccgtagccgcaggtcgaccagagagccacgaggagctnccaaggggaacgcttnnnnnnnnnnnnnnnnnnnnnnnnnnnnnnnnnnnnnnnnnnnnnnnnnnnnnnnnnnnnnnnnnnnnnnnnnnnnnnnnnnnnnnnnnnnnnnnnnnnnnnnnnnnnnnnnnnnnnnnnnnnnnnnnnnnnnnnnnnnnnnnnnnnnnnnnnnnnnnnnnnnnnnnnnnnnnnnnnnnnnnnnnnnnnnnnnnnnnnnnnnnnnnnnnnnnnnnnnnnnnnnnnnnnnnnnnnnnnnnnnnnnnnnnnnnnnnnnnnnnnnnnnnnnnnnnnnnnnnnnnnnnnnnnnnnnnnnnnnnnnnnnnnnnnnnnnnnnnnnnnnnnnnnnnnnnnnnnnnnnnnnnnnnnnnnnnnnnnnnnnnnnnnnnnnnnnnnnnnnnnnnnnnnnnnnnnnnnnnnnnnnnnnnnnnnnnnnnnnnnnnnnnnnnnnnnnnnnnnnnnnnnnnnnnnnnnnnnnnnnnnnnnnnnnnnnnnnnnnnnnnnnnnnnnnnnnnnnnnnnnnnnnnnnnnnnnnnnnnnnnnnnnnnnnnaagaattcggcacgagggcaaattgaataaagaaaatgtggtacatatacaccacggaatactatgcagccataaaaaacaagatcatgtaatttatgggaacatggatggagctggaggccattatccttagcaaactaatgcaggaacagaaaaccaaatactgcaaggtctaacttataagtgggagctaaacgatgagaacacatggacacaaacaagggaacaacaaacactggagcctacttgagggtggaggctgggagaaggaagaggaacagaaagaaataactattggttaataggcttcgtacctgggtgacaaaataatctgtacaacaaacccccatgacactagtttacctatataacaaaccttcatatgtacccctgaacctaaaataaaagttaacnnnnnnnnnnnnnnnnnngcctacagccgcggccgcaagcttattccctttagttgaggt

SEQ ID NO: 82123 - DNA, 611 bp, Homo Sapiens
ggttttggtttttttctccccgtctgcattcttaggcctcttagctattaggaactgtcagatacatactagtagctaattttcctagcctgaaattatatactgcatctgcactatgtacctactagggatctgacctcaagtgttttctgagcccaggcttcctggtgtggtgtcttttaccacataaaattattacaaattgcaaatgttggtattgtgatttgattatctgtacaaagaaagaagctctatgcagtgagtttgtggtttaatggtcacaaaaatgttagcactgctaccactcagcacgtgtaaaattttttaaatttataaatattaaaattttaaacttacactaagacttttcagttttatttaaagacccagggatgagtgtactgtttaaatatttacctctattaacataactaatgaaggtataaaattgcatttagtttttcagaagatgctgcaatatgattttaggaaataaggctatgtattgagccagttataggctgaatatcaggttgataaaattttatttgtatttttaaaattcataaatgggagttaaaatgtgtcttttcactaaatatttttattac

SEQ ID NO: 82124 - DNA, 1031 bp, Homo Sapiens
  misc_feature (22)..(22): n is a, c, g, or t
  misc_feature (24)..(24): n is a, c, g, or t
  misc_feature (38)..(38): n is a, c, g, or t
  misc_feature (46)..(46): n is a, c, g, or t
  misc_feature (99)..(99): n is a, c, g, or t
ccagttgataatcggacgcatntnggacaagtcgtcgnagtcagtntgttggagcagaacatgttctcatggcagaccatgtgatgatgatgtatatcncgagggatctgcaatgtaggagtgacgtcatgtgtgtgaaagtctagttcatagccaccatcagaaagtcagcaaagtgtgcatcttccttacatattggagaccattcttatgaggaagattgtgtgtcaacgcagcacagatggtcctatgtcatgtgggaagaactgtggattggcgccgatgtgtgtgaaagactgctgcaaaattcttgacaacacagtatacctccagaaactgtgttccaccattcactgtcttctcaggctgcccaggactcttctcaggggagctcccggagtgcactcaggagctgatgattgacgtcaccaagagctactaccagaagtttttgcccctgacgcaagtctagcatctctgcctcatgtcttgaatctgcttgagctctaagatgaacctggggacaaagtgagccagtcagcacctacaaagagcttttgtgtctttgacatctaccaccctcctccttttaaaaaatttctttagaatttctcaatcttcaaggctctaagtgcttaagaattcactaacagacagaccatctggaggagctgtcttcaaatgctgtgcttacaccttatctatgaacagtcactttgtaccattatctgtggaacacagaatcatctgttcccaacactccagccccttggtcctgtggatggctggatcccgcctgaaacggacctgcagagcagcagcacccttccggtgtggaggctatgtagctggtgcgctgctcacggccattcactgcccatgctgagcgcctctcacacaggtaatgcccagcttttctgctgctaacacatttggccagttgttgcagttgctcatcatcttgggaaaggtgtttgtgacttttcagagcccagattcctgttgtctattaaaacttgaagggaggggtg

SEQ ID NO: 82125 - DNA, 1084 bp, Homo Sapiens
  misc_feature (984)..(984): n is a, c, g, or t
ggcacgagggaattctgaaagaactgaccgactgactctgacaggatccggggctgagggaaggaggcggcggccatggagttgggcgagctgctctacaacaagtctgagtacatcgagacggcatctgggaacaaagtcagtcgccagtcagtgttgtgtggaagccagaacatcgttctcaatggcaagaccattgtgatgaatgactgtattatccgaggggatctggcaaatgtaagagttggacgtcattgtgttgtgaaaagtcgtagtgtcataaggccaccattcaagaagttcagcaaaggtgttgcattctttcctttacatattggagaccatgtctttattgaggaagattgtgtggtcaacgcagcacagattggttcctatgttcatgttgggaagaactgtgtgattgggcgccgatgtgtgttgaaagactgctgcaaaattcttgacaacacagtattacctccagaaactgtggttccaccattcactgtcttctcaggctgcccaggactcttctcaggggagctcccggagtgcactcaggagctgatgattgacgtcaccaagagctactaccagaagtttttgcccctgacgcaagtctagcatctctgcctcatgtcttgaatctgcttgagctctaagatgaacctggggacaaagtgagccagtcagcacctacaaagagcttttgtgtctttgacatctaccaccctcctccttttaaaaaattttctttagaaatttctcaatcttcaaggctctaagtgcttaagaattcactaacagacagaccatctggaagagctgtctttcaatgctgtgcttacaccttatctatgaacagtcactttgtaccattatctgtgggacccagaatcatctgttcccaacacttcaagccccttggtcctgttggatggctggatcccggctgaaaacgacctgcagagcagcagcaccccnccggtgtggaggctatgtaactggtgcgctgctcccggccattcactggccatgctgaaccgcctctcacacgaaactggcgggatttgggtccccttgc

SEQ ID NO: 82126 - DNA, 1052 bp, Homo Sapiens
  misc_feature (46)..(47): n is a, c, g, or t
  misc_feature (160)..(160): n is a, c, g, or t
  misc_feature (293)..(293): n is a, c, g, or t
  misc_feature (423)..(423): n is a, c, g, or t
  misc_feature (989)..(1011): n is a, c, g, or t
caattccaccggaaaagtttgactggttcggaattatcgactcctnntgggaattggcctcgggccaagaatcgcgcacgagggtatggcaaagctttgtgatcacaccccacagggagatctgcatgtgggacactgtgagctctgcccagatgacctnttcaggggtaccaccccaactgcttgagagaacagtgtgctgctggcagagatgcatccaagagatgactccgctctggaactcactctcagcccacagggagctgcatgcacccacaggggcaatgcacctntgcaggggtaccttctggccccaaccctggactcaacggggacaactccagaagtcattccagatccagagatccccatcgaactgaaggatcactggttgcagacacattgcaggtcagcttcttcctntgcccagtcctgccctcactccccagtgaatcctcaattttctgtctcgttgtctgtccagataattgattctaagacatgttaggtatataaggagtgtagataaggcttcagccatgagtcaccccccagtaagccccagagtatattgaatagaaattctgcatgtgtggggagaatggacaaggacttaggaaaaagtcctcatcaaagaacagcttttttgggacaagctttacatgggtggggagggaaaatgtgaaacacattagcaataagttaaacctcatcttgtactaaaggaggacacactcagggagaagacctctgtgggcagggcttgtgggtggagcttcatcccgatgtcactcctcaactgacttaggaggacagtcttgctaccccaagtcactacctcactcacctctgagggattttcaggaaatgtcttgactcccccatgtactctgtatgtgagcgaagatggcagtaactgttaaataagcattcttttctacttcttggaatcagatgaaataaaaaagcaggctttatttaagtaatcnnnnnnnnnnnnnnnnnnnnnnncctgagcaggcggccgcaagcttattccctttagttgaggg

SEQ ID NO: 82127 - DNA, 489 bp, Homo Sapiens
cgccactctgccaaaaagtctgttcagaagtttcacatcactagagaagagagaagaaggacatttgtactgggaggagtcgaccggtcccagtaaggagaaagtagctacagcgtcatgggtgagctggtcccccaaaaaggaactttaagggaatggactgaatcaagtctgagatgtccccaaagcaagaccaaagaactgaggaagagaagcattcatcagaaaccaaaattcagctacaagtgagcatccagatggaggtattatgaagaggaactgagactgagggcaaaaggtgccagccagaatcctggataggagagcaagaaccaggacctcatttaagagacaacctgcttaaggcagagtaagcacaaatgggcactcaacatcaatgaagtaacagcaaagtcacataataaaagcatggaattaagacaagctgaagattcggatgcaataaaacaaccacccattattaaaaaa

SEQ ID NO: 82128 - DNA, 734 bp, Homo Sapiens
  misc_feature (510)..(510): n is a, c, g, or t
  misc_feature (513)..(513): n is a, c, g, or t
  misc_feature (539)..(539): n is a, c, g, or t
  misc_feature (561)..(561): n is a, c, g, or t
  misc_feature (572)..(572): n is a, c, g, or t
  misc_feature (600)..(600): n is a, c, g, or t
  misc_feature (666)..(666): n is a, c, g, or t
tgagcggagagcctcagcgtaccgcgcagccatcgaaccacgtggtttaaagcagagtcgggaggagagggcgaccagccaggagacatgggcacgacggtccctatcctggcccaggagtgggtcacgctgggcgccgtcacagagctccagagtagcctctgtgcagcggaggacaactgctccccgacttctgggttcagtcaccacagtgcggacctagcgctcaggagcctctcctacaaataaacccaacaccaatcaaaatggccgccaccagagggcgccggaagtccggacccattgtcacgtgcacacaggaaacgcctttattctgagcccccagagctcttccacgctatcattccaggcggagttttctgggtaatgtagttccctaggcaacaaggagggtaaagggcacaaatcccagaggcgcttctgcaggaaaagcccagcttcacctcaggagtatccttaagatatgcgtcctgactggtatggtggctnctnctgtaattcaccagtttgggaggcangtcagaggatcatttgaggcangagtagagatnagctgagcacaaagaaatcctgtttganggggctgccctcatactatggtatctctcacagctcctgcgaatctggctcgaggcaatccctaangatctataatcgtacagtcaactgtctgggtgattgtacgtccatcaacaaaacagcggacaaaggta

SEQ ID NO: 82129 - DNA, 644 bp, Homo Sapiens
ggggagctctgtgacggcgcccagcgtgacccactcctgggccaggatacggaccgtcgtgcccatatctcctggctggtcgccctatcctcccgactctgcttaaaaccacgtggttcgatggctgccgcggctacgctgaggctctccgctcagggcacagtgacttttgaagacgtggctgtgaaatttacccgggaggaatggaatctccttagtgaggctcagagatgcctgtaccgtgatgtgacgctggagaacctggcacttatgtcctccctggggaaagaaacagtagctccactcctgccggtccctcccctaggggagagggaagcagaggagaaaacagcagcataggtggctggcaaagacaaaggaaagaccagtagaagagaaagaaaccaaaaacagcaagcgcagagccaaacagccaggcaggtaggccaaaggttaagtccctctccccagccctgcggtttgtgaaaaagagggtgggcaccggctccgggaggagagcagaggaggtgaaaaggcgtaattcttgcaatttgcggcaggcatatctgccaagcctctaggctagtgactgcccggggcccagactgcagccacgcaaatcccactcagcccaagaaactacc

SEQ ID NO: 82130 - DNA, 852 bp, Homo Sapiens
  misc_feature (439)..(565): n is a, c, g, or t
aatttttttgagacaggcgtttaatttttcgcctaaggctggacagaggtgagactccccctcaaaacacaaaacacaagcaggcaacttcaaatatccataaacggatgaatgaatatataatgacatttcatggcagactatacttctcagcaatatacaacaaattaacccatgtctacaatgacatcaaaataagcatgatgcaggagagcacccagggattataagaggaaacactttattacatcagtcagaaaattctagaaaatggaaagtattatacagcagagtaaatcaatggttgtctgcatagagaaaaactttataaaggctccaggtgaatacaaaggtgatagattagataaattcattattgtgactctgatgatggtttcatgggattataagaaaattcaagccaggagcagtggctcannnnnnnnnnnnnnnnnnnnnnnnnnnnnnnnnnnnnnnnnnnnnnnnnnnnnnnnnnnnnnnnnnnnnnnnnnnnnnnnnnnnnnnnnnnnnnnnnnnnnnnnnnnnnnnnnnnnnnnnnnnnnnntggttgcctgtagtcccagctattagggagattccattcctcctgggtaaatttcacagccacgtcttcaaaagtcactgtgccctgaacggggaaccttagcgcggccgccgccatgggaccacgtggggtaagctgggttgagagcagcgggcgccgttaaagagctgcagagtcacgtctgtgcaaagagaagaacgactctcgacctcctggatccagtcaccaccacggtcccccggccgtaatggccgaattcccgggcatatgtccggtaccgtcgactg

SEQ ID NO: 82131 - DNA, 686 bp, Homo Sapiens
  misc_feature (411)..(411): n is a, c, g, or t
aaagagcagtgtaagaatagtagatgtgcccttgattctggttaatttcactttggcaatgactcaaagtctgctctcatataagacaaatattcctttgcatattataaaggataaagaaggatgatgtctttttattaaaatatttcaggttcttcagaagtcacacattacaaagttaaaattgttatcaaaatagtctaaggccatggcatccctttttcataaattatttgattatttaagactaaaagttgcattttaaccctattttacctagctaattatttaattgtccagtttgtcttggatatataggctattttctaaagacttgtatagcatgaaataaaatatatcttataaagtggaagtatgtatattaaaaaagagacatccaaattttttttnaaagcagtctactagattgtgatcccttgagatatggaaggatgcctttttttctctgcatttaaaaaaatcccccagcacttcccacagtgcctattgatacttggggagggtgcttggcacttattgaatatatgatcggccatcaagggaagaactattgtgctcagagacactgttgataaaaactcaggcaaagaaaatgaaatgcatatttgcaaagtgtattaggaagtgtttatgttgtttataataaaaatatattttcaacagac

SEQ ID NO: 82132 - DNA, 992 bp, Homo Sapiens
  misc_feature (118)..(118): n is a, c, g, or t
  misc_feature (127)..(292): n is a, c, g, or t
  misc_feature (304)..(304): n is a, c, g, or t
gatgactgtacgctcccgcaccgacgacgagcgagcgatcatgaggagagcgagagcgccatacgcaacgcctctcccggcgttgccgatcataatgcagctgcacgacagttccganctgaaagcnnnnnnnnnnnnnnnnnnnnnnnnnnnnnnnnnnnnnnnnnnnnnnnnnnnnnnnnnnnnnnnnnnnnnnnnnnnnnnnnnnnnnnnnnnnnnnnnnnnnnnnnnnnnnnnnnnnnnnnnnnnnnnnnnnnnnnnnnnnnnnnnnnnnnnnnnnnnnnnnnnnnnntggccctcgagnccaagaatcgggcacgaggagaaatttgaacaaatttaattgaatcttttgtttagcttgcctctaagaacttttcttaataaagctcccaaaacttctcagcaaataaatctcccttaagtaggaaaactagatttcatatttgcttactttgaattaacagcaactttccacaggtaaatctgttcttgcaaagatgtgagcagaatagttaaaaataatatttttatgtttcatggttctaaatggaagccataaatgcagtaaatactatctgttgtttaactactttaatcgtcattttttacattttcaagtttattaggttaagaaaaacagggcagccttggaaggcagctactacagaaaactgcagttttgcgttaaagataaagtagtattttcagctccctgaaaaaccattcctgctgaaactgctgtagaaattgtgaagctgcatgagtggagagtattgaatctgtggttatagtagttttctcaggtttgtttatcttgatgtttgatgcactgtgttttatagttattaaaattgagtaatattatttctatgcagtgttatgtgtcattggccttttgtgaatgtgcatgttttaaactgcaaattttaaacattttgtcctctaattgttattaaaaatgaaataaactttaccattacttaaaaaaa

SEQ ID NO: 82133 - DNA, 1005 bp, Homo Sapiens
  misc_feature (110)..(110): n is a, c, g, or t
  misc_feature (164)..(164): n is a, c, g, or t
  misc_feature (182)..(182): n is a, c, g, or t
  misc_feature (191)..(191): n is a, c, g, or t
  misc_feature (212)..(212): n is a, c, g, or t
  misc_feature (216)..(216): n is a, c, g, or t
  misc_feature (225)..(225): n is a, c, g, or t
  misc_feature (228)..(228): n is a, c, g, or t
  misc_feature (237)..(237): n is a, c, g, or t
  misc_feature (294)..(294): n is a, c, g, or t
  misc_feature (316)..(316): n is a, c, g, or t
  misc_feature (322)..(322): n is a, c, g, or t
  misc_feature (590)..(590): n is a, c, g, or t
  misc_feature (943)..(943): n is a, c, g, or t
  misc_feature (946)..(946): n is a, c, g, or t
ttgatgagaccagctggcagacgtctacagtatgcaacgtcaacagctagaggtgctaacacacccagtacacgcaccagcatcagggtgtgttccacatgagcatcccntcctgtctgccagcacctgcacagagctctccagcccatctcctaacggggctnggggtaagagaatctaantgcgctccnccaacccctcgccctgccatnttcncctcaagcntgntaagtatcncaggcctgtgcgtgtgggaaaaagccagccttggccctgcagcctccacctcgccgntgggggaccaacaggttgctancagctntgcaccccggcatcagcacaggggtccctgccccaccctccggcagctcagggagtgtttcctgtgaggcctcccccatcagtggaccagagggagaagcccgatgccccatcccggctttcccgtaacgcacaggacacgtgtgcaattcataggaacggcccagatcgccctcatgagtgccacctggtacaggtaggtggcgctcacgttcctgcccaaatgcagcccatcggggagtcacagtcagtccccccggcccccctcnccagtccctgttggctttcggtagctctcgcatgcagttctattaacagccgtctagaagcgatgctttagtggcctaacccagggtcaaatacagctctttctagcaaaatcaggcagctctgccccatcggtaggggcaccgattagtctactaacagccagaggtccatctagcagggtgccgggaggagctgagcccccggaggtgggctcctggtgacgggtgtccaagaagcggtttccttgggagcttctgcctccgtgggcctctcagcccgccccgtgtggccgcccgggtgtggctcagccatgtcccctccccaggtccttcattcacccctcccctccccnacnagtggaattgttgaagtgtggcgagtctgtgctcgggacaataaagcttgtgacaggtc

SEQ ID NO: 82134 - DNA, 979 bp, Homo Sapiens
  misc_feature (53)..(68): n is a, c, g, or t
gttaatagaactgccatgcgagaggttaccgaaaggccaccagggaatgggannnnnnnnnnnnnnnnactgactgtgacttccccgatgggctgcattgggccaggaacgtgagcgccaccttaccggtaccagggggcactcatgagggcgattggggccgtccctatgaattgcacacgtgtcctgtgcgttacggggaaagcccggggatggggcatcgggcttctccctctggtccactgatgggggaggcctcacaggaaaacactccctgagctgccggagggtggggcagggacccctgtgctgatgccggggtgcaaagctgtaagcaacctgttggtcccccagcggcgaggtggaggctgcagggccaaggctggctttttccaccacgcacaggcctgggataacttagcaggcttgaggggaagatggcagggcgaggggttgggggagcgcagttagatttctcttacccccagcccccgttaggagatggggctggagacgctctgtgcaggtgcctggcaagaccaggaagggatgctccatgtggcaaacacacccctgaatgcctggctgcgtgtacttgggtgtgtatacgcacctctaggctgtaggaacgtttgcagtatctgtaggcacggtcctgccaggcctgggtctcagtcccagaaaccaagtatgtgtctctgtgtggcctgagcatggttcacagcaaacgccgccacccacacggtcatgcgtgcacacgtggtccctctgtgtgtgtgtgaacgtggtgtgtacataaggacccacttagctgcatctccaggtggatgcagatattttggaacatctggtcaaccccaggggaaaccgtattactgacctttgtcaaacctgcctagagcctccactctgagctgcctctgccctgggctccgagccagggtttgcccaaggtcacggtgggaggtgaggagagggg

SEQ ID NO: 82135 - DNA, 1388 bp, Homo Sapiens
  misc_feature (42)..(42): n is a, c, g, or t
  misc_feature (55)..(55): n is a, c, g, or t
  misc_feature (77)..(77): n is a, c, g, or t
  misc_feature (104)..(104): n is a, c, g, or t
  misc_feature (129)..(462): n is a, c, g, or t
ttaaggggccgagcttttgaaaaccccagcacgccgcctttnacgtctgggcctntgctgcctttgctcacatgtcnttcctgcgtatcccctgatctgtgatnaccgtataccgcttgagttgagttnnnnnnnnnnnnnnnnnnnnnnnnnnnnnnnnnnnnnnnnnnnnnnnnnnnnnnnnnnnnnnnnnnnnnnnnnnnnnnnnnnnnnnnnnnnnnnnnnnnnnnnnnnnnnnnnnnnnnnnnnnnnnnnnnnnnnnnnnnnnnnnnnnnnnnnnnnnnnnnnnnnnnnnnnnnnnnnnnnnnnnnnnnnnnnnnnnnnnnnnnnnnnnnnnnnnnnnnnnnnnnnnnnnnnnnnnnnnnnnnnnnnnnnnnnnnnnnnnnnnnnnnnnnnnnnnnnnnnnnnnnnnnnnnnnnnnnnnnnnnnnnnnnnnnnnnnnnnnnnnnnnnnnnnnnnnnnaagaattcggcacgaggaatcttattaaaaagagaaagtcctccccgactttatctttttccgcccagaatccgataaggaagacttgttctggccccctcagctctctgacctcatctaccagaggagagagtgggatcctctaacactcgagccgtcatcccagcactaggggacagtgaccagtgtggctcccgtggccagaaccattctgaagtttgggttgccctgtggtcttcgccttcaaagcaggccgccacttgaatccttctggaacggacagtgttgctgtaaacgccgcggaatagtatcttctaagtattcgtagcttctttcttgagggatctcgggaacgttccgtgtattaaccactaacgtattccaaagttaacttcgtggtaaagtcgctggggaaaaaaataactgctccagttccacaggtgattgaaacaaaagtgatctgtttcccaaacttccttgatggtaaagaatgacttggggtactaattaaaaataaaaataattgcgtcatttccaacctactaaatccgagtctttaagggcaggtcctgggaagccatccatgtaatgggggtcctaagtgggctcttatcggcgagggcggggactcagcgagagggctggcagcgacgggacaaaccccagacggctgcgcggatgcgtttgttcctggagcttgcgagcacttgcaatgcatggacacctccacagggtggtggcctgccaccacgagagcaccagctccgccagcgtcctctccagaggacactttagagcagaaagaaacggacagttcagtcttcccctcagcttgaaggcagcattcttttgcttctctttgagtcaggtaattgttttgtcttccttccactcagtcagcaggtattaaacagcaaccgcattgc

SEQ ID NO: 82136 - DNA, 874 bp, Homo Sapiens
  misc_feature (307)..(317): n is a, c, g, or t
  misc_feature (861)..(861): n is a, c, g, or t
tctggttgtttctgtttctgagtggaccaacagcagcacccacgaggatttgttttgagtatggagctgttgcgggtttgctcctttttcttgctttgcgtgctcagtttttacagactgtaaaggagatgtgttgtttgtgaagatggagcagagtcaaatctgtgcttctaactgagatgagagtgtattaatcacgtatcgcagggctccagctgttttagaagccacatcatgttaaacattaactggtttggattaaaagaacattaatattataatacacatatcttagtggtaaacagcnnnnnnnnnnnaaggtcagattgcctcaggtttagaaagaggctgagaaatcaaatcttgaacacaatcaacttacatattttaaaggaatctgcctcaaatgagaaaatatgctagttatctagatagaggaaagagatatttacttttttaaaaattaaaatagttatgaaatctggcagaaaaggtaaagcctagaagaaactatgaaagctattctcatgttaccaaattctatctgcgcatatgtttttgtataacatttcggtgacagtgggagtcggttccctttcccaacctgcagagactatcttccaatacagaatctgtctatttatgcttgtgtttacaaactgtatttgttgggtttgggtttttgttttctttggtggcatttttcaggtcactttgcttctataacaaaggtaattgttttcaaataatttgtcttcaccttttcctgtatttgtacatagtgattcagtattagagaaaagtgcattgtttctgtcatatttccaatctgtgttggtgctcatttgagaaaataaaagnttttcaaatatta

SEQ ID NO: 82137 - DNA, 1690 bp, Homo Sapiens
  misc_feature (219)..(667): n is a, c, g, or t
  misc_feature (723)..(785): n is a, c, g, or t
  misc_feature (1103)..(1127): n is a, c, g, or t
  misc_feature (1328)..(1385): n is a, c, g, or t
cgtgggtaaggggtgtcaccaaccagttgcggagcctacccgaatagtcctaaggtagtttgagaagcgccccctcccgaggggaagccgacaagttccgtaacggcaggtcgaaccggggagccacgaagaactcccaggggaaaccctgtattttttaatcctttcggtttcccacccctgaatagacgtcgatttttgatggtcgtcagggggccnnnnnnnnnnnnnnnnnnnnnnnnnnnnnnnnnnnnnnnnnnnnnnnnnnnnnnnnnnnnnnnnnnnnnnnnnnnnnnnnnnnnnnnnnnnnnnnnnnnnnnnnnnnnnnnnnnnnnnnnnnnnnnnnnnnnnnnnnnnnnnnnnnnnnnnnnnnnnnnnnnnnnnnnnnnnnnnnnnnnnnnnnnnnnnnnnnnnnnnnnnnnnnnnnnnnnnnnnnnnnnnnnnnnnnnnnnnnnnnnnnnnnnnnnnnnnnnnnnnnnnnnnnnnnnnnnnnnnnnnnnnnnnnnnnnnnnnnnnnnnnnnnnnnnnnnnnnnnnnnnnnnnnnnnnnnnnnnnnnnnnnnnnnnnnnnnnnnnnnnnnnnnnnnnnnnnnnnnnnnnnnnnnnnnnnnnnnnnnnnnnnnnnnnnnnnnnnnnnnnnnnnnnnnnnnnnnnnnnnnnnnnnnnnntggcccttgaggccaagaatttggcacgggggttggagccgccccggctttaggcnnnnnnnnnnnnnnnnnnnnnnnnnnnnnnnnnnnnnnnnnnnnnnnnnnnnnnnnnnnnnnngacttttcaacattttattcttatatttgtacagctatattttacaacgcggtaatgcagtttagacacagccaaaccctgtctccggagtagttataacacaagcatgacgcagaatgggatgagacaaacattcccaaagagagtttagttagtaacaacttcaagtccctgtgtctgcctacacttcaaaaagggatggtgcacgctcgcccatcattgaaaacttccgtgaaaaaaggcaccgtgaggacacgttgtacgggtatatacaaactgaaaactagaacaaaattacacatttttccttctgcagannnnnnnnnnnnnnnnnnnnnnnnnaatacacactttgtaaattgtaaaccttcacttgcaaaaaaatacaaatacactgaggcattttagacaaaatattttcttacttatacagatgcaatacttaaaatattctcttaagtgctctttctcaataaagattctcagatccgtgtctgcctgcagatacaaaatcgagcctttaacgcagttttatattgttannnnnnnnnnnnnnnnnnnnnnnnnnnnnnnnnnnnnnnnnnnnnnnnnnnnnnnnnnttacaactctgccatatattccttcacctttggttaaaaaaattaaagccctctctttgacaacatactgaagtcttgtcttttaaaagaatgcacatttacatacaaaagaaacatctgttcccacaaaacatatacattcctcattttgcagactaaagtcaagtcagaacttttgcatactcccctgctttgacatataaaatgattttgctttttgctgacatggttcaccttacacataggagaagaagcaatatgattttcttaatgttttatggcagtgggggagggggagctgctgc

SEQ ID NO: 82138 - DNA, 400 bp, Homo Sapiens
  misc_feature (50)..(74): n is a, c, g, or t
atttgtatttttttgcaagtgaaggtttacaatttacaaagtgtgtattnnnnnnnnnnnnnnnnnnnnnnnnntctgcagaaggaaaaatgtgtaattttgttctagttttcagtttgtatatacccgtacaacgtgtcctcacggtgccttttttcacggaagttttcaatgatgggcgagcgtgccccatccctttttgaagtgtaggcagacacagggacttgaagttgttactaactaaactctctttgggaatgtttgtctcatcccattttgcgtcatgcttgtgttataactactccggagacagggtttggctgtgtttaaactgcattaccgcgttgtaaaatatacctgcacaaatataagaataaaatgttgaaaagtccaaaaaaaa

SEQ ID NO: 82139 - DNA, 932 bp, Homo Sapiens
  misc_feature (825)..(847): n is a, c, g, or t
tgtagagacgacgtctcactatgttgcttcatttaacaaataaggggaggaagggcgggggcagaatggaggacacagactagagttcagcttttacaagtggcaaaggacaatttggattcggcctcccacagcttcatttgtaatgctttcaagacatcttccatctgtgttagagacttttctatttcaactctgctttcaagattaaaaagctctttatcttctgacacaatttgcttttcagaggaccctaaaacataactttcaatggcttcaacactgaggcaaaacaagtctctcttgtaatcaagattcttgggcgtgcatctgtacacgtagccaagattgagtgagcaccccgcgcagcacaaagtctcaaggacgcaaccattttccttttcacgtttggatagcttctgttccttatccacagaaacattacaggaaacacagcgaagcaggatgcagttggtgtcctcctggctggccacccagctcagcgagtcgcccagcggccgccggcagccggagcacaggaacaccagcggcctctcctccgcagccgccgcctcctcctccagctgcgccctctccatgtcggccaccgacgcgtcttcgctcatggagctccacatgctcgcccacttctgcaacagctggtggcggctcgagtcttcggagagtctcttgcccaacagcgaggagtcgctgcatttgcccttgtcgccgcactcacagccgccagcgcatcctctgatacacctcagtgaccgaacgcctgccattacctacaaatcgcccgcgccccagagcgccatgggnnnnnnnnnnnnnnnnnnnnnnngcctacagccgcggccgcaagcttattccctttagtgagggtaatttagcttggcactggcctcgataaaaaacaacacaacaca

SEQ ID NO: 82140 - DNA, 1001 bp, Homo Sapiens
  misc_feature (83)..(83): n is a, c, g, or t
  misc_feature (159)..(162): n is a, c, g, or t
  misc_feature (171)..(171): n is a, c, g, or t
  misc_feature (183)..(183): n is a, c, g, or t
  misc_feature (206)..(206): n is a, c, g, or t
  misc_feature (243)..(243): n is a, c, g, or t
  misc_feature (913)..(943): n is a, c, g, or t
gcggcatcagttaagcttagaggatcctagcaagtggtcctttcagccaccctgacccacacttgtcccatcagccatcccanactacagccgcgatcctatctcttccatcagtcgtttcccactgtccttttccacgccacagtccagccccccaannnnccatcttcnccaaggagcacntcagcttctccacaccacgttcnccacagacagttccccacatcctggactgtagctgcncagccaaaccccatggacaaaggcatttgccagcccggaccagaattcaatgctttctcagcttgctagcaatccaggcatggcaaacctccatggtgcaagcgccacggacctgggactcagcaccgataactcagacttgaattcaaacctctcacagagtacactagacatacactagagacaccttgtagtattttgggagcaaaaaaattattttctcttaacaagactttttgtactgaaaacaatttttttgaatctttcgtagcctaaaagacaattttccttggaacacataagaactgtgcagtagccgtttgtggtttaaagcaaacatgcaagatgaacctgagggatgatagaatacaaagaatatatttttgttatggctggttaccaccagcctttcttcccctttgtgtgtgtggttcaagtgtgcactgggaggaggctgaggcctgtgaagccaaacaatatgctcctgccttgcacctccaataggttttattattttttttaaattaatgaacatatgtaatattaatagttattatttactggtgcagatggttgacatttttccctattttcctcactttatggaagagttaaaacatttctaaaccagaggacaaaaggggttaatgttactttaaaattacattcnnnnnnnnnnnnnnnnnnnnnnnnnnnnnnntaaaataccagttttttttctctgggtgcaaagatgttcattcttttaaaaaatgttt

SEQ ID NO: 82141 - DNA, 616 bp, Homo Sapiens
  misc_feature (499)..(544): n is a, c, g, or t
  misc_feature (598)..(598): n is a, c, g, or t
gcggccgcttcctgcgcatccgccagacggtcaaccgggggcctggcctgggctccacgcagggccagaccattgcgctgcccgcgcaggggctcatcgagttccgtgacgctctggccaagctcatcgacgactacggagtggaggaggagccggccgagctgcccgagggcacctccttgactgtggacaacaagcgcttcttcttcgatgtgggctccaacaagtacggcgtgtttatgcgagtgagcgaggtgaagcccacctatcgcaactccatcaccgtgccctacaaggtgtgggccaagttcggacacaccttctgcaagtactcggaggagatgaagaagattcaagagaagcagagggagaagcgggctgcctgtgagcagcttcaccagcagcaacagcagcagcaggaggagaccgccgctgccaccctgctactgcagggtgaggaagaaggggaagaagattgatcaaactgaatgaaaccccnnnnnnnnnnnnnnnnnnnnnnnnnnnnnnnnnnnnnnnnnnnnnngaaaatatactgtacagaaagagagaaaatagactgtttctcccccggaagganctgaaaaaaatgccgtgt

SEQ ID NO: 82142 - DNA, 1303 bp, Homo Sapiens
  misc_feature (61)..(90): n is a, c, g, or t
gtgccaagctaaaattaaccctcaactaaagggaataagcttgcggccgcggctgtaggcnnnnnnnnnnnnnnnnnnnnnnnnnnnnnnaaagaattatttaagaaatctgggattacaattttatttctgttataagttttaaaagcaatcaatcatccatcagagataggcacaccaaaatgcactcagtaatggtataaccaagatgcagcagcagaaaacaaatacattaagcatgaagccgaaaggttcagtttctttacctctccatttcttagttcaatttccttgcttaaaaggtttaaggtaaggtgacggccttcatccagggaattccacttctgttgcatggccaaagcattggcctctctctgaagaagtaatgagttgctcttggcctgctgaagttcaaggctcaaaaggtccccagtactggaatgctttctatgaccagataaatcagtaacaatgaatctgtccctttcaacatagtgtgctgatgatgtggcctcgttgccatatgaactccacctgatacactgatgggcttagtcgcacttcctggggaagcaggggcctggacaggatctgtggtatggtaacctgtacgggaagatctggaaatcgcaccccaattttgagatgatgggtccatcactaaagggaattattggatcttcttctgttgtccttctctgggtttcaaataaatgtactcttctcttaacatcaccactgtccaggtccattaacacagcatttgaattagcaatgacatctttgggctctgaatcaatggcatttatacaggagcctatggtgccacaagaccagggagaataatgggaaagatgatcttcttcaaattttgtaccactcacactctctgagaaatccgcacgaaagtctacactgaacagaggagaaggtggtgttggtgactgtgttgccacaggaagagttgaagagacaagaggtgctttctgagtgtggtactgtgcccactgatctggctttcttcttatctgctcctcgcaactggtcttcaaatgaccacaaggttcccttggtaaaggcacagttgtccttggctcacttggtggctgacaagccaccgaataatatccatctaatgagttatatctttcccgcaaagatgtatgatagacagatgagtgcatcacatccattggaggtaaagaattgcttctaataatgtcatctcgttggtacataggtgggcgccagatgcgcctgctgtcgtacacaggagcatacattccagaaggtccaggtatga

SEQ ID NO: 82143 - DNA, 1102 bp, Homo Sapiens
  misc_feature (50)..(50): n is a, c, g, or t
  misc_feature (108)..(108): n is a, c, g, or t
  misc_feature (110)..(110): n is a, c, g, or t
  misc_feature (121)..(539): n is a, c, g, or t
  misc_feature (1027)..(1042): n is a, c, g, or t
cagaggactccaggggaacgcttgttctatagtctgtccgttcgccactntgacttagctcgatttgggatctcgtcagggggcggacctatgaaaaacgccagcacncngccttttacgnnnnnnnnnnnnnnnnnnnnnnnnnnnnnnnnnnnnnnnnnnnnnnnnnnnnnnnnnnnnnnnnnnnnnnnnnnnnnnnnnnnnnnnnnnnnnnnnnnnnnnnnnnnnnnnnnnnnnnnnnnnnnnnnnnnnnnnnnnnnnnnnnnnnnnnnnnnnnnnnnnnnnnnnnnnnnnnnnnnnnnnnnnnnnnnnnnnnnnnnnnnnnnnnnnnnnnnnnnnnnnnnnnnnnnnnnnnnnnnnnnnnnnnnnnnnnnnnnnnnnnnnnnnnnnnnnnnnnnnnnnnnnnnnnnnnnnnnnnnnnnnnnnnnnnnnnnnnnnnnnnnnnnnnnnnnnnnnnnnnnnnnnnnnnnnnnnnnnnnnnnnnnnnnnnnnnnnnnnnnnnnnnnnnnnnnnnnnnnnnnnnnnnnnnnnnnnnnnnnaagaattcggcacgaggagcaaagctgtcaaataagctactatatcagaagggacataaactgaactagtgccattctgacacacaggatcagaaactcctaaaatcacatattcctgaatactgctatcagcaataccactgagactgattcactgctatgttatggtgatgatttgacatgatccattctccttaactaaagctttagcttctgtggttgtctgaggttttggtggccattctggatcaaccaagagctcctgcgccagatacatgtactttgcctttggtgtcttctttctacagcccagggcccagggtaagcagcattttccccaccgatccactgactcctccactgtgatagacacaaaggcattgacaagaacaatgatgagcatagttacacgccactgatatggtacacacactatctgaagaacctggtcaacagaggcaactggatccaacatgatgaataatatnnnnnnnnnnnnnnnngcctacagccgcggccgcaagcttattccctttagttgagggttaattttagcttggcac

SEQ ID NO: 82144 - DNA, 1061 bp, Homo Sapiens
  misc_feature (36)..(36): n is a, c, g, or t
  misc_feature (136)..(136): n is a, c, g, or t
  misc_feature (163)..(163): n is a, c, g, or t
  misc_feature (180)..(180): n is a, c, g, or t
  misc_feature (186)..(186): n is a, c, g, or t
  misc_feature (216)..(216): n is a, c, g, or t
  misc_feature (359)..(359): n is a, c, g, or t
  misc_feature (999)..(1017): n is a, c, g, or t
agatgtgtcgctgacccccaagccaaccacattgtntccagtgcacagtagtgccatctttgttgtgacgtgtgttctcggacacgcagcctgtacacacctggctggagtcatgggatgacagattggggtgcanccagctgcgccaatccatatgcatgcntgcctgggaccgcttcncactgntgcgtcaccatgtgcgagcacagccaaccncagtgtccagagcatgcccatgcccaccctggtacccagtccagaggtccgccaccacacagccccagtggaggctgtctccctggggctccccagtgctctgccctggctgtggggtggaggaccttgccaggatgaacccnccagtcccaggcaccctctagctccctcagccgaacagcaccctgcatctgggggattgaagcagtcgctgacccccgtccccagcgggcccgggccctcactccctgaaccacacggggtttatttgcggatgttccctggagaggtcgctttgtgaagaaaccatcagcaggctgtgagcatcgccaggctgctgtgggggcgggagcagcctcagtgtcaagggcccgcccactgacccagccgtacctattcgtccacggtgccccgtagcagcaggtcctgcggccaaatctgtctcccttcatgggcctcccagggaaggaggaagccctgctgtgcagacacctctgtggccccccaggagtgtgagtggcctggggagggggccgtggcactgaggccgaaagtgcctgccagacggcacggtctgggtgcgggtgttccctgtgagcccgagtccgcttcaggaggggagcctgcaggtgccggctggtgaggggatgacgcgctgtgggtgggaggaggcagcgcccatctcagcagcaccaggactgcctgggactccctggcaacccagcaccggggaagccgtcagctgctgtgacaataaaacctgccccgtgtctggagcgcagnnnnnnnnnnnnnnnnnnncctgagcaggcggccgcaagcttattccctttagtggaggttaa

SEQ ID NO: 82145 - DNA, 532 bp, Homo Sapiens
tcttcgggggcgtccttatgaccctgctgggactcctgggcagcctgttcttcctgggccaggccctcatggccatgctggtgtacgtgtggagccgccgcagccctcgggtgagggtcaacttcttcggcctgctcactttccaggcaccgttcctgccttgggcgctcatgggcttctcgctgctgctgggcaactccatcctcgtggacctgctggggattgcggtgggccatatctactacttcctggaggacgtcttccccaaccagcctggaggcaagaggctcctgcagacccctggcttcctaaagctgctcctggatgcccctgcagaagaccccaattacctgcccctccctgaggaacagccaggaccccatctgccacccccgcagcagtgacccccacccagggccaggcctaagaggcttctggcagcttccatcctacccatgacccctacttggggcagaaaaaacccatcctaaaggctgggcccatgcaagggcccacctgaataaacagaatg

SEQ ID NO: 82146 - DNA, 1285 bp, Homo Sapiens
tccatccccccagttgtggagtataggctgctcaccctttcattgccgaggttcctacctcatggacagaacaaacacctcagcaatgaaacctgttcatgtctaagagcagctgggctgggaatcttcccctttgttcaaggccttccagtaaggcccagctgtccccttgctgtgcatggggctctggggagttccactctttgatggagggcagaggccctgagtgcaaactccctgggaagagtcccatgctaacatgtgctcaaaggagccctcctctcacatctcagcgaccaagaaccccaatccctaatcagagctctgcctctgccccacatggggccctaccccacttccaggaagcacagcagcctctgaccctagccctgccctggcagcatgggacctgccaacagctgagggtggcagcagtctgtgctggaatctgtgcccggatctgtgcccattctcttcagtaaggctggagctgcgagccagtttgctgccctcccagatcctgtgtccattctgaagaatggggacacctccctattacagatgagaacagaggggacatgaactccttggagggcagggctgggaagggaccctgggctgtgtctcctccctgtaccgtgtcaactccaagagctggcaccaggccgggagggctattcccatattcctcacagctggcttgtaaggcaggagctggcccaggccacagcacctgctggggtgggaaagggccccagcgtgacctggctatgggtgccactggagctagaacagccctcctgcaaccagggctggcgacagcccagaagtgcccacacaggactgggccctccgcaggggacttcagagcagcaaggccccagctggcagtagcctgaccatctggacacagcagagccagggcggcccagggacggcaggagagctcgcggcaccttcctgaggccaagcaaggggagcagggttagggctgttcctgaaaggcagagagcctctgccctgagcctcacagctactcttctcagctctctgggtctggaaggagaacaggctgaggggagctgagaggagctgaggtgctacccggagccccattcacccccacctgcccacttgggaatctgaggcagaggagggtgaggcctgtgtgccaaccttgttcacataccaccttcgtccccccaggccccggccccactcctggctctcattatttttatgttaaaactttgaagaaattgaacatgacctgttgaagaaattg

SEQ ID NO: 82147 - DNA, 983 bp, Homo Sapiens
  misc_feature (14)..(14): n is a, c, g, or t
  misc_feature (65)..(65): n is a, c, g, or t
  misc_feature (77)..(78): n is a, c, g, or t
  misc_feature (81)..(81): n is a, c, g, or t
  misc_feature (149)..(149): n is a, c, g, or t
  misc_feature (161)..(161): n is a, c, g, or t
  misc_feature (164)..(164): n is a, c, g, or t
  misc_feature (170)..(170): n is a, c, g, or t
  misc_feature (234)..(234): n is a, c, g, or t
  misc_feature (314)..(314): n is a, c, g, or t
  misc_feature (337)..(337): n is a, c, g, or t
ccagaacagttgcntgatcgattatcgactccttaggattgcctcgagccagatcgcacgagggnaagacaacaccnngtnggaatggcagagactgatggcactataaaaatgatatcacatgccataaacatatggatatatcaccntatcatgagtcntgngtgatntaattgctattcctgatgtatggagctgagtctgttcacagaaacctgcaaggtaaattaactnatactaaggaatggtgagcatatggagcaaacagaaactttgtgacctgctggtgggtgtgtaaattggtataatcattntggatgatagcttggcgtatttnactgaaattgatacatgccctgcaacctagaatttttactcccagttgtatacctaaaactgatgtgagcacaggtgctctaagcaatatgtataaagctgttcatagcaccatttttcttaatagccccaaactgaaacagcccaaatgtccattataaatagaaattgataaattgtaacattttgtacaatattatatatcaatgaaataagcaaattacagcagtatgccacaatgtggattgatttcatgaatatacgtgaaaaacagcacagaagaataccatacactatgtgattttaattttataaagttcaaatataggcaaagcaaagcaatagttttatttacacttctgtagataaaaactgtattatacacatgcatatatatgaatgcttaggtggtaaaattataaaggagagtaaagaaatgactgcattatattaagactaatggctacttttcaaagggagggagaggctggtgatgggaaagggccatgagtggagtatgtaaggtgcttccaatgtaatatttcttggcctatgtggtgtttgctttgtgataaatcagtaagctgtagttctttgtttttgcacttttcataagtataatacctaataaacatttaaatatttaa

SEQ ID NO: 82148 - DNA, 2107 bp, Homo Sapiens
ggacggccagtactataacggttctaaggtagcgaggcctgggtggcgaattcggcacgaggcctcgtgcctggccacaggacaggaggtggccattaagcagatgaatcttcagcagcagcccaagaaagagctgattattaatgagatcctggtcatgagggaaaacaagaacccaaacattgtgaattacttggacagttacctcgtgggagatgagctgtgggttgttatggaatacttggctggaggctccttgacagatatggtgacagaaacttgcatggatgaaggccaaattgcagctgtgtgccgtgagtgtctgcaggctctggagttcttgcattcgaaccaggtcattcacagagacatcaagagtgacaatattctgttgggaatggatggctctgtcaagctaactgactttggattctgtgcacagataaccccagagcagagcaaacggagcaccatggtaggaaccccatactggatggcaccagaggttgtgacacgaaaggcctatgggcccaaggttgacatctggtccctgggcatcatggccatcgaaatgattgaaggggagcctccatacctcaatgaaaaccctctgagagccttgtacctcattgccaccaatgggaccccagaacttcagaacccagagaagctgtcagctatcttccgggactttctgaaccgctgtctcgagatggatgtggagaagagaggttcagctaaagagctgctacagcatcaattcctgaagattgccaagcccctctccagcctcactccactgattgctgcagctaaggaggcaacaaagaacaatcactaaaaccacactcaccccagcctcattgtgccaagccttctgtgagataaatgcacatttcagaaattccaactcctgatgccctcttctccttgccttgcttctcccatttcctgatctagcactcctcaagactttgatccttggaaaccgtgtgtccagcattgaagagaactgcaactgaatgactaatcagatgatggccatttctaaataaggaatttcctcccaattcatggatatgagggtggtttatgattaagggtttatataaataaatgtttctagtcttccgtgtgtcaaaatcctcacctccttcataaccatctcccacaattaattcttgactatataaatttatggtttgataatattatcaatttgtaatcaattgagatttctttagtgcttgcttttctgtgactcaactgcccagacacctcattgtacttgaaaactggaacagcttgggaatgccatggggtttgataatctgccagggacatgaagaggctcagcttcctggaccatgactttggctcagctgatcctgacatgggagaacaaccacatttttctttgtgtgtgcttctagcagctgttcgggaggaccgtgacccaacagtgttcccatgctgtttcttgtgaaatgctctcggctatgtagcagcttttgattccctgcataccctaggctgctgcccctatcctgtcccttgtttataacattgagaggttttctagggcacatactgagtgagagcagtgttgagaagtcggggaaaatggtgactacttttagagcaaggctgggcatcagcacctgtccagctctacttgtgtgatgtttcaggaactcagcccctttttctgcctaggataaggagctgaaagattaacttggatcttctaatggtccaaatcttttggtcacaataaagagtctccaaattagagactgcatgttagttctggatggatttggtggcctgacatgataccctgccagctgtgaggggaccccgtttttaagatgcatggccaagctctctgcaaatggaaatgcttacactgggtgttggggatgtttgctacctcctgctatttttgtggttttggttctcccactatggtaggacccctggccagcattgtggcttgtcatgtcagccccattgactaccttctcatgctctgaggtactactgcctctgcagcacaaatttctatttctgtcaataaaaggagatgaaaatattatattggaaa

SEQ ID NO: 82149 - DNA, 984 bp, Homo Sapiens
  misc_feature (117)..(117): n is a, c, g, or t
  misc_feature (137)..(137): n is a, c, g, or t
  misc_feature (228)..(228): n is a, c, g, or t
  misc_feature (239)..(239): n is a, c, g, or t
  misc_feature (244)..(244): n is a, c, g, or t
  misc_feature (467)..(483): n is a, c, g, or t
gatagtcatcatagcacccagcttacattatgtccggctctatgtgttgaatgtgagcgatacatttcacacagaacagttgacatgatacgattatacgactcatatagggattgnccctcgagccaagaatcgcnacgaggattactttatctttttttaaaaacactcatgacagaaaacagttaataatatctcattctaaataaaaacactggttgcaggtcnttcaggatgcntattntgccaagaaacttcagtatacaggttagaaatatgcttttgtttttgaacaataatatactggtttgctttaaagaagggactaaatatgacttaaaagagacttcaaaatattgagtattttaaaaatttaaaagtaggtcagtttataacgagtaaatacctaacacaccaagaatgtgcagtgaacctcaggcatttaagacacctcccccaccgaccgnnnnnnnnnnnnnnnnnaaataaagtgtggtcccaaaacaagccaacagctgtatatctcaaaagttaacccaagacaactctgatatttaggttatttgttgagactcattggtactgactggcaagtattctgctttaaagtatcatgtattaaaatgtttagacagcatgtgttttaaagtgataaatgcaaaatgttaagtttgaaatggttaacagtaaattattatgttagtttccaggcacttgaactgtgctacaagtaggggaaaacctactttaaagtatggtaaatgtgtgttttaaacttcctatcaagtgacatacttcatttgattttttgtttaagaagccatggtacttttttcttgagttactttggatatgttttttcaatgccatctgaagattttgtaattgagtagcagtaaatatacagatttacaatgttttaactacagttcatgaatagctggttgtgtaaaactaataaaaaactagactttcacatgtaaa

SEQ ID NO: 82150 - DNA, 651 bp, Homo Sapiens
  misc_feature (130)..(157): n is a, c, g, or t
  misc_feature (537)..(537): n is a, c, g, or t
actaaatatgactttaaagagacttcaaaatattgagtattgtaaaaatttaaaagtaggtcagtttataacgagtaaatacctaacacaccaagaatgtgcagtgaacctcaggcatttaagacacctnnnnnnnnnnnnnnnnnnnnnnnnnnnnaatcaaagtgtggtcccaaaacaagccaacagctgtatatctcaaaagttaacccaagacaactctgatatttaggttatttgttgagactcattggtactgactggcaagtattctgctttaaagtatcatgtattaaaatgtttagacagcatgtgttttaaagtgataaatgcaaaatgttaagtttgaaatggttaacagtaaattattatgttagtttccaggcacttgaactgtgctacaagtaggggaaaacctactttaaagtatggtaaatgtgtgttttaaacttcctatcaagtgacatacttcatttgattttttgtttaagaagccatggtacttttttcttgagttactttggatatgttttttcnaatgccatctgaagattttgtaattgagtagcagtaaatatacagatttacaatgttttaactacagttcatgaatagctggttgtgtaaaactaataaaaaactagactttca

SEQ ID NO: 82151 - DNA, 1387 bp, Homo Sapiens
  misc_feature (323)..(338): n is a, c, g, or t
  misc_feature (578)..(606): n is a, c, g, or t
  misc_feature (858)..(858): n is a, c, g, or t
  misc_feature (860)..(885): n is a, c, g, or t
  misc_feature (941)..(1316): n is a, c, g, or t
  misc_feature (1320)..(1320): n is a, c, g, or t
  misc_feature (1342)..(1342): n is a, c, g, or t
cctggaaggaagcaaatttaattttcttttcctctttgacacctttcttccctgtccaaagggaggttcttaattgaagtctgtgaggggagcgctccatctctttatcaccaagtggcctcagtacacagaacgctcgctttttattgtagattataccttccttttcccccttggctctggaaaggataagtgattacaattttgttatcttctaaattaaaaagaaggtgaagttgactgggctggagccatctgcacagcagtttgacaactggggcgacaccataatactgggcaattttttgcacaattcaaaagcnnnnnnnnnnnnnnnngccaaggaatcagtttaacaaacatcctactcttgctgaaaataatttcttttcccaactcttctaggaataaaacacttttaatgtatttgtcaggaatcgacacttcatttaataggatttaaaaagtgacaatttaaagagcaattgagaagagtcccacatccatcatggcttgtgcttctaactaaaatcaaaggaatgaaagcagaaaaagcactgagaaaatggtaaaacggnnnnnnnnnnnnnnnnnnnnnnnnnnnnnagagggagagacggtgggggcggggggtggttcatagctgcttcaagtccaaagtgctcacaacggctcctgtgagactgccctgctgggtgctggctgcacggacacagctgctgcccggcacacaccctacctgccctacactctcagtccaccccaaatgaccctccccagagctgccagaaggtgactttgaaggcttttttccccaaaagctccaatgaagttgcctttctactctccaaaaaaaanannnnnnnnnnnnnnnnnnnnnnnnnngcctacagccgcggccgctccaacatcagaatggtaaccctcgtgccgaattcttnnnnnnnnnnnnnnnnnnnnnnnnnnnnnnnnnnnnnnnnnnnnnnnnnnnnnnnnnnnnnnnnnnnnnnnnnnnnnnnnnnnnnnnnnnnnnnnnnnnnnnnnnnnnnnnnnnnnnnnnnnnnnnnnnnnnnnnnnnnnnnnnnnnnnnnnnnnnnnnnnnnnnnnnnnnnnnnnnnnnnnnnnnnnnnnnnnnnnnnnnnnnnnnnnnnnnnnnnnnnnnnnnnnnnnnnnnnnnnnnnnnnnnnnnnnnnnnnnnnnnnnnnnnnnnnnnnnnnnnnnnnnnnnnnnnnnnnnnnnnnnnnnnnnnnnnnnnnnnnnnnnnnnnnnnnnnnnnnnnnnnnnnnnnnnnnnnnnnnnnnnnnnnnnnnnnnnnncganggaagacattgagcaaaagcancaaaggggcagacgtaaaaggcgcgtgctggggttccacaagtcc

SEQ ID NO: 82152 - DNA, 391 bp, Homo Sapiens
ttcaggaatcgacacttcatttaataggatttaaaaagtgacaatttaaagagcaattgagaagagtcccacatccatcatggcttgtgcttctaactaaaatcaaaggaatgaaagcagaaaaagcactgagaaaatggtaaaacgggtgtgtgtgtgtctataactatttactatgtattcctctataaatctgtttcaaagtattctaaaatttgcttatttcatattatgtttatatcattatactttttgctgccttttgacaaaggcacttccttatacatctttcccactctcttatccttttaaatccttaatatccttgtcacttgtagctgaaatacatgcaaagcctttgaaaggattgggggctgtggtatagatatag

SEQ ID NO: 82153 - DNA, 1168 bp, Homo Sapiens
  misc_feature (99)..(99): n is a, c, g, or t
  misc_feature (123)..(123): n is a, c, g, or t
  misc_feature (142)..(142): n is a, c, g, or t
  misc_feature (151)..(552): n is a, c, g, or t
  misc_feature (583)..(604): n is a, c, g, or t
ccaggaccaccgaggactccaggggaacgcttgtatctttagcctgtcgggtccccactctgactgagctcgattttgtatctcgtcagggggcgagcntatgaaaacgccagcaacgcgccnttttacggtcctggccctntggtgcccnnnnnnnnnnnnnnnnnnnnnnnnnnnnnnnnnnnnnnnnnnnnnnnnnnnnnnnnnnnnnnnnnnnnnnnnnnnnnnnnnnnnnnnnnnnnnnnnnnnnnnnnnnnnnnnnnnnnnnnnnnnnnnnnnnnnnnnnnnnnnnnnnnnnnnnnnnnnnnnnnnnnnnnnnnnnnnnnnnnnnnnnnnnnnnnnnnnnnnnnnnnnnnnnnnnnnnnnnnnnnnnnnnnnnnnnnnnnnnnnnnnnnnnnnnnnnnnnnnnnnnnnnnnnnnnnnnnnnnnnnnnnnnnnnnnnnnnnnnnnnnnnnnnnnnnnnnnnnnnnnnnnnnnnnnnnnnnnnnnnnnnnnnnnnnnnnnnnnnnnnnnnnnnnnnnnnnnnnnnnnnnnnnnnnnnnnnnnnnnnnnaagaattcggcacgaggcgcggctgtaggcnnnnnnnnnnnnnnnnnnnnnnagttcagtttattttttaatatgtcctgagttctttctgttcataaaattatgatcttatgacagctgtaacttttaattaataatattaacaaatcattattgatataggcttttcaatttgctcaagattaggaattgtaagtggaatgaagcagcacttccagttgacaaatggatccaaaggtaatccaatgtcttttaaattaagcttgtgacaattaaaccaatacactgtagcaatgagaaaactattgacaaagtataaccagggaatattcatctcaatatatgctggaatctgaactttaagtaaaacaatgattacctgaagtagtacaaatggtaaccaggtactgagaaaacagacaatgagcttggataagaatatttttttagatctcacagtataactggagtgggatgaaaaaggaaaatataagatagtttcattcatataggaagttatcctgatagcctgtaccaaagtagtaattcttcccaacaggttatgaatgctacaaataaaatcatcaccatgaaaaaagccaacagccgcggccgc

SEQ ID NO: 82154 - DNA, 2687 bp, Homo Sapiens
  misc_feature (20)..(20): n is a, c, g, or t
  misc_feature (955)..(955): n is a, c, g, or t
  misc_feature (1023)..(1023): n is a, c, g, or t
gctggtaccggtccggaatnctccggatatcgtcgacccacgcgtccgctccggaggagcgtaggcagggcagcgctggcgccagtggcgacaggagccgcgcgaccggcaaaaatacacgggaggccgtcgccgaaaagagtccgcggtcctctctcgtaaacacactctcctccaccggcgcctccccctccgctctgcgcgccgcccggctgggcgcccgaggccgctccgactgctatgtgaccgcgaggctgcgggaggaaggggacagggaagaagaggctctcccgcgggagcccttgaggaccaagtttgcggccacttctgcaggcgtcccttcttagctctcgcccgcccctttctgcagcctaggcggcccgggttctcttctcttcctcgcgcgcccagccgcctcggttcccggcgaccatggtgacgatggaggagctgcgggagatggactgcagtgtgctcaaaaggctgatgaaccgggacgagaatggcggcggcgcgggcggcagcggcagccacggcaccctggggctgccgagcggcggcaagtgcctgctgctggactgcagaccgttcctggcgcacagcgcgggctacatcctaggttcggtcaacgtgcgctgtaacaccatcgtgcggcgggcgggctaagggctcccgtgagcctggagcagatcctgcccgccggaggaaggaggtacgcgcccgcttgcgctccggcctctactcggcggtcatcgtctacgacgagcgcagcccgcgcgccgagagcctccgcgaggacagcaccgtgtcgctggtggtgcaggcgctgcgccgcaacgccgagcgcaccgacatctgcctgctcaaaggcggctatgagaggttttcctccgagtacccaaaattctgttctaaaaccaaggccctggcagccatcccacccccggttcccccncagcgccacagagcccttggacctgcgctgcagctcctgtgggaccccactacacgaccaggggggtncctgtggagatccttcccttcctctacctcgccagtgcctaccatgctgcccggagagacatgctggacgccctgggcatcacggctctgttgaatgtctcctccggactgccccaaaccactttgaaggacactatcagtacaagtgcatcccagtggaagataaccacaaaggccgacatcagctcctggttcatgggaagccatagagtacatcgatgccgtgaaggactgccgtgggcgcgtgctggtgcactgccaggcgggcatctcgcggtcggccaccatctgcctgccctacctgatgatgaagaaacgggtgaggctgggagggagcccttcgagttcgttaagcagcgccgcagcatcatctcgcccaacttcagcttcatggggcagctgctgcagttcgagtcccaggtgctggccacgtcctgtgctgcggaggctgctagcccctcgggaccccggcgggagcggggcaagacccccgccacccccacctcgcagttcgtcttcagctttccggtctccgtgggcgtgcactcggcccccagcagcctgccctacctgcacagccccatcaccacctctcccagctgttagagccgccctgggggccccagaaccagagctggctcccagcaagggtaggacgggccgcatgcgggcagaaagttgggactgagcagctgggagcaggcgaccgagctccttccccatcatttctccttggccaacgacgaggccagccagaatggcaataaggactccgaatacataataaaagcaaacagaacactccaacttagagcaataacggctgccgcagcagccagggaagaccttggtttggtttatgtgtcagtttcacttttccgatagaaatttcttacctcatttttttaagcagtaaggcttgaagtgatgaaacccacagatcctagcaaatgtgcccaaccagctttactaaagggggaggaagggagggcaaagggatgagaagacaagtttcccagaagtgcctggttctgtgtacttgtccctttgttgtcgttgttgtagttaaaggaatttcattttttaaaagaaatcttcgaaggtgtggttttcatttctcagtcaccaacagatgaataattatgcttaataataaagtatttattaagactttcttcagagtatgaaagtacaaaaagtctagttacagtgggacttagaatatattttatggttgatggtcaaaacaggctggagccaccccgtaacccatgacagaatggtccaagggcgcagctttagggaaaagataaaaatggggtggtccctttgggtacgaaatacgggtgggccaagggggtaaaccccatggattgtaaacccaaaccttttgtaagcttgttgctttggccctcccttgaaagaaaaggtcatgggcccgcgggttttggcggccgcggggccaaggaaagcggaaaataaaaaacggggggaactgaaaaacttacctgggttttcgcgaaattttggacttctttctctccaccaaaaacacaacgataaaaataaagcccatgataaaaccacccaaaaacctccttggtctcccgccccttccccctccaggagcccacctctccgaaataaaacacttttttctcctt

SEQ ID NO: 82155 - DNA, 1289 bp, Homo Sapiens
  misc_feature (30)..(30): n is a, c, g, or t
  misc_feature (47)..(47): n is a, c, g, or t
  misc_feature (244)..(244): n is a, c, g, or t
ggtcagcataatcatccagccctgcgatcntgatggttgttagcatntttggccctactactggattactgagttgcaccgccagggtagctgctgtatgttcttctcctgatagcatggtctgtgagctgtggtcgcactattctggaactgcgcgctgagtccttcctgtacagtgtgttcctgcctctcagtgtgcaccccagccatgctcttcccggcacttgcggcccgccggaccctnacctacctgtcccaagtgtactgccacaagggctttggcaaggacatggcactgtactcgctgttgagggccaagggagagagggcctatgtagtggagccgaacctcgtgaaacacatcgggctcttctccagtctccggtacaactttcatcccagtctcctctagggtgccaagagatgcctttcggaagttgcccacttcttgaagattcaaatatttatctctttatttagacatggttgcctgcaggtatttcactgtttactgttgttagagatataggcactggggcagctgaggaacctcaatatgttaagagccttggctttggtagcctcctggcaggagcagcagtttgccacaggtccggacctctccctccacacagccacaatgcctcatgcagtctgacccacccagtgagggtgcatttgaacactgattatattctccatttgtttttaagctctgctttgtgttagagcttgtgactgccaaaaattttgtgcacagtgatatgactgttttaggatcttaagggtagaattttgtgaaaggtgagatcctttggaattgagttctttctcattgggtatgaaaatggatgtatgtttagaatatatgcccaacgaggcaggaccatgtggatagattccatttgtttccttgacctgatgtaataaaaactgataaaagccgtgcagtgcccggcatcttggaggcaggtgatctggcttttctgttacctgggattttcttttcctatatatctgtagtgcactgataattgatattgttagtgagaactttaaggcacgacaagatctggaagagcttgtgaaccatcaaagtcagattgcttatgttgagtagtgatttaacattgaacatttctgtactactctgactctttgaaaattggacatttcagaatgatacaatataggggagctctttacaagtagcatatcatttttcctgactttcctggctgactgcttaccttcatttctttttcttctaggtagcatgatgtaataga

SEQ ID NO: 82156 - DNA, 507 bp, Homo Sapiens
tgcggccgctccaacatcagaaaggcatctcttggcaccctagaggagactgggatgaaagttggccacttcttgaagattcaaatatttatctctttatttagacatggttgcctgcaggtatttcactgtttactgttgttagagatataggcactggggcagctgaggaacctcaatatgttaagagccttggctttggtagcctcctggcaggagcagcagtttgccacaggtccggacctctccctccacacagccacactgcctcatgcagtctgacccacccagtgagggtgcaattgaacactgattatattctccatttgtttttaagctctgctttgtgttagagcttgtgactgccaaaaattttgtgcacagtgatatgactgttttaggatcttaagggtagaattttgtgaaaggtgagatcctttggaattgagttctttctcattgggtatgaaaatggatgtatgtttagaatatatgcccaacgaggca

SEQ ID NO: 82157 - DNA, 1150 bp, Homo Sapiens
tttaggtgacttagaccagtggtacaaaaagcaggtggtaccggtccggaattcccgggatatcgtcgacccacgcgtccggatctatgtccataaagaaagcacaaaggaaaggcatggctattgcacctgggagaagcctttaatcggttagacttctcaagtgcaattcaagatatccgaaggttcaattatgtggtcaaactgttgcagctaattgcaaaatcccagttaacttcattgagtggcgtggcacagaagaattacttcaacattttggataaaatcgttcaaaaggttcttgatgaccaccacaatcctcgcttaatcaaagatcttctgcaagacctaagctctaccctctgcattcttattagaggagtagggaagtctgtattagtgggaaacatcaatatttggatttgccgattagaaactattctcgcctggcaacaacagctacaggatcttcagatgactaagcaagtgaacaatggcctcaccctcagtgaccttcctctgcacatgctgaacaacatcctataccggttctcagacggatgggacatcatcaccttaggccaggtgacccccacgttgtatatgcttagtgaagacagacagctgtggaagaagctttgtcagtaccattttgctgaaaagcagttttgtagacatttgatcctttcagaaaaaggtcatattgaatggaagttgatgtactttgcacttcagaaacattacccagcgaaggagcagtacggagacacactgcatttctgtcggcactgcagcattctcttttggaaggactcaggacacccctgcacggcggccgaccctgacagctgcttcacgcctgtgtctccgcagcacttcatcgacctcttcaagttttaagggctgcccctgccatccctattggagattgtgaatcctgctgtctgtgcagggctcatagtgagtgttctgtgaggtgggtggagactcctcggaagcccctgcttccagaaagcctgggaagaactgcccttctgcaaaggggggactgcatggttgcattttcatcactgaaagtcagaggccaaggaaatcatttctacttctttaaaaactccttctaagcatattaaaatgtgaaattttgcgt

SEQ ID NO: 82158 - DNA, 1331 bp, Homo Sapiens
  misc_feature (44)..(44): n is a, c, g, or t
  misc_feature (87)..(87): n is a, c, g, or t
  misc_feature (93)..(506): n is a, c, g, or t
  misc_feature (513)..(513): n is a, c, g, or t
  misc_feature (535)..(535): n is a, c, g, or t
  misc_feature (555)..(572): n is a, c, g, or t
  misc_feature (1032)..(1277): n is a, c, g, or t
ctgatctttagtccgtcggttcccacctctgacttagctcgatntttgatctcgtcagggggcggacctatggaaaacgccagcacngcgccnnnnnnnnnnnnnnnnnnnnnnnnnnnnnnnnnnnnnnnnnnnnnnnnnnnnnnnnnnnnnnnnnnnnnnnnnnnnnnnnnnnnnnnnnnnnnnnnnnnnnnnnnnnnnnnnnnnnnnnnnnnnnnnnnnnnnnnnnnnnnnnnnnnnnnnnnnnnnnnnnnnnnnnnnnnnnnnnnnnnnnnnnnnnnnnnnnnnnnnnnnnnnnnnnnnnnnnnnnnnnnnnnnnnnnnnnnnnnnnnnnnnnnnnnnnnnnnnnnnnnnnnnnnnnnnnnnnnnnnnnnnnnnnnnnnnnnnnnnnnnnnnnnnnnnnnnnnnnnnnnnnnnnnnnnnnnnnnnnnnnnnnnnnnnnnnnnnnnnnnnnnnnnnnnnnnnnnnnnnnnnnnnnnnnnnnnnnnnnnnnnnnnnnnnnnnnntggcccntcgaggcccaagaattcggaancgaggcgcggctgttaggcnnnnnnnnnnnnnnnnnngaagaaactgatgagtggatcctaaaattcatttggaaatgcaagagatgcagaagagtcaaaacagccttgaagcagaacaaagtaaaacttctcacaacaaagcagcactgatcaaggcactgtggcactggcataaggttaaacaggtcaatggaatagagtcaagtgcccagaaataagcctgtacatttttggtcaactgattatcaataatggtgcgaagataattcaatggggaaaaataatgttttcaacaaatggtgctgggacaactggatatccacatgcaaaagaatgtgggctcttacaccacacacaaaacttaattcacaatggatcaaagatctacacataagagctgaaattataaaatgcttattagaaactaggtgtaaatctctgtgatcttggattaggtgatggcttctgaaatgtgacagcaaaagcataagcaacnnnnnnnnnnnnnnnnnnnnnnnnnnnnnnnnnnnnnnnnnnnnnnnnnnnnnnnnnnnnnnnnnnnnnnnnnnnnnnnnnnnnnnnnnnnnnnnnnnnnnnnnnnnnnnnnnnnnnnnnnnnnnnnnnnnnnnnnnnnnnnnnnnnnnnnnnnnnnnnnnnnnnnnnnnnnnnnnnnnnnnnnnnnnnnnnnnnnnnnnnnnnnnnnnnnnnnnnnnnnnnnnnnnnnnnnnnnnnnnnnnnnnntgtaaatctctgtgatcttggattaggtgatggcttctgaaatgtgacagcaaa

SEQ ID NO: 82159 - DNA, 1108 bp, Homo Sapiens
  misc_feature (669)..(678): n is a, c, g, or t
gcaaaacaatcagaaaacatttattatactgaaatgtgtacatcctactattaaaaaaacaaagtaacaaatttgctggtgccaaaatttatttagcctgtttcactgggacaaactcacgttcaatgccactcagtataatttcaagtctgataagcatctaagtatttttaccccgcttctaaaacctgatgaggaattcaaaataagcacacagcattaaatgacatttattgttccataaatcttgagacccaaaaaggaatgctaaatagacaagcaaaacttttaaaacaaacgagataaactcacttctttccccagtgactggtacagaaaacatgtggtcacacgaaagcaaagggaaaaagtcagaaaggaaaactctctgcctataggatctataggagttacagatattttcaaatcgatgatgaaaatagatcgtgcttctttgtagcaaataattaaccccctttatgaataaaacataaaatgtcaaagcttttactcactgaagtagtttgtcttctgggagagatttcaaactcaaaattactcatttcctattttttgcctgaacacaatgaggatcaaatagtacattcaaatcaggacacctgggtatatggacaaagatatcctacaattaaaatggaatagaagttnnnnnnnnnnttcagtcccctacaccacaggcctcaaacatgcttgctgatggattctgggaaggttttggatgaaggacggagatatgggaggaaagtgagaaaacagtggattccctttgaaaagtatgctagcagacaagcatttggttttatgaaagaggcactcttatagagaaagaagctagtatgtggtgtataaaaagcccctaaatcatcaccagaatgtctatccatgaatgtactaaagctcaatatttgagaggcttaagggatttgtatggtacattttagtgtttgattgataacatctagtgtttccagaaaaaaattcatcttgttcataatgaagatcccttaacacctagtcagaagctatcaacaataatactttctccccctacttgggtcacctatttccaatgtctggggtagggctt

SEQ ID NO: 82160 - DNA, 1152 bp, Homo Sapiens
  misc_feature (60)..(60): n is a, c, g, or t
  misc_feature (67)..(67): n is a, c, g, or t
  misc_feature (85)..(85): n is a, c, g, or t
  misc_feature (161)..(161): n is a, c, g, or t
  misc_feature (174)..(175): n is a, c, g, or t
  misc_feature (195)..(195): n is a, c, g, or t
  misc_feature (218)..(218): n is a, c, g, or t
  misc_feature (268)..(268): n is a, c, g, or t
  misc_feature (314)..(314): n is a, c, g, or t
  misc_feature (379)..(379): n is a, c, g, or t
  misc_feature (674)..(683): n is a, c, g, or t
ggggtagtgtgtaggaaatgggacctccttatcagattcaaaagtcaatccatagatgtntctgtcntgaaaatcaagagtcatntaacagatgtggaagacatagaaaagagtatcgctagagtcaaaaagtagtcagtaatgtagacagccaaatatcntcatatgattgtnngcatctggggatgccatacntatatgtaccatgactagcatgntggaagtcctccagcgcagccttctgaagagctggagagatgctgctctntattgaactgtgaggtggagtcacagctggctgaaccaacacaatnacctaagtatctatgtggcaggatatctcttttagagtatcacagcgtttaatccttacattttnttctataaaacattttttatgattacttggaaaaagatacaaaagaacataatttggtgtaattatttcaatgaagctaatgagatttcctgccacacagatgaatacagagcattaccttcataactgttataacctgttgtggcagatgacatctggagtatttgtcctggtctgagcaatacattataaaattggtttagaaaaatttgcagcagagattagtatggctagatctgcctggaaaatgacctgtgaaggaaagttaagaaaaaaatgtatgtttaacttgggnnnnnnnnnnttttggaagcagggcctgtgatacagtttggatatttgtccctgcccaaatctcatgttgaattgtaatccccaatgctggaagcaggcctggtgggagatgtttggatcatgggggcagattccttatggtttggtgctgtcttcaccatcgtgagtgagatctgatgatttaaaagtgtgtggcacctcccccggcccttgctcctattcttgccatgtgatgtgactgctccccctttgcctttcatcatgattggaaacttcctgaggtttccccagaagcagatgccactatgcttccagttgacagcttgcaaagccgtgagccaataaatctcatttcttataaattacccagtctcgggtatttctttacagcaatgcaagaacggtctgacatagccttatactatcttcacgtgttaaaagaggacgggattgggccgggcgtggtggctcacgctctt

SEQ ID NO: 82161 - DNA, 1326 bp, Homo Sapiens
  misc_feature (1250)..(1285): n is a, c, g, or t
ggaatcttaagtagggtttttgacatgttggcccaggcccgttctcccacttcctcccttgtgaatccacccggccttgggcctcccatttagcattttaaatgtaaaactgaagcttataaatctttgagccattcagctcttaactgccagctcacactatttcacagcatatccatagatatgagggcgcaccaactcccaggacagtggggcctggatgtgctgcagcttcagcttagagaagctggcccgctccagggccttccagctctctctggtcaggttgcacccatcaaacagaaggtgccaggcaggatccaggacttgttgccagaagtaattccaagtcgaacactcagctgccacatgctccatgaaatagaaagcccctcccggtctcagcactctgcacacctcgcggagaatccgctcctggttcttcacagagcacagcaccagggtgcagaccaccacatccacagagccatcagccacctggtgcatgttctccccggcagctaccacaaagcgctcaaactgcaggtgtcggttctctgcaatgctcttgatcaaaaacttctcaaagttggggttggggtcaatacaggtcaccctgcacccaggtgggtagaacttgaagttggcccccgtgccacagcccacttccagcagggagagtttcccggaggggcccgcaaactcctgcaggttactgaagagctcccgcttcttgcttgccatctgttcgttgtatatcacagtgaacctcaccaagaagtaggggaaccattttttgcatatccagctccacaagcccagaaagttcagcaggtacaagggaaatgtcaggatgtaaatggccagtctcaggataaagatggtaagctccattgctcagaagggaaaaaaacagatcaacagttagagacccgactcctttaattgcaggagagaggcttctggccacactccagagccaatcagctgcagaggagcaaaaagaactggctgtgctggaaagtcaaatcatgggcaagaggccaattttgcctaatagatgtttggcagcagtcgattcagcttagttttcataaggcaaaatgagaaggttcccagcttttcctcagaaggaaagtggattataatcctttattcctaactcgattcctgtttccccttctctgggtttggagacccccggccgtaatggccgaattcccgggcatatgtccggtaccgtcgactgnnnnnnnnnnnnnnnnnnnnnnnnnnnnnnnnnnnnccgcttcctcgctcaatgacctctgctgcgctcgtcagttt

SEQ ID NO: 82162 - DNA, 1383 bp, Homo Sapiens
  misc_feature (76)..(76): n is a, c, g, or t
  misc_feature (786)..(794): n is a, c, g, or t
  misc_feature (1233)..(1267): n is a, c, g, or t
  misc_feature (1323)..(1323): n is a, c, g, or t
  misc_feature (1332)..(1332): n is a, c, g, or t
accagttttgaacttttaatgttctgaagtataagtaacacatctcaacagcttgacatattttcatatatgtatnttataaactctcataactgtgcaagctagcagtaaaatagtgccttcaatattttactaattagcaccgtataccttttaaagctaactggaacattgattcattataaatgattgtaaaataaaatgatcatttcaaatgccaaattaatctcaaataacaagtgaactattattaattttatctctttttttggctctacgcacaaagatgtatttcaaagatgaacttaattatattagtatcagttctgtcaatctagcaaatcaaagtatcacagtttaaagcaatatttaatctctgaaattactagaggcatacaagaaagttaaggaatcagctacaaaaacaaaagatactaaataactgatttatagtcccttattttttaaaagaatgaggaaataactcaatgaaaaattccatggtgccaagtatcagttacacatatggttaagtatacgtcagtattctctgttttgcttatcagagtttggccttaccaaaaaccatcgaaatgtccaggataactcacagggacagctggaagcctgaaataaaattgctcagtgcaaaaagatcccaaaccattcatataattttaaatggaagcctagacatttaatccctatttttaatgttcacatctgaaaaatctttcaaaaatatggaaaaaatctaattatactaaaattacttccacacattcnnnnnnnnnttttaagggatattttctttcctgttttctgctaaaagcattcctctgagctatggggttaagttctgagccacgactgactgcttactagcatgcctgttttgcataccagtagaatcaagtccagttttgccatttgtggataactatgacaagatacaaaagcatgtgtttgccataaatagcctggctaacagcaaaccgctcacactgagcagatcaaattctctataaggagcacagtctggaccatagccaaatcccactactaatgtttaagactgctatatcaattcctattccaattcaatttgcaaaatatattcagaaatagtaggtgaaatgactgttccgaaacatcagaagtatcattaaacttttaaaggaccccggccgtaatggccgaattcccgggcatatgtccggtaccgtcgactgnnnnnnnnnnnnnnnnnnnnnnnnnnnnnnnnnnncgccgcttcctcgctatctactcgctgcgctcggtcgttcggactaagcgcgaatncgccatatnaggtctattacgtctaagcgggtggtgtggtggtgtggttgtgtgtttggt

SEQ ID NO: 82163 - DNA, 1029 bp, Homo Sapiens
  misc_feature (65)..(66): n is a, c, g, or t
  misc_feature (103)..(605): n is a, c, g, or t
gcccagctcccgagggagagccgacagttccgtagcgcaggtcgaacagagagccacgaggactnncagggggaaagctgtatcttatagtctgtcgggttcnnnnnnnnnnnnnnnnnnnnnnnnnnnnnnnnnnnnnnnnnnnnnnnnnnnnnnnnnnnnnnnnnnnnnnnnnnnnnnnnnnnnnnnnnnnnnnnnnnnnnnnnnnnnnnnnnnnnnnnnnnnnnnnnnnnnnnnnnnnnnnnnnnnnnnnnnnnnnnnnnnnnnnnnnnnnnnnnnnnnnnnnnnnnnnnnnnnnnnnnnnnnnnnnnnnnnnnnnnnnnnnnnnnnnnnnnnnnnnnnnnnnnnnnnnnnnnnnnnnnnnnnnnnnnnnnnnnnnnnnnnnnnnnnnnnnnnnnnnnnnnnnnnnnnnnnnnnnnnnnnnnnnnnnnnnnnnnnnnnnnnnnnnnnnnnnnnnnnnnnnnnnnnnnnnnnnnnnnnnnnnnnnnnnnnnnnnnnnnnnnnnnnnnnnnnnnnnnnnnnnnnnnnnnnnnnnnnnnnnnnnnnnnnnnnnnnnnnnnnnnnnnnnnnnnnnnnnnnnnnnnnnnnnnnnnnnnnnnnnnnnnaagaattcggcacgaggcgcaatcctgcagcagtccccgtcaatgagaggccaccagcagacagtgcctgttggacccatgaagtccaccactaattatatactctgctttaggtagaatatttttattagctgtcaaactgtttttgtatttaagtttccaaaagtccaggtactttatgtaggccaatgtataaatatttcaagtctaacagtagcacagttatatgttaatacaactgactacacgaaaaatatgtaatagcatatgctatgtaatttttcaaatcactaggtattgatatgtgccttttttatattaccaagagattctctaaatatggaattagattaggattctctgctccacttaacacacatttttaaattagtactgatgattgagggatggacaatagcacacc

SEQ ID NO: 82164 - DNA, 1437 bp, Homo Sapiens
  misc_feature (917)..(1029): n is a, c, g, or t
  misc_feature (1036)..(1066): n is a, c, g, or t
  misc_feature (1089)..(1099): n is a, c, g, or t
  misc_feature (1124)..(1211): n is a, c, g, or t
  misc_feature (1272)..(1281): n is a, c, g, or t
  misc_feature (1371)..(1381): n is a, c, g, or t
atgtcaatgagttcacctgccctgtgtgtttccacgtcaactgcctgctctgcaaggccatccatgagcagatgaactgcaaggagtatcaggaggacctggccctgcgcctcaagaaccgatgtggctgcccggcagacgacagagatgctgaaggtgatgctgcagcagggcgaggccatgcgctgcccccagtgccagatcgtggtacagaagaaggacggctgcgactggatccgctgcaccgtctgccacaccgagatctgctgggtcaccaagggcccacgctggggccctgggggcccaggagacaccagcgggggctgccgctgcagggtaaatgggattcctttccacccaagctgtcagaactgccactgagctaaagatggtggggccacatgctgacccagccccacatccacattctgttagaatgtagctcagggagcttcgtggacagccttgcttgctgtagcgttgtaggggccctgcctgcactgcggttgtccacggtcacatctgccccagtgcctttgtccttcccttggggcttgccggccagacttctctcccctgcggctcccacctctgcctgaccccagccttaaacatagcccctggccagaggccttgctgggtggagcctctgtgtgactccatactcctcccaccacaacactcatctgtcaaacaccaagcactctcagcctccccgccttcagctgtcagctttctggggctaacttctctgcctttgtggttgggaggcctgaggcctcttggaactcttgctaacctgttcagagccaggaaggagactgcacagttttgaaagcacagcccgtcaggtccggctctgcgtctccctctctgcagcctgtgtaagctattataattaaaatggttttccgggnnnnnnnnnnnnnnnnnnnnnnnnnnnnnnnnnnnnnnnnnnnnnnnnnnnnnnnnnnnnnnnnnnnnnnnnnnnnnnnnnnnnnnnnnnnnnnnnnnnnnnnnnnnnnnnnnttgcggnnnnnnnnnnnnnnnnnnnnnnnnnnnnnnncatttttttgggggcggggcccnnnnnnnnnnnggaaccggggcccccccggtccccnnnnnnnnnnnnnnnnnnnnnnnnnnnnnnnnnnnnnnnnnnnnnnnnnnnnnnnnnnnnnnnnnnnnnnnnnnnnnnnnnnnnnnnnagtttgggggttttttcggaccataaaaaaaggaccccgggggaccctcattttaattaannnnnnnnnnggggctttcgtgggggtttggggggaattttataagggattctcgcggagatggaaataaattaaaggccgcctgggggaccctaaatcnnnnnnnnnnntaaaacactttaaccccttggcgaaaaatattttcccccccgggaaaagggggggg

SEQ ID NO: 82165 - DNA, 1010 bp, Homo Sapiens
  misc_feature (87)..(204): n is a, c, g, or t
  misc_feature (213)..(221): n is a, c, g, or t
  misc_feature (259)..(333): n is a, c, g, or t
  misc_feature (380)..(418): n is a, c, g, or t
  misc_feature (427)..(447): n is a, c, g, or t
tctttgaaatggtgggcctaaacttagggttcccttggaaggaaccggtatttggtatttgcgctcggcggaaagccaattactttnnnnnnnnnnnnnnnnnnnnnnnnnnnnnnnnnnnnnnnnnnnnnnnnnnnnnnnnnnnnnnnnnnnnnnnnnnnnnnnnnnnnnnnnnnnnnnnnnnnnnnnnnnnnnnnnnnnnnngggatcacnnnnnnnnngcccgctcattaggcgggtaaattcccgggtactgcannnnnnnnnnnnnnnnnnnnnnnnnnnnnnnnnnnnnnnnnnnnnnnnnnnnnnnnnnnnnnnnnnnnnnnnnnnaccactttgtacaagaaagctgggtcaggaaacagctatgaccatgnnnnnnnnnnnnnnnnnnnnnnnnnnnnnnnnnnnnnnngcctcgagnnnnnnnnnnnnnnnnnnnnnaacacctcaaactcccctcagccccaatatcctggcatctttagtgagtcaggacaatcctaacctagaagcatatatgcctgggagcttcctggcctcaaaggaataaatcttttcacagcattcacaggactgaaaaataatataaataggattcctacagtaaacaagtattgtttctgtttcaaaaccatcctgcaagcataacaatcagctggtcctaaagcctgtaatacgtacacaggtcacaggcagacaggcaggcaggaaaagggatttcccccagtgcaggctcctttggttctgcctcagaggcactagaagtctaggccctgggttaacagcaacccagagtctgcttggatatggttctagttgtatgcttcgtaagtgaacaccaaaataccataaaggtagaggagagtgaacacataacccacttgcaaataagaattaccttgcaagattcctatttttttatcttaacagtctatgcgtatgaacattttattctataatataacttttatataaaaataggtcatcttatgactctaaaccat

SEQ ID NO: 82166 - DNA, 1318 bp, Homo Sapiens
aaatagatgcaatatacatttgaagacattgatatttggaattaattatgtttgtttaagtcacgcaaaagattttcagaaaatgttcggatataattagctctgttaaatacccacagaactgttatcaggtcttatatttattttcatctggttcctctaatacagtgctgtccaatagaaacacaacagccacaaatgcaggccacagatacaaatatttaacttcacagtagccctattttaaaaagtaaaaataaatgtttgtttgttaaaatgaattttgattttttaaaaacactatatgttatttcaacgtcatcaatataaaaaaattgattgattgattgatagtttacatctgtttcttgaaccaagttttcaaaatccagttggtaatttaaaagtacacttcacttcaacttgaataaactatattggatagcacagccgtaaaattagagactaagcttctgctttatttaacagttgttgagtatgtcaaaacagtttttaattcattcttttatttcaaagtctcacaaaagttagttatgatttgtaaaagcattaaattaagtgtcctcattttaaagtcagatgaagttcacatctctaaagggtaaaaatccaaaagtatagaaagataaaacaatcaatctgcctatagcagagttgtgaaataaataaattgttactatgaagtacttacaataggggaataaaattacctatttttgttattaaatcaaatgtgtaaggcttatttcatccatatgaggtgtcaacttgacagatgatgagtaattatgactaagaatctagcccttacttttaaaagctgacaggatttcccttgctcagttagaaaacaaaaatattcaacagattctgtgataagtaattaatcgtttaggtttgacagttgattattgtgttctttgcatattcatgtaaaactgatgtgtgaatgacattgcagtgagctagattaacggtgattatagatacagtagcctgtcaaagaaagatgtcctacattaaaaaaggtgacttatttttgttagctgtcattatttattaacatgaaaaggcaatgatggccataagaaccaaagcatgagtatcacactgcacaaatctgggtatcacatggatgcactttgtaattatcagtgtgcttgttcttcacagatcataggaaaaagggaaaaaaaaaacaaactttaaatgaggcgaaagatggtattaaatatccagtaagtgggtggacaacttgaggtcccaaaatagtctgtgagttcctagaaaattaaac

SEQ ID NO: 82167 - DNA, 597 bp, Homo Sapiens
  misc_feature (546)..(554): n is a, c, g, or t
aaatcatagtagtactagagtcaaagtttataattgctttggaacaatgggtttacttgaggtgaattcacaatgccttcacttaaaagtaagattctggacttcattatgagctatctgtataccatgtatgaacacagaaaacctttagagaactcttctctaatgatcttcacccaaaaatacatgccacaattttcaaaaacagaacatgtacaattgttggggtttttacattacccttataagattggtttgtgtgatacactaaacgtatatattttaatgacaatagaggaagcagattattactggcattaaagtacaaccatttctagacggttttaaatgccacagagtcccctggttaaaatgtaaagctgcacagcttgcctatgtcatctttatgataaagttaaaacagcaagaggatttaactttcactctacattttactgccaggtttttatatagatcaagtatcgctgcagcattctgaccagcccagatttagcagcaaatggcaggaatcatataaaatgcaannnnnnnnnaacaaagtgcttttctaagatatacatacatatataaataggt

SEQ ID NO: 82168 - DNA, 976 bp, Homo Sapiens
  misc_feature (755)..(755): n is a, c, g, or t
  misc_feature (762)..(763): n is a, c, g, or t
  misc_feature (772)..(772): n is a, c, g, or t
  misc_feature (779)..(779): n is a, c, g, or t
  misc_feature (923)..(923): n is a, c, g, or t
  misc_feature (954)..(954): n is a, c, g, or t
  misc_feature (966)..(966): n is a, c, g, or t
tccagatgataattacatatttaatacgtgttgcttttaacagcaatttttaaagtaaacacatcatagaccttataacttattaaagattttatagtgcttacaaagttgattctaaaaaatataccttatttgttctaaatgaataacattatctggaagatataataataaattatagtagtatgttttccaccacgatagttaagattgtgtacacatattcaatatgaaatcctcttaggattttcacaccttcagcctgaaaacataaaagcagattaaagtttggcatacaagatctcagtctgatagtaattgctttaaaactcaaagtgtaaaaatatctacttgacattctaggaaagcatggccacatgcacagacacattctctcactcactccaacacacacgtgtgcacacatactcacaccccagagtactcagaagatcttgcccttgtggatcagacaactgccaccaatttcaaaaactaatggaaaaaattagctaagaatatgtttaaaccatacttaagaggtgctggttgccattaagatctttaacatgcagagaatgccatctcaatacactcttaaacagacttgaactattcactaatggatacacgaatacataagaaattatgtattcatccacccccaagactgcatgtaagatgaaaaacctaggcattccaccaacgagtcatatgactgaacccagctaaagctacagtggtttgcttcacangacccanntagagacangacccancagattttagaacctcatgtgatctgtttggagttccttatgctcatgtgcaaagcatgagatctgtatgcaatgacactatacacttgcactttgtgaactgcagaggcactgtattccaaacagtattatcaaataatcccnatgtcctactttttataaaaacgtccaattnagacaaacattnatgtgaaacc

SEQ ID NO: 82169 - DNA, 991 bp, Homo Sapiens
  misc_feature (200)..(200): n is a, c, g, or t
  misc_feature (206)..(678): n is a, c, g, or t
gcacgtcggtgacggggtcgtcaacagccagttgacgacgctacaccgactggtactaagcgtagtatgagaagcccacgctccgagggagaaggcgacagtatcgtagcgcagggtcgaaccagagagccacgaggacttccaggggaacgcctgtatcttatagtctgtcggttcgccacctctgactagcgtcgatnttgtgnnnnnnnnnnnnnnnnnnnnnnnnnnnnnnnnnnnnnnnnnnnnnnnnnnnnnnnnnnnnnnnnnnnnnnnnnnnnnnnnnnnnnnnnnnnnnnnnnnnnnnnnnnnnnnnnnnnnnnnnnnnnnnnnnnnnnnnnnnnnnnnnnnnnnnnnnnnnnnnnnnnnnnnnnnnnnnnnnnnnnnnnnnnnnnnnnnnnnnnnnnnnnnnnnnnnnnnnnnnnnnnnnnnnnnnnnnnnnnnnnnnnnnnnnnnnnnnnnnnnnnnnnnnnnnnnnnnnnnnnnnnnnnnnnnnnnnnnnnnnnnnnnnnnnnnnnnnnnnnnnnnnnnnnnnnnnnnnnnnnnnnnnnnnnnnnnnnnnnnnnnnnnnnnnnnnnnnnnnnnnnnnnnnnnnnnnnnnnnnnnnnnnnnnnnnnnnnnnnnnnnnnnnnnnnnnnnnnnnnnnnnnnnnnnnnnnnnnnnnnnnnnnnnnnnnnnaagaattcggcacgaggaaggacttcatctcctcaacatggaaactaaggctttactcatcagtcttaagtatggttgttttatgtggcaattgggagatactgatacttgttttcagatccatagcatggaaaataaaatgagctttatagtacatacaaaacaggctggtctcgtggtaaaactgttaatgaagctaaatggacagttaatgcccactgaaagaaattcatgaaagagaagtaactgttactcaagccaccacattttgtaatgcagagttttttctccgtgaaagatttcttaaaatatt

SEQ ID NO: 82170 - DNA, 1266 bp, Homo Sapiens
  misc_feature (80)..(80): n is a, c, g, or t
  misc_feature (86)..(86): n is a, c, g, or t
  misc_feature (105)..(105): n is a, c, g, or t
  misc_feature (137)..(137): n is a, c, g, or t
  misc_feature (154)..(154): n is a, c, g, or t
  misc_feature (202)..(202): n is a, c, g, or t
  misc_feature (219)..(219): n is a, c, g, or t
  misc_feature (233)..(233): n is a, c, g, or t
  misc_feature (276)..(276): n is a, c, g, or t
  misc_feature (286)..(286): n is a, c, g, or t
  misc_feature (1023)..(1024): n is a, c, g, or t
  misc_feature (1026)..(1026): n is a, c, g, or t
  misc_feature (1028)..(1133): n is a, c, g, or t
  misc_feature (1142)..(1156): n is a, c, g, or t
ggattgcctcagccagaatcgcacagagtgaggggagaagacctgttctcagaagatgctccacaccgtaccagagactntgcatntgcattttgctcttatgcngagacggggagttaggctcagatagtgagctntggccatgagaggtagntccagaagtggggggaactgtacagatcagcagagcaggacagttgcnagcagtgacctcagtanggaacatgtccgtntaccctttcgcactcatgacacttccccctaccagccctcctnttcctcctcntcctcctcctgtgggaggtggtcagtgggacttaggaatctttcacctgctgtgcccagtagttctgaagtctgcttgtggagcagtgttttatgtttatccctgtttactgaagaccaaatactggtttggagacaacttccatgtcttgctcttctacctccctagttagtggaaatttggataagggaactgtagggcccagattctggaggttttatgtcattggccacagaataactgtctctaagctatccatggtccagtggtccctgccaagtctgtagacttcagagagcacttctctcttatggggttcatgggaacaggggcgggtgtgacttgcttggtggcctcattccatgtgtgcctgtgcctggggcatggactttgttaagcagagtcagcagtgaggtcctcattctccagccagcctctctgccctggagaatcatgtgctatgttctaagaatttgagaactagagtcctcatccccaggcttgaaggcacatggctttctcatgtagggctctctgtggtatttgttattattttgcaacaagaccattttagtaaaacagtcctgttcaagttgtattcttttaagttcttttattctcctttccctgagatttttgtatatattgttctgagtaatggtatctttgagctgattgttctaatcagagctggtacctactttcaataaattctggttttgtgttttcttttgtannanannnnnnnnnnnnnnnnnnnnnnnnnnnnnnnnnnnnnnnnnnnnnnnnnnnnnnnnnnnnnnnnnnnnnnnnnnnnnnnnnnnnnnnnnnnnnnnnnnnnnnnnnncttgtcggnnnnnnnnnnnnnnnaaaaatttttcaaaacctttctttgggcgcccggccccagaaggaaagggaactgggccaaacttgttcccaagaaaatccgggccataaatagggctgggatccccccc

SEQ ID NO: 82171 - DNA, 1081 bp, Homo Sapiens
ggtctcaaaactgagactgagatgtttgagaaatattacgctaaactggagcccagggatcagcgacctccacgattatcagaaattaaaatatcagcagcagattatgcacagtttcgaggcaggcgtagatccaaatcccggacaggtatggaccgtggggtaggcctgactgccgaccaaaaacttgagctggtacaaaaagaggttgcggacatgaaggatgacttacgacacacaagggcaaatgcggaacgcgacctgcagcatcacgaggcgatcattgaggaggctgaaattcgatggagtgaagtttcgagagaagtgcatgagtttgaaaaagatattctaaaagccatatccaagaagaaagggagtattttggccactcagaaagtgatgaaatacattgaggacatgaaccgccggagggataatatgaaggagaaattacgtttgaaaaatgtttctctcaaagttcagaggaaaaaatgcttttacaattgaggcagaaggaagaggtgagtgaggcccttcacgatgttgattttcagcagttgaagatagagaacgctcaatttcttgagacaattgaagcaaggaatcaagaactgacccagcttaagctgtcatttggaaacactttgcaggttttcaatgcctacaaaagcaagcttcacaaggcaatggaaatatacctcaatttggacaaggagatcttgttgagaaaagagctacttgaaaaaattgaaaaagaaacactacaagtggaggaggaccgggccaaagccgaggcagtgaataagaggctccggaagcagttggccgagttccgggcaccacaggtgatgacttacgtccgggagaagattttaaatgcggacctggagaagagcatcaggatgtgggaaaggaaagtggagatagcagagatgtccttaaaaggccatcgtaaggcttggaatcgaatgaaaataaccaatgagcagttgcaggcagattaccttgttgggaagtagccagaggcaggccacggcttacagaccactacatgacctttaaaagtaatcagctccttttt

SEQ ID NO: 82172 - DNA, 479 bp, Homo Sapiens
ccacagcgccatattaatggaggaggggaggaaggtgaaatctactgcatgggattcaggaaacagttgtggttggtcaggacggaagttggggtaagtttggttggtcagagggagttgtgctggagattgtgaaaaatgggttcttgaatgatctactataaggcagggaaggttcatttgtaagtagtaatgtgaactgaattgcattaagagtgtgtggcctttgttgtgatatactatgtattttcttatatgcatgagccaaactgttgcatcataatttagcactgatgtctgcttttattttgatcatctttgtccacccttattagttcttggctgttaaccgtagatagatcttgtaaatccagcaacctttggttgctgcattccccttggttcgattccacgcaaggagccacaagtgagaactccactgtccttagaagaaagggcatttttacttttgaaccaaa

SEQ ID NO: 82173 - DNA, 1558 bp, Homo Sapiens
  misc_feature (1447)..(1478): n is a, c, g, or t
gtggtaccggtccggaattcccgggatatcgtcgaccccgcgtccgggatgatgaaggtgttttgggcagcattgagaattcttttcagaagtttcatgctttcttggatctccttaaagatgctgggcttgggcagcttgccacaatggctgggatagatcagtcagattttcaattactaggtcatccccagatgacttctactgttagtaatccacctaaagaagaaaagaaggcgcttgaagatgaaaaaccagaaccgaatcagaatgccctagggcaaatgcaaaatatccaggtttctatttgtatgcagtcagcttacaatgaaggaacactaatgaagtttcagaaaattacaggtgatgctagaattcctttgcctctcgactcctttcctgtcccagtttctactccagagggcttaggaacttccagcaacaacctaggagtcccagctactgagcagcggcaggagtcttttgaaggattcattgctagaatgtgttctccttcaccagatgcgacttctggaaactggaagtcaaagaaaagaagaggagttgtccagaaatagcagatcttcttcagagaaaaagaccaaaacagaaccccattgaaatgactggagaaatattaaaataaaaataatagcagagttggaaaaccagaaatttgaacagtgaaatttctggaagataagaagcagatgatttaagcaccagttaattaaaggatggaacagctaagccattccactcatctttggaacatcctgattctggagtttgccaccaggctaagaaagcagctatctgaagtgggagctctgacccaagaaatgctgggatcggagaataagggaattatccaaaatggctccgaagaggaactgaagttaagctgcccacatgatctctctaactatgatgacctgccacttccgtttataatcaccatataagtgcctgtaatcatttgtgttcattaaaagtgaaccagaattcccatttggatgaaaaaataacacttccaactttaatcttaggccctcatttataaatatggacaaccaagaatcatcaaatttgaagaaaaccagtaacataaaaggaggcatgaaattaaaattaacctgttcaagaagatagttactaggagaaacatgaaatttttaaattaatgaatcaaaatcttcagcaattcataaagatactgtgttcataaagaataggatgccatgaaaaaaaatatttagagtttctggaaattaaaaatttgattatgaaactgaaacactcagaagatggactacacagcagaatggattcatttgaagcttaaattcatgaaatggaaggtattaattggtcttagacgtttcatcagcaacttaattacttagaaaaaatctttctcagagtaactaagcaaaatgaacaatgnnnnnnnnnnnnnnnnnnnnnnnnnnnnnnnncctgacaggcggccgcaagctttttccctttagtgagggttaatttcgagcatggcacttggcccgttctttaaccaacc

SEQ ID NO: 82174 - DNA, 578 bp, Homo Sapiens
tttccataataaaaacataagaaaatttattaaaatttaaaggtaaaaacatagtttcaaaagatttagtcatatgaaaggtgtgatagagaatggatgctttcttgaaattcaaaatcacatccaagagtatcactttcagaatgttctagtggactggatttacttttatttgtcttggatgaaacagtcactattctattttctttcttgacagaaacatattttttcaaagacctacttttaattggttcattaaccaaagaactagtttccctagtttctttgcttttctggttttcaggacagtcagatcaggaatgcaggtcctttccagggtgttgcttatcagagtgttttttggtatattcacctgttttggtctttttctctgaagaagatctgctatttctggacaactcctcttcttttctttgacttccagttccagaagtcgcatctggtgaaggagaacacattctaccaatgaatccttcaaaagacttctgccgctgctcagtagcctggacttcctagttgttgtctggagttcctaagccctctgaattgaaccctgg

SEQ ID NO: 82175 - DNA, 1202 bp, Homo Sapiens
  misc_feature (659)..(668): n is a, c, g, or t
  misc_feature (1111)..(1131): n is a, c, g, or t
cccgccctgcccgtcatccgagacaagtacaaagacctgacgggagaggtggagaaaaatgagagatatgcatatgaatggccagagatgcctggggagtgccctgaatgtcattaagaaggcaaatgataccttaaatggaatcagtagtagttctgtttgcacagaagtaattcagtcagctcaaggcatggaatatttattaggtgttgttgaagtgtacagggtaaccaagcgtgtggagctggggataaaagccactgcagtgtgcagtgagaaactccagcagttgctgaaggacatcgataaagtatggaataacctaatcggcttcatgtcactcgccacactcacaccagatgaaaactcgctggattttccctcctgtatgtcacggcctgggattaaaaatgctcaggagcttgcctgtggagtgtgcctcttgaatgtggactcgaggagccggaaagaagagaagcctgcagaagaacatcctaaaaaagcattcaactcagaaacagacagtttcaagctggcctatggagggcaccagtatcacgccagctgtgccaacttctggatcaactgtgtcgaaccaaagcctcctggcctcgtcctgcctgacctgctctgaacaactcctctgtgaagcattgacnnnnnnnnnnctgtgacaccccacggggtgacagggaccaataaatagaatgcgagcactgcacagttcgcttccctgaatcgatatgaagaacaccgcaagggacggggcccccgtcatccccacggccagtctgcaggacttcaggtaaaattgtcccacccaaactgcacgtggcaccagaagcttgctcacttatctctacttaagattttctgaaatacggaccacggctttcttgatctaaggaagaacttgctgctgcagtattgaaactgtgaagaactgacatttgaagaaaaatagattaccgttgcgggactagaatgggcgactgcttggagccagtgcttgtttttatctaggacacttactgtcctgtgaagtagaatacatttatctgcatttagtttgttaatgtctgaaatgaataaaaagaggaaattgcgattnnnnnnnnnnnnnnnnnnnnngaaacctagcaggcggccgcaagctttttccctttagtgagggttaatttgagcatggcactggccgtcgt

SEQ ID NO: 82176 - DNA, 983 bp, Homo Sapiens
  misc_feature (25)..(25): n is a, c, g, or t
  misc_feature (51)..(51): n is a, c, g, or t
  misc_feature (85)..(86): n is a, c, g, or t
  misc_feature (99)..(99): n is a, c, g, or t
  misc_feature (107)..(107): n is a, c, g, or t
  misc_feature (117)..(117): n is a, c, g, or t
  misc_feature (130)..(130): n is a, c, g, or t
  misc_feature (138)..(138): n is a, c, g, or t
  misc_feature (146)..(147): n is a, c, g, or t
  misc_feature (149)..(149): n is a, c, g, or t
  misc_feature (157)..(157): n is a, c, g, or t
  misc_feature (342)..(342): n is a, c, g, or t
ttcttgccccacttccgtgtcccgntgggtgtttgtgtttctggcccgtcntatccggatgcctaagggtttccctggcccactnnttccagggccccntcccattnggggttcctntgatccccagtgnagcctcancagtgtcnntnggcttggngggctgctctgtcctgcaactgggcagtggtgccgacatcctgctgtgctccagctggaccagagagtgaaggcacgccaggcagaagcgcagctgagtcaagggcctggagcatcctgtctcagagcgtattttgtctgatgtccacacgaacctccagtctgtggtgtgcccagatgccgggngacggcagaggcactcagatcacgtgggccacatcctgggagacgctggcagcccctatctcacaggacttatctctagtgtcctgcgggccaggcgccctgactcctatctgcagcgcttccgcagcctgcagcagagcttcctgtgctgcgcctttgtaatcgccctggggggcggctgcttcctgctgaatgcgctgtacctggagagagacgagacccgggcctggcagcctgtcacagggaccccagacagcaatgatgtggacagcaacgacctggagagacaaggcctactttcgggcgctggcgcctctacagaggagccctgaggtccctgcctacactcgtcctgcctgcaagcctcccgttggtccccacagcagcagtgcctcggttcctctttggctgtcctcggggactccggctgaggcacatctgccacttttgaattcccggctggagagctggcaggaccctgtggctgggctgggaatggagctgtcagcactctgcgtgggaggcctgggcctgtgcctgcatcccgctcaaggctgccccagcctggggtccccagcctggctgctgctgggccctgaataaagagaggccagtacaaagcccatggattttgggcctgt

SEQ ID NO: 82177 - DNA, 763 bp, Homo Sapiens
  misc_feature (164)..(204): n is a, c, g, or t
gcttaaaaaaaagccatgacggctctcccacaattcatcttccctgcgccatctttgtattatttctaatttattttggatgtcaaaaggcactgatgaagatattttctctggagtctccttctttctaacccggctctcccgatgtgaaccgagccgtcgtnnnnnnnnnnnnnnnnnnnnnnnnnnnnnnnnnnnnnnnnnagcccaccatgtctcgccgcaagcaaggcaaaccccagcacttaagcaaacgggaattctcgcccgagcctcttgaagccattcttacagatgatgaaccagaccacggcccgttgggagctccagaaggggatcatgacctcctcacctgtgggcagtgccagatgaacttcccattgggggacattcttatttttatcgagcacaaacggaaacaatgcaatggcagcctctgcttagaaaaagctgtggataagccaccttccccttcaccaatcgagatgaaaaaagcatccaatcccgtggaggttggcatccaggtcacgccagaggatgacgattgtttatcaacgtcatctagaggaatttgccccaaacaggaacacatagcagataaacttctgcactggaggggcctctcctcccctcgttctgcacatggagctctaatccccacgcctgggatgagtgcagaatatgccccgcagggtatttgtaaagatgagcccagcagctacacatgtacaacttgcaaacagccattcaccagtgcatggtt

SEQ ID NO: 82178 - DNA, 469 bp, Homo Sapiens
  misc_feature (334)..(334): n is a, c, g, or t
atcagacgcggcgcggcggttggtgaagttacagcccggccagccgagcctcttgaagccattcttacagatgatgaaccagaccacggcccgttgggagctccagaaggggatcatgacctcctcacctgtgggcagtgccagatgaacttcccattgggggacattcttatttttatcgagcacaaacggaaacaatgcaatggcagcctctgcttagaaaaagctgtggataagccaccttccccttcaccaatcgagatgaaaaaagcatccaatcccgtggaggttggcatccaggtcacgccagaggatgaccgattgtttatcaacngtcatctagaggaatttgccccaaaacaggaacacatagcagataaacttctgcactggaggggccctctcctcccctcgttctggcacatggaggctctaatccccacgcctgggatgagtgcagaatatgccc

SEQ ID NO: 82179 - DNA, 439 bp, Homo Sapiens
tcggtaccactcagagtagatttcttttttatagtattggataaagtttggtgtttttacagaggagaagcaatgggtcttagctctttctctattatgttatcatcctcccttttttgtacaatatgttgtttacctgaaaggaaggtttctattcgttggttgtggacctggacaaagtccaagtctgtggaacttaaaaccttgaaggtctgtcataggactctggacaatctcacaccttagctattcccagggaaccccagggggcaactgacattgctccaagatgttctcctgatgtagcttgagatataaaggaaaggccctgcacaggtggctgtttcttgtctgttatgtcagaggaacagtcctgttcagaaaggggctcttctgagcagaaatggctaataaactttgtgctgatctggaaaaaaaa

SEQ ID NO: 82180 - DNA, 640 bp, Homo Sapiens
  misc_feature (45)..(45): n is a, c, g, or t
ccaaagaattcggcacgaggccttgccggagctgcccttcacctntggggcccgagacagtcataagggatggacttagttttcttgcagggaaaaaggtggacagccgtgtttcttaaggatgctgagggcatggggccaggaccaggggagaggcacagctccttcctgagcagcctctcaccactgccacaaggctccctaatgctggtctctgctccactccccggcttcccgtgaggcaggaggcagagccacagccaaggccctgaccacttctgtgccagttgtctaagcagagcgcctcagggacgctgggaaatgccttaaggatagaggctgggcatcacatcaaatgggactgtggtgtttggtgaaaaccttcctgaggatctggattcaggaccctccatgactggcctatttactgtttacagctggccagtgcagagctgctgctcttttacctttttaggcccctgtaacttcccacctttaaactgcccagaaggcatgcctctcccacaggaagaggggagcagacagggaaatctgcctaccaagaggggtgtgtgtgtctttgtgcccacacgtggtggctggggagtgcctggatggtgcggtggttgatgttaaccta

SEQ ID NO: 82181 - DNA, 1470 bp, Homo Sapiens
  misc_feature (41)..(41): n is a, c, g, or t
  misc_feature (100)..(844): n is a, c, g, or t
  misc_feature (862)..(875): n is a, c, g, or t
  misc_feature (1029)..(1108): n is a, c, g, or t
  misc_feature (1441)..(1441): n is a, c, g, or t
gtgtagccccaatcagacttgtgccgcctactactcgtgtntatctgtaccatgctgtgccgtgcgatagtcggtctaccggttgactcagacgtagtannnnnnnnnnnnnnnnnnnnnnnnnnnnnnnnnnnnnnnnnnnnnnnnnnnnnnnnnnnnnnnnnnnnnnnnnnnnnnnnnnnnnnnnnnnnnnnnnnnnnnnnnnnnnnnnnnnnnnnnnnnnnnnnnnnnnnnnnnnnnnnnnnnnnnnnnnnnnnnnnnnnnnnnnnnnnnnnnnnnnnnnnnnnnnnnnnnnnnnnnnnnnnnnnnnnnnnnnnnnnnnnnnnnnnnnnnnnnnnnnnnnnnnnnnnnnnnnnnnnnnnnnnnnnnnnnnnnnnnnnnnnnnnnnnnnnnnnnnnnnnnnnnnnnnnnnnnnnnnnnnnnnnnnnnnnnnnnnnnnnnnnnnnnnnnnnnnnnnnnnnnnnnnnnnnnnnnnnnnnnnnnnnnnnnnnnnnnnnnnnnnnnnnnnnnnnnnnnnnnnnnnnnnnnnnnnnnnnnnnnnnnnnnnnnnnnnnnnnnnnnnnnnnnnnnnnnnnnnnnnnnnnnnnnnnnnnnnnnnnnnnnnnnnnnnnnnnnnnnnnnnnnnnnnnnnnnnnnnnnnnnnnnnnnnnnnnnnnnnnnnnnnnnnnnnnnnnnnnnnnnnnnnnnnnnnnnnnnnnnnnnnnnnnnnnnnnnnnnnnnnnnnnnnnnnnnnnnnnnnnnnnnnnnnnnnnnnnnnnnnnnnnnnnnnnnnnnnnnnnnnnnnnnnnnnnnnnnnnnnnnnnnnnnnnnnnnnnnnnnnnnnnnnnnnnnnnnnnnnnnnnnnaagaattcggcacgaggnnnnnnnnnnnnnnctgatgtggtggtaactttttgagggataatgaaattatgttcagcctcaaaaccctgaaaattaattataatgctgctcagtcttgcttatgcatttgtttgctctaacatgctctttccattaaaaattgttaacttcctccattgctgttnnnnnnnnnnnnnnnnnnnnnnnnnnnnnnnnnnnnnnnnnnnnnnnnnnnnnnnnnnnnnnnnnnnnnnnnnnnnnnnncacttccctgggggaaaaactgtcagatagaccgatagtgttattgttgcatggttattttaataaaagtattcttatatgttatattattaacaataatttaattaaaaacccaaaatactctattgtttcatttctcttttaatatttctctctctcctctaagaaaatgttgcaggaagtttggatcctcttggtttccagcaaaacaagagaataaaacttccatgcaacccgatggcaatacgaaaaaggagttcatattgtttgcagtgacacaagaatctacaaaacacctatattataggtcattcttttcattatactatagtntaagttacagactgctacaaaaggacatg

SEQ ID NO: 82182 - DNA, 1341 bp, Homo Sapiens
  misc_feature (873)..(873): n is a, c, g, or t
  misc_feature (1159)..(1159): n is a, c, g, or t
tggaccggtccggaattcccgggatgacagctttgggatgtcggaagatcctagaggtcccaaggtagctgacttgcgaagctgaggctccagccgagggctccaggcctctgaccggcccagcagtgagcgcggctgcccgacgcttcagggccgggagcagggagcgtgagtcgccatggcgacgccggcgggtctggagcgctgggttcaggacgagctgcactcggtgttggggctgagcgagcggcacgtcgcccagtttctgatcggtaccgcacagcgctgcacctctgccgaggagttcgtgcagcgcctacgagacactgataccttggatctcagtgggccggcccgggacttcgccctgagactctggaacaaggtaccacgaaaggcagtggtagaaaagccagctcgggcagcagagcgagaggcccgggccctgctggagaagaaccgatcttataggttactggaagacagtgaagagagcagtgaggagactgtgagtagggctggaagcagcctccagaagaaacgtaaaaagcggaaacacctcaggaagaagcgtgaggaagaagaggaggaagaggcttctgagaaagggaagaagaaaacaggggggagtaaacagcagacagagaagccagagtcggaagatgagtgggaacggacagagcgtgaacgccttcaggacctggaggagcgtgatgcctttgctgagcgggttcgacagcgggacaaggatcggactcgaaatgtcctggaacggtcagacaagaaggcttatgaagaggctcagaagcgcctcaagatggccgaggaagacccggaaggccatggtcccctgagctgcggaagaaatctcgnccgagagtacctggctaagcgggagcgagagaagcttgaggacctggaggcggagctggctgatgaggagttcctttttggggacgtggagctgagccggcacgagcggcaggagctcaaatataagcggcgagtgcgggatctcgcccgggagtaccgggcagctggggagcaggagaagctggaggccaccaatcgctaccacatgcccaaggaaacccgaggacagccagcccgagctgtggatctagtggaggaggaatcaggagcccctggggaggagcancggcgctggggaggaggcgcggcttggggcaccgtccctgaagtttgggggcccgaggatgcttgcctctcaggagccccaggaatcaactggggtgcttggaggaaggcaggaaggaccatttgtagttttggtccgggggccccacttcaaactttccacgggggggaataaagggaaat

SEQ ID NO: 82183 - DNA, 1045 bp, Homo Sapiens
  misc_feature (30)..(30): n is a, c, g, or t
  misc_feature (57)..(57): n is a, c, g, or t
  misc_feature (103)..(103): n is a, c, g, or t
ggtgttccacgtgtggaccaacatgagtgntgctccagggtcatagactgtacaacnttacgatagcagatgtgagctttcagtgcatttaactgcacccagntggtactccaacagcaaagatgcaacatgcagactgcaaagccttccgctatgaaggtgggggagaagctgcccacaaagtcttctccagtgaaagtaggggagaagcggaaagctgctgatgagacgctgtgccaaacaaaggtattgctggacatcttcactggggtgcggctttacttgccaccctccacaccagacttcagccgtctcagacgctactttgtggcattcgacggggacctggtacaggaatttgatatgacttcagccacgcacgtgctgggtagcagggacaagaaccctgcggcccagcaggtctccccagagtggatttgggcatgtatccggaaacggagactggtagctccctgctaggtttgctgtcttccctctccctcaggccatactctcctttaccatactactggactggactcaggctggaggcagatagacacagtatagggggaatgggcttgcttctcccaaacccaccagttctccactgtctcttctggaccaggaattagttgctgtgggtgccacagctgaagtcagtttgtcttgctggtttaaatagatctttcagagctgggtgctgggtttgccatctttttgttttctttgaaaagcagcttagttaccctttttataaataaaatatcttgcagttatctttgtcctttccccacctacacccccaataatttccctagagattaaggagtaaaggctgggctatggcagctctgtccacaaagccttctctcccatccttgcctgttcctttgtacttccaggctcattttaaagttgtatttaaaggactgccctcggaaatgcttctgtttagcggaacttgtattcagcctgacacgctttgccaggaacaaacctcatgtgaaagaaaacaaaatgaatttttttactttcaaaaaaa

SEQ ID NO: 82184 - DNA, 1125 bp, Homo Sapiens
  misc_feature (138)..(753): n is a, c, g, or t
  misc_feature (856)..(866): n is a, c, g, or t
ccatgcgtaatcttcctaccggtgatcagacgtagtcccgataggcgcgcgtcggctaacgggatcgtcaccaccagctgacgaagactacaccgactggatcctacgcgtgagctagagaagcccacgctcccgaannnnnnnnnnnnnnnnnnnnnnnnnnnnnnnnnnnnnnnnnnnnnnnnnnnnnnnnnnnnnnnnnnnnnnnnnnnnnnnnnnnnnnnnnnnnnnnnnnnnnnnnnnnnnnnnnnnnnnnnnnnnnnnnnnnnnnnnnnnnnnnnnnnnnnnnnnnnnnnnnnnnnnnnnnnnnnnnnnnnnnnnnnnnnnnnnnnnnnnnnnnnnnnnnnnnnnnnnnnnnnnnnnnnnnnnnnnnnnnnnnnnnnnnnnnnnnnnnnnnnnnnnnnnnnnnnnnnnnnnnnnnnnnnnnnnnnnnnnnnnnnnnnnnnnnnnnnnnnnnnnnnnnnnnnnnnnnnnnnnnnnnnnnnnnnnnnnnnnnnnnnnnnnnnnnnnnnnnnnnnnnnnnnnnnnnnnnnnnnnnnnnnnnnnnnnnnnnnnnnnnnnnnnnnnnnnnnnnnnnnnnnnnnnnnnnnnnnnnnnnnnnnnnnnnnnnnnnnnnnnnnnnnnnnnnnnnnnnnnnnnnnnnnnnnnnnnnnnnnnnnnnnnnnnnnnnnnnnnnnnnnnnnnnnnnnnnnnnnnnnnnnnnnnnnnnnnnnnnnnnnnnnnnnnnnnnnnnnnnnnnnnnnnnnnnnnnnnaagaattcggcacgaggcgtaatgtaacatttccttctagcttcctactgaattgtgagctgttacttgttgaaaaaccatatcacttttctgttgccatgannnnnnnnnnncaacaaaaaaccaaagtgcattgtacgccctttggccagtcttgtatgtgccttgatccaacgctacatgtattcagcttttaaaactccacaaatttttcatactccttaaatatgaaaaattatggtcttattgctgaataaaacttttaaaaagtacagaataattgtgcttgctttttcaggattgtgttactatcactaagtagcaaattgcccagcacattagtcctaaacgtcccatgtatttttctaggca

SEQ ID NO: 82185 - DNA, 1575 bp, Homo Sapiens
gctgtctggcgaggaagttatgggatgtgagcgccgccaccgtgcagtagattctccgcgacgtggtcctctctcctcgggctttgccttcgctctctagcttttcttctttcactcccgctcccgactccagcccgctgggctcacgctctgccggacaccaatcccggcggcctgcccgaggagctcgaggctaggcctggccttgtcccgggagtcccgccctcgccgcaccgggatccgccccggccgaacgcacttccggcagcgccgggcgggagggaccgagcggggagaaaggcctgcggggaggcgcaggatggacgcgttggctgtcatgatgtaggacctcctgacctagaaccatgcccggcgcagggagaacaacgagcttatggaccgggtgcgggggctgctgtgcgagaaagcctacctgctggcccgggagcgttcgccggcccacctggtggctttccctggacgtttaacggcgactccgcccggcctcccgactttttgatgcaggcgttctcttacatgactttcttcgaggctagattctcgaaagacatcctgaaggtggctttcttaattagctgactcaccggctggcggagcagttcgtagtcccctacatcgagagggagagccccgtcctggctcagtactggggcttcgtggacgcgctgtagcgggtcttcgccgtcgtgggtaggaaacagtcgggccggatccccggtgtctggggagcggctgccggccgggcccgcgcgagccgcttcactcctacaagcccggctcactagttccaagctgctggactttgaccctcgctgggaagcttgatcgccgcctgttctcgccaatctctatgcctttgcactgcccagcaacccggtcactgcccaggacctgttaaaagttgaatggacctcccagaatcacgccgctgccaccgccgtttctagagacggcttttggccacctttgagaatcagggtcaaacttggaagggcctgcatttgtcacacttcctcggacactaatttggatagttcaggcccagagacggcttcccgggttagtgtgcctgacaacactgaagaaaaattgtgacattttccttccccagaattacttcgttttatacatttcacttctcttctgaaatcacagcaatgccagtttgcgccttttggtctgaggaacgcaggccctggccactaccaggaaaaagtatttacttttaaaacttgaatgtatatctttaccgtatgcctagtacagtagtgcttggaagaaacagattagtaagacaaaatatatgtcttcaagaacacttacgttctgagaaagaattctgaatgcagattctaatgtctggtaaaatgctttacagtgtaaagaatgcatatatgattcttattttatggcattttaaactttccaccccacggttttaaagtgttaatatatgttaaaaatatatgcaatttataaaggagagggaaagcccagcttgatttttgctgccaaagatggtatatttaaaattaaacgtaactaatggcaaaa

SEQ ID NO: 82186 - DNA, 574 bp, Homo Sapiens
  misc_feature (199)..(209): n is a, c, g, or t
aggataatgctgtttattaaaaatatagtcagggagaaggaagtcagtgcatttatgcaattttacatacacatctgtatttatgattctctgagaaatgcttttgtataagtcttaggtttgacattgcagtagttgacatacacggtaaaggataacctagtgacaaatcactgaagatgcttcctttgttacctcnnnnnnnnnnntccagacaaaatagcatttataaatatagaaaacaggattggctgttctccaagaacttcaagttaacaattcttatgcaaggaaaagttcttaatgctaaagacttgttctgcatgaaggagacattctttaataatggaagaggtggttttatttttactacaagccgactcatatttccaaacctataaccaattgctgatctcctgtgtaaagcatttttttccttttatctgaaacagtgatttatatgaactgttggaataatggaacctcaaactacagatgtgtatgtaaaatgtgcataaatgcactgacttccttctccctgactatatttttaataaacagcattatcctaaaa

SEQ ID NO: 82187 - DNA, 643 bp, Homo Sapiens
  misc_feature (85)..(152): n is a, c, g, or t
  misc_feature (214)..(229): n is a, c, g, or t
cttcttttaaagggatatgatcaagttataacatgtaccctgcttcccccaaccctgccttcttcactaaataagcatgtagctnnnnnnnnnnnnnnnnnnnnnnnnnnnnnnnnnnnnnnnnnnnnnnnnnnnnnnnnnnnnnnnnnnnncaacttgcactccacattaattaacatgtctaggagtgggagcctgacagacaccactattnnnnnnnnnnnnnnnntccccaaaatgattccaatagacaacaaagttgaggaaccactggcacatcccaagctaagatacaaggttaaatggcctttttaagtatgtcatactggatctttaaataaagcaaggcttttgttacactttgtcatgttattaaaagcagacctttgggctgtttaaccgtgtaacaaaaatgccacgtgaaaaataaaaatttttattgtatagcaattctctataaatagtagataatctaagtccttattttctgatggctcttgttccactattaacattgtttttaatttttaaaatcctatcagcagcctcctaattagcagtgttaggaatttgccttatgttttccatctcatctcctgaacctgttattctgagaactcataaataaaattcagccaagatt

SEQ ID NO: 82188 - DNA, 1034 bp, Homo Sapiens
  misc_feature (35)..(35): n is a, c, g, or t
  misc_feature (143)..(143): n is a, c, g, or t
  misc_feature (152)..(152): n is a, c, g, or t
  misc_feature (162)..(162): n is a, c, g, or t
  misc_feature (170)..(170): n is a, c, g, or t
  misc_feature (195)..(196): n is a, c, g, or t
  misc_feature (218)..(218): n is a, c, g, or t
  misc_feature (242)..(242): n is a, c, g, or t
  misc_feature (293)..(293): n is a, c, g, or t
  misc_feature (327)..(327): n is a, c, g, or t
cagttgagcacatgccagcccaaaaataatttgtngaatagcattctagtagtggaagcagactgcaacagaatagtggatatacttttttaaaaagcatcccacagtgattcagtcactatgtctgtgatgaccaagcagtnacagaaatngtcagacccncccataantatgaatctagtgtagcttagtcanntgtcagactaaatctaaaggtnttgtggatttctgtagcctatctnggctgcataccaaaaagccatccctgaattagtaggaggaagaggataggnagaaagaaatctcttagtccagtgatgtgccttngcaaccagccagcattccaatttaatcaggtggaaatgatcttcctggctcataagtatttggtatcacacaggctaattgccccccttagggcgtgatgagagttaggagagtcaatgtaaaatcacataacctatttgtcaaaaataatgttaaatccagatagttctttcaaattaaatttttaaagctgtaataagactgggcatggtgactcatgcctgttatcccaacactttgggagtccagggtgggagtattgcttgaggtaagaagtttgagactagcctgggtcccatagtaagaccctgtctcttaaaaaataaatactatctttctctctggcctctccatcctccagacaatcactgaattacaatatttgcttaacagtagattaatgtcaattttctggaattttatatgactgatataacatgtttcctcttttcatacctgagtactctcctgagccctatttatttagatgttcttcttttttctttattattatttttatttcacatagcagggatgcatattttgacattcatcaatcatgatatatgagtagttcattctttttatcttagaatatgacatgctatggaaatcactgtatacgaattcatctgcttatggatatgttattgcttcttatttttgtctgttaggaataaaactgcttgttaagcacatttgaatgc

SEQ ID NO: 82189 - DNA, 424 bp, Homo Sapiens
  misc_feature (28)..(28): n is a, c, g, or t
gtgtggatgtgcgaagggccctcccccncccgcttgcgaaaggaacatgcggtgctggaaccctgttcggaactcccaatgccttcctcgcctgctcacctgctcgacgctggaatcgggacaggtgcaaagggacgcagacgtctgggacagctaaggcccgtgtcaccggagggctccgcacagtcgttctggtttcaacaaataagcaaaactcgggcaagtactgcagctatttggaaatgttttccaaaccacagtctctttagaactaagcctatttgaaacggtcggtgtaggcttactgagatcaggagacagggaggccccgcacatcacacagataaagtcagacaattgtaattaatacttttgctgcctcaagttgttttttaaataaagtactttgaaatgcatgagaaaa

SEQ ID NO: 82190 - DNA, 1057 bp, Homo Sapiens
  misc_feature (929)..(952): n is a, c, g, or t
agaataattaattttcttttccacaatgtggttctcttagaagaatgacgtatcttcttttcctcagcgagttggacacattgtgcccagggcagccctgtccttgggcagcgaccgcacaccaaagctgggaggaggctggtccggggggcctgggcagaagacagtgatttgcaggggtggctcccagacaccctgcccagggatgggctgggcaccacctgggggcggagcgtgagctccagacgagctcctgcgtgcgcgtgtgagtgtgtctgcgcccagccatgtgaccctgctcgtcccgtctgaaggactctcctaggaggccaggttgcccctccagacccctcccaacgtcagggggaaggaaacgttgactttcactgcactttgattcgtctctaaaccatttgctggggattcctgagagcagagctcccagcgggccctgcctcccaagtcccgccgcaaggctacctcgggtgtgtggatgtgcgagggcctcccccgcttgcgaaggggacatgcgtgctggaacctgtcggaactccatgccttcctcgcctgctcacctgctcgacgctggaatcgggacaggtgcaaagggacgcagacgtctgggacagctaaggcccgtgtcaccggagggctccgcacagtcgttctggtttcaacaaataagcaaaactcgggcaagtactgcagctatttggaaatgttttccaaaccacagtctctttagaactaagcctatttgaaacggtcggtgtaggcttactgagatcaggagacagggaggccccgcacatcacacagataaagtcagacaattgtaattaatacttttgctgcctcaagttgttttttaaataaagtactttgaaatgcatgagaatcatgctgcaatatgatcattctagagcaannnnnnnnnnnnnnnnnnnnnnnnttcaagatgaaactaaagcagtttttaaattaaactttaccttgagatttttcctgtgttattttaccagatacacaatcaccacactacacagacaaacagcgg

SEQ ID NO: 82191 - DNA, 1239 bp, Homo Sapiens
  misc_feature (35)..(35): n is a, c, g, or t
  misc_feature (47)..(47): n is a, c, g, or t
  misc_feature (193)..(193): n is a, c, g, or t
  misc_feature (214)..(214): n is a, c, g, or t
  misc_feature (247)..(247): n is a, c, g, or t
  misc_feature (283)..(284): n is a, c, g, or t
  misc_feature (365)..(365): n is a, c, g, or t
ctgggagctgcgaggatcatgacctttgatcaatntgtgtatgattntcgtccacatggagatcactgctctattgagttatcttggcagtctttaatgaccatagcgacttcggccaggatatgattcagcttcgtacttccatttagtgctgcagcattgagccctcacatcatgaagagatccagtattntgcagtgtgaaggaaagtgcngacaaatcatgaacttacaaagcattcttggantaaaagtgtgggggatccctttctccagccttcacnntacaactggaagagagcactgggtctcgcgagcaagatgtcagactgcttcaggaaattgtagatcaatgcatgaacagangtattgcattaactcaggcgcgctacttggagaaagaagagaagttctccctcctcccagcattcgggttgtggtcacggtggaacaaacagaggaagaactggagagagctgcgtccaccatcaaggaggtagcccaggccgtcctgctctaggcagagtcccgggaccatggcctcctgccacacaacacgcagagaggacttaagactcccgctggccatggagtggcctgaaagagagcaagaacatgtggatctttgataggattgttaccaaatggtgtcagtatggaccaattgtgtgaccatgagaaggatgcttattttttttaaaaagaaaacacatctaaaagcccaggaactgatttttttaagaggaaaactaatgacagtgtataactgatgtttaaattgtgcatttagtactatttaaatgttttcttatactagtattttatattcttttgttgtcgtttaaaactggagcttcagtgtctcttccctccctctaatagtaatggttcagtaagcactccttaactccttagtatttcatagaaaaatgactgcaacattaaagctaagaggaacacttcaacatatgtggtacaaatttatattgaagatctaaataaaccacgtattttccagtcttcgttgtgtgaagctaaatggtggctaaaaggaacactttttgtgtgattattataaactttgcattgtatttgaatcttagaacttttgtacacactaaatattgatgtcacaccatttctaatctgagcatccttagccagagaatattcattatacttcctaagtgagcaataatttaaatcagaagctattttattttaatgtaattaacctttc

SEQ ID NO: 82192 - DNA, 1129 bp, Homo Sapiens
  misc_feature (16)..(16): n is a, c, g, or t
  misc_feature (85)..(119): n is a, c, g, or t
gcatgtactagactantatagggcctagcgcggttttatgccgaacgacgagcgcagcgagtcagtgatgcgaggaagcggacgnnnnnnnnnnnnnnnnnnnnnnnnnnnnnnnnnnncagtcgacggtaccggacatatgcccgggaattcggccattacggccgggcagtaagcactccttaactccttagtatttcatagaaaaatgactgcaacattagagctaagaggaacacttcaacatatgtggtacaaatttatattgaagatctaaataaaccacgtattttccagtcttcgttgtgtgaagctaaatggtggctaaaaggaacactttttgtgtgattattataaacttcgcattgtatttgaatcttagaactttcgtacacactaaatattgatgtcacaccatttctaatctgagcatccttagccagagaatattcattatacttcctaagtgagcaataatttaaatcagaagctattttattttaatgtaattaacctttctttacatttcttatgtgttcacctctaatctgttttaggaagagagttggttattatgttgatcccataatataaatcatatcctttatattttagaatatctcaaatgtattccttttttgtatggtgggtttgcctagggacgtgtaactacaggcttttactaagccaaggaaaaagagaatttttcttttcatcttacaaattccagatatctacaaaagatgtgaaagcactaaaaataccatttttaagcagtactttacctgttttttctttagcaaaccaggttatgtggtgtaaaggtttgttatacgtgccacaatatagcatataaatattatgccatcattccttctcttgttaaaggtagaagaataaaattgtgatttttataacctgtgcttattactcaaatggtcttcaacatctttttaaacaacacatactttttgaatgttcagtttctattttgcttgaggtattttgtacatatgtgccttgtgattgctgctgctttaaaggataaagtactctttgggggatgagtctggtttgttttgctttatttttcaatgaaataaacctataatcctgattattaaaaaaa

SEQ ID NO: 82193 - DNA, 1032 bp, Homo Sapiens
  misc_feature (665)..(665): n is a, c, g, or t
  misc_feature (710)..(710): n is a, c, g, or t
  misc_feature (713)..(713): n is a, c, g, or t
  misc_feature (724)..(724): n is a, c, g, or t
  misc_feature (743)..(743): n is a, c, g, or t
  misc_feature (835)..(835): n is a, c, g, or t
  misc_feature (852)..(852): n is a, c, g, or t
  misc_feature (939)..(939): n is a, c, g, or t
  misc_feature (953)..(953): n is a, c, g, or t
  misc_feature (999)..(999): n is a, c, g, or t
  misc_feature (1001)..(1001): n is a, c, g, or t
cttgcaaaactgggagctgggctggctccagccggcttgctttttgaggagtgaccatttctgcaccatttgctctacaggcagccactggggagaatgcctgctgcgttgcgtctgcgtttcacaccaggccgttggggagagattgtgagcgccttcaggtcaggattggggtctttgcatcaatggctggagcctcagcgcccactccacacagtaacagctcaggaaaggcctgctggttgatcccaaatccacgtagaacggttccaactgcagcggggaagatgggctggtttaaaataaaaaaccaggtattgtttcactggtgccagaacacccagctcttcctggtattatggggtctgcagaccagttggaccccgggaataggcaggggctatagtcgcattttcagaaggtgatctggagccatggaaaatgccctactctctggcagttctaccagccaccctcagaccacagcttccctgaaggctgtgcagctgtggcctctagggaaggcctgtgtggtcaggtttttcctttgtgttaatttccaggccgggagctgactaactgcacaggtctacccacagccacatgagatgaagtcaggtgcaacgatattttccctaagtgactagagttagtgccacaagcanacgaatgaattcccaggaagctcatcttctcacattggtccacancangccgacatcanaaacaagcatctgattcanggagaagagggccacgactctaccagcccagatgtagcggcttccagggtgaccgtgggtactgagggtgcgtgcgagggtgggagcaccantacacgtgcacgcagtnggggtgcctatctgtggcgatttaggatcatactgactagagtcagtttgctataccacgtgtgcggtatctcgacaagtcgcatanatatcctctccganatctgtgtgatgagttaaaatgcgtgctacggtgcgttatcaacananagctcaatcgcaacgtgtactactgaagacc

SEQ ID NO: 82194 - DNA, 1096 bp, Homo Sapiens
tatggtaggcctggtgtaatcggcacgaggggcccctaccgtagtgcagcagcagttgcaggcagacggagcagagcggtcagggatcatgagggagagtgcgttggagccggggcctgtgcccgaggcgccggcggggggtcccgtgcacgccgtgacggtggtgaccctgctggagaagctggcctccatgctggagactctgcgggagcggcagggaggcctggctcgaaggcagggaggcctggcagggtccgtgcgccgcatccagagcggcctgggcgctctgagtcgcagccacgacaccaccagcaacaccttggcgcagctgctggccaaggcggagcgcgtgagctcgcacgccaacgccgcccaagagcgcgcggtgcgccgcgcagcccaggtgcagcggctggaggccaaccacgggctgctggtggcgcgcgggaagctccacgttctgctcttcaaggaggagggtgaagtcccagccagcgctttccagaaggcaccagagcccttgggcccggcggaccagtccgagctgggcccagagcagccggaggccgaagttggagagagctcggacgaggagccggtggagtccagggcccagcggctgcggcgcaccggattgcagaaggtacagagcctccgaagggccctttcgggccggaaaggccctgcagcgccaccgcccaccccggtcaagccgcctcgccttgggcctggccggagcgcagaagcccagccggaagcccagcctgcgctggagcccacgctggagccagagcctccgcaggacaccgaggaagatcccgggagacctggggctgccgaagaagctctgctccaaatggagagtgtagcctgagggctggtgttgcctgcctcccctgtgcttgtgccttgtcccaaaataaatcctttcagaatgtagcactcacgccctaataaggagcgaatcctacatccaccaaggcgggcgctctggccctcccttccttaagcccagtcctgtgtcctctgaaagaggtgcagtcactcacacctgcttgcgctcaccatcaataaaagtaatttcacccgaaaaaaa

SEQ ID NO: 82195 - DNA, 1059 bp, Homo Sapiens
  misc_feature (28)..(28): n is a, c, g, or t
  misc_feature (40)..(40): n is a, c, g, or t
  misc_feature (108)..(108): n is a, c, g, or t
  misc_feature (111)..(111): n is a, c, g, or t
  misc_feature (120)..(120): n is a, c, g, or t
  misc_feature (130)..(130): n is a, c, g, or t
  misc_feature (136)..(136): n is a, c, g, or t
  misc_feature (178)..(178): n is a, c, g, or t
  misc_feature (206)..(206): n is a, c, g, or t
  misc_feature (237)..(237): n is a, c, g, or t
  misc_feature (293)..(293): n is a, c, g, or t
  misc_feature (354)..(354): n is a, c, g, or t
tatctgaattccagtcagctcattcccngtatcagaacanccagggtgactcttatcaccagtgcctcactcgtaaacagatttccagccgtctgtccaacagcagcntantaaaccagntaaagtcacntgtgcnaactgcaaaaaacctttacagaagggccagacagcgtatcancgaaaaggatcagctcacctctttgttntaccacgtgccttcttctgtctcccacagcntgctccaaggaaactctgtgttatgtgtaaaaaagatataactacaatgaaagganccattgttgctcaagtggattcaagtgagtccttccaggaattctgtagtacatctggttnatctctctatgaagacaaacagaatcctactaaaggagctctaaataaatcaagatgtacaatctgtggtaaactaactgagattcgccatgaagtcagctttaaaaatatgactcataagctgtgcagtgaccactgctttaatagatatagaatggccaatggtttaataatgaattgctgtgaacagtgtggagagtacttgcccagtaaaggtgctggaaataatgttctggtgattgatggtcaacagaaaagattttgctgtcaaagttgtgtcagtgaatacaaacaggtaggtagccatccaagcttcctgaaggaggttcgagatcacatgcaggactctttcttaatgcagcctgaggtaagcaggaatgtaaatggagttcaaggccttaacatttttgagcactgctactactgtcattaatatgtatctgaaaaatcttgtccaatttgaaatatattaaaatttccaaacttaaattgtatcaaatgatgaatgttttatctctgagacatagatttctaatttcactaattttacatgtattttcttgtgatatgctcatttgtctttagttatttatgttcttaggaaattattttcagatttttttagtgcacaataccttgtacacagtaggcatttaataaagggatataaaaatcctctcttttgtgcctacctgaaaagttaaa

SEQ ID NO: 82196 - DNA, 1045 bp, Homo Sapiens
  misc_feature (20)..(20): n is a, c, g, or t
  misc_feature (27)..(27): n is a, c, g, or t
  misc_feature (59)..(59): n is a, c, g, or t
  misc_feature (65)..(65): n is a, c, g, or t
  misc_feature (76)..(77): n is a, c, g, or t
  misc_feature (85)..(85): n is a, c, g, or t
  misc_feature (93)..(93): n is a, c, g, or t
  misc_feature (98)..(98): n is a, c, g, or t
  misc_feature (117)..(117): n is a, c, g, or t
  misc_feature (132)..(132): n is a, c, g, or t
  misc_feature (238)..(238): n is a, c, g, or t
  misc_feature (247)..(247): n is a, c, g, or t
  misc_feature (282)..(282): n is a, c, g, or t
  misc_feature (284)..(284): n is a, c, g, or t
  misc_feature (297)..(297): n is a, c, g, or t
  misc_feature (320)..(320): n is a, c, g, or t
  misc_feature (417)..(417): n is a, c, g, or t
tttgcactggtaagcaccgngacagangggccaagtgcgtcagcactgccggaggcgancagcanggccagccatnnccggaatntacctcanccgtntctgtcattgaaggcacgntgcagaagttgtgancgacaccttccagccattctcagcgtgaaccgcccattccccattgccgtcaagtacttgttgacctttctggatgagctagcagagaagcacggcatcgaggacncagggaccntgcacatctggaagaccaacagtctgctgctgcgntnctgggtgatgccnttgaagaacccacagctcatctntgatgtacgggtgtcggacaatgtggacgccatccttgctgtcatcgcccagaccttcattgactcctgtaccacctcggagcataaagtgggccgngattccccagtgaacaaactgctctacgcccgggagatccacgctacaagcagatggtggagaggtactatgcggacattcgccagagctctccggcgagctaccaggagatgaactctgctttggctgagctctccgggaactacacttctgctccccactgtctggaggctctgcaagaactctacaaccacatccacaggtactatgatcagattatcagtgccctggaggaggaccctgtgggccagaagctgcagctggcctgccgcctgcagcaggtcgccgccctggtggaaaacaaagtgactgacctgtgagctctggctcagacagcagcaagccggatccaccaacaccgcagcgccttatgaccccggaaccgagccagccactgaggggagctggcagagcctgggggcacagggtgcaaagccaggcactgtgcccagcagtgggctccctgcctgccacctcccctgccagcccacccaccttccccccacctgagattgtttctaatttataaggatccccctccttccccctctccccattgtatttatttgcctgctggaaaatcacatccggaaataaaatagaaatatgtctttttattttaaaaaaa

SEQ ID NO: 82197 - DNA, 1368 bp, Homo Sapiens
  misc_feature (27)..(27): n is a, c, g, or t
  misc_feature (98)..(100): n is a, c, g, or t
  misc_feature (119)..(119): n is a, c, g, or t
  misc_feature (127)..(128): n is a, c, g, or t
  misc_feature (136)..(136): n is a, c, g, or t
  misc_feature (143)..(143): n is a, c, g, or t
  misc_feature (154)..(155): n is a, c, g, or t
  misc_feature (210)..(210): n is a, c, g, or t
  misc_feature (223)..(223): n is a, c, g, or t
  misc_feature (291)..(291): n is a, c, g, or t
  misc_feature (865)..(877): n is a, c, g, or t
  misc_feature (1158)..(1166): n is a, c, g, or t
  misc_feature (1206)..(1206): n is a, c, g, or t
  misc_feature (1304)..(1314): n is a, c, g, or t
gatgactgacagttagctgtatcatantgtgctcaatgtgacaacacacacaactcatgccaggaggatgggtgttcagtcagcagcgtgatctgagnnntgaaatgtaggtagaagcntgctgtcnntagtaacntgtgccntgctccaccanngaggagtaccaaatgtgagacctgagatctcctccaatatctgtcctctgcagtnccgggaaactatncatgaagtacacatgcagcagctcctccacgtcctttcctccgaggtcctcctttccattctcccacntagatactgacacaccgccacggtttccacattggaagggcagaacactgtgcagtatcgtgcacacttgctgggttaggaatagagctgccctagggtcaccttcatgcaagtattgacagctacaaattaaagtccttagagcagttgacacagatactacgttctagaagagaattaaatttaaacgtcaagtttaaagggatcataattctgcaggtatctttctctgagtgactgaatgtgactattgcattagggtaaatgaattaagacgtgcaagtgggatttactgtatgttagaaaggagttttgcagccaagactgccttgaataaaatgtgtttgcactgaaaaaaaattttaaattacttggtctctggttgctgtaaaggtcatccaagatggatgttctgtttatattgtatagtatttcatatgaaataattacagttcatgaaatgtcttccctaatgttactgatttataacagcacatttgtaacatggtttttatcgtgtcagtgtaccatactgtaaatgatgattacttgtcatgcttagtataataacttnnnnnnnnnnnnnggacagggatttttgtaagtctatatttgaaagtccctccctatggtgatactgtgttcatgttgtttatgtagtgttgtgtgaaatatccattttggattgtgttactttttaagatattaaataacatttggttatgccaaccacgactatgcgtttccaagatacctcaaaacgccgggccgctactacagcatcaccgaaaggggcccgatacaaaagggggggccggctttaaaaaattccccccgagggggcccaagctttaccctgtacccaannnnnnnnngaaaaaagggcgccccaataggggggcccctttttaaaancctggggcatgggcccgtccttttttaaaagcgtccggaacggggaaaaaacggccaaccttggggaaatttttgggaaagggaccccttactttttnnnnnnnnnnnacataatatggaacaaaataacccctaaaagaattttataagcctccaaagagg

SEQ ID NO: 82198 - DNA, 1195 bp, Homo Sapiens
  misc_feature (115)..(116): n is a, c, g, or t
  misc_feature (125)..(125): n is a, c, g, or t
  misc_feature (179)..(179): n is a, c, g, or t
  misc_feature (240)..(240): n is a, c, g, or t
  misc_feature (308)..(308): n is a, c, g, or t
  misc_feature (1116)..(1116): n is a, c, g, or t
  misc_feature (1159)..(1159): n is a, c, g, or t
  misc_feature (1170)..(1170): n is a, c, g, or t
ccctagcacccagcttcattatgtccggtgttgtgttggaattgacgatacaattcaacaggacgttgactgatacgattatcgactcctatagattgccctcgagccagatcgnncacgaggcnagtacagagcacagggacaggaggtgaaccaggagacaatgttcagtcccagtnttgactcagtcccactttaacatgggcctagcatgggcattggggccagcaagagctagtntgcaaaagtgcacagaactgctggagactcccagtcttgaccatctccttcagtgatccaaccgcacngttcctctgggcagagctgcctggctgaggaccatcttcaggctccgcgccccccgccgataggagcgagtgctctcggagctgaatctgacggggaggtacatctccgaaggggtggtcccggatgtcaggctgggtctggaggtgcctgggggctctcggaggccctctttcagagttgggtggggcttggctgggatccccaggttccaaggggctcatcagactggaggaggaggctggactgcccaggctctcaggggtctcaggggcctctgaactcaggctggagacttcagaacgatctccactggcatgtcttgcacacccttggaccaaagtccgagaagagtttttgactggcaagggcgggggacagtcctcactctcgccctgaggggtggctgctcccaggctggcgacagtctcataggtcttgttgctgatgtccagcctcccactggcccagtgagcctgggccgggagcttcagcaagcagcgcttctcttcctcatcctcctcactgtcagagccaggctctgtggaaattacccaggagtagtccacatgtagagggaaggcaaaggtccccgcctgggcctgctccagcagctcctcacactccttgtggtgcttcttcctggctatgtccagagctgtctcgcctgcttcatttactgtgccaaccaaagctctccccttcagcagcagcttgaggcagtcgggctggttgtagagtgctgcgtagtgcagagccgtgttcccgtcagcagccttggcatccaggtgaccaccgttctggatgatnaaatccaccagaggcagggaagcctggttggcgactttgacanccaaatgcaanacgagttcttcaggtgcctgaaaac

SEQ ID NO: 82199 - DNA, 718 bp, Homo Sapiens
gcagtattctaaattttttgaagtcaacacaggaaatgtatttttatgacggtgtctccagagatgcagcttcagctgccctcgcagatgccgctgaggagctgctggaccgcctcgcgtcacacagcatgctgccctcagacgtgtccatcctgtaccacatgaaaacgctgctgctcctgcaagatactgagagattgaagcatgctctggaaatgttcccagaacattgcacgatgcctcctgaccatgccagagtaatctcagctttctttagttactggatcacacatatccttcctgagaagagcagtgactaaaatggaatatctctttaagaacagctcctctttaacaaaaaaacttaaaagacaaatgtgagatgggcttagagttagttctctgggaacttgaaagacatttatgccatattatttattcacgtgtttgttcctggtgggcaagatgccatctgaggcttcagatgagaaattggggtaaaatggaaatttttcacttatttgcaattatatatatcttgaattactacataaaacttgattctgtttctctacttattgtaaaaattgaaaatggacattctgttaagttaaatgtatagtttgaagctaatatatttttatgaagttttgaatcaccttgtatctgaaagtctctgctttaagaatgctttctgggtattaaaatgttctagttt

SEQ ID NO: 82200 - DNA, 631 bp, Homo Sapiens
accgggccctgggttcctcctctcctactcggctctgcagtcctactcaagcgggtggctctgggatcctgggggcctgggttgggggctagggagacgccatgtgatggacactccagggacacacagcctagcacagcagcttataatgggctctccggggccatttgcaataacagctgcaattccctggatagacgagttgatttcctccctctgcccatcccccagccatgccagctggcctttgtaagtgcaggaaaccgagtagaaaatgtgaccctccaaatggagaagctgcaggctttgccattgtgaaccatggtgaagtgcttggaacatactgttcactcactctaaaggcgctgagactgtgctgttgttctcgtttttatagtcaatggcttgttcatcatccagatgtggctactgacatatctacacttcgcaccggagtgtctggaattgtggctatcctgattataggattttaacttaactgaaatgcctgctttgaataaatgtgttgggttttttgtttggttttattttatacttgccatcagtgaaaaagatgtacagaacacatttctctgatctccataaacatgaaaacacttgaaatctcaaa

SEQ ID NO: 82201 - DNA, 980 bp, Homo Sapiens
  misc_feature (26)..(26): n is a, c, g, or t
  misc_feature (78)..(78): n is a, c, g, or t
  misc_feature (80)..(80): n is a, c, g, or t
  misc_feature (91)..(91): n is a, c, g, or t
  misc_feature (121)..(121): n is a, c, g, or t
  misc_feature (139)..(616): n is a, c, g, or t
cgctagtttggaagcgccgctccganagggaaggcgacagttccgtaagcgcaggtcgaacagaggcgcacgaggagntncagggaacgcnttgtatctatagtctgtcagtttcgcaacnctgacttagctcgatttnnnnnnnnnnnnnnnnnnnnnnnnnnnnnnnnnnnnnnnnnnnnnnnnnnnnnnnnnnnnnnnnnnnnnnnnnnnnnnnnnnnnnnnnnnnnnnnnnnnnnnnnnnnnnnnnnnnnnnnnnnnnnnnnnnnnnnnnnnnnnnnnnnnnnnnnnnnnnnnnnnnnnnnnnnnnnnnnnnnnnnnnnnnnnnnnnnnnnnnnnnnnnnnnnnnnnnnnnnnnnnnnnnnnnnnnnnnnnnnnnnnnnnnnnnnnnnnnnnnnnnnnnnnnnnnnnnnnnnnnnnnnnnnnnnnnnnnnnnnnnnnnnnnnnnnnnnnnnnnnnnnnnnnnnnnnnnnnnnnnnnnnnnnnnnnnnnnnnnnnnnnnnnnnnnnnnnnnnnnnnnnnnnnnnnnnnnnnnnnnnnnnnnnnnnnnnnnnnnnnnnnnnnnnnnnnnnnnnnnnnnnnnnnnnnnnnnnnnnnnnnnnnnnnnnnnnnnnnnaagaattcggcacgaggtttacaataatttaatgtgcctgagaatttttgtgcaaatacatgtcatctttcattaaaaatatgcatagcgcactttggaaaaagttggtttagttgtcaccaacttttcttacaaaaaaagtttacatatataaatatacaacattccctaattcctattgattgcacttctggcttaaccccttccagcctccaaggaatttttaaaaacatgcaattatgtttgtattccttggctactgtacttattcagacgaaatattctaaaaacaagttttcttggtttcaatttactcacattttgcctcttaaaagtaaatccctcccaccctctaccccagttg

SEQ ID NO: 82202 - DNA, 1022 bp, Homo Sapiens
  misc_feature (29)..(29): n is a, c, g, or t
  misc_feature (52)..(53): n is a, c, g, or t
  misc_feature (60)..(60): n is a, c, g, or t
  misc_feature (71)..(71): n is a, c, g, or t
  misc_feature (92)..(477): n is a, c, g, or t
cgattttgtatctcgtcaggggccgagcntatgaaaaacccagcacgcgccnntttacgngtctggccttntgctgccctttgctcacatgnnnnnnnnnnnnnnnnnnnnnnnnnnnnnnnnnnnnnnnnnnnnnnnnnnnnnnnnnnnnnnnnnnnnnnnnnnnnnnnnnnnnnnnnnnnnnnnnnnnnnnnnnnnnnnnnnnnnnnnnnnnnnnnnnnnnnnnnnnnnnnnnnnnnnnnnnnnnnnnnnnnnnnnnnnnnnnnnnnnnnnnnnnnnnnnnnnnnnnnnnnnnnnnnnnnnnnnnnnnnnnnnnnnnnnnnnnnnnnnnnnnnnnnnnnnnnnnnnnnnnnnnnnnnnnnnnnnnnnnnnnnnnnnnnnnnnnnnnnnnnnnnnnnnnnnnnnnnnnnnnnnnnnnnnnnnnnnnnnnnnnnnnnnnnnnnnnnnnnnnnnnnnnnnnnnnnnnnnnnnnnnnnnaagaattcggcacgaggagagagttcatactggagagaaaccttacaaatgcaatgaatgtggtaaagcctttaactggtcctcaactcttactaaacataagagaattcatactggagagaagccctacaaatgtgaagaatgtggcaaagcttttaaccggtcctcaaaccttactcgacataagaaaattcatactggagagaaaccatacaaacctaaaagatgtgaccagtgcttttgacaacaccccaaacttttctagacataaaagaaatcatatgggtgagaaatcctagaaatgtgaagaatgtgacaaagcctttaagcggttgtcacacttgattgtatataagataattcatactggagaaaactcccagaagtgtgacaaatgtgacaaaacatttaattaattctcataccttattgcacaggaaagcatttatacttgagaaaaattgtataaagaatggaaaagtcattaatatctgctcatatcttaacatcagcgagttggtatttaataaaagcattatcaatga

SEQ ID NO: 82203 - DNA, 734 bp, Homo Sapiens
cctactgggaaaccctacaaatgtgaagaatgtggcaaagcttttaaccagtcctcaacccttactagacataagatagttcatactggagagaaaccctacaaatgtgaagaatgtggtaaagcctttaaacggtccacaactcttactaaacataagagaatttatactaaagagaaaccatacaaatgtgaagaatgtggaaaagcctttagtgtattctcaacccttactaaacataagataattcatactggagcaaaaccttacaaatgtgacgaatgtggcagtgcctttagggaattctcaacccttactgaacataagagagttcatactggagagaaaccttacaaatgcaatgaatgtggtaaagcctttaactggtcctcaactcttactaaacataagagaattcatactggagagaagccctacaaatgtgaagaatgtggcaaagcttttaaacagtcctcaaaccttactcaacataagaaaattcatactggagagaaaccatacaaacctaaaagatgtgacagtgcttttgacaacaccccaaacttttctagacataaaagaaatcatatgggtgagaaatcctagaaatgtgaagaatgtgacaaagcctttaagcggttgtcacacttgattgtatataagataattcatactggagaaaactcccagaagtgtgacaaatgtgacaaaaacatttaattaattctcatacc

SEQ ID NO: 82204 - DNA, 892 bp, Homo Sapiens
  misc_feature (797)..(817): n is a, c, g, or t
cagtcgacggtaccggacatatgcccgggaattcggccattacggccgggggcggccgccgtaggcgaaggtgaagatggctgcctctgcctttgctggtgcagtgagagcagcttcaggaatcctacggtccctgaatattttggcatcttcaacctaccgcaactgtgtcaagaatgcctctcttatttctgcattgtccactggacgttttagtcatattcagacaccagttgtttcctccactcccagacttaccacatctgagagaaacctgacatgtgggcatacctcagtgatccttaatagaatggcccccgtgcttccaagtgtcctgaagctgccagtcagatctctaacatacttcagtgcaagaaaaggcaagagaaagaccgtgaaagctgtcatcgataggtttcttcgacttcattgtggcctttgggtgaggagaaaggctggctataagaaaaaattatggaaaaagacacctgcaaggaagaagcgattgagggaatttgtattctgcaataaaacccagagtaaactcttagataaaatgacgacgtccttctggaagaggcgaaactggtacgttgatgatccttatcagaagtatcatgatcgaacaaacctgaaagtatagatcagaagtttcacttgtttctcagttattggatatgtatctttgtgtacatatctttgcaaaaatggataagtacaaaacttgatgtaaattgtaccaatgaatatgtaaacatacagtgacaacattaaacttagaaaagttttaaaacttnnnnnnnnnnnnnnnnnnnnngcatacagccgcggccgcaagcttattccctttagtgagggtaattcgagcatggcactggccgtcgttaaaacc

SEQ ID NO: 82205 - DNA, 560 bp, Homo Sapiens
aatctgtctttcaagtttacagaaaagaaagcagtaaatgcattgatgtcattttattatgtacatatatcatgtgcattcaagctgtgtgacaagatatatcaatataaaaacaaggtatatactttattattttttgaaaacaaggatattgtgatcaattttaccctgtaaaacatatttctgtatttataggtcttaaacatgatgaattttttctattacaagtttatttaaaactgctttctcaagtcgttattgatacagcaagtgaacctgctgcagacagaagcagaggaaagccaagaacagcctttattggtgaagaaaagaatgaatgattctttgtaggcgccatcagccacttttagaagccatcagccagtgtgttgggaaaagaggtttgtcaagtgttggcctatgggaaggtggtcaatgaatgttttgatgaaatgaatgtttttgtataatggccttaaacttttctggaagtatttcaaataaattacattattaagtcgggcccaaaaagaaaaagaacatggaacataactgtttcc

SEQ ID NO: 82206 - DNA, 538 bp, Homo Sapiens
attttgttatatatattacagatgaaatctcactgctaatgctcagagatcttttttcactgtaagaggtaacctttaacaatatgggtattacctttgtctcttcataccggttttatgacaaaggtctattgaatttatttgtttgtaagtttctactcccatcaaagcagctttctaagttattgccttggttattatggatgatagttatagcccttataatgccttaactaaggaagaaaagatgttattctgagtttgttttaatacatatatgaacatatagttttattcaattaaaccaaagaagaggtcagcagggagatactaacctttggaaatgattagctggctctgttttttggttaaataagagtctttaatcctttctccatcaagagttacttaccaagggcaggggaagggggatatagaggtcacaaggaaataaaaatcatctttcatctttaattttactccttcctcttatttttttaaaagattatcgaacaataaaatcatttgcctttttaaa

SEQ ID NO: 82207 - DNA, 1117 bp, Homo Sapiens
  misc_feature (37)..(37): n is a, c, g, or t
  misc_feature (78)..(96): n is a, c, g, or t
  misc_feature (258)..(278): n is a, c, g, or t
gctggtaaagacggccagtgtcatactgcaattaacntcactaaagggactaccgcttgcggccgcggctgtatgccnnnnnnnnnnnnnnnnnnnatgcgaagttaacatgtatttttttgataatacaaaaaagtaatccttgaaaatcagaatacataacagaaaagagcacaataacttaagtattaaacatctgtatgaaataactgttgcaaagattgacaaaaatgcacacttagaacatgcggttatttnnnnnnnnnnnnnnnnnnnnngcctacagcagcagccgctcgattattcaattgggaagacgacatttttcgtttggcactgatcgtggatttacagggcagtttctggtattaaggaatcctattatattttaaaacacttcaattctgtttcttgtgttaaattgttaaccgccaatatgtctgattgattattatttctttattcagtatgtgacatgcttggtgttattaattatgtgtctatttcagaataagtattttgttttctttctcggctttccattggggatatctgttatgacaattttagacgctagtcgtttcatgcgctcgttatagagggttttttagtaagtgcttgtctgcgtctgtcgtcattcactccgctcgctcggtctttcagtttcggttatcggtttcattttatcgagtctgcgatatcttctgtctgggctgttttgtggtatatcctttttatactcacatttgtgctggttggtactgtatcttccatgatgtgtgttgatgctcttttgagtggtttttgttgagatgctccgtcaattgtgtgtgccacatgtcttcttggtgcattcttcactttttcttgtttgcgtttcttcttctatacttctctcttcttgaatctgtgctccgtgttttgttcgtgctctggtttttgtgtctcttctctgttcctgtttgctatcctgtccctgcacttttgtgctcttgctgcttctgttttgcgtgctttctcgctcctttttgcgccagtatccgtctctccctcttatctcctcttactcctttctactttctccctcctctttttgcagcctcctcgtgtgcggtgg

SEQ ID NO: 82208 - DNA, 1135 bp, Homo Sapiens
  misc_feature (706)..(714): n is a, c, g, or t
  misc_feature (779)..(779): n is a, c, g, or t
gccttgtcaatgtatttaaagtttacttaaggtcaggaaattctaaaacaacttttctggccttgttatttgatgtatatcttttaaatttactgaccaaagcatgttttaagctgcaatgcagtagtcacgggtggtaaccatgtagtcaggtattgttattaggacctatcactgctgagctgtatttaaaattttggtacaatatataaaatggagaagagcttgatattcaggtactaaccacaactagtctgacattgttggcagttaaaatcttattttgaattgtaaattagttaaattttatgtggaatttgctgagaaaagaatatagactactgaaatgtcattttagttatttttcttatgaccacattgtacaaatgaatctgtgttaaaaagactattttaaatgtatttcctgcttttgtaagcattaaagatttataagaaaattattcaaactattttttataaaatgaaagttatgatttttaaacttattgattcctcttgcccctaccccctctttttggaagatattttgattccttataaacttttaccctaagcttatatatgttttctgtcacaagtgcttcctggcacacagacagccaatggaggggatcaaattcagtgttgtatgtatgtttatggcaacattttgaaaataaaaattaaatgtttttcttcaagtagnnnnnnnnnaattgctgagagaaaaaaacagtaaagctttctgattaagtaaaatttaaatgggcagtaccatnaatttaaaaaactaatacttttaaagagagagacaaagatattttgtgctttgacaaattaaatctaatagtggaaaaatgtgtcttaattaaagcacttactagtgaaaaagatctcacatttatgcaaatcaggtactgattttcatgtatttaccaattaactttggtgaatactaacggttcagggggagtgctattccaagaaaattaggtttgggtacttacaatcccggtttaattaaccaggaaaggttgggtcgggtagttaaccggctgaaaatttaaaccacagttggaaagaagacttagggcacatccggggaagtcaaccgttggaaaacaggaaagggggt

SEQ ID NO: 82209 - DNA, 960 bp, Homo Sapiens
gaaggaagaacaaattcggtcaaggtacagtgccgcgtgttgaattcggcacgaggggaggagccgctacaaccaagttgtaaaagaaaagggagaccttgagctggaaattattgtcctgaatgaccgggtaacagatcttgtaaaccaacaacaaaccctggaggagaagatgcgggaagaccgggatagcctggtggagagactacaccgtcagactgctgagtattccgcattcaagctggagaatgagaggctgaaggccagctttgctccaatggaggacaaactcaaccaggcacacctcgaggtccagcagctgaaggcctcagtgaagaactatgaggggatgattgacaactataagagtcaggtgatgaagaccagattggaggctgatgaagtagctgcccagctagaacgctgtgacaaagagaacaagatccttaaagatgagatgaacaaagagattgaggcggcacgaaggcagttccagtctcagctggctgacctgcagcagctccctgacattcctgaagatcacggaggccgaagctggctgagtgccaagaccaactgcagggctatgagccggaagaacatcgacctcacagccatcatatcagacctggcaaaccggatcgaacaccagggggacaagctcggagaatgggggagagaggaaacttcggggttccccgaagggaaataaacaggtgagttcaaggcggcgtaagcggcgagggaacctgtgggggaccctggcccaaaaatcgaggccatcaggggagttgccccaggagagggggagacacacagtcaccagtggtggggtgaacaccgcgatgtgtacctgttggagtggcgaggatctaaaatacagagcggcggtgcacacagcgaggcctctacagggcacaaaacagtctgcatcactgtacactaaaatgcggcagagtt

SEQ ID NO: 82210 - DNA, 728 bp, Homo Sapiens
gggagaggctcaaggctagctttgcccctatggaggacaagctcaaccaggctcacttggaggttcagcagctgaaggcgtcagtgaagaactacgaggggatgatagacaactacaagagccaggtgatgaaaacaagattggaggctgatgaagtggctgcacagctagaacgctgcgacaaagagaacaagatccttaaagatgagatgaacaaagagattgaggcggcacgaaggcagttccagtctcagctggctgacctgcagcagctccctgacatcctgaagatcacggaggcgaagctggctgagtgccaagaccaactgcagggctatgagcggaagaacatcgacctcacagccatcatatcagacctgcgcagccgggtaagggactggcagaaagggtcccacgaactgacccgagcaggggcccgcataccaagatgagctgcacgccccccaagggaggactacttcctttttcttggctgctgctttttaaaaggagtgagctatcatcagtgctgtgaaataaaagtctggtgtgctaaaaattccttccgtttccccgacaatcttcttgtcggcccgccctcgggccctcaaaaagtttccaaaaaccttctttttggggcccgggcccccccagggtaaaggaaaatgggccaatacttggttccaaggaaatcctgggaaaggactaggggcctgggattccccccc

SEQ ID NO: 82211 - DNA, 1301 bp, Homo Sapiens
aaaatatatattctatattctgtggaaaataacacagctttgataatgaccactgttaaaaactccaattctgattgatatctttttaaacatgaaataggtataattttaaggcagtggataacccaaaggatttaacaccaatttgtaattatagtgatttacattgtgatctatgaaaatgggaatgttgaccatgatttttccaaactgtctctcacacatgcttgtgttttttcttttgacagaaaataatttattagcaggtgtctgtagaggtaagtgctaccaaattctgttttatgtctttttcagaataggtaaaattgtcagtttgggagtaccattatgtatgtgtgtctatatgcatctgtgatttatttctgagagttcgctggtggcatatcaaagagtcggctcctatggtgtctatcagtctgactctcggcctcccctcccttgtgataaaaatcacagtttttaattagggcaatatgagtgtccccaatcttcacaagctgccacctttgggttttaggtgcttatgagaaagtttggggcattgctgatagcaatcagaatcagaaatgtacctgctcagattatccatataaacaattgaaataaaaacattacattatacatcagattaacagcaactcccagaacaaagcttacagtgtataaaaatagctacgtaaaaaatttacataaaaggcaaacccaaaagaaatcctcagtgcagacatttacggaaaaaaaattgaaccatacactacatatgacctattatcatggctgccaaaacttgttcttattgtttgtaattaaatttcatttgttttacttgagataattctctgaaaacctgtgacagcttggtagaatgaactgcttaatacttgaaccatgaattgctgtcaatgtctttgtttatgtcttaaatacgatccacgttcatgcttcaattggtctatatgatttttatctctggacaactaggacagtttctctcttaggcttcagttttgtgattgttttcttctaactttttgttttcttccatattaccgaggtccttgtttacatgttttgatgcagtctttgacttcttcatgtacagccagtagacgacaccagcaacaagggcagcaaggaggagaccaacaacgattcccacaattagttttgcctggtcattcaccttttctctgttttcatcacttatctcgtctgcctcatcgtgttctgcccggccgtaatggccgaattcccgggcatatgtccggtaccgtcgactg

SEQ ID NO: 82212 - DNA, 1229 bp, Homo Sapiens
  misc_feature (800)..(817): n is a, c, g, or t
ccccacctcccaccgccttgcctcactggcaatctggactcgatggagaacatccccccacctccatttggcactacccaagtggagtgtacccttgccctttccaccgtgtaccacccactccaacctcaccccagcttgcccaatgcttctggggaatttaatagctaccatgcaggccacagggaatttgtgaggcttcttttgtcatctttgtatctccagtttgtctttcttttctccatagccctgcctctactttccttccttggaatcaggggttcctttagcccatttgctttctctaccttggggaccccaggggccaagcagttctccatctagtcacaccaaaggcaaaaagcctggctacctcccccctagcacgtgagtccctactcccctcccctctgtttctgcccagcttgcttatcttggggatttcaaggcagcagagggtagtgaggggagagcaggagaagcctctgtcctgtataggcaactgcctgactatgcggtgactgctgtaaccaagatcaggtccccagcccttttgtccattaacaccccttcttgatctttcaaaggcagctaattgctagcaaatccccccgattccggccttttccctctatttctttgttagaagttttctgtggagctgaaacccagcctctgtttgactgggtttcatttagcttagttgggttcttagagccccctgtttgttgttttgtgttgtttccaatgaaaagcaagtttaccctcagagttatgcttttccaaagaggctgatgtcnnnnnnnnnnnnnnnnnnaatgtttcaggttctaagtgaagtgagttggggaggggttgggagtgttagtaatcaaggtttagaacaccatgagatagttacccctgatctccagtccctagctgggggctggacagggggaagggagagaggatttctattcacctttaatatatttttacaaaaaaagcaaacaatttaaaaacaagcccaccgcttctgtacatgtctaaatatatttttagaagtgggtaggattgtgaatttctgatgcagggcctttttataaataggttagggtagcatcattcagacttctctgttgtttttgtccctgtctttttcttatgttgtgttactaatgtaatttatattttttttagatcctccctttcctatagagataaaagtgatttatcttggcaattgc

SEQ ID NO: 82213 - DNA, 1057 bp, Homo Sapiens
  misc_feature (12)..(12): n is a, c, g, or t
  misc_feature (76)..(76): n is a, c, g, or t
  misc_feature (139)..(139): n is a, c, g, or t
  misc_feature (194)..(194): n is a, c, g, or t
  misc_feature (307)..(307): n is a, c, g, or t
  misc_feature (353)..(353): n is a, c, g, or t
  misc_feature (377)..(377): n is a, c, g, or t
  misc_feature (993)..(1016): n is a, c, g, or t
tggcgcacgcantatgtgagtactcactcatagcaccccagcttacacttatgctcccgctgtttggtgtgtgaantgtagcggatacaattccacacaggaacagctatgacatggtacgaatttatacgactccctntaggaattgccctcgagccaagaatcgccacgagggtctgctgctgatcactggntgaacgatgaagttgtgacagctgctcaggctgctcgttgagttttcactcacagaaagacgacaccattgcaggtactgtggtcagctcttctgccagaagtgcagtcgctntcaatctgaaatcaaacgcttgaaaatctcatccccggtgcgtgtntgtcagaactgttattataactancagcatgagagaggttcagaagatgggcctcgaaattgttgaagattcaacaagctgagtggagaccatggtctgtagaccccttcccgattctcctgtcccagcttggaaggcattgaaaacagtctccgtttacacatctcttcataccacgtgtttgaagtgttaaaattcaaagggatcattgaataaaacgggtgtagagtacaggaatggggcagacgcgattcaggtgaacagcacaagaagaatatgaggtggttcctaggagcaacactttcgacctccagttctccctgatgacagtagctgtctccaagagaaaaatcctcacttattaactctcttttcttgcatctcatttttatagagctactcatccttatttggaaaaaccaacaacaaaaaaggcttttagaaaatggttgtaaatctgacttctttgcaagtaactatgtatattgtaaatagatataaaaggccttttttctaaataaggacttaactgcctgtaacatgaaacttcaaactaaaccactaactcaatgaactacttatggtttgtctgacatccctcacttaccaattaattataaatatgtttttttaaatcccnnnnnnnnnnnnnnnnnnnnnnnnacctgagcaggcggccgcaagcttattccctttagtgaggt

SEQ ID NO: 82214 - DNA, 469 bp, Homo Sapiens
  misc_feature (200)..(264): n is a, c, g, or t
gaaagggtcaggacttccagatcttctgactgtcccgtttttatttttaccattgagccttctaccagtactgaaatgggcaaaagatggctgataacaaattacactttacctgtgatggttactctatgctagttcctgttttttaaaaaatagttcttatgaggtgttaagaaaagctttcgcttggattcatacannnnnnnnnnnnnnnnnnnnnnnnnnnnnnnnnnnnnnnnnnnnnnnnnnnnnnnnnnnnnnnnnacatatattggaaaattttttggagatttgtatcactttgaaaaaacttagatgaaactcggatgaacttttcaattaaaatattgaaaaaaatgaagaaaaaggtatgtcataaatgcagaaaatgtatacagatactagtctactttatcatttcctaccataccaatagttaactattttaactattaaaagttaaaaattt

SEQ ID NO: 82215 - DNA, 1007 bp, Homo Sapiens
  misc_feature (178)..(443): n is a, c, g, or t
  misc_feature (474)..(496): n is a, c, g, or t
  misc_feature (862)..(873): n is a, c, g, or t
ttttatgcttacaggggcgacctttgaaaccccccacaccggcttttacgttctggccttttgtgcctgtgctacatgtcttcatgcgtatccctgtttttggtaccgtatacccctttgatgagttgtacccttccgcaaccgaggaccgacgcaggatcaatgagcgagaacggannnnnnnnnnnnnnnnnnnnnnnnnnnnnnnnnnnnnnnnnnnnnnnnnnnnnnnnnnnnnnnnnnnnnnnnnnnnnnnnnnnnnnnnnnnnnnnnnnnnnnnnnnnnnnnnnnnnnnnnnnnnnnnnnnnnnnnnnnnnnnnnnnnnnnnnnnnnnnnnnnnnnnnnnnnnnnnnnnnnnnnnnnnnnnnnnnnnnnnnnnnnnnnnnnnnnnnnnnnnnnnnnnnnnnnnnnnnnnnnnnnnnnnnnnnnnnnnnnnnnnnnnnaagaattcggaacgaggcgcggctgtaggcnnnnnnnnnnnnnnnnnnnnnnncccccaacatcgtgactgcccctctgttcctgaaccctcagaacctctctctgctcaccagcaaccctgttagcttggtctctgccgccgcagcatctgcagggaactctgcacctgtagccagcctccacgccacctccacctcggctgagtccatccagaactcttctcttcacagtggcctctgccagcggggctgcgtccaccaccaccaccgcctccaaggcccagtgagctgggcagagctgggctgccagaagcctttttcactctgcagtgtgattggactgccagccaggttaataaactgaaaaatgtgattggcttcctctcgccgtgttgtgagggcaaaggaaagaagggagnnnnnnnnnnnngaaccacacacacccatacacacataccagaaaaagaaagaaaggatggagacggaacatttgcctaattttgtaataaaacactgtcttttcaggattgcttcatggattggagaactttctaaccaaaaatt

SEQ ID NO: 82216 - DNA, 691 bp, Homo Sapiens
  misc_feature (503)..(503): n is a, c, g, or t
  misc_feature (607)..(607): n is a, c, g, or t
accagccactgcgcctggctggcctctggtttttaataaaacatgactagagtgactccatcttaaagtgagtagctaggcacttacaaggttcatgcttatggcctgaaaataaccacatcccaggctgaccaccaattataattacagaatatttatggccatacagaacatgttccaccaagcctgcagaatgtccaaatgtcctaagaatgcagcccccattacttaaatataacataaatgagcaagcttaggttgcaggattaatggtcgtggataacaccaatagcccctacctttagtgagcttatctgcacactccaagtttaactatagttccttatagtttcttataagtagaaatactaacaaagggctgtgggtttctccccctgctttctgaggacactctactctgtaaaggagtagtttccaataaacttgtttctttcactgtaaaaacctcgtgccgatttcttggctcgagggcaaatccctanagtgagtcgtattaattcgtatcatgtcatactgttcctgtgtgaattgttatccgctcacatccacacacatacgagcggagcataatgtaagctggggtgcntatgagtgagtactccattattgcgtggcctcactgcggcttcagtcgggaactgtctgcagtgcatatgatccgcacgccggg

SEQ ID NO: 82217 - DNA, 1102 bp, Homo Sapiens
  misc_feature (421)..(421): n is a, c, g, or t
gacattcaacttgaggctcctgttagttaagctatcttctttcacttgaagcaggtttgagaggcctaggccagaatttaaattccttttatgaatagatttccctttcttcctgaccccaaggtcagaggagactatatattccatggctgcctctaagactaggaataggaatatctgaaaacagcatttctaagggtggtaaccacaggtcgattttaatacgagtcctttttcttgtagaggtaagtataatcttcctgacaaggtagtcctcttttcacggcacagacaatgggctttctgtttatgaggggtgagaagtgatgtttgttactatgttctccagcaagtaaacattcctctgctcacctcccaacaagactaacagtctttttagaagtaaatatattcaagacanaacgagaaaatcctggctacccaagtcgagtatatacaggaatacaaatcggtaaccagcagctgttcctcaggttgtgactcactgagcaccacttgtcctggaggctggatgatggaggacatctggttataggtactgtagcagggataggtgccacaggaggataggaactacagcagatcgctgtttccagaacggggaggagtatctcattgtgaaacagactctagagtggttctatttggtcttcagtgttttagcctcattagttcatatttggcatgcagcttgtggtgagtactgttctaggactggccaaaaatgggcaaaatgtatcactccaaacactactgattcagcattgttttcatgtcttaaaattgccacctgcactttgtttctgcactattatgtagtgcattttaacttaaattttttccagcaacatgttacttatttaagatacattactgatatttcattataattagttcaccttccctgtgaaacaagagaattgtaaaatgttgtggaaaatgatacatatgtggatgctaatgaaatcatagtattttgtgtagcttctctgaagaccttagagacctgcagctttggtttataagtgtttgggccttatcagcccatctgatccagatcaatatttttttgaaaacaaaa

SEQ ID NO: 82218 - DNA, 769 bp, Homo Sapiens
tttaagtttcaaaatatttgtaattgaaagacattttcaactgtaaaatgtctcttgagcatctataaagtagaaattattttggcttaaacttcatactgctttcctaaacaaattatgttgatagaggcatggtataagagtcaccttagagagagaacctattaaattccaatgtcttcactgtgttcagtttacaccaactataataaaactcaagccactttttttgttgatatgcaaaacattctggtaagttcatttgaagttgaattatttcattaacatgtaaactcacatgtacaattttactttttgtcatatatttaaatattttcttatctgcagagctatctcaggatatgaaatcataacatgctagcaactagtaatttaacattaaaacacttccctaaattattccatggaaaagtgcatttacaatataaacatgtcatatatgaagctacaaatcataatctcactggagtggatataaaatttcaaattcagtccaaatgagtcaaagaaaaaagtgctaacagagcaaatctgaaacaagttcatggggattgggtaatgagtcatcgaaacgaaatcttttggaaaccatgctgctatcctctgggatattctctttgtcttctctatcaccacaggttccattacaagaggatttagaagtcttgtcttcagaggaccttacagaatgatcctgagtttgagaggaactggaagtttcttcagggtgacctcgtgccgaattctt

SEQ ID NO: 82219 - DNA, 1567 bp, Homo Sapiens
  misc_feature (896)..(897): n is a, c, g, or t
ggtccggaattcccgggatatcgtcgacccacgcgtccggttgaatgaggaccaccggaaggtgaggaggaccacccccgtcccactgttccccaacgagaacctccccagcaagatgctcctggtctatgatctctacttgtctcctaagctgtgggctctggccaccccccagaagaatggaagggtgcaagagaaggtgatggaacacctgctcaagcttttcgggacttttggagtcatctcatcagtgcggatcctcaaacctgggagagagctgccccctgacatccggaggatcagcagccgctacagccaagtggggacccaggagtgtgccatcgtggagttcgaggaggtggaagcagccatcaaagcccatgagttcatgatcacagaatctcagggcaaagagaacatgaaagctgtcctgattggtatgaagccacccaaaaagaaacctgccaaagacaaaaatcatgacgaggagcccactgcgagcatccacctgaacaagtccctgaacaagagagtcgaggagcttcagtacatgggtgatgagtcttctgccaacagctcctctgaccccgagagcaaccccacatcccctatggcgggccgacggcacgcggccaccaacaagctcagcccgtctggccaccagaatctctttctgagtccaaatgcctccccgtgcacaagtccttggagcagccccttggcccaaaacgcaaaagcgttcccagaaagtccccactggccggaggaaggtagactgaactgcagcaccagcccctgagatcttccgcaagtgtatggattattcctctgacagcagcgtcactccctctgggcagccctggggtccggaggcgtcgccaagccgagatgggacnncaggagaaaagccccggtacgagtcccctgctctcccggaagatgcagactgcagatgggctacccgtaggggtgctgaggttgcccaggggtcctgacaacaccagaggatttcatggccattgagaggaagcagggcactgtgtataaataccttctatttttaatacaagctccagctgaaaaccaccttcgttttcaacggttctgacaaacacatggcatcgacagtaactggaattcgttccctctttgagagattttttattcatgtagacctcttaatttatctatctgtaatatacataaatcggtatcgccatggtcttgaagaccaccttctagttcaggactcctgttcttcccagcatggcacactattcttgatgatggtctgatgtgtgtgatgtgtgatggccctgaagggctgtaggacggaggttccctgggggaagtctgttctttggtatggaatttcttctctcttctttggtatggaatttttcccttcagtgactgagctgtcctcgataggccatgcaagggcttcctgagagttcaggaaagttctcttgtgcaacagcaagtagctaagcctatagcatggtgtcttgtaggaccaaatcgatgttacctgtcaagtaaataaataataaaacacccaactggg

SEQ ID NO: 82220 - DNA, 978 bp, Homo Sapiens
catgaaacggcatgtggcccagaatgaattgataacaccccttgacacccccggttgaacttttactcgcctcgttgttttgaatttagccggaaacaattcccacgggaaacaaatagagatggtacaattttatacgacccctctagggaattggccctggggccaagaatcgcaccgagtggactcccaggtggaattatagattttcaattatttgcaaggacgggaacagcagtaaaggtactgaaggagacggtcagattactgcaattctggcccaagaagaactatttcgaagaactgaacaaccatctgaatgctacttacacaacctccaagcaaaagtagatgcattagaaaaatccaaccctaaaatgacagaggagcttgcagttgcaaacaacaggatcattaccttacaaaaagaaatggaacgagttaaagaggaaagttcatacatactggaatccaatcggaagggtcccaagcaagacagaactgcagaagggcaagcactaagtgaagcaagaaagcatttaaaagaagagacacaattacgattggatgttgagaaagaactggagatgcagatcagcatgaggcaggagatggaattggctatgaagatgctggagaaggatgtctgtgagaagcaggatgccctggtatctcttcggcagcagctggatgacctcagagctctcaagcatgaacttgcctttaagctgcagagttcagacttaggagtaaaacagaaaagtgaactaaacagtcgcttggaagagaagactaatcagatggctgctaccattaaacaacttgaacaaagattgcgccaggctgagcgaagccgccaatctgctgagttggacaaccggctcttcaaacaggactttggagacaagatcaacagtctgcagctggaagtcgaggagctcaccaggcagcggaaccagcttgagttagaactaaaac

SEQ ID NO: 82221 - DNA, 2246 bp, Homo Sapiens
  misc_feature (102)..(102): n is a, c, g, or t
  misc_feature (120)..(326): n is a, c, g, or t
gatacgccttgatgagtgtacgtccggcagcgaacgacgagccaggggtcatgagcgaggagcggagagcgccattacgcaaaccgctttccccgccgttgncgattcataatgcagctnnnnnnnnnnnnnnnnnnnnnnnnnnnnnnnnnnnnnnnnnnnnnnnnnnnnnnnnnnnnnnnnnnnnnnnnnnnnnnnnnnnnnnnnnnnnnnnnnnnnnnnnnnnnnnnnnnnnnnnnnnnnnnnnnnnnnnnnnnnnnnnnnnnnnnnnnnnnnnnnnnnnnnnnnnnnnnnnnnnnnnnnnnnnnnnnnnnnnnnnnnnnnnnaagaattcggcacgagggattattctgtggatgaaaatggacaaaggtggttttgcactggtgatattggagaattccatcccgatggatgtttacagattatagatcgtaagaaagatctagtgaagttacaagcaggagagtatgtatctcttgggaaagtagaagctgcactgaagaattgtccacttattgacaacatctgtgcttttgccaaaagtgatcagtcctatgtgatcagttttgtggttcctaaccagaaaaggttgacacttttggcacaacagaaaggggtagaaggaacttgggttgatatctgcaataatcctgctatggaagctgaaatactgaaagaaattcgagaagctgcaaatgccatgaaattggagcgatttgaaattccaatcaaggttcgattaagcccagagccatggacccctgaaactggtttggtaactgatgctttcaaactgaaaaggaaggagctgaggaaccattacctcaaagacattgaacgaatgtatgggggcaaataaaatgttgttgtcttattgacagttgtgcaggaggtagcctggtggttttcaacctctagaattttaagcctttgttgaactgttagaatgtaaggtatatcattctaaagatagagtaaaaagaaaacaaaaccaaaagttattaaaattgttgtccggtttactttaacttagttttgcatagttctagtgcagctgaaattgaaaagttatttccctttagctgtgttattatagagcagaaattctgtttttaaaaattagcctaagatatacttgtttttgtaaagaaaaatatttaatgttgaacaaaataaattggagttggagtagaatgtagtttgaggaaatttgcagcttccaatgcctcttgtcttcctatttcagaagtttaaatattaagcatgacagaaaatatgtattaacactactcaaagcaaaagtgctgcagggctttaaaattctcttccaaccatttatcttgaaggaaaaattcaatagtaatataatacacaaaatcaaataataccttagaaggtattaagattataattgttgcataggttagatatagagtcattgtaatgttgtgaataattacagtgcctaaaataagaatagaacaacatatacaacaccaaaaaatatctagtaatatatttaaagggaaattgagctgctttttttgaaactttgagatctaaaaataactgtaattatttgaatgactaagaggaaagtacattttttgaaatgctgaaaattgcctttctgtgtttattcaaactgaaaagctgagaccaagagcaaggaaggtaaaaagttaacaggcaaacattttctcttagaaaaggtgataaaatcataagtatttggaattagaacccttgcacagcactgaacctgggaaagagatttaaactctgaatttatctttgataacagggattgattttaaaatgtacatgtattaaattacatttgtaatttaaggtctgtttgctgttgctgattttattcttgatcagtagtttgcattttcagacagcctttcatttgctttaattttagcaaagcgggttataatgaatgacttccccaatatcttgcttgaacttacaggtgataactggatgagttgcaagtcaccggagaaactgggttcaattttcctgttgggaagaccctgaaccgggactcaaactcggaaacggcacactccggcagggcccgttgtcacaatgggacggggccttgaacctcataaccggtattaccgcgaaatcacaacacctcgtcagccaatctacgttctccgcaacccaacaatataccagcgacagaacataccaacaacttcaaaacaaactgagaagtaaacacc

SEQ ID NO: 82222 - DNA, 1072 bp, Homo Sapiens
  misc_feature (49)..(49): n is a, c, g, or t
  misc_feature (149)..(625): n is a, c, g, or t
  misc_feature (643)..(656): n is a, c, g, or t
tacccgactggtactacgctgacttgaaagcccagctcccgaggagagncgacagttccgtaacgcaggtcgaacaggagcgccgaggactccaggggaacgctgtatcttatatctgtcggttcgccactctgacttagctcgatttnnnnnnnnnnnnnnnnnnnnnnnnnnnnnnnnnnnnnnnnnnnnnnnnnnnnnnnnnnnnnnnnnnnnnnnnnnnnnnnnnnnnnnnnnnnnnnnnnnnnnnnnnnnnnnnnnnnnnnnnnnnnnnnnnnnnnnnnnnnnnnnnnnnnnnnnnnnnnnnnnnnnnnnnnnnnnnnnnnnnnnnnnnnnnnnnnnnnnnnnnnnnnnnnnnnnnnnnnnnnnnnnnnnnnnnnnnnnnnnnnnnnnnnnnnnnnnnnnnnnnnnnnnnnnnnnnnnnnnnnnnnnnnnnnnnnnnnnnnnnnnnnnnnnnnnnnnnnnnnnnnnnnnnnnnnnnnnnnnnnnnnnnnnnnnnnnnnnnnnnnnnnnnnnnnnnnnnnnnnnnnnnnnnnnnnnnnnnnnnnnnnnnnnnnnnnnnnnnnnnnnnnnnnnnnnnnnnnnnnnnnnnnnnnnnnnnnnnnnnnnnnnnnnnnnnnnnnnnaagaattcggcacgaggnnnnnnnnnnnnnnggatggggtgtgataggtggcatttaatatttcttgagacctcaagtattcaaatatcaaacttgtcctgtgttgtaacaaatattcagaatctcttaaaatgttggctgaagctgccttaatgtaccaaaatacagctctcaagactgttcacaaatatctgtggttgtacaatgttttgaacatttaatgtaaagttgttgtagaactgtgaactctaaggatagtatctttattgttttaggaagaatggttgtgttctttgtcatgtatgcttaaatatacagtggattttgaatgcaacaaataaaactgaaaacagccatttggttgtgtcatgacaatcataatataggatataatatttactttttttcaaaaacatcctgcattcattcattcttagcatacctttg

SEQ ID NO: 82223 - DNA, 929 bp, Homo Sapiens
cagtcgacggtaccggacatatgcccgggaattcggccattacggccggggtggggacccgctgttttaacagtcttcattcagggtcccaaatagtatttggctttaagtaatgattggttttccctttttactagaggggccctgggaagtccttgtacctttcctccattttaaaccagctgttctctactttgtccttggaatgagggacaagtgatcatgacagaacactttgtcattgggactgggaaaggtttggcaagggcattaaatttaacagccagtgccaggaaaatataaaatggggtcaatgataaacagctgttagaggctggaaaatgggtagggcagttgaattttttggtggtttcgtaccatttgggtgattgaagcatggtagtgggtgggtggggggtgtgacagagcatcatgtttgttattctgccttaaatttctacttactgtctttttcttctctgtcttccaatcactttaatatcttcaattttcaaactatatttgtacttgggcttagatagaaagtcttacacaagcatagtatcttctactttggttttccctaccttttcttccccaccttctccaaacacacatatacatactctactcaattctatttctgattttgtagttgttagttgtccatgctcaggataaaaaatgagtgggtagggttgagggactggttctttgaggttctgccctttttccatgattcagaccaactttctcttggtcatttctggagtataactgactcaattcttgtaaaaatgtgttccacccaaaccactgtatgttcttttccctactttattttctcctaccttccttctcctaattgtgttacaagaggcagccatagcaagaatggaaaatccagatcagtaaaagattcaacaaaa

SEQ ID NO: 82224 - DNA, 1183 bp, Homo Sapiens
  misc_feature (880)..(888): n is a, c, g, or t
  misc_feature (950)..(1027): n is a, c, g, or t
  misc_feature (1051)..(1059): n is a, c, g, or t
ggcctgggtggcgaattcggcacgagggctagcggtgccccgcctgctgcggtggcaccagccaggaggcggagtggaagtggccgtggggcgggtatgggactagctggcgtgtgcgccctgagacgctcagcgggctatatactcgtcggtggggccggcggtcagtctgcggcagcggcagcaagacggtgcagtgaaggagagtgggcgtctggcggggtccgcagtttcagcagagccgctgcagccatggccccaatcaaggtgggagatgccatcccagcagtggaggtgtttgaaggggagccagggaacaaggtgaacctggcagagctgttcaagggcaagaagggtgtgctgtttggagttcctggggccttcacccctggatgttccaagacacacctgccagggtttgtggagcaggctgaggctctgaaggccaagggagtccaggtggtggcctgtctgagtgttaatgatgcctttgtgactggcgagtggggccgagcccacaaggcggaaggcaaggttcggctcctggctgatcccactggggcctttgggaaggagacagacttattactagatgattcgctggtgtccatctttgggaatcgacgtctcaagaggttctccatggtggtacaggatggcatagtgaaggccctgaatgtggaaccagatggcacaggcctcacctgcagcctggcacccaatatcatctcacagctctgaggccctgggccagattacttcctccacccctccctatctcacctgcccagccctgtgctggggccctgcaattggaatgttggccagatttctgcaataaacacttgtggtttgcggccaaaacaaaaacaaccacaannnnnnnnnacacactccccacaccacgccgaccatctatgaaaataccctccaatgggggtctaggtttnnnnnnnnnnnnnnnnnnnnnnnnnnnnnnnnnnnnnnnnnnnnnnnnnnnnnnnnnnnnnnnnnnnnnnnnnnnnnngtgaaaaaaagggcgcccctattnnnnnnnnnctttttttaaaactctttgggccttgtcccccctcttttaaaccaactctctggggttgggaaaaaaaccgttcctactggggggaattctttgcgggagaagaaaaaccttcttttttcgggg

SEQ ID NO: 82225 - DNA, 871 bp, Homo Sapiens
ggcctgggtggcgaattcggcacgagggctagcggtgccccgcctgctgcggtggcaccagccaggaggcggagtggaagtggccgtggggcgggtatgggactagctggcgtgtgcgccctgagacgctcagcgggctatatactcgtcggtggggccggcggtcagtctgcggcagcggcagcaagacggtgcagtgaaggagagtgggcgtctggcggggtccgcagtttcagcagagccgctgcagccatggccccaatcaaggtgggagatgccatcccagcagtggaggtgtttgaaggggagccagggaacaaggtgaacctggcagagctgttcaagggcaagaagggtgtgctgtttggagttcctggggccttcacccctggatgttccaagacacacctgccagggtttgtggagcaggctgaggctctgaaggccaagggagtccaggtggtggcctgtctgagtgttaatgatgcctttgtgactggcgagtggggccgagcccacaaggcggaaggcaaggttcggctcctggctgatcccactggggcctttgggaaggagacagacttattactagatgattcgctggtgtccatctttgggaatcgacgtctcaagaggttctccatggtggtacaggatggcatagtgaaggccctgaatgtggaaccagatggcacaggcctcacctgcagcctggcacccaatatcatctcacagctctgaggccctgggccagattactttcctccacccctcctatctcacctgcccagccctgtgctgggggccctgcaaattggaatggtgggccagattttctggcaataaacactttgtgggttttgcgggcccc

SEQ ID NO: 82226 - DNA, 1226 bp, Homo Sapiens
  misc_feature (179)..(179): n is a, c, g, or t
  misc_feature (198)..(198): n is a, c, g, or t
ccgcacatggaaacttgaggaaatttctcttattgctaggactataggacaatgggatccaagatgaatttccacaatgggataaccacggaaccgacctagagaatcaggaagtctcttatcaaaagcagatatgtgtcaatgctgctcaaaccacacacattcttttctggttggancagattgtaaatttattcnccaccacctgggggacaggcacacgtttatctagcggtcagtagaagtcacaacccaggcatccaaaccagttagtatgagttattactaagtcaggtgaaaagagctaggtggttatacatttgatctcttaaataacacaggaccaccaaataaataataataaaaaggcacattgtcgttttcatcctggggaccccagtgagagtagggacctcaggtaggctccttggaattggaactgttgtcctgaagagggcaagcctctgtttaacactctgaatccagggcttgctgcaaccctatgctaggtgactcaggcctctctcctctcattacaggctggctaaccgcacagcctaagttgaggagcacatgagctgtcatgactgtatccagattggaattcatcattttcaatgtcttgcccttagaatgagtccactgagcaatgtgaagttggcggtgtccaggaaaacctcctgctgttccttctgtataattcctcttctttaggatttctggttaggaacacggacgggtgtctcagtgccctgctttatgaaactcagcaaagcgtctggaatggatcaagttattctgctggctccatgggctcctgagtgttcagtaagggaatgtctgtgtccttgctgcttacatccccattgttgggatgggagaaggtgtacgggtcactctcagactcaggaggggagcgaggaggtggctcctcagtggccaactttgcagttggggccctggagcatatggtgggtggggagggaggacagacccccatggtgccctggaacggccggtaggtgtccacctctggctgcaggaaggagccgctggaatcctgtagcagatgcccatataccatggtgtcctcgatgactgcatacacatgggagtcattgtcctttcgccctttctgaaacttttttggctgcctcggcatctcagtattgatgttgccattgtagatacccaccggacgcgtgggtcgacgatatcccgggtaa

SEQ ID NO: 82227 - DNA, 985 bp, Homo Sapiens
  misc_feature (161)..(161): n is a, c, g, or t
  misc_feature (249)..(249): n is a, c, g, or t
  misc_feature (281)..(281): n is a, c, g, or t
cttgctcggctgttgtttggatgtggcgatacattcaccagaacgttgacatgtacgattatcgactcctataggattgcctcggccaagaatcgcacgagcgcctgcagcgttgcgtcccgtcgtacctcttctcttccgacgctgagtagccgtatccntgctgcttcagccccaagctgttcccgctgtgcaaagtccgcgcctctcagttagactttctcccacgtctcctcccatgtgtccctnggaggacccaagttgtctcaggcgatccctgntcggctgaccttctcctgtggggcctccgctccccaaccctctgtgctccgcggattcttctataccggctgctcctggaaagggtgggcccagtgtttctctaccgttgaggtattttgtgaagccgaaatgactgcagagagaaaagtgtgccatcccccagaggggctgtcttccaagttactcggactccgaagttgtggcaattatcacacttaagtgacaaagtgtctcacatcaagtagctcttgtttctgttaggcgtgagagcttgctccagaatatacacgaagcatgtttagtaacaaattctttcagcagctcctcttaggagaggtaactgtttcgaaatacttctggggcgttctgtgtctgaaagtcctgtttgcaaagacaagacgaaggataaggagaataattttttgtagggtgtcctctattgcgagcaattaatctgatgaacataaagcttaatcagtgaaaactgaatcaccttccttgcaggcggatctgccattggatcgtatttcagttttttgggtcaatatatgaacaatgtgtgaaccagaacgtatggtatttgacatcaaagctatgtcttggcatatgtttatgttgatatacttgaattcatttaaaatggaatgttaattacatcgacttcttactataaaaaataaaaagttattgtccagtgcaaaaa

SEQ ID NO: 82228 - DNA, 972 bp, Homo Sapiens
  misc_feature (50)..(50): n is a, c, g, or t
  misc_feature (54)..(54): n is a, c, g, or t
  misc_feature (64)..(64): n is a, c, g, or t
  misc_feature (67)..(67): n is a, c, g, or t
  misc_feature (123)..(123): n is a, c, g, or t
  misc_feature (126)..(126): n is a, c, g, or t
  misc_feature (130)..(130): n is a, c, g, or t
  misc_feature (147)..(147): n is a, c, g, or t
  misc_feature (256)..(256): n is a, c, g, or t
  misc_feature (297)..(297): n is a, c, g, or t
tcgctgtgttctccattcagtaaccgcaccttatatctccgctcgtgacntcantgcacacctnaangcataacatgctacaagtacccgccgtgccagtgctaacagtgcctgacccgtctntantccntggcagagctcgacgcntgcccgagatccaagccaccatgcccccagcctgccaccccgctcgccgcaggctgggcctgcgcagatccgacagaactgacatgcagaggatagaagatgtgtggcnagcagtgaggactctaggcggacagagtccacgccgctgtnagcgagaacactaaggacattcggctgtaggagcagaacacttcagcctgtgcaggtttatattgggaagctgtagaggaccaggacttgtgcagacgccacagtctccccagatatggaccatcagtgactcatgctggatgaccccatgctccgtcatttgacaggggctcaggatattcactctgtggtccagagtcaactgttcccataacccctagtcatcgtttgtgtgtataagttgggggaattaagtttcaagaaaggcaagagctcaaggtcaatgacacccctggcctgactcccatgcaagtagctggctgtactgccaaggtacctaggttggagtccagcctaatcaagtcaaatggagaaacaggcccagagaggaaggtggcttaccaagatcacataccagagtctggagctaagctacctggggtgggggccaagtcacaggttggccagaaaaccctggtaagtaatgagggctgagtttgcacagtggtctggaatggactgggtgccacggtggacttagctctgaggagtacccccagcccaagagatgaacatctggggactaatatcatagacccatctggaggctcccatgggctaggagccagtgtgaggctgtaacttatactaaaggttgtgttgcctgctaaaaaa

SEQ ID NO: 82229 - DNA, 1313 bp, Homo Sapiens
  misc_feature (1292)..(1292): n is a, c, g, or t
aactattggtcagtacgaggcctgggtgttaaattcggcacgaggctgaacctcgcctccagccagggggtgccctgctgacaggaactagcagtgtccttctacggggccccccaggctgtgggaagaccacagtagttgctgctgcctgtagtcaccttgggctccacttactgaaggtgccctgctccagcctctgtgcagaaagtagtggggctgtggagacaaaactgcaggccatcttctcccgggcccgccgttgccggcctgcagtcctgttgctcacagctgtggaccttctgggccgggaccgtgatgggctgggtgaggatgcccgtgtgatggctgtgctgcgtcacctcctcctcaatgaggaccccctcaacagctgccctcccctcatggttgtggccaccacaagccgggcccaggacctgcctgctgatgtgcagacagcatttcctcatgagctcgaggtgcctgctctgtcagaggggcagcggctcagcatcctgcgggccctcactgcccaccttcccctgggccaggaggtgaacttggcacagctagcacggcggtgtgcaggctttgtggtaggggatctctatgcccttctgacccacagcagccgggcagcctgcaccaggatcaagaactcaggtttggcaggtggcttgactgaggaggatgagggggagctgtgtgctgccggctttcctctcctggctgaggactttgggcaggcactggagcaactgcagacagctcactcccaggccgttggagcccccaagatcccctcagtgtcctggcatgatgtgggtgggctgcaagaggtgaaaaaaagagatcctgggagaccattcagctccccctggagcaccctgagctactgagcctgggcctgaaacgctcaagccttctgctccatgggcccccgggcaccggcaaaacccttctggccaaggcagtagccactgagtgcagccttaccttcctcagcgtgaaggggccagagctcattaacatgtatgtgggccaaagtgaggagaatgtgcgggaagtgtttgccagggccagggctgcagctccatgcattatcttctttgatgaactggactctttgggcccaagccggggggcgaagtggagattctggaggagtgatggacagggtggtgtctcagctccttgccgagctagatggggctgcacagcactcaggatgtgtttgtgaatggagccaccaacagaaccaaatcttctggaccctgcctttctgcgggcctggnagatttgaacaacctgggtgt

SEQ ID NO: 82230 - DNA, 1124 bp, Homo Sapiens
  misc_feature (52)..(52): n is a, c, g, or t
  misc_feature (114)..(114): n is a, c, g, or t
  misc_feature (122)..(122): n is a, c, g, or t
  misc_feature (127)..(535): n is a, c, g, or t
  misc_feature (554)..(571): n is a, c, g, or t
  misc_feature (608)..(616): n is a, c, g, or t
gggaacgcttgatctatagtctgtcggttcgcacctctgactgagctcgatnttgtgatctcgtcagggggcggaccctatgaaaaacgccagcacggcgcccttttacgatcnttgccctntgttnnnnnnnnnnnnnnnnnnnnnnnnnnnnnnnnnnnnnnnnnnnnnnnnnnnnnnnnnnnnnnnnnnnnnnnnnnnnnnnnnnnnnnnnnnnnnnnnnnnnnnnnnnnnnnnnnnnnnnnnnnnnnnnnnnnnnnnnnnnnnnnnnnnnnnnnnnnnnnnnnnnnnnnnnnnnnnnnnnnnnnnnnnnnnnnnnnnnnnnnnnnnnnnnnnnnnnnnnnnnnnnnnnnnnnnnnnnnnnnnnnnnnnnnnnnnnnnnnnnnnnnnnnnnnnnnnnnnnnnnnnnnnnnnnnnnnnnnnnnnnnnnnnnnnnnnnnnnnnnnnnnnnnnnnnnnnnnnnnnnnnnnnnnnnnnnnnnnnnnnnnnnnnnnnnnnnnnnnnnnnnnnnnnnnnnnnnnnnnnnnnnnnnnnnaagaattcggcacgaggcnnnnnnnnnnnnnnnnnngggagtagtatttttattattccaattgcacagaggnnnnnnnnngttatgcatagaaggttcagtaacagctaggcaaattgtataccatattgaacccaagcagtttgaatatctttgttttttatactagtgcatcatatagctttctggatgagtctgaggtttttatcaactatgataaggactggaaataggtgaaaagatatgaagggagagttattaagatcaattttcatattttgagtttgaatttcctatcgtatgtccaggtggaagtaactggttaaataattggaaagagagagaaaaagggaattaaagaaattattgctataaagatactggttgataccataggaccacagacgcttgctcagtgggagagtaaaaaataaaagcaagacagtggcaaggatgaaagcagtacagaccactttccctcttgaaaataaataaacacttgcaagctttgaacctccaaacaacacaaaccccataaactcaagtatgtagtctctatttccgattatgccttttgtaccttttggtt

SEQ ID NO: 82231 - DNA, 1966 bp, Homo Sapiens
  misc_feature (74)..(74): n is a, c, g, or t
  misc_feature (78)..(78): n is a, c, g, or t
  misc_feature (92)..(92): n is a, c, g, or t
  misc_feature (131)..(131): n is a, c, g, or t
  misc_feature (158)..(159): n is a, c, g, or t
  misc_feature (185)..(185): n is a, c, g, or t
  misc_feature (213)..(213): n is a, c, g, or t
  misc_feature (261)..(261): n is a, c, g, or t
  misc_feature (281)..(281): n is a, c, g, or t
  misc_feature (286)..(286): n is a, c, g, or t
gtacgaattatcgatcacttaggaattgccctcgagcagaatccgcacgaggctgttcccctgagctatctctnggcntgtagatcctttcnttcctgatctcacaagtctcccctctgtggtgctgtgcntgtcgcccctctatgagactcagtatnntggatgcacccaccctatgcctcatntactatgattcctcttaaaagccctttntctaatagtcagtctgaagtcctgagttctggctcaaacatacggatntgcggatgacacaaaattcnggccntaacatggagtcagatgctatcacgtatcaggcagtgacacaggaaggacgcacgcccaagagtggggctgagcagggagcctgcagggcaggtggagctgggagaggaagcagtgcaaccacagggttgggctccagctggggtggaggtgcccctatgctgaaggctgggatgtgtgcctgtcctgtccttggcacccagaggcgcccacttggggctctgggtgagtgagccaacagccagatgccctacatccaagtgtcaggcagaagtgggccttggtccgcagggctgggctgcaccccattggtgatgcctcctggcacacatgtcagagcctctgtccagcattcctgtgtctgagccttgctgcgggtggtttatggccccctgtgtgtgtttttgctgcctgacgctcaaatgtaggagagggggacggggcgaggctccaggggcggggaggggactccaggagcaagcgatggtcactgacaccgagtgtgctgtttctcctccccacataggacatcaaggacgccctgcgcagggtccaggatgtgaagctgcagcccccagaagttgtgcctatggagctgaggaccgtgtgcagggtcccgggactggtagagacactgcggaggtttcgaggggacgtgaccttggacccggacaccgccaaccctgagctgatcctgtctgaagacaggcggagcgtgcagcggggggacctacggcaggccctgccggacagcccagagcgctttgaccccggcccctgcgtgctgggccaggagcgcttcacctcaggccgccactactgggaggtggaggttggggaccgcaccagctgggccctgggggtgtgcagggagaacgtgaacaggaaggagaagggcgagctgtccgcgggcaacggcttctggatcctggtcttcctggggagctattacaattcctcggaacgggccttggctccactccgggacccacccaggcgcgtggggatctttctggactacgaggctggacatctctctttctacagtgccaccgatgggtcactgctattcatctttcccgagatccccttctcggggacgctgcggcccctcttctcacccctgtccagcagcccgaccccgatgactatctgccggccgaaaggtgggtccggggacaccctggctccccagtgactcgggccctcctggaggagtcctgttgcctctcctgcccctccaggccactgagtgttttggccacttggaggacctgggaggagggagtgtgtcctttgagcaagaggaggaactcctggtgcctttctgagcctgcgtgggagaaccccaattctagcactccaggaaactgtgggagagtgtggggcaggctccgtcctccctgggagacccctccagccaccgggtgccacttaatgccaacagccttaccaaagctgggagccccattgccccggcagctctggcctgtggttccagaaagctgagaaaaaactccactggggcttgcagaatccagggttcacctaagctgcacagttcctgcagctttgccagcccctgaaagtctggtgtacccaactctgaagatctgggggaggcagtgggattggagcagcccatgctgttgggacccacagggggggagccgtccaatcc

SEQ ID NO: 82232 - DNA, 1018 bp, Homo Sapiens
ggtcttgggtaccattgtgttgccttcctcagagtcccttgaagtcccgagtttcaagataggcatcatgaagccctgtccactccttcagcaggcagcagcccaggtcttcttgggtgcatgtttgaggtctccacacaacagaaccacgtctgccttcttgatcttggtggatgaactgggccaattcccaagcttgggccacacgatgtgctaaggtagatgtcctcctgtcgattgtattcggcatggagatgggtcaacataggcgttgagcaccatgccacttagatggagcaccagcagccccacagccttcccactgaaccaagtcaccatgatggatcatgtaggggtagccattgagagtgtagatgtgctgggtaagctcctggattggatgtttggagaagacacagaggccactgccaatgattccgctccggaagtggtgtgcagctgggtaggtaggtgacagcttctgtctcaggtactggaagtcctgctcactccacacctcctccagcaaagccaggtcgaagctctcctggttcagaaagtctcccaggcgcctcatgcggtcggcccggtgcttgctcaagtacggaatgccccagcagttgaggttgaagatccgcagtcgcagggagaagttgggcttcatggttggggagctccaggggcgctaggcggctcgaactctccagcgacggccgcggtggggacgggggcggccggcggcgccttctccctagaccgttccttcttcgcaggcggcgcgcacaggtgggcaccaagcccgcgtggctcaggtcgggcccgactcccgcgttcccccggcaaccggccggctgttcccaatcaggcgggccgccaacccggaaaggcgatccgctgccgaaatccgggcgcccaggctcggtaagggccgcgcgctaggaccctgggggtccggagagcgcccccgggtgggcggctcccggttccttttcctccaagctcgtccccggcggtcgcg

SEQ ID NO: 82233 - DNA, 1446 bp, Homo Sapiens
  misc_feature (75)..(75): n is a, c, g, or t
  misc_feature (121)..(121): n is a, c, g, or t
  misc_feature (157)..(157): n is a, c, g, or t
  misc_feature (169)..(169): n is a, c, g, or t
  misc_feature (936)..(1041): n is a, c, g, or t
ttatgccccgctacatttctccgtcttttttgatgtcgaaacatcaccagaaagttgctgtccgattatcgctcnttaggattgctggagccagatcgccgagtttatcagttaccagttntgatccctgagtgctggctacctgtgtgcagagctntgtgcatacccntaggagagcctgatcacgatcactgagagaccaagggagccatgcttgctgctgggaccccagcaccctccagagtagggaagcgggttcttttgctgtgagtgcccagggacaacagacagattcctgggggctcccgatgagcaggaacgtggagcctgctgcccaaggcctgctccttccggctgctccagcccctgggggcagagtccacaaagagtccccatcaagacttcttccctgagtcaagtacagcgtagcatagtcctccacccacccaacctctctgcctggccagggtcctggccctgccactgtgtggcgaggtgtccttctagaccacatcagccccaaggctgggagcagtcgctccagggccgcagcagttcactcccacacatagaacccaggtcactgctggggcgattgaacaggttgcctggcttttctctgctgtcagtttggtgtggaggcctatgttctgccccatacaccccacaggccctgcttatgggaaggaacacaggcctccagcccagaggactgtgccgccctgttcttggccgtccacgtttcctctccctctagcaccagcaatacatttccctggcatggacagaaaagacagagaggacttatacaaaggctttgtaaaaccagaggctagcttctatctttgtctactgttatttcagctcagggcgggtaattaacatcattggaactagctattaggaaagaaaaaaaacttggttttttttacaacnnnnnnnnnnnnnnnnnnnnnnnnnnnnnnnnnnnnnnnnnnnnnnnnnnnnnnnnnnnnnnnnnnnnnnnnnnnnnnnnnnnnnnnnnnnnnnnnnnnnnnnnnntcacagtgcgcctcacacaatacctcaccaatgccagaccctatgtcatctcttactgttctgatgttgattgaatgggcggcgctactctaactgagacgcgactgtctatatataaaacagaaccgcggtgggagaggacatacgaaaaaacatacctgtgtggtatgtgagaagacaagtgtacgctggttcgtgtgcttctctagtctggtagagaccgcaccctccatccagggccgaggaggcccattaacatcaccggcgctctacgcttccctcaaggacgttatataccgctcgtctgtagctggtctcacttcgtcttcgcgggcgcgtgggtgcccgtacctaccacgtcgtccccttcggcggccgtcctacacgttcgtcgcgtctcgtaca

SEQ ID NO: 82234 - DNA, 1287 bp, Homo Sapiens
taggtagcgaggcgggtgtcgaattcggcacgagggcggcggtagcggcggccgttgcgattgattgcgctggttgcctgcggcgtccacttccttggccgcccttgctacactggctgattgttgtgcagccggcgccatgtctgtgagcgagatcttcgtggagctgcagggctttttggctgccgagcaggacatccgagaggaaatcagaaaagttgtacagagtttagaacaaacagctcgagagattttaactctactgcaaggggtccatcagggtgctgggtttcaggacattccaaagaggtgtttgaaagctcgagaacatttggtacagtaaaaacacatctaacatctttgaagaccaaatttcctgctgaacagtattacagatttcatgagcactggaggtttgtgttgcagcgcttggtcttcttggcagcatttgttgtgtatttggaaacagaaacactagtgactcgagaagcagttacagaaattcttggcattgagccagatcgggagaaaggatttcatctggatgtagaagattatctctcaggagttctaattcttgccagtgaactgtcgaggctgtctgtcaacagcgtgactgctggagactactcccgacccctccacatctccaccttcatcaatgagctggattccggttttcgccttctcaacctgaaaaatgactccctgaggaagcgctacgacggattgaaatatgacgtgaagaaagtagaggaagtggtctatgatctctccatccggggctttaataaggagacggcagcagcttgtgttgaaaaataggaggctctccttgctcctggccttgctgacctcagcggttgccaggaaggggtgagcacagagtgcctcttacggtagttaggatgctcagttgctaaacactgcgctttattttcttaaccagttgtggtgtgagtatcagaattgaaacacttttttgggggtaaaaaatatagcctttacatggacagaattttttttgttgtttcagtgaatatgcctgtaattcagtgtatttcagttccgtcagaaagtgtaaatgttagtttcttggtaaagtccttttcttgcttaccttgactgttgatgtactgattgagaagttcattgtctcgtttgtgattcttccagatgtgatgcttgatattttctatatgcgagttagccatccacacccagcatagcctggatacagtataaaaatagataattaaaaagatggttgccaagcaaggaaaactt

SEQ ID NO: 82235 - DNA, 734 bp, Homo Sapiens
gggagtcgcggcgatcttctcctcgcttctggagtgttatcgtcaccatgtccctaatggtctcggctggccggggcctgggggccgtgtggtccccaacccacgtgcaggtgacggtgctgcaggcgcggggcctgcgggccaagggccccgggggcacgagcgacgcgtacgcggtgatccaggtgggcaaggagaagtacgccacctccgtgtcggagcgcagcctgggcgcgcccgtgtggcgcgaggaggccaccttcgagctgccatcgctgctgtcctccggacccgcggccgccgccaccctgcagctcaccgtgctgcaccgcgcgctgctcggcctcgacaagttcctgggccgcgccgaggtggacctgcgggatctgcaccgcgaccagggccgcaggaagacgcagtggtataagttgaaatccaaaccaggaaagaaggacaaggagcgaggagaaattgaggttgacatccagtttatgagaaacaacatgactgccagcatgtttgacctttctatgaaagacaagtctcggaatccatttggaaagctgaaggacaagatcaaggggaagaataaggacagtgggtcagacaccgcctccgccatcatccctagcacgacaccttcggtcgacagtgatgaatgagtctgtggttaaagacaagaaaaagaaatcaaagatcaagaccttactttccaagtcaaatttgcagaagac

SEQ ID NO: 82236 - DNA, 969 bp, Homo Sapiens
  misc_feature (145)..(145): n is a, c, g, or t
  misc_feature (202)..(202): n is a, c, g, or t
  misc_feature (830)..(853): n is a, c, g, or t
gcagcagttcgatgaaagcgcatggccaccatatgtggtgtcatcatacacccagctacactttgctccgctgttgtgttggatgtggcgatacatcacacagaacgcttgactgatacgattatcgactcatataggattgccntcgagccagatcggcacgagagtccaaggagattagcagatagagtgagtcacactntcagtgccactgtaggttctctcagcctgggaaactatcaactctttcttaaaaaagaaagagggttgaaaatcctctggacgaacagaagtcactttggctgttcagtaaggccaatgttaacaacacgtttagaggaggaaaagttcaacctcaagttaaatggtttgacttattcttcgtatcattagaagaaccccagagatagcattcctctattttattttactttcttttggattgcactgattgtttttgtgggaatgacactttatctggcaaagtaactgagagtttggtaaaagaatattttcttctctgaataataattattttcacagtgaaaatttcagtattttatcactaatgtatgagcaatgatctatatcaatttcaaggcacgtgaaaaaaattttttagtatgtgcaatttaatatagaaagatttctgcctgtttggacaataggttttgggtagtaccgattaggataagtaagcttatatatgcacagagattattgtattacctgtaaattgatttacaagtacttaaaagcgtggtccccagtgaggccaagaaagtttccggttaagttctttaataataatcctacagtttatcttaagnnnnnnnnnnnnnnnnnnnnnnnncactttaatttaggcttcgttggttgatggtggaaaaaaatgctcaggaaatatttcagatatttgccaaaaaaccagtaataaggttaccttattaaaatagtgatatttgcttt

SEQ ID NO: 82237 - DNA, 1140 bp, Homo Sapiens
cagtcgacggtaccggacatatgcccgggaattcggccattacggccggggagcgcgaggccgggcagggggccagactcggagtcgaggcgcgcccgacagccgcagcgctcatggcgggcggaggagcgggggaccccggcctgggggcggccgcgccccagcgcccgagacccgcgagcacctcttcaaggtgctggtgatcggcgagcttggcgtgggcaagaccagcatcatcaagcgctacgtccaccagctcttctcccagcactaccgggccaccatcggggtggacttcgccctcaaggtcctcaactgggacagcaggactctggtgcgcctgcagctgtgggacatcgcggggcaggagcgatttggcaacatgacccgagtatactacaaggaagctgttggtgcttttgtagtctttgatatatcaagaagttccacatttgaggcagtcttaaaatggaaaagtgatctggatagtaaagttcatcttccaaatggcagccctatccctgctgtcctcttggctaacaaatgtgaccagaacaaggacagtagccagagtccttcccaggtggaccaattctgcaaagaacatggctttgccggatggtttgaaacctctgcaaaggataacataaacatagaggaagctgcccggttcctagtggagaagattcttgtaaaccaccaaagctttcctaatgaagaaaacgatgtggacaaaattaagctagatcaagagaccttgagagcagagaacaaatcccagtgttgctgatatatggcttctgcttctcttgtgtgtgcctcagctctgaagaagttcctgagaatgggttacagatgtcatgttagctgggagtcttcccacatgtggcacttcaaaaggcagcaccactgggcgcctgcacttatttgaaaatggaactttgggagaagtatccctgctagtggctctgtaacttaacagatgacaattaggcttttgtcattgttgccatcatatggaagataatgtttacatccttttaaacatttttatatgacaattcctcaggatttggtaaggcttccaagttgtagcttttagtgtaagtgctggggtggtaataaaatgttacctcccaa

SEQ ID NO: 82238 - DNA, 1083 bp, Homo Sapiens
  misc_feature (117)..(151): n is a, c, g, or t
  misc_feature (389)..(391): n is a, c, g, or t
  misc_feature (394)..(458): n is a, c, g, or t
  misc_feature (466)..(468): n is a, c, g, or t
  misc_feature (472)..(472): n is a, c, g, or t
  misc_feature (475)..(492): n is a, c, g, or t
  misc_feature (511)..(511): n is a, c, g, or t
  misc_feature (529)..(529): n is a, c, g, or t
  misc_feature (531)..(531): n is a, c, g, or t
  misc_feature (538)..(539): n is a, c, g, or t
  misc_feature (543)..(543): n is a, c, g, or t
  misc_feature (560)..(577): n is a, c, g, or t
  misc_feature (669)..(677): n is a, c, g, or t
  misc_feature (805)..(813): n is a, c, g, or t
  misc_feature (1004)..(1004): n is a, c, g, or t
  misc_feature (1053)..(1053): n is a, c, g, or t
cagtcgacggtaccggacatatgcccgggaattcggccattacggccggggttttaaaaagttaaaatctttaaaaatcttctccctgctctcctcagaggtaaaagttattctgannnnnnnnnnnnnnnnnnnnnnnnnnnnnnnnnnncaagtagttttagcagacatatgtatcttcaagcaatacattgtccagttttgtgtttttgaaccttgtgtatatgaaatcaaagtatgtcatattttatgttgcagctttcaccgggttctgtttttgagattcaattatgctttgtcctgccaaaatctatgtttcaactgccatgtatgtggtattctattgtatgaatatgattaatatgttataattaaatgttcttgatgannnacnnnnnnnnnnnnnnnnnnnnnnnnnnnnnnnnnnnnnnnnnnnnnnnnnnnnnnnnnnnnnnnnnccaaaacnnnaaanccnnnnnnnnnnnnnnnnnnccccgcccgcccccccacncccacaaaaaaacttacnanaaccacnncccnccgggccggggggcccnnnnnnnnnnnnnnnnnncgtgcccacaaaccgcgttccaacaggaaaaacccggggccttggtaattagggcttcggcaaaaacaccccccccataaaaaccccgcccnnnnnnnnncccagacaaatagttttataaaaaacaaccccgggaaggggggttttttggagaggttttttaacagggagaaaattaaaagagggggggtggccgaactggaggtttcaaaaatttcggcctttcgnnnnnnnnnaaccatgagaaatcttggcggaagaattagtgttgataaaaaatatccccataacacatattcgcccgccccaccaacagaacgcccattataatacacggtgggaatgttagcccatccctgtaaacccgccacacgcgggccgcccgacatcgcttggttcccctcctttgttcgcactataaaaatancggaccccgcgggaggaagaaaaaaacacgtggtccccaaaaacaacantatctctccccatctatgcgcccaaaaaag

SEQ ID NO: 82239 - DNA, 530 bp, Homo Sapiens
ctttcatgtatttacagtccggagcacaagattctcttctttcaaatacaatgtaattcgctttactttacaacactaaatctgggctttgaatttccagtgcattggactgattggattgttgggagttagaggctgttccaaccatccttagtttgggagagtggctccttctgcttgttttctaagcgtacagtcaacgggtgccatttgtggtatttaacatgttaggatgattgttccaaatgctgagttgttttatttctagatgtaattagttcactttatgtaatattcttctctcagactgactttaaaaacaaagttttatcattttcattgtattagtatttattacagagtgttttagctttgatattctttgtattttcattcatttgttacatgagctttatcagtaacatctgtataaatggtttttaaaaattaactatgtatgtgcccatgccgaagtcgagcaataaaatcaatgctgtttgcactgtcacagcatcaacgtttttaaagaa

SEQ ID NO: 82240 - DNA, 954 bp, Homo Sapiens
  misc_feature (21)..(21): n is a, c, g, or t
  misc_feature (67)..(67): n is a, c, g, or t
  misc_feature (70)..(70): n is a, c, g, or t
  misc_feature (283)..(283): n is a, c, g, or t
  misc_feature (318)..(318): n is a, c, g, or t
  misc_feature (397)..(397): n is a, c, g, or t
tgtgttcctcacagaccccancctccccacctcacccgagggtggcgaagactggctccgccttttntcntttccatgtcccaggtgtcatttctcctactaaaggtttggagtctgggggcatttttcaccaagaaatagaacaaaccttgacaccatgcgtaaggcgggatgtttgtaggttcacacccccgagaactgacctggatgcctacaggacaggagcacccctttagagataggctcagccccatcatctcaaagttaagccaccagtcaccancgaggcacccctcaggcttggtggccactgtccantattacgtagacagaccccaacctcaccccggccagctgtggccagtcccgccctgccatctggtctggtgccttcctnttccatgttggtccccttggccactgtctctgggcatgcaagccagtgtcctggttcagtgcctcggccagagctggggcaggagaggggcctctgggtgagagctgggggtgtctctgcagggtactggcagccttgccacactgtcctcattcccagatggaaagacctgagtgcctctcgccttcctccgggaatgaattcctcatgaaaatgaccaggccacttcttccgagggccaggccgccccctccccgagacctgtcctgccgtccgcgggtgtgtggcctgtaggggactgagagctgggcttgctgggcacctctggaatctgaccctgtgggccaaagaagcaccactgtagtttctgcagacccccatgcggttcattgtgcattgtttggtttctaggatgtatgtgttgctagttttttttaatgaaaccctggattaatgtaaatagctttttggggaacggattctaatgtcacgtatgtgaccgtgtggactatttcaaggtgctgatgcaacactaataaacctggaggggccggcaa

SEQ ID NO: 82241 - DNA, 1021 bp, Homo Sapiens
  misc_feature (120)..(120): n is a, c, g, or t
  misc_feature (152)..(152): n is a, c, g, or t
  misc_feature (156)..(156): n is a, c, g, or t
  misc_feature (166)..(166): n is a, c, g, or t
  misc_feature (175)..(175): n is a, c, g, or t
  misc_feature (191)..(192): n is a, c, g, or t
  misc_feature (212)..(212): n is a, c, g, or t
  misc_feature (225)..(225): n is a, c, g, or t
  misc_feature (241)..(241): n is a, c, g, or t
  misc_feature (407)..(407): n is a, c, g, or t
gtgccaaatttttctccacccccgcttcccgcgcgccgtggggggagggcagagcagagtgccaaaggcccgcgtgcccatgctaagaagaccccgccacagtgcgaggattcagacacncacggtgaagtcgactcagcgtgagatgagcnctgntgcggagacnaactgctcntgcccagaagcaacgnntgagcgcgcctggacgccanagagtgccctttntccatcaccactgacnacctgcagtgccttagcgccgcgagcacccccacctcgtgcgcgaccatgtggaaacggagctgctgaaggaagccgagctcatcccgaacattcaggagctgctgaagagaaccatcatgcaagcagtgagccagatccgactgaaccgggagcacaaggagacntgcgagatggactggtcagacaagatggaggcctacaacatcgacgagacctgcgggcgccaccacagccagagcaccgaggtgcaggctcatccgtactccaccaccttccaagagagcgcctccaccccggagacccgggccaagttcacgcaggacaatctgtgccgtgcccagcgcgagcgcctggcctcggccaacctgcgggtgctggtggactgcatccttcgcgacacctccgaggacctgcggctccagtgcgacgccgtgaacctggccttcgggcgccgctgtgaggagctggaggacgcgcggtacaagctgcatcaccacctgcacaaggctgttgagtgaggtggaggagctgaacatgtccctcacagcactgcgagagaagcttctagaagcggagcagtccctgcgcaacctcgaggacatccacatgagcctggagaaggacattgccgccatgaccaacagtctcttcatcgaccgccagaagtgcatggcccatcgtactcgctaccccaccatcctgcagctggctggctaccagtgagcagcggcacggtgcttccccccagtcccccaaataaacagcgcgttagctttca

SEQ ID NO: 82242 - DNA, 621 bp, Homo Sapiens
  misc_feature (595)..(595): n is a, c, g, or t
atccggaacattcaggagctgctgaagagaaccatcatgcaagcagtgagccagatccgactgaaccgggagcacaaggagacctgcgagatggactggtcagacaagatggaggcctacaacatcgacgagacctgcgggcgccaccacagccagagcaccgaggtgcaggctcatccgtactccaccaccttccaagagagcgcctccaccccagagacccggaccaagttcacacaggacaatctgtgccacgcccagcgcgagcgcctggactcggccaacctgcgggtgctggtggactgcatccttcgcgacacctccgaggacctgggactccagtgtgacgccgtgaacctggccttcgggcgccgctgtgaggaactggaggacgcgcggcacaagctgcagcaccacctgcacaagatgctgcgggaaatcacagatcaggaacacaacgtggtggcactgaaggaggccatcaaggacaaggaggaacctctgcacatagcccagacccggctgtagctgctctcacaccggcccaacatgcagctgtgccgcgatgcagcccagttcagccccagctcacacnccccaacacccccaagctggtgagtg

SEQ ID NO: 82243 - DNA, 983 bp, Homo Sapiens
cgataacaagaacgtccacaatgccagggccataccgtgaacacttcggccacctgccccaccaactaaccgcaaacaatttaacttgccatggcccgtcatggagggcgcctcccctgcccaggcccttgcccaagggttccacccacccttgtagcctatcgtcccggaggagctcttcagccaaggtgactactggaggcaaccggcccagagagcccggaggagcccattccctgctgccctgaggtggtgtccacacctgtggtgaaagtatgacctacccctggctaacaggcatagatggcccgcccttctgtgtcccatgtaaacggatgcctggtggccccttctgagcctaagtacctgtcttccttccctgcccctcagttccttcaaggaactgggtgcctccttccgtcaaatatcaggaatggaaagaactgagcctggtcggctgaggccagtcctgtcctgtcagggtcgagattgcacgcgggtcactcattcccactcaggcccgcgctccctgggaggaccctcgtaatttatgctctgccctagagccgctttcctggtaggatcctttcatggcgtcttcccaggacctcctgccagctcccattgggagttttgggtcccctccaccccagtaggtgcatacttctgccctccccagccccagctcacaccccccaacacccccaagctggtgagtgaggtggaggagctgtacaagtccatcacagcgctgcgggagaagcttctacaagcggagcagtccctgcgcaacctcaaggacatccacatgagcctggagaaggacgtcactgccatgaccaacagtctcttcatcgaccgccagaagtgcatggcccatcgtacttgctacaccaccatcctgcagctggctggctaccagtgagcagcggcacggtgcttccccccaatcccccaaataaacagtgcattagctttcaaaa

SEQ ID NO: 82244 - DNA, 956 bp, Homo Sapiens
  misc_feature (66)..(66): n is a, c, g, or t
  misc_feature (407)..(552): n is a, c, g, or t
  misc_feature (607)..(783): n is a, c, g, or t
acttccactagtctataagtggtgggtaaaaaaggtttcattgtttggttttcataccacagtggnggggtcaggcctggcatccagaccctgtgtccactctaagtgggcaaggaccctatctgtcttgtccattgttatatccatgtcaggtgcatggttggcactatatatccatgttgaataaaatattgcaataaataaatgaatgaaaaaatcagaaaactcaggtccattcattcattcaagggatagttactgaacatgtacctactacacggcagttactcatccatgtcttgggaatacagcagtgcaaagagtagacccaggcccctgcctttgtgtaactgtacctgggacaggagaaaataagtatattaaaggctctgttaaaaagtataagnnnnnnnnnnnnnnnnnnnnnnnnnnnnnnnnnnnnnnnnnnnnnnnnnnnnnnnnnnnnnnnnnnnnnnnnnnnnnnnnnnnnnnnnnnnnnnnnnnnnnnnnnnnnnnnnnnnnnnnnnnnnnnnnnnnnnnnnnnnnnnnnnnaaagcctacagccgcggccgctccaaccctctgtgcgcctcgttgcgaattcttnnnnnnnnnnnnnnnnnnnnnnnnnnnnnnnnnnnnnnnnnnnnnnnnnnnnnnnnnnnnnnnnnnnnnnnnnnnnnnnnnnnnnnnnnnnnnnnnnnnnnnnnnnnnnnnnnnnnnnnnnnnnnnnnnnnnnnnnnnnnnnnnnnnnnnnnnnnnnnnnnnnnnnnnnnnnnnnnngctttcattcgggaacctgtcgtgcagttgcattattaatcggccacccgcgggaaaaggcgttgcgtattggcgctctcgcttctcgccatgatccctggctcggtctcggtggggagcggtcattatcatgggtatacgttccaagatcatgataccagaaaacttggaaa

SEQ ID NO: 82245 - DNA, 867 bp, Homo Sapiens
  misc_feature (38)..(38): n is a, c, g, or t
  misc_feature (105)..(105): n is a, c, g, or t
  misc_feature (135)..(135): n is a, c, g, or t
  misc_feature (167)..(167): n is a, c, g, or t
  misc_feature (227)..(227): n is a, c, g, or t
  misc_feature (240)..(240): n is a, c, g, or t
  misc_feature (256)..(256): n is a, c, g, or t
  misc_feature (350)..(350): n is a, c, g, or t
gtagatcatagtcccagtagccaaccttgctaagtacnctgtccgctccaaagtctggatatagagaacacgcaccagttggacccaatttactcatctctcagnttaattgctgctcagctggagagaaaactntgagggctctgtgtcacccacagatgccgtcntagggagccctgtgtcatgatctgtgatacacataccccctgctgctctgtccagagccnttgccaaagcctnttctttgaggctcacntgccctctcccagaccctagccactctcccgtgtaagctcaggccagggggatgcagtgtgaccctgccagccaaattgggagtctggctgctntggaagtcagaacaaccagagcctgctcccctccactggcctaaaccaccctgttctctacgtgtctgtgatgaggtctaacttggctccaaaacccctccagggaaaaggctgggctgaggtcactcccaacatggctcagcactaatccttcacatctggacaaaactgtgctttgtgcaccctggagcaactgtccgtgagctcatcggggcctccacagagtgcatctgagagagcaagcttggagcagggcctgacattgtactgccagcatcctcaccacagcgctgacttgaacgcatcatggtagaaaacatgctggagaccccttttctcagcctggttcagccactaatgattgtgggattgtgagaaagtttcttctgctccctgagcctctgctgcctcttacataaaatggggtagggtaggcctgaggccctgactcccccgtgtagcgcatccttaattcttctgtcttttggaggctgcagagaggcctcaagaattagct

SEQ ID NO: 82246 - DNA, 884 bp, Homo Sapiens
  misc_feature (30)..(30): n is a, c, g, or t
  misc_feature (59)..(59): n is a, c, g, or t
  misc_feature (142)..(142): n is a, c, g, or t
  misc_feature (180)..(402): n is a, c, g, or t
cttgaaaccagcaccgccttacgtctgctntgtgcttgctcaattcttcctcgtacccngatcttgatacctatacgcttgagtgactgtccgtccgcagccgacgacgagcgagcgatcatgagcgaggagcgagagcgcncatacgcaaccgcctctccccgcgcgtgccgatttcannnnnnnnnnnnnnnnnnnnnnnnnnnnnnnnnnnnnnnnnnnnnnnnnnnnnnnnnnnnnnnnnnnnnnnnnnnnnnnnnnnnnnnnnnnnnnnnnnnnnnnnnnnnnnnnnnnnnnnnnnnnnnnnnnnnnnnnnnnnnnnnnnnnnnnnnnnnnnnnnnnnnnnnnnnnnnnnnnnnnnnnnnnnnnnnnnnnnnnnnnnnnnnnnnnnnnnnnnnnnnnaagaattcggcacgagggcggcggtcgtgcgggttcgcgccgggccgagagcgggttgggggctgcgggaggctgcaggggcctgggcggcagaagaggcggccctgagctggctcatgcgggccagtctcggcagggtggctgggcagggctcgcgaggccacggctcggagcccagaccggggcccaggaggcgagcgccgttttggagaggagcctgcctgctctgcctgccagcgtgaccccacgaggcctcgggcgggaagaggtcctcggggcagatccgagttaatgagagaggggtattgagcgtgtagcgttaactctgccagtcactgcgtcagtcgctttggaaatactaaatttctcgagctgagtcttcatacctggctccattactacgtctgtaaggaggagctggtggtagggtctgctttttagacttttctttagactatttgtatttttttcagatggagtct

SEQ ID NO: 82247 - DNA, 1044 bp, Homo Sapiens
  misc_feature (50)..(50): n is a, c, g, or t
  misc_feature (85)..(85): n is a, c, g, or t
  misc_feature (90)..(90): n is a, c, g, or t
  misc_feature (95)..(95): n is a, c, g, or t
  misc_feature (98)..(98): n is a, c, g, or t
  misc_feature (107)..(107): n is a, c, g, or t
  misc_feature (116)..(116): n is a, c, g, or t
  misc_feature (123)..(123): n is a, c, g, or t
  misc_feature (152)..(535): n is a, c, g, or t
  misc_feature (558)..(558): n is a, c, g, or t
  misc_feature (634)..(644): n is a, c, g, or t
aggggactccaggggaaccgtggatctttgtcctgtccggtccccacctntgatttagctcgattttggatctcgtcagggggcnggacntatgnaanacgccacancgcgccttntacgtcnttgcctttgctgcctttgctcacatgtcnnnnnnnnnnnnnnnnnnnnnnnnnnnnnnnnnnnnnnnnnnnnnnnnnnnnnnnnnnnnnnnnnnnnnnnnnnnnnnnnnnnnnnnnnnnnnnnnnnnnnnnnnnnnnnnnnnnnnnnnnnnnnnnnnnnnnnnnnnnnnnnnnnnnnnnnnnnnnnnnnnnnnnnnnnnnnnnnnnnnnnnnnnnnnnnnnnnnnnnnnnnnnnnnnnnnnnnnnnnnnnnnnnnnnnnnnnnnnnnnnnnnnnnnnnnnnnnnnnnnnnnnnnnnnnnnnnnnnnnnnnnnnnnnnnnnnnnnnnnnnnnnnnnnnnnnnnnnnnnnnnnnnnnnnnnnnnnnnnnnnnnnnnnnnnnnnnnnnnnnnnnnnnnnnnnnnnnnnnnnnnnnaagaattcggcacgaggtttacnacctatttagttctccttgttaaagaaacaggggtgggaataaaatggatttaggacacccagtttgaattgcagnnnnnnnnnnnctgacacatggccaggctgtggtgccagcttaatggagtaggctgtccttggcacttgcatgtgtgaaaggagggttttgcctcttcttgagcatggcttgagttggtaaggaaagctgtaactcacgaagccctgagacctgctacccctaagatcgagcttgttttcagtgactggcttgagtcataggaggaggagtctggtacagctgcaggagagcagggccatctgaagcggtagcattgccaccatctccctctcatctagagcagttttcttatgccttggtttgagctgaatttgatgtgaattcttttgctgcttaataaagtgacctctaggtgcattagaatgcgaaggcaaatagttgcaataaatcacctgcacaagcaaaaaaaa

SEQ ID NO: 82248 - DNA, 387 bp, Homo Sapiens
  misc_feature (180)..(192): n is a, c, g, or t
caactgttgttgatggccctgctctgctgtagcatcatgtcagggcttcctggactcagcacacctctcagtttgtcttttaaaaaacagctgaatctttactacctatttagttctccttgttaaagaaaccaggggtgggaataaaacggatttgggactcccggtacgaattgcagnnnnnnnnnnnnngacacatggccaggctgtggtgccagcttaatggagtaggctgtccttggcacttgcatgtgtgaaaggagggttttgcctcttcttgagcatggcttgagtgggtaaggaaagctgtaactcacgaagccctgagacctgctacccctaagatcgagcttgttttcagcgactggcttgagtcataggaggagg

SEQ ID NO: 82249 - DNA, 1054 bp, Homo Sapiens
  misc_feature (37)..(37): n is a, c, g, or t
  misc_feature (64)..(64): n is a, c, g, or t
  misc_feature (86)..(86): n is a, c, g, or t
  misc_feature (149)..(149): n is a, c, g, or t
  misc_feature (163)..(163): n is a, c, g, or t
  misc_feature (198)..(198): n is a, c, g, or t
  misc_feature (214)..(214): n is a, c, g, or t
  misc_feature (239)..(239): n is a, c, g, or t
  misc_feature (250)..(250): n is a, c, g, or t
  misc_feature (279)..(279): n is a, c, g, or t
  misc_feature (284)..(284): n is a, c, g, or t
  misc_feature (291)..(453): n is a, c, g, or t
  misc_feature (484)..(621): n is a, c, g, or t
  misc_feature (971)..(990): n is a, c, g, or t
ataattcttagtttcactttattggtgatttgttgtntagggggcacccgcaaaccaccaacancgtaattatcgctttatgactntaccctgtatcccgcgttccctgcttgtggtacacttcaacccttgagtaatcccacgcccanagccgacgaccgangcaggagcactgcggagaacggaggaggcacaatngccaaccgcctttcancagcgttgccgattcataatgcaanttgcaggacangattcaggattggacagcggccattagcngcaanccacttnnnnnnnnnnnnnnnnnnnnnnnnnnnnnnnnnnnnnnnnnnnnnnnnnnnnnnnnnnnnnnnnnnnnnnnnnnnnnnnnnnnnnnnnnnnnnnnnnnnnnnnnnnnnnnnnnnnnnnnnnnnnnnnnnnnnnnnnnnnnnnnnnnnnnnnnnnnnnnnnnnnaagaattcggcacgaggcgcggctgtaggcnnnnnnnnnnnnnnnnnnnnnnnnnnnnnnnnnnnnnnnnnnnnnnnnnnnnnnnnnnnnnnnnnnnnnnnnnnnnnnnnnnnnnnnnnnnnnnnnnnnnnnnnnnnnnnnnnnnnnnnnnnnnnnnnnnnnnnnnnncatggtgtttttctttagggctcttcctacaaccttgagaagtagataggcatcagagtatggtactataggaatcagaaaaattcaaaacaaatgtggattaagtgtttaggctctatgtggctcacgcagccagaatccttaagtctgtgtgtttctgtgtctcaagactgggctcacattctggctttgtccataacaatgctctgggatttcagggagttccctcatttgtaaaatgagggggtcagagcaggtgatatccatgtttcttccctttctgatattgttgtctgtggcatattctttgtatggcgaatttaataaattatattaatgtgtctctttgnnnnnnnnnnnnnnnnnnnngcctacagccgcggccgcaagcttattccctttagtgagggtaattttagcttggcactgcccg

SEQ ID NO: 82250 - DNA, 1040 bp, Homo Sapiens
  misc_feature (602)..(978): n is a, c, g, or t
  misc_feature (983)..(983): n is a, c, g, or t
  misc_feature (989)..(989): n is a, c, g, or t
  misc_feature (1014)..(1015): n is a, c, g, or t
ttgaagtcaaaaagtttatgtaaccaatcaattaaattctggaaatttcagcagcactttcttcccaaactgctttccaatcaaatcctctttctcccgtaagaattatcacagacataaattgcctaattaataaacttaattcttataggtttacgtatttatgtcatttgataaacagatgctggccaatgttaagactcctaaggacttggtattaaaaactgaaacctctcatcagaatttctatttttatatctgtgactcaccaaacatacttggaaatgtccattttccaagctgactttccagttagattttaatcttaaataaagtgtgtatgtggttttattaaacaaactgtcacaatggacaaactgcatgcctttccatgaatgtctggttatcaccctgacatcacccaatgaaaaagaatacaacacttaaaatttaatagaattctaacagtaaacattttctgagttttggtttctagtacctgcttatctagagttaataataatcacccgttcaacaattacagaagaaaaacttttaaagttaagttctaaatttgaagtatacctcgtgccgaattcttnnnnnnnnnnnnnnnnnnnnnnnnnnnnnnnnnnnnnnnnnnnnnnnnnnnnnnnnnnnnnnnnnnnnnnnnnnnnnnnnnnnnnnnnnnnnnnnnnnnnnnnnnnnnnnnnnnnnnnnnnnnnnnnnnnnnnnnnnnnnnnnnnnnnnnnnnnnnnnnnnnnnnnnnnnnnnnnnnnnnnnnnnnnnnnnnnnnnnnnnnnnnnnnnnnnnnnnnnnnnnnnnnnnnnnnnnnnnnnnnnnnnnnnnnnnnnnnnnnnnnnnnnnnnnnnnnnnnnnnnnnnnnnnnnnnnnnnnnnnnnnnnnnnnnnnnnnnnnnnnnnnnnnnnnnnnnnnnnnnnnnnnnnnnnnnnnnnnnnnnnnnnnnnnnnnnnnnnncgcangaaganatgtgagcaaagggcagcaaagcanngacgtaaaaggcgcgtgctgcgttt

SEQ ID NO: 82251 - DNA, 1455 bp, Homo Sapiens
aggacgcgaggcctgagtggcgaattcggcacgagggtggctgccccgcaggtgcgcgcggccggggctggcggcgactctctccaccgggccgcccgggaggctcatgcagcgcggctgggtcccgcggcgcccggatcggggaagtgaaagtgcctcggaggaggagggccggtccggcagtgcagccgcctcacaggtcggcggacgggccaggcgggcggcctcctgaaccgaaccgaatcggctcctcgggccgtcgtcctcccgcccctcctcgcccgccgccggagttttctttcggtttcttccaagattcctggccttccctcgacggagccgggcccagtgcgggggcgcagggcgcgggagctccacctcctcggctttccctgcgtccagaggctggcatggcgcgggccgagtactgagcgcacggtcggggcacagcagggccggggggtgcagctggctcgcgcctcctctccggccgccgtctcctccggtccccggcgaaagccattgagacaccagctggacgtcacgcgccggagcatgtctgggagtcagagcgaggtggctccatccccgcagagtccgcggagccccgagatgggacgggacttgcggcccgggtcccgcgtgctcctgctcctgcttctgctcctgctggtgtacctgactcagccaggcaatggcaacgagggcagcgtcactggaagttgttattgtggtaaaagaatttcttccgactccccgccatcggttcagttcatgaatcgtctccggaaacacctgagagcttaccatcggtgtctatactacacgaggttacagctcctttcctggagcgtgtgtggaggcaacaaggacccatgggtttcaggaattgatgaactgtcttgatctcaaagaatgtggacatgcttactccggggaattgtggcccaccagaagcatttacttcctaccagccccccaacttctcaggcctcagagggggcatcttcagatatccacacccctgcccagatgctcctgtccaccttgcagtccactcagcgccccaccctcccagtaggatcactgtcctcggacaaagagctcactcgtcccaatgaaaccaccattcacactgcgggccacagtctggcagttgggcctgaggctggggagaaccagaagcagccggaaaaaaatgctggtcccacagccaggacatcagccacagtgccggtcctgtgcctcctggccatcatcttcatcctcaccgcagccctttcctatgtgctgtgcaagaggaggagggggcagtcaccgcagtcctctccagatctgccggttcattatatacctgtggcacctgactctaatacctgagccaagaatggaagtttgtgagggtaaactgtggcttattcttacaaaaagtgtaataaaggagactgacccctg

SEQ ID NO: 82252 - DNA, 1240 bp, Homo Sapiens
  misc_feature (80)..(114): n is a, c, g, or t
  misc_feature (819)..(877): n is a, c, g, or t
  misc_feature (1029)..(1029): n is a, c, g, or t
  misc_feature (1031)..(1063): n is a, c, g, or t
  misc_feature (1166)..(1167): n is a, c, g, or t
agtgtatagatcactataggcgctactcgttctgcagcgaacgacgagcgcagcgaagtagtgagcgaggaagcggccgnnnnnnnnnnnnnnnnnnnnnnnnnnnnnnnnnnncagtcgacggtaccggacatatgcccgggaattcggccattacggccgggcgggggaaggaaagaaggcgccgcagctaagcccaggtctctcctccgcaggttccagctcctttcctggagcgtgtgtggaggcaacaaggacccatgggttcaggaattgatgagctgtcttgatctcaaagaatgtggacatgcttactcggggattgtggcccaccagaagcatttacttcctaccagccccccaatttctcaggcctcagagggggcatcttcagatatccacacccctgcccagatgctcctgtccaccttgcagtccactcagcgccccaccctcccagtaggatcactgtcctcggacaaagagctcactcgtcccaatgaaaccaccattcacactgcgggccacagtctggcagctgggcctgaggctggggagaaccagaagcagccggaaaaaaatgctggtcccacagccaggacatcagccacagtgccagtcctgtgcctcctggccatcatcttcatcctcaccgcagccctttcctatgtgctgtgcaagaggaggagggggcagtcaccgcagtcctctccagatctgccggttcattatatacctgtggcacctgactctaatacctgagccaagaatggaagcttgtgaaggagacggactctatgttgcccaggctgttatggnnnnnnnnnnnnnnnnnnnnnnnnnnnnnnnnnnnnnnnnnnnnnnnnnnnnnnnnnnntcacctaccacatccagcctacacgtatttgttaatatctaacataggactaaccagccactgccctctcttaggcccctcatttaaaaacggttaactataaaatctgcttttcacactgggtgataataacttggacaaattctatgggnannnnnnnnnnnnnnnnnnnnnnnnnnnnnnnnngagacggagtctcgctctgtcattccaggcttggaatgccagtggcatggatctcgggctcactgcaaacccccattctcccaggttcaagcgattctcctgnnctccttcctggagtaactggggactacagggggctcaccaccacaccccaggccaaattttttgggatttttt

SEQ ID NO: 82253 - DNA, 1618 bp, Homo Sapiens
aagatgtcaagaactcaaggtctacagattccattcgtctcttagctctactttctcttggagaagttgggcatcatattgacttaagtggacagttggaactaaaatctgtaatactagaagctttctcatctcctagtgaagaagtcaaatcagctgcatcctatgcattaggcagcattagtgtgggcaaccttcctgaatatctgccgtttgtcctgcaagaaataactagtcaacccaaaaggcagtatcttttacttcattccttgaaggaaattattagctctgcatcagtggtgggccttaaaccatatgttgaaaacatctgggccttattactaaagcactgtgagtgtgcagaggaaggaaccagaaatgttgttgctgaatgtctaggaaaactcactctaattgatccagaaactctccttccacggcttaaggggtacttgatatcaggctcatcatatgcccgaagctcagtggttacggctgtgaaatttacaatttctgaccatccacaacctattgatccactgttaaagaactgcataggtgatttcctaaaaactttggaagacccagatttgaatgtgagaagagtagccttggtcacatttaattcagcagcacataacaagccatcattaataagggatctattggatactgttcttccacatctttacaatgaaacaaaagttagaaaggagcttataagagaggtagaaatgggtccatttaaacatacggttgatgatggtctggatattagaaaaggcagcatttgagtgtatgtacacacttctagacagttgtcttgatagacttgatatctttgaatttctaaatcatgttgaagatgggtttgaaggaccattatgatattaagatgctgacatttttaatgttggtgagactgtctaccctttgtccaagtgcagtactgcagaggttggaccgacttgttgagccattacgtgcaacatgtacaactaaggtaaaggcaaactcagtaaagcaggagtttgaaaaacaagatgaattaaagcgatctgccatgagagcagtagcagcactactaaccattccagaagcagagaagagtccactgatgagtgaattccagtcacagatcagttctaaccctgagctggcggctatctttgaaagtatccagaaagattcatcatctactaacttggaatcaatggacactagttagatgtttgttcaccatggggaccattacatatgaccatacaatgcactgaattgacaggttaatcataagacatggaaagagaagtgtctaaaagcttcaaaatgttccacttttttttccttcatggagactgtttgtttggctttcttccattgttgtttttgtagcatttatttcagaaatgtgtatttccataatccagaggttgtaaaaccactagtgttttagtggttacagcaacatttgaaatggaaactaaaagttaggattttatggagtatggagatagggtccagtatctatttaccctgtaatgtttaggattaaaatgttaaaattttgtgaccatgaatttctttcttttataaattttctcatttaaaaatcaaa

SEQ ID NO: 82254 - DNA, 1374 bp, Homo Sapiens
  misc_feature (111)..(111): n is a, c, g, or t
cagaaggcccggaagaaaagcggagcaaagaacatgcatccatgtgcaaaggcgacagtgccctcgcctgggcgcaagaacaaggagaattggtcgtgaggaatggtagtngagtccaccccgtgcccaaggatccatccagtgcatgacccacatgcccccctcagatgtcagggaaaatgccatcagcgggaaaagtgtgtgtcagttgacccatgtgggaccctgatggacctgaaagaccaggatcggtccagctcagatattgaggctatgaaagcctcgttctgtcttctctggagcagctgtggcttcccagtggctgcttggtgacatggattagcgctacgtgggctgcagcatttgggatccagaatacctagaggggcatcgggccagggaaaacctcggattagcaagcaataaaaacatgacctcactcttcctcaaaggagcccctggtcttccctgtgtgactcagttctttccatctgtttgtcccgctgcaagcctctttctgcgctgactgtgacatcggaacgtggccttcctgtcaccccctccgtgccacgcactgaaggccacccccacccacctgggaaactaagaactggatattttgcctcattcacttgtactgtaacaatgtatataatttggttggtatttcactatttaatttttaagaagcctattttactagtgttttatatgaacaaagtactgcagaagttaaacctgtgttgtattttttctgagatgttttgctttaagagatactttttgctcagtttttatatgccagatacagagaatttgtagcggttatttttgtatgatctagtaacttgcaaacagaccaaatggatgagaggcggggaccgtgcagctgtcggctgatgaggaggcggccgccccagtgctgatggagatgccactttcgtgtgactgcgaacattaaagcacaaaaaaatccaacctgggagttgtgtgattttgataccaaagtaagttcacttttcctccaaaaggaagtttttatttttccaagatttataactaaagcatacacttagatgacttattaacattcacttgatacaacatataaacaaaatagtaacagattctgagtggttattttgtggactgtgacaagcacttcaaatacaaaatgttaggagggcaaaacggtgcgggccctcgtaggtcaggcaggcaccagtgggcttcttcctgctgaaagctgtggctgtgagatgagaccgctggctgggtcacagagtgaaatccagcgttccgtgtgcggacgaggagacaagctgtcctggccagccatcgcaccccaatgtcttcagcttgacgttgcttctc

SEQ ID NO: 82255 - DNA, 1134 bp, Homo Sapiens
  misc_feature (875)..(894): n is a, c, g, or t
  misc_feature (1031)..(1031): n is a, c, g, or t
  misc_feature (1044)..(1044): n is a, c, g, or t
cgaataaatcgggtcggtacgaggcctcggtggttaattcggcacgagggtctgcacgttaggtggcaggagtggcgctgctcacctctggtgccaaagggcggcgcagcggctgccgagctcggccctggaggcggcgagaacatggtgcgcaggttcttggtgaccctccggattcggcgcgcgtgcggcccgccgcgagtgagggttttcgtggttcacatcccgcggctcacgggggagtgggcagcgccaggggcgcccgccgctgtggccctcgtgctgatgctactgaggagccagcgtctagggcagcagccgcttcctagaagaccaggtcatgatgatgggcagcgcccgagtggcggagctgctgctgctccacggcgcggagcccaactgcgccgaccccgccactctcacccgacccgtgcacgacgctgcccgggagggcttcctggacacgctggtggtgctgcaccgggccggggcgcggctggacgtgcgcgatgcctggggccgtctgcccgtggacctggctgaggagctgggccatcgcgatgtcgcacggtacctgcgcgcggctgcggggggcaccagaggcagtaaccatgcccgcatagatgccgcggaaggtccctcagacatccccgattgaaagaaccagagaggctctgagaaacctccggaaacttagatcatcagtcaccgaaggtcctacagggccacaactgcccccgccacaacccaccccgctttcgtagttttcatttagaaaatagagcttttaaaaatgtcctgccttttaacgtagatatatgccttcccccactaccgtaaatgtccatttatatcattttttatatattcttatnnnnnnnnnnnnnnnnnnnncaccgcttctgccttttcactgtgttggagttttctggagtgagcactcacgccctaagcgcacattcatgtgggcatttcttgcgagcctcgcagcctccggaagctgtcgacttcatgacaagcattttgcgaanctagggaagctcnaggggggttactggcttctcttgagtcacactgctagcaaatggcagaaccaaagctcaaataaaaataaaataattttcattcattcac

SEQ ID NO: 82256 - DNA, 711 bp, Homo Sapiens
tgaccttcggtatattgaaatgcagcatttcagagaaaagctgccttcgtatggaatgcaaaaggaattggtaaatttaattgataaccatcaggtaacagtaataagtggtgaaactggttgtggcaaaaccactcaagttactcagttcattttggataactacattgaaagaggaaaaggatctgcttgcagaatagtttgtactcagccaagaagaattagtgccatttcagttgcggaaagagtagctgcagaaagggcagaatcttgtggcagtggtaatagtactggatatcaaattcgtctccagagtcggttgccaaggaaacagggttctatcttatactgtacaacaggaatcatccttcagtggctccagtcagacccgtatttgtccagtgttagtcatatcgtacttgatgaaatccatgaaagaaatctgcagtcagatgttttaatgactgttgttaaagaccttctcaattttcgatctgacttgaaagtaatattgatgagtgcaacattgaatgcagaaaagttttcagaatattttggtaactgtccaatgatacatatacctggttttacctttccggttgtggaatatcttttggaagatgtaattgaaaaaataaggtatgttccagaacaaaaagaacacagatcccagtttaagaggggtttcatgcaagggcatgtaaatagaca

SEQ ID NO: 82257 - DNA, 731 bp, Homo Sapiens
  misc_feature (106)..(114): n is a, c, g, or t
aaaagaagtataatgccttacttcagagaactcttggaaagaagccttatgtgaaagtgatgactgtgaagtaatatggcccacactttattcaccaccctggagnnnnnnnnncccaggaatatgtggaaaagccattaataaccactcttttatttttttgcaataacaaggtgaaatcaatattgttgagaagattcttccatctggtaatgttgagaagacttcatttggtaggagtcccttactttacgtgtgtaaattcctaccaggaaagaatacatatccaatagattggagaaagccagagattagccctcattccgcatctgtcaaccaggacagaatgcatggacaagggatgagctttacaaagatgatgcactttggagatcagaaaattcatatttaagcaaagtgatacaaacacagtgatttgggaatgccttcatttacaatgcaatacttaaattttaatactcttgtaggagaaaaagcaactgtataaatgaatgtagagtgactttctgcaatatttcaaacctatatcagagaattacactgtgggaaaactaccattgtaataagtgtagcaaaatctccttagatatctgaaaagtcatactggatggaatctgtaggaaacggttctattttgagggaagggggattcctttttgttttttaagtgaattcagaaaatgttataaataaatcttttggtttattat

SEQ ID NO: 82258 - DNA, 908 bp, Homo Sapiens
gagtgcccctgagcctgtgtcctaggtttccctgatggaccaagccttctccttttgagactcctcatccagtttctttagttcttcatatatcactgtttttcagatctctggctatccttgccattgacctcagaaatcctgtatttgaccttaaccttcttatacccagtccatacccaaagtgatggaaatggaatagatttctttttaaagttttaaacgaatattttgactgaaaaattttggcagtcttgtatgcaaatgacactgcagagcattgttttctcccccccacgtaggagattttattcaactaaggcacaggcatattaaaagactttcagtataaggaaaaggggtagtttattccctccaaatttgactacagctcgaaattgtctttattaatgcaaagttcttttgtcaccttgactttgggacactgttaccaaacctcgtgggaaatatcaagttccagaagattgaatacatgcaggaaacaaatgttttttgggccctagagtgaacatttggtccatatgaaaatgaccaggaagacaattaggtgaaggttttttaatgatttgtgctacgtcagtctcttcccataagacatattcaaagttttaacttttccttaagaggcttccatggggagcaagcatttgataattcatcctttaagaaaaacaccaccgtacactgcttgaagagttcctcttctattacttaaaacgtttttattgtgcaacatttaaggcatacaaaaacatataaagaataccatgatgaaaatctatgactgtattaccaagcttaagaaataaaacagttgagtgatctctcatttatgactaaattaacttattaaaaccattaaaacttttggattattcctgttaaaa

SEQ ID NO: 82259 - DNA, 1002 bp, Homo Sapiens
  misc_feature (90)..(90): n is a, c, g, or t
  misc_feature (130)..(130): n is a, c, g, or t
  misc_feature (142)..(142): n is a, c, g, or t
  misc_feature (154)..(154): n is a, c, g, or t
  misc_feature (162)..(162): n is a, c, g, or t
  misc_feature (175)..(175): n is a, c, g, or t
  misc_feature (337)..(337): n is a, c, g, or t
  misc_feature (357)..(357): n is a, c, g, or t
tacccacaaagtgagaaaggagaatgttgctcctgacctcaaattagtgagagagattctcagatagctcagtagctcagattctcaganccacaacaataggatgcatgctgatgaagtctgatctgcnctagaatgtgcncacagctccgtnagtagagncctgaatgagtcntgtgttgagaatagcctgtatgtctagtgttgtcagggcaatggatgtgtggtttcccatgaaccatagtgagacatgcaagagtgaagtcagcatgggctctttaggtcctctctgataggttgtccaaagaggtggagggaacccagcatcaagaagtgngaggtgaagccagattgtgngatgaggaaggagtcacaaatgaccacctggaatacaaaaaaatctacacaagctaaagatgagaagtcagggctatgagaatttctatgggagttcgtgaatgctccctctcttattacacacaattactatccagagaaccctgacaccatgtgaaggcagccctatctcataagacagatttctttttttggggaccttggggaaagggaggccagaaacctccgtgtccaaggtggggtggaaggagagggagaaatcttagcaaaaatgtcaaccagcaagggaagatgtgctagcgcaagtaggcaactcaacacaagactcagttggagagggaagaaaaatttagtactaaattattgtagtttcttcttattgtaggcgactgggagtcataattaccaaactatttaaaatgaccaaaatgttgctcttacctgagtatgttggcatacaactggaatgtatctgatggaagaaaaagcttctcccactgaataaattttatgaggatgatgagagacaaaaaaatgtttgatcagatatcatgtatgtgcatgcttgtctaattcactgattatgcatacattcacctcaaaatgctactaaaacaacaataaaataatgaaaaagtgaatagc

SEQ ID NO: 82260 - DNA, 1021 bp, Homo Sapiens
  misc_feature (128)..(128): n is a, c, g, or t
  misc_feature (163)..(164): n is a, c, g, or t
  misc_feature (183)..(183): n is a, c, g, or t
  misc_feature (225)..(225): n is a, c, g, or t
  misc_feature (440)..(440): n is a, c, g, or t
  misc_feature (530)..(569): n is a, c, g, or t
  misc_feature (901)..(914): n is a, c, g, or t
ctgagccagatcgcagaggtttgtgaaattttctgatctgggaagacctactgtgcgtccttcccagcattggagggcttacctccagatcgtagagtagagtcaattttcttgcagcgaactccatntggtagagatgattggatattattccttctctgtnntggaaaacgagagctacanccaagacagctgaggagagtgaacaccacacatccacagaancagagagcgtagtgggccctgccgttgaccgcagcctctctggacaggcaaggggagttggcgcaggtgaggactcagacgacgtccacccgtcccaaggtgtcactagtatttctctgaagtgcctgaaggtaggaatgggccggcgattgggaccagctgggccccacccacggccacgccaggcaaagcgccagcagccctgcactccacgntggccaagaaggccttccacgcagaatgacaagacttcaaaaatccgatgtgcttccttccctggcgcagtcgctcctcggagccggttnnnnnnnnnnnnnnnnnnnnnnnnnnnnnnnnnnnnnnnnacaggaatttaagacctttcagcttcgagccagggggcgggggatcccgagcaaaagccttccgtggacatcaggccccgtggcctcaagggctcccagggcaaacctaattccccccaaaacgtgaagtcggggaagctgcggctacacattccacaaagtgctggcacttacacccacaacccggaaggctgtggaccgattcctctagggtggtgacctcccattagccaacggtgtcatggtttggaatgttcattatcgccaagaacctggttagatgcataaagaccttttttcaccgttacctaattttttcccctttcaagaannnnnnnnnnnnnnggtgtgttgtacagcagtataatttttcacttatttattccatcagtagatatggtttgtacaatgtacaattgtttcatttcagaaaataaaaatttcaaatcatg

SEQ ID NO: 82261 - DNA, 978 bp, Homo Sapiens
  misc_feature (53)..(53): n is a, c, g, or t
  misc_feature (98)..(98): n is a, c, g, or t
  misc_feature (101)..(101): n is a, c, g, or t
  misc_feature (107)..(107): n is a, c, g, or t
  misc_feature (153)..(154): n is a, c, g, or t
  misc_feature (544)..(673): n is a, c, g, or t
ggaatgcaggcacagttgagagagcaacccaatcgtaccagggagctgtcttncaggcacttgatgaggcatgacagcctgacgctcttcgtaccatngcncaggcntgctgatgcttggtccatgtgacagtgtgggaacagtacgagcagnnttagatttggaagtcatgttgcccactggctacagagcagtctaggaacagcaccataaaaataaagattattcctgacacacatgcatctagagtaaactggggcgtatctgacagcgttagtacagtgatggccaaatgcaaactgcattccagaaccagcgaagggtgacagactgggctgaggcagagctaggactaaccatctcgagtgatgccatctcggggccaacaaaagttttggacacggctggatcatctgaccaaactgctcaaatctttacacaattattgtcctggtattaaactttcacctgccacttccaacaaacaggagacagaataaggagatgaccaggaagatggctggattaagaattctagacttgnnnnnnnnnnnnnnnnnnnnnnnnnnnnnnnnnnnnnnnnnnnnnnnnnnnnnnnnnnnnnnnnnnnnnnnnnnnnnnnnnnnnnnnnnnnnnnnnnnnnnnnnnnnnnnnnnnnnnnnnnnnnnnnnnnaattacccagaagactcactccatagttcatggccccgtgatccagagtccctgctggcgccttcgagtggggcaggctgagaactcaagctgtaactaatgtctcctccgaagaaaactaaaccgagggctgagctgatgtgaagttttccgtggctgcattcatacaaatggtgaaaatgtagcatacctcccctcaaaagcctgaaagtaaagacatgcccccaatttaatgtgatgaattagagaaataggtttcagacacttaatggtttaaagtctcacaaaaataaagctttagaagg

SEQ ID NO: 82262 - DNA, 414 bp, Homo Sapiens
cttgagtaaaccaatagataaaaggatatacaaaggaacacagcctacttgtcatgacttcaaccacctaacagccacagcagaaagtgtctctctcctagtgggcttttccgcaggccaagtccagcttatagacccaatcaaaaaagaaactagcaaactttttaatgaggaagcttttgaggggaggtatgctacattttcaccatttgtatgaatgcagccacggaaaacttcacatcagctcagccctcggtttagttttcttcggaggagacattagttacagcttgagttctcagcctgccccactcgaaggcgccagcagggactctggatcacggggccatgaactatggagtgagtcttctagaaagagaaataataaaagacactaagacttgctgttctaaa

SEQ ID NO: 82263 - DNA, 1261 bp, Homo Sapiens
  misc_feature (852)..(865): n is a, c, g, or t
  misc_feature (931)..(931): n is a, c, g, or t
tagggctaggtacgaggcctggggtgtgtaatcggcacgaggtgaacgctgctttccaagatggcgacggagggaggagggaaggagatgaacgagattaagacccaattcaccacccgggaaggtctgtacaagctgctgccgcactcggagtacagccggcccaaccgggtgcccttcaactcgcagggatccaaccctgtccgcgtctccttcgtaaacctcaacgaccagtctggcaacggcgaccgcctctgcttcaatgtgggccgggagctgtacttctatatctacaagggggtccgcaaggctgctgacttgagtaaaccaatagataaaaggatatacaaaggaacacagcctacttgtcatgacttcaaccacctaacagccacagcagaaagtgtctctctcctagtgggcttttccgcaggccaagtccagcttatagacccaatcaaaaaagaaactagcaaactttttaatgaggaaagactaatagacaagtcacgagttacctgtgtcaaatgggttcccggttcggaaagccttttcctagtagcccactcgagtgggaacatgtacttatataatgtggagcacacttgtggcaccacagccccccactaccagcttctgaagcagggagagagctttgccgtgcacacttgcaagagcaaatccacgaggaaccctctccttaagtggacggtggggcgagggggccctcaacgagtttgctttctccccagatggcaagtcattagcgtgcgtgagccaggacgggtttctgcgggtggtcactttggactcaatgggagctgacgggtaagatgaaagctattgggagcnnnnnnnnnnnnnnaagccgggatgcaagtacatggggacagggggaggaagaatggtgacaggccggcccttgggacgncggcgcagacataccagcgggcacggtgccaaagatcacgtgggtctgggtacagcgggttgaccctagtatcccatgtgggctgaacacaggcgcccatgggactaaatgggcagaaaaagacgcaacaagactacaagtggagagaagtagggaagaacaggacagaggacaaagagcagatgagcagccgcgatcgaagtagagtacggcagacacaaacgtatgagtgcagaagattcgaccacgcaagacgacggaagtcatcgtgtgtagagcaagctcgctgcttctcgtcttgccacctcttcgctcctctcctgccgttac

SEQ ID NO: 82264 - DNA, 1007 bp, Homo Sapiens
  misc_feature (52)..(52): n is a, c, g, or t
  misc_feature (72)..(73): n is a, c, g, or t
  misc_feature (95)..(95): n is a, c, g, or t
  misc_feature (135)..(135): n is a, c, g, or t
  misc_feature (143)..(143): n is a, c, g, or t
  misc_feature (148)..(148): n is a, c, g, or t
  misc_feature (174)..(174): n is a, c, g, or t
  misc_feature (176)..(176): n is a, c, g, or t
  misc_feature (199)..(199): n is a, c, g, or t
  misc_feature (230)..(230): n is a, c, g, or t
  misc_feature (233)..(233): n is a, c, g, or t
  misc_feature (256)..(256): n is a, c, g, or t
  misc_feature (271)..(271): n is a, c, g, or t
tagagttgtctcccgcagacattatgtgatttctcctccgcattcacccacntggatgccactaaagtgctnntgatctaaagtaactctgatcntgtgtgatgggaaccattctctctaacatgtgttttcttnaagatgtntgacntgggccacatgagaataacagatctntnggcagtccaaagcaagagcctcntgatctagcagccaagactccccctgacctntgnccatgtaccccaaccctctcatntactgcacctgctgngacccctggaacttgggaccacggaagctaatcaagacccctcaactaccacgcaagaactccacagggagttccaagctaattcctcttgtaccagctccaaaaaatcacaattacctccaaccaacaaaacctgttgtttccccaaaaatgaaaatccattcagcaaggcaagaagagactaataaatcattttatgaagtgatcaacgtgtcacctggctatcaacttgttcggaatcgggaacagatttctgtcaccttaggggatgagatgtttgataggaaaaagcggtgggaatcggagatcccggacaaaggcagattttccaggaccaacatcatttctgacctagaagagcaaatctcagagctgacagcaataattgaacaaatgaacagagaccaccagtctgcccagaaattgctctccagtgaaatggatctccgctgtgctgagatgaaacagaactttgaaaacaagaacagggagctcaaagaggcccatgaagcagaactcagtgagttggagaacaactacaaagcagccttgaaggcagagaagttggctgcccaagagaagctagaggagatgggaaaagaatacaagtatttgaagaatatgtttcgtacgtatcaggacagtatttatgatgaaatggaagagaagtggtcaaaacagaaggcgaaatggaagaaggatgagaagttcgagcgagaaaatatcctgctacagc

SEQ ID NO: 82265 - DNA, 985 bp, Homo Sapiens
  misc_feature (64)..(64): n is a, c, g, or t
  misc_feature (66)..(66): n is a, c, g, or t
  misc_feature (96)..(96): n is a, c, g, or t
  misc_feature (111)..(111): n is a, c, g, or t
  misc_feature (117)..(117): n is a, c, g, or t
  misc_feature (121)..(121): n is a, c, g, or t
  misc_feature (255)..(255): n is a, c, g, or t
  misc_feature (267)..(267): n is a, c, g, or t
  misc_feature (334)..(334): n is a, c, g, or t
  misc_feature (390)..(390): n is a, c, g, or t
ctgcagcccagccatagtgctcgactgttgtccaatagtccttgatgtgggctgacatttcccncntactgctgccatgggagacagtgatggatntcgggaccctcctcntgttgntccntgaactgtgcaactcccacgcctcatgcaatgccaaagctgtccgcacccagcgggcccctgtatgagaaccttgtgcagctgcaccaggagggagcggcccagagccagctcagtccagctgttcctctctgngccttttgaacnctctcagcagtccacagcacctggcagagggtcagagaccaggggagccgggccttgccctcccttntgcccagggcccagtttcttgatagaagacccttctgggagccagggagctcaggngacagataagggaaggacgccccctgactccaggcccctgagcctggcgggaagtggctgcggcccaggcagccagtcctggtggtgttctccctgcatgccctccgtggctgggctgccaccccacccggcccgaatctgtcttgacctgcaggaatacacgggcggcgccaggcattacctcacagcgggactacacagttgctggctttgctcctgggcaaggaggagcaggccagagcctcttttgcttccttttcttgcccatgccgcttctagaagccaggcacaggttgccaagaggtgacacgaaacaggaggaaactcagtgacctctgcctctcccacattcctccccgcgggggaggacctcgccgctctgaagagcaccgtgcacatgtgggtgcacaaacgtgggtgttggtgtggacggggcgcagatctccgtggatgaactgcgtctggactcttagattcataaaatattcgagggtttgggagtcacagaccctcccctctcctcagtgcactttggcatttgcacggtgtcttccccggacagcacagcaataaatggtgtgattgcgtggaaaaa

SEQ ID NO: 82266 - DNA, 1580 bp, Homo Sapiens
aacggctaggtacgaggcctgggtggcgaattcggcacgagggagcggcgcagtggcggccgcgttctgtggttttccgctattcccccagacccgcaccttctcggcctctttgcggagaatcgtgaccaagatgtggaacagtggattcgaaagctatggcagctcctcatacgggggagccggcggctacacgcagtccccggggggctttggatcgcccgcaccttctcaagccgaaaagaaatcaagagcccgagcccagcacattgtgccctgtactatatctcagctgctttctgccactttggttgatgaagtgttcagaattgggaatgttgagatttcacaggtcactattgtggggatcatcagacatgcagagaaggctccaaccaacattgtttacaaaatagatgacatgacagctgcacccatggacgttcgccagtgggttgacacagatgacaccagcagtgaaaacactgtggttcctccagaaacatatgtgaaagtggcaggccacctgagatcttttcagaacaaaaagagcctggtagcctttaagatcatgcccctggaggatatgaatgagttcaccacacatattctggaagtgatcaatgcacacatggtactaagcaaagccaacagccagccctcagcagggagagcacctatcagcaatccaggaatgagtgaagcagggaactttggtgggaatagcttcatgccagcaaatggcctcactgtggcccaaaaccaggtgttgaatttgattaaggcttgtccaagacctgaagggttgaactttcaggatctcaagaaccagctgaaacacatgtctgtatcctcaatcaagcaagctgtggattttctgagcaatgaggggcacatctattctactgtggatgatgaccattttaaatccacagatgcagaataactggatctaactgggtacctgagatattttacagctggacctagtttcacaatctgttgtctccagctctgcatatgtctggccagggggcttctaggaagtaggtttcatctatcaaatgtctcctctgacttccttttgaaacttactgctcttctgttttattttgttttgtttgaagctcagagggagatgggcaattgacagggatgcaatccagggtgggatttcttgaggaagttacaaataagcttgttacaacatcaagatagatggaattggaaggatgctaccaggagagtacttacatagtgctcaggagtttctcttcttaaaatgtttactgctgaaagatgagcaggaccagggcgttataggcagagccctagccgagaaacctgctggcctctgcctgttttcatttcccactttggttgtgtggcattactttcagaattgcactttcctgcttgtcatgactttttgacacacttgccatgacgtgtgtttctgtgaacatgaagttctgcggtagtgcctccaggggcagaggaaaagaagaagtgttactgcattttgtacaaaataaatacagtcatatgtttaataaaacagttctattgtagtaacttgt

SEQ ID NO: 82267 - DNA, 671 bp, Homo Sapiens
  misc_feature (15)..(15): n is a, c, g, or t
  misc_feature (33)..(33): n is a, c, g, or t
  misc_feature (47)..(47): n is a, c, g, or t
  misc_feature (70)..(70): n is a, c, g, or t
  misc_feature (82)..(82): n is a, c, g, or t
  misc_feature (112)..(113): n is a, c, g, or t
  misc_feature (127)..(127): n is a, c, g, or t
  misc_feature (143)..(143): n is a, c, g, or t
  misc_feature (165)..(165): n is a, c, g, or t
  misc_feature (194)..(195): n is a, c, g, or t
  misc_feature (203)..(203): n is a, c, g, or t
  misc_feature (211)..(211): n is a, c, g, or t
  misc_feature (219)..(219): n is a, c, g, or t
  misc_feature (248)..(248): n is a, c, g, or t
  misc_feature (329)..(329): n is a, c, g, or t
ttacgactcatatanggattgccctcgagccangaatcgcacgaggnttacccaccgtagaatgtatttncacataagcctnaacagatgtcctgatgagcagcagctctcnnccaagtcctgatcnagagacctaagtatcntcaatatggggccctgccagcntcaacatgtgctcccaaaggattcgtctnntctgctcnaagctgcnagatgganaacagcatggagacctgcccacaaagttntatatgtcagaactggaggtggcacataccacttctgttcaaatgccattatgtagaactcagtcacttggctacactaangtgtaagtttaggaggctaggaaatgtagtctgtgggcccaggatgaagagaataagagtttggtgctagctttctgcaataaacttttgggctgtttgctaggtgctggaaacaaaattataaaagagatattccagctaagtgcaaataaattgcaacatagtgaaaaaaatgcctcactacagatatagcaaatgtcatttcacagagtaagtcaaatgacacatgatcacagttttgcctcaaacaaaatcccatggtataacttgggacactgaactgaagctcttagtttcttgaatccctatcaccatatgtgcacatacaggctaataggttat

SEQ ID NO: 82268 - DNA, 1452 bp, Homo Sapiens
  misc_feature (112)..(171): n is a, c, g, or t
ggctctgggcgaggcggcggggcctgggctcccggacgaggcgggcttggcgggcgcccggcagctacagctgcaggaggcggccggcgaccccgacgcgccgcccaagaannnnnnnnnnnnnnnnnnnnnnnnnnnnnnnnnnnnnnnnnnnnnnnnnnnnnnnnnnnngaaactggaggagcggctctactcggtgctgtgctgcaccgtgtgcctggacctgcccaaggcctccgtgtaccagtgtactaatggtcacttgatgtgcgctggctgttttatccacctactagcagatgcccggctgaaggaggagcaggccacgtgccccaattgtcgttgtgagatcagtaagagcctctgctgccggaacctggccgtggagaaagccgtgagcgagctgccttcagagtgtggcttctgcctgcgccagtttccccgctccctcctggagaggcaccagaaagaggaatgccaggacagggtaacccagtgcaagtacaaacgcatcggctgcccatggcacggccccttccatgagctgacggtgcacgaggctgcgtgcgcccacccgaccaagacaggcagtgagctgatggagatcctggatgggatggaccagagccaccgcaaggagatgcagctgtacaacagcatcttcagcctgctcagcttcgagaagattggctacacagaggtccagttccggccgtaccgcacagacgacttcatcacgcgcctgtactatgagacgcccaggttcacagtgctgaaccagacgtgggtcctgaaggctcgagtcaacgactcggagcgtaaccccaacctgtcctgcaagcgtacgctctccttccagctcctcctcaagagcaaggtcacggcaccgctggagtgctccttcctgctgctcaagggcccctacgacgacgtgaggatcagccccgtcatctaccactttgtcttcaccaacgagagcaacgagacggactacgtgccactgcccatcattgactcccgtggagtgcaacaagctgctggctgccaagaacatcaacctgcggctcttcctgttccagatacagaagtagggcggggcctcaggatgtccgaggagcccacgggcggcatcccagcaccgctgccctgtccacctggttggcagctgcttcacaggactatctgatcactttagcaaaggaggagaacaaacgaagccaacacagaggctgggctgacccgaagaggagacggtgcaccaggcgccccgaggttaagagacggtggcagcaaggaggccgagaggcacagcgaccctgccccagcccttttgtgcagtcaggcggcggtgctgctccatccctgcgggttccggcggggcgcgggggccttgctgacatcagacgggatatccgaatatttgatagcaattaaaaggcagccttgtttcgt

SEQ ID NO: 82269 - DNA, 773 bp, Homo Sapiens
cgaggagcccacgggcggcatcccagcaccgctgccctgtccacctggctggcagctgcttcacaggactatctgatcactttagcaaaggaggagaacaaacgaagccaacacagggcaagtctgcatgcgtgcgcgacggggcccccgcctccggctcacccccccgacccctgcctcccctccttccgagggccgccagaggctgggctgacccgaagaggagacggtgcaccaggcgccccgaggctaagagacggtggcagcaaggaggccgagaggcacagcgaccctgccccagcccttctgtgcagtcaggcggcggtgctgctccatccctgcgggttccggcggggcgcgggggccttgctgacatcagacgggatatccgaatatctgatagcaattaaaaggcagccttgtttcgtactttctgttttgttcgaggggaaggcatggctgtgaatggacagcgtgggggctttggtttggcctggggtcagagcctgccccgcccccatctgtgtgcccgcacacgtcccccgaggaaagactcagagacactgcctccccctacgctctgtcatggggtcttgagactgaggcttgggcaggaagatccaggtagggtcggggctgccctgccaaccggccgctcccagggagacaggactcagccaccagggctcagcaggcattttcggaaagcagggtgaaattgtctcttcccaggaaaaagattaaactccttgcaggctcttggataagttaaa

SEQ ID NO: 82270 - DNA, 797 bp, Homo Sapiens
  misc_feature (68)..(103): n is a, c, g, or t
  misc_feature (137)..(137): n is a, c, g, or t
agagttgcaggtcaaagatcgcaccacttgcactgcagcttgagagagagagagccagacctgtctcnnnnnnnnnnnnnnnnnnnnnnnnnnnnnnnnnnnngaatccttttaaagcatgttgagaaagtattttntggtatgaatgggtgacgggccttttaatctttcaggaatacatataagcaggaatacttagcctgtattgggaaggtgcgtgaaactcaaagttgctaacatcatcttccttattttcagccagtgctgttactgcatttagcatggctctgacgaggcagtggagagttcctgacagcatagcatactgccttctgacagactgggttaagctaccaaaaatgacaaccagggattcaaaaaaaatttttggtcattaaatcgaatgtatattattactttttaattttctaagtatttatcacaggactttaacaccatatatttccctcccagtttttctccccttttggtttaatagttaaaacatttttcataattagtgctgtacatttgattgcaaacaaattggtgatacttctaaactataactataaatctctagaattctgtgaatttcaacattatttgaagtagttcttcagttatatttacatgtgttgtaaatatgtaaatatacttttagcttaggaagtcttccagaatacaaactactcccagttagatatcagtgagtttgaataactgaagaaatgttgacaatgttaagtgtttgattttatataacaagcttaaaaaatatatttttgtggaaaaaa

SEQ ID NO: 82271 - DNA, 1018 bp, Homo Sapiens
  misc_feature (48)..(48): n is a, c, g, or t
  misc_feature (92)..(93): n is a, c, g, or t
  misc_feature (124)..(124): n is a, c, g, or t
  misc_feature (132)..(133): n is a, c, g, or t
  misc_feature (292)..(292): n is a, c, g, or t
  misc_feature (316)..(316): n is a, c, g, or t
gatcgcacgagctacaactcgtgacattgaggacccaacaggacgcgnttacagaggatcagctcaaagcaagtgaagtggcagagatccanncagattgtgcaggcgcagagccagccagatntgagaganngcaaaaaagatgctgggagcagagctgtatgctgctgtgctgctgccctgtacagctcagggcagagctgtgccgggggcagcagccctgcctggactcagtgccagcagctttcacagaagctctgcacactgccttggagtgcacatccactagtgngacacatgaatctaagagaagagngagatgaagagactacaaatgatgttccccatatccagtgtggagatggctgtgacccccaaggactcagggacaacagtcagttctgcttgcaaaggatccaccagggtctgattttttatgagaagctgctaggatcggatattttcacaggggagccttctctgctccctgatagccctgtgggccagcttcatgcctccctactgggcctcagccaactcctgcagcctgagggtcaccactgggagactcagcagattccaagcctcagtcccagccagccatggcagcgtctccttctccgcttcaaaatccttcgcagcctccaggcctttgtggctgtagccgcccgggtctttgcccatggagcagcaaccctgagtccctaaaggcagcagctcaaggatggcactcagatctccatggcccagcaaggccaagataaatctaccaccccaggcacctgtgagccaacaggttaattagtccattaattttagtgggacctgcatatgttgaaaattaccaatactgactgacatgtgatgctgacctatgataaggttgagtatttattagatgggaagggaaatttggggattatttatcctcctggggacagtttggggaggattatttattgtatttatattgaattatgtacttttttcaataaagtcttatttttgtggctaaaaa

SEQ ID NO: 82272 - DNA, 641 bp, Homo Sapiens
  misc_feature (1)..(1): n is a, c, g, or t
  misc_feature (335)..(362): n is a, c, g, or t
nggaaatgcattaaatagaaggttgatagtttatcataaacctgcggggaagaaactcagtactttctatttttgatattttgtgcattaatacattacaaacatgaagatgtttgtaaagttttgttttagtcattttctttgcagtcacatcattgtaccaccttcattattgtatagagctgcttcaattctgagtcctctggacttcccctgcctatctgtttgttgttgttgttgaagacagtaaaataagtgttttcaaatctatatgtctcctttttgttggataatgtttcttctttttaatggtaaatattcttgttcttcaacannnnnnnnnnnnnnnnnnnnnnnnnnnnaggaaaaacaaaacaacagacttcatccttaggttttctcaagatttaagtgaacacatttacacatatcaattttcttaaagaacacaaaatgtttccctccctagcaaaactatttaacgagccaaattaaactatgaaataggttataaaaatattttttaatattttaaaggccttgaaattatattccaaggcaaatctaaatgggtgtagttgtatatgcacgatgtaatttaatgctaaagagtacttacagcttgagggaaaagcataaag

SEQ ID NO: 82273 - DNA, 1033 bp, Homo Sapiens
tttaagtgtcatatacatgctgagaatacatgaacttcaagactgtgatgctaatgtttttattgctctttatcagtctattttgggagaaaaggtaccagacctcatagttattcctaggagtcaagaagatgatgcacacaatgtacaagcagtaattgattcactggccttggactacttgcaggtcagcttgtctcacataacaggagaaaatatagtgaaaggagataaagaatctattaagaatctcctggaaatatttgatggtttgttggagtatcttacagaacgcatcagtgaaacatctcatgagaaaagtgctccttgtcttctgagatgttgggcccctcttgggatggagatgaagcagaatccactggtgaaatcattagacttggagacacagcacacaccttttctctaagaagtaatggtgctcaatgtcctaatgaaatgctgtctaaaaaagccttagcctcaccaagttctaaatcacatgaagatatgttgtaccctcctagtgttttgtccaagagtaggacatcctttgttgaagacacggaaaccctttctgtgagtgggattccaaatgctaggaagctaggggagcctatccgagcagctattcctttacatccaccctaccacccttcagagcctcgagcaccctgccccataggaaaagaatacttgcattcaagtcactgctccccagccgtaaattctactggagagcatacggaattttctggggatctagatgatggacttttcttaatttccaagttgcctaaaggcagcaaatgggaagtatatccagctcaggtccaagggcctaggacaaggaagcctcccaaaggaaaaagaaatgaaaacagagctacagcctcatcctgcaattcacctttcccccagaggccaagaaagagattaacagaacaagaattacatgatgtatcagaaaaactctctcagcggctttctgaactagattggatgttaaaaagtgctctgggtgatcggattaaag

SEQ ID NO: 82274 - DNA, 970 bp, Homo Sapiens
  misc_feature (49)..(278): n is a, c, g, or t
cagtcgacggtaccggacatatgcccgggaattcggccattacggccgnnnnnnnnnnnnnnnnnnnnnnnnnnnnnnnnnnnnnnnnnnnnnnnnnnnnnnnnnnnnnnnnnnnnnnnnnnnnnnnnnnnnnnnnnnnnnnnnnnnnnnnnnnnnnnnnnnnnnnnnnnnnnnnnnnnnnnnnnnnnnnnnnnnnnnnnnnnnnnnnnnnnnnnnnnnnnnnnnnnnnnnnnnnnnnnnnnnnnnnnnnnnnnnnnnnnnnnnnnnnnnnnnnnnnngcagaatcaatatgtgcacagttctctttatcaggcaaaaacacgtttattgagacatgaaatgagaatcaggctgaaggaatcatgcagctgaaagatgattatattcatagaaatgaagagatgaaatattcaaagaagatggctactttattgtgagacttaccactttaacctcatatgttaacagcacctaccaaaaaatgatatgagatagagctaaaatactgaaattgcaaatggacaaaataaatcatgaaaatttgtttattatttcttcaaaaaatatttctaggtgctttgggattctttcatttagtcattaaagccattgctttactatatttgcgttgccactttaaaaacaagttacttgacattggttttgacagatttcactaaattcctatggaattaattgattattttccaaaatggttgaataaactttgtaaccccctctaagggagattttaattccttccttttaaatccccaaatgaacttttaaacttaccgtggctgtttaaatgcccttggtaaagggaccttcttgaaaattggcataaaacaaattccttggaaaaaggggaacaactgtgagaaatattcccttgggttcccttttttcccccaaagggccccacaagaaatggccttttaaaaacacctaaatcccccgggtgggccac

SEQ ID NO: 82275 - DNA, 1119 bp, Homo Sapiens
ctaacccaggaggagcgtggggaaaggggctgtgggcctctcggggagcgagctgcgggtagcggcgcactgggtacaggcgcgcgcttggctgtcgcctctgccgctgtgtttgggaggactcgaactggcgccaggaaatattaggaagctgtgattttcaaagctaattatgaaaacatttatcattggaatcagtggtgtgacaaacagtggcaaaacaacactggctaagaatttgcagaaacacctcccaaattgcagtgtcatatctcaggatgatttcttcaagccagagtctgagatagagacagataaaaatggatttttgcagtacgatgtgcttgaagcacttaacatggaaaaaatgatgtcagccatttcctgctggatggaaagcgcaagacactctgtggtatcaacagaccaggaaagtgctgaggaaattcccattttaatcatcgaaggttttcttctttttaattataagccccttgacactatatggaatagaagctatttcctgactattccatatgaagaatgtaacaaggaggaggagtacaagggtctatcagcctccagactctccgggatactttgatggccatgtgtggcccatgtatctaaagtacagacaagaaatgcaggacatcacatgggaagttgtgtacctggatggaacaaaatctgaagaggacctctttttgcaagtatatgaagatctaatacaagaactagcaaagcaaaagtgtttgcaagtgacagcataaagacggaacacaacaaatccttcctgaagtgaattaggaaactccaaggagtaatttaagaaccttcaccaagatacaatgtatactgtggtacaatgacagccattgtttcatatgtttgatttttattgcacatggttttcccaacatgtggaacaataaatatccatgccaatggacaggactgtaccttagcaagttgctccctctccagggagcgcatagatacagcagagctcacagtgagtcagaaagtctccactttctgaacatagctctataacaatgattgtcaaacttttctaactggagctcagagtaagaaataaagattacatcacaatcc

SEQ ID NO: 82276 - DNA, 1102 bp, Homo Sapiens
catgtaataaaataactttattagaatcaggaatttgttaaaataatatccttcacatatagctaaagtgcaaattctcttgctctgtagtagaagcaagcacatctgtcagacctccgtggtgtgcttataaaaccaagacgagaagagttttaagaagtacctctggcagcataagagtacgaaaacacattttataaaggtttgaacaattatcatttggagccatttcatatatcgtgtatgtcttttcacttatttttcttaacctttcaaaaactactctgtgctatttatacaactgaagaactgtataaactactttagagcagtggctttattactgtcaggaacggaattaccaaatcaaagagacaacactgcgtattcgccatcactcacacactgacaaagtgcagtagtgttagacatcatgggctctgtcactgggaaagggacccagtgacttccacctctctgactctaaatagcagcagtcatattggcacctgtaccatatgattcaaagagaagattctacttccattggatgacagcttggaaactcggccatattacatagagcactacatcatttcacaagttgcgagaaaaataaggccactccgaggcaatctcttctgcctcccagggggatgggacacgggacagtgcaaagaccgtggaagatggcagtaagtagatgaaactccaggaccaaagggatgcagcctggccatggctgaaggtttttgctccattcagtagaaactggtgctctaattcattatcaaaaatgcttacttggtgtccacatggcacttgttttctcaggttaacatctgcctacagaaaactcaggcagaggggtgagggcagatgcctactagcataacacctggtttgcagcacgatacaggtggaatgacaagcccagagaatttcagacgaaaacatctggcctgagttgctacaaatgaagtgtgagagaaacgcggatacacaaagaaaaccaaactgcccgcccaccatgtttccccctccaacatacagctctttatggctaccccctattcttaattagaaaaatagtctcaatatg

SEQ ID NO: 82277 - DNA, 1113 bp, Homo Sapiens
aaaggtagaaaggatacacatcccctgtagaagagtgacctgaactggagttgcatttgacatctgatgtcagcatgagggtgctggtcaccggggacttgagtacgtactttcctttcaaaagcacaatagatcaagatacaggtacacacatagctacagatatagatccagccacagatccagattagatatagatgcatatagaagcctagaaaagccaatatggaaaactctggcagtgtttgattctgagtggcaagcatattggtgactgtaattatttcttgcagttttctatattttttagtttcccaaactgcaaaaaatacccacaacagttaccagagaaaatgctggatgccacaagaaggaagaacctcaaggggcaggaggcaaagttgtcttcttggaggagggggtgttagaaataacccaggcctcctggaaaatgacccaaatacagcctggctctgccagccccaggcccttccccacccccagggcaccctttctgtcccagtagagaaggtgacctggagtcaggccttgtgtgtgctccaagcgtttggagctttaccgtgggatgtggggagccaggggtgttgtttgctggcatttctgtggctgggtctttctggctgtggagctgtgtttgtgggcagtggctgagatggaggacctggggcaggtgtctcagtgacagcgcagtatcctccagcctcttccagggccccacgctactggctacctggcaatacagtccagcagttgctgcttctctaggcccctggtgcattcagaaacctcctgaaggccagcggagggtaagccaggaacagatcatgtccattgcacttcactagctgagcgagttggttctgcccttctgatccttggtccctcagggccaggacaggcccggtgaccccataatcatgcagccgtcatgctccgtcatctgaaattcacaaggaaggcaaggattcaaaggaagatgtctgagatgctgaactccagctcagccacttgtcaactccttgaccttggacaagttacttaaattaagccttgattttttttcatctgaataaatagagataaaaataaaaa

SEQ ID NO: 82278 - DNA, 545 bp, Homo Sapiens
caccagggctgggcctggactttcaactgcaggcagcctggaccttgaggctgaacttgaggagatccagcagcaactactgcactaccagaccaccaagcagaacctctggtcctgtcggcggcaagcgagcagcctgcgcaggtggctggagctgaacagagaggagccggggcctgaggaccaggaagtagagcagcaggtgcagaaagagctggaacaggtgaggccccaggccatccccaggtgtccctggggacgccccgggctgtgctccctctcagccctgcctgtccctccatggccccaggtggaaatgcagatccagctgctggcagaggagctccaggctcagcgccagcccattggcgcctgcgttgcccgcatccaggccctgcggcaggccctgtgctagcgtgttcgcaccaggaacgcaggtgctgggctgtcggggaggcctcaggccacctccaggaacagaacacagttttaagtttgattttttttatttcaaaatgctttgcaattaaatgaattactgttca

SEQ ID NO: 82279 - DNA, 1038 bp, Homo Sapiens
  misc_feature (128)..(128): n is a, c, g, or t
  misc_feature (182)..(182): n is a, c, g, or t
  misc_feature (247)..(248): n is a, c, g, or t
  misc_feature (271)..(271): n is a, c, g, or t
  misc_feature (304)..(304): n is a, c, g, or t
  misc_feature (344)..(344): n is a, c, g, or t
  misc_feature (385)..(385): n is a, c, g, or t
  misc_feature (455)..(455): n is a, c, g, or t
  misc_feature (709)..(709): n is a, c, g, or t
  misc_feature (817)..(912): n is a, c, g, or t
cgcaattgaccttttcagcatccacaatgggccccagaagcaggttgggggacaggggactttattttaccttccgaagtcccggagccccccccttgaacccctcggatccgacctcagaagtgacnccatgaccagaccgggaggaccctcgggggacggggagttctccttaattcccnccccagcctcttttttccttggggctggagggaccggggcagccacagggagagacatggcgatnngagtgagaaattttacaaaatancgatgtcatttgggctcttttatgacctctttntcaatactgtaaatcgacctttgaacgaagccaattcaanccgagtcccgggctggggtgtcgcagagcgtgttgagcatngggccaccccaggcggggcctttgggccccggggtggaggaagctgacacggagatgcctggcctctctntgccaaaaagcattttttcctttaaatatgttttttaagaacagggaaaattaaacaaaaccccaggttattttttccctgcccaaagccagcctgggattgtcagccttaaatcccctttccttcctcttttggggttttcttctttctcctttaagcacttacatggttgggggtaagactaggctggggcattctgggggcccggaggtctccgttgcttcttggttggggtttgctgctgctgggccccncctcccccttccccatctcggcactagaattcgccactctcccaccccccagcccccacctctgcctccaggtctcatcttccaccccaaaaatgtctgtctctctcnnnnnnnnnnnnnnnnnnnnnnnnnnnnnnnnnnnnnnnnnnnnnnnnnnnnnnnnnnnnnnnnnnnnnnnnnnnnnnnnnnnnnnnnnnnnnnnnacaattttgaggtcttcgtgttcaaggagaagctattatattttgttaagaaagtggggagaaaaaaaccaagaggccaccgtgcctttgtaaagaaacaaaataaagtttgtactttgttttttc

SEQ ID NO: 82280 - DNA, 1030 bp, Homo Sapiens
  misc_feature (40)..(40): n is a, c, g, or t
  misc_feature (83)..(83): n is a, c, g, or t
  misc_feature (90)..(582): n is a, c, g, or t
  misc_feature (799)..(807): n is a, c, g, or t
tccgtagcgcagggtcgaacagagagcgcacgaggagctnccaggggaaacgcttgtatcttatagtctgtcggtttcgcacntctgacnnnnnnnnnnnnnnnnnnnnnnnnnnnnnnnnnnnnnnnnnnnnnnnnnnnnnnnnnnnnnnnnnnnnnnnnnnnnnnnnnnnnnnnnnnnnnnnnnnnnnnnnnnnnnnnnnnnnnnnnnnnnnnnnnnnnnnnnnnnnnnnnnnnnnnnnnnnnnnnnnnnnnnnnnnnnnnnnnnnnnnnnnnnnnnnnnnnnnnnnnnnnnnnnnnnnnnnnnnnnnnnnnnnnnnnnnnnnnnnnnnnnnnnnnnnnnnnnnnnnnnnnnnnnnnnnnnnnnnnnnnnnnnnnnnnnnnnnnnnnnnnnnnnnnnnnnnnnnnnnnnnnnnnnnnnnnnnnnnnnnnnnnnnnnnnnnnnnnnnnnnnnnnnnnnnnnnnnnnnnnnnnnnnnnnnnnnnnnnnnnnnnnnnnnnnnnnnnnnnnnnnnnnnnnnnnnnnnnnnnnnnnnnnnnnnnnnnnnnnnnnnnnnnnnnnnnnnnnnnnnnnnnnnnnnnnnaagaattcggcacgaggtttatgtaaaaaaattttacataagagttagcatctttagctttataatctaaggaaccaaatttaaaaaatgatggattatgctctgtgaaatgaaaagttcaatcattgcctaaaaaagatgatcaagttagttgatctcttgtacttggaaaagctacttttttcctaaagaacagagtggagtggatatattcacnnnnnnnnnctaaaacatacaaagtgataaaataatcgtgcctaatgtcaaaactttactggtttgagaagaataatcaaaaaggacttataccaataggacttactattgttttttaaggatctcctctcacagtggtaatgaaacattaactgtaacagaaatttacaatttatgtgcttataaaattagttttatgaatgaacaataaactgatgcatataatggctta

SEQ ID NO: 82281 - DNA, 1192 bp, Homo Sapiens
  misc_feature (103)..(103): n is a, c, g, or t
  misc_feature (109)..(397): n is a, c, g, or t
  misc_feature (455)..(478): n is a, c, g, or t
ccgcttaacgtctgcttgttgctttgtacattctcctgcgttccctgatcttgataccgttaccgccttgatgagtgtacgctcccgcagccgacgaccagcnagcgannnnnnnnnnnnnnnnnnnnnnnnnnnnnnnnnnnnnnnnnnnnnnnnnnnnnnnnnnnnnnnnnnnnnnnnnnnnnnnnnnnnnnnnnnnnnnnnnnnnnnnnnnnnnnnnnnnnnnnnnnnnnnnnnnnnnnnnnnnnnnnnnnnnnnnnnnnnnnnnnnnnnnnnnnnnnnnnnnnnnnnnnnnnnnnnnnnnnnnnnnnnnnnnnnnnnnnnnnnnnnnnnnnnnnnnnnnnnnnnnnnnnnnnnnnnnnnnnnnnnnnnnnnnnnnnnnnnnnnnnnnnnnnnnaagaattcggcacgagggttaccattctgatgttggagcggcccgcggcttgtaggcnnnnnnnnnnnnnnnnnnnnnnnngtcgtgtagttatggcactgtcttatttggaacatttgcaactagggataatacaacatttttaactctcatttgacaacctactactaatcacagaccacaagggtaatgaccaaatttatgtggtttttgcactccatagttgtcttagcccaatctttctatactcttacgattacttgggttaacgcttctgtgaggaccttctggctcttgagataccctaaatatttaagatatttagatatcttgaagatagtataggatatagagattgtaccaaataggaatataaggagtatgttaaaatgaccagatacctgtttgatagtttactgacctagcagatgtgtggaaaaggaatcagatcttgattcttctgggtttatactggttgtaaaacagaatgatacagaaaatgttttccttgtttaactggtagttgaacatagaacttgggtattatagatcacttttcactttttggaatgttttgtattgaaacttaataaaactttaacatggcaaaaagaacactgacgagaagacagaccaagcatgcaagatatggtgcaacgacaacaaggggggggcgcgccaccgaaaaacacatcgccttcccggggcgccaactcttgtgccccccaaagcccctcttctctttgttcctaacaaaggccccccgaagaggggggcgggagcattcagacgaag

SEQ ID NO: 82282 - DNA, 1042 bp, Homo Sapiens
  misc_feature (174)..(174): n is a, c, g, or t
  misc_feature (235)..(235): n is a, c, g, or t
  misc_feature (279)..(279): n is a, c, g, or t
  misc_feature (311)..(311): n is a, c, g, or t
  misc_feature (410)..(410): n is a, c, g, or t
  misc_feature (468)..(468): n is a, c, g, or t
  misc_feature (494)..(494): n is a, c, g, or t
  misc_feature (948)..(967): n is a, c, g, or t
tttttttgtttggataattccgaacgttatgtggataacgctcttgattgctgacaagatcgcagacgtgagtcccccccttcgactggtgagtcgtgagtttctggcctcccgcccaggtcatctgtttacacagagcactgattggcccaatcactcaggactggttccatngaatcttatttttacatgggtgccccggcctgagagggagagcacctctccccgcttcctngttgcaccgtgggcttgattactcttcctccagggcgggcgggncccccttggacctcttaagcccaagttggccnccaggacctctgggcagagtggactgctcatggcagatgtgtggcaatgtctggctgtgtctctccggcacttgcgtcccctctcccgggctcccttgntgcatggtggatgtctccttcctggcccggtcacattgcctccttgagccttagtccnagggggtcactccttcccaccccacntacctcacagggttgttgtgagggtgcacagaggagcaaagtccctgaaggccctcaggcagtatataggggccgcccaccttcagctgccctgggatgggaaggacccagcccgacccctgggcataacactgtgtttgcaaatggagattcaggtattggggatgcaggttgtggggagctggcctggcagagtaggggtagttggcttggccttctctttggtgatcccacccccagccatttgcattgctggcccagcgcctggcctggggggcggggagaggcagcagaaggggctgggcaggggcggtggaggactcaggaactgcccggggagagtgggtatggcggctgagccaggggccctcctgtgtttgacttcccgggatgggtccttgcttctcagctgtgtccgaccccaccatgtaataaaacccaaaggaacagcccnnnnnnnnnnnnnnnnnnnncctgagcaggcggccgcaagcttattccctttagagagggttaattttagcttggcacgggccgtctttaaaacc

SEQ ID NO: 82283 - DNA, 1117 bp, Homo Sapiens
  misc_feature (115)..(115): n is a, c, g, or t
  misc_feature (262)..(525): n is a, c, g, or t
  misc_feature (722)..(722): n is a, c, g, or t
gacggagtcaacagacccaggggtttccaggacttttatttttacctgcggtcccccctttattaggtgtttttgtcttgtaggggcggcctatgaaaacccagcacgcgctttnacgtcgtgctttgctgcctttgcccacatgttttcctgcgtatccgtgatttgtgaaaacgtatacgctttgagtgagtgataccgctcccccacccgaacgacccagcgaagggattagtgagcgaggagcggaagagcgcccatnnnnnnnnnnnnnnnnnnnnnnnnnnnnnnnnnnnnnnnnnnnnnnnnnnnnnnnnnnnnnnnnnnnnnnnnnnnnnnnnnnnnnnnnnnnnnnnnnnnnnnnnnnnnnnnnnnnnnnnnnnnnnnnnnnnnnnnnnnnnnnnnnnnnnnnnnnnnnnnnnnnnnnnnnnnnnnnnnnnnnnnnnnnnnnnnnnnnnnnnnnnnnnnnnnnnnnnnnnnnnnnnnnnnnnnnnnnnnnnnnnnnnnnnnnnnnnnnnnnnnnnnaagattcggcacgggaggattttgggaacagcaaaaatcattatatttctcgcttctctcttcccttgggggatgagatgttggcggctgcgctcctaaaggccaagtcccaggagctggtaacctttgaggatgtagctgtgtacttcatccggaaggagtggaagcgtttggaacctgctcagagggacctctanagagatgtgatgctggagaattacgggaatgtgttctcactggatcgtgagaccaggactgaaaatgatcaagaaacttctgaagacacaagatcacatggggtcctactgggaagatttcaaaaggatatttctcagggtctcaagtttaaagaagcctatgaacgagaagtcagtctgaaaaggccgctggggaactcccctggagaaagactgaacaggaaaatgccagattttggtcaagtgacagttgaggagaagctaacccccaggggagagagaagcgagaaatataatgattttgggaacagcttcactgtgaattccaaccttatctcacatcagagactccccgtgggagacagaccccataagtgtgatgaatgtagcaagag

SEQ ID NO: 82284 - DNA, 1001 bp, Homo Sapiens
  misc_feature (319)..(331): n is a, c, g, or t
gaccattctcttttagtctatgggaattacagggttgccgctaaaatattcacttgttcatatcgtgtcagagatttcctcttctctggagcttaggtggctcttcacaatccataggcttgaatctgcaacctagtgtaaactgccttgctttccccggttctttcccctgctagcacctgctttctcatccctatctccagtcaaagatgggattgcttaatccaactctggagagggaccaagtcttttctgcccacatctcacacaattgaggtgtctgaacaagcttggggagggtctataaggggtaggctcnnnnnnnnnnnnncccatttgcagaggcagttttgccaacacaagggctctttcaagccgactttcacaaagagagccggacttgttagttggcttctgtctctttagagccaagaaaatagtaattaagtggcctagatataggaagggcagaataagcacttactccccctgccttccaagatgaagaggagaagcaggccaaccctcaataattgcaagcctgaagagaagtgatcttagagaaagcagagaacagaatggactggatagacatcttgactctattcagcccgtagtctgtgatctggagagtccagttaaggtaacccagatttttgacaaccgccttcctgctgagccaaagttttctcattacccctccactggggaagcagctgaggcccagggccttgctccctgggaaattctcttctctccatctttcggtgcattggccatgttactgtgccaaagtgtcttaattcttgtcccatctattctcagctggccttggaacccacataggagttggtgggggagggatggaatgggtattattcattgtagttgatcctggtgtgtgtattatataaagagacccctccccttattttgtgttttccatccctctcccttaacaggattgaaataaaacatgcttctgtttttgtaaaaataaa

SEQ ID NO: 82285 - DNA, 1510 bp, Homo Sapiens
  misc_feature (465)..(475): n is a, c, g, or t
  misc_feature (1167)..(1212): n is a, c, g, or t
  misc_feature (1305)..(1305): n is a, c, g, or t
  misc_feature (1331)..(1331): n is a, c, g, or t
  misc_feature (1356)..(1356): n is a, c, g, or t
  misc_feature (1426)..(1426): n is a, c, g, or t
  misc_feature (1453)..(1453): n is a, c, g, or t
aaaaaacaaaacctacacctctaaattaacaaaaatcaaagaaatataacttaaaaatggggtttgccatccatctcaatggagcaggacacatccgccaatgacaccgtcctgcctccataaggctcagacaggacacaagggtcctagttccctcccctggccatgtgcaaacagttttacagaagaaccccatccactggggaaggagcagatgaggtgtcttggtattaattggctaacatttcatacttccaggatagggcacttcgcgggtgagaccagaaggacatgggaagccagggtcacaagccaggtcttcccgtcttcttggtgtggccacaccctgtccggcatatttggtttttcagaaaccaggctggcaaccctacttaaggtttaaaataatactgtaatcattaaatggatatatatttactctctgaacaaaatctttaaactcannnnnnnnnnnaaaaggaggacattgtaaacaagtggacaagcactgtactcaaaggatttcattgtttttctttgtcttccttggtgggttaaaggccccaagtagttcaatggctagcttttctcattatcccaatgagatcaagtgctaggactggattgaaatctaaaaggaagattaaaaaaaatccttccaggcattgagaagtgcagccagagtgaatcatcttgttgtgatgatcttggaatttggaatgatactgtgtgatgtggcaggcagcaacagtgggagctcgaagattgctgcactgtgcatttcaagcaacaaagtctgaaaagtgccagggcaatttcttcacagtatttcacatgcaaaggggaaaggaagaaggggagaagaagccccatgctgcttttaaggcagggaaggaggcaaactggtccaccgtcctcagaatgtgagttccaaggctccaatgctcaggacgtcttcttgtgctctcctttcaggtggctcgctctgcttccagaaaagtctgtgcctcaaacagcagaaacttgttcatcttctgcaaatacagcagggaagaaaaagaaatcaatgagcaagcaagtaatttcttgtgctatagagaatatattcactgatgtgctaaataaaactatcatagttattctttttagtatagctcacttagaatnnnnnnnnnnnnnnnnnnnnnnnnnnnnnnnnnnnnnnnnnnnnnnatgtatgcaatacatatctttacatatatacacacaatacttaaaagatatgcattatatatttttgttcaagaagttgttaattcaatttanaagttgtacatagcatgtgcaattanaaaaatatacgatcagatcacatanaagtctagatatatacacattttatagtggtatctgctcgtgcgaatcctggctcgagggcaattcctanaggatcgtataaatcgtatcagtcaanctgttctgtgtgaattgtatcgccacattcaacacatacagcggagcataatgtagc

SEQ ID NO: 82286 - DNA, 1031 bp, Homo Sapiens
  misc_feature (47)..(141): n is a, c, g, or t
  misc_feature (144)..(574): n is a, c, g, or t
  misc_feature (778)..(786): n is a, c, g, or t
ccaggtcgaaccagagagcgcacgaggagctccagggggaacgcttnnnnnnnnnnnnnnnnnnnnnnnnnnnnnnnnnnnnnnnnnnnnnnnnnnnnnnnnnnnnnnnnnnnnnnnnnnnnnnnnnnnnnnnnnnnnnnnctnnnnnnnnnnnnnnnnnnnnnnnnnnnnnnnnnnnnnnnnnnnnnnnnnnnnnnnnnnnnnnnnnnnnnnnnnnnnnnnnnnnnnnnnnnnnnnnnnnnnnnnnnnnnnnnnnnnnnnnnnnnnnnnnnnnnnnnnnnnnnnnnnnnnnnnnnnnnnnnnnnnnnnnnnnnnnnnnnnnnnnnnnnnnnnnnnnnnnnnnnnnnnnnnnnnnnnnnnnnnnnnnnnnnnnnnnnnnnnnnnnnnnnnnnnnnnnnnnnnnnnnnnnnnnnnnnnnnnnnnnnnnnnnnnnnnnnnnnnnnnnnnnnnnnnnnnnnnnnnnnnnnnnnnnnnnnnnnnnnnnnnnnnnnnnnnnnnnnnnnnnnnnnnnnnnnnnnnnnnnnnnnnnnnnnnnnnnnnnnnnnnnnnnnnnnnnnnnnnnnnnnnnnnnnnnaagaattcggcacgaggtgtatactgaaaacccatttcctcagcaactacacaaaataagagaaagggaagtgctatattccagatacaaatgactcaaaggcagctcagttgtactggttttgaaaactcaaggattttataaataaaaatatttaagtatttccagttatgtaaacactctaaaattctataattttttggnnnnnnnnngctatagctttattgtttttacattcacctttataatgtctgtctgtttcaacacaatgaaggtatatggaatgtgcaatttacaaacctaaaatatatgtgccaaaaattaacgcttttttgttagtactaattacttcatggacacaaacaagataaaggaaatataaagcattactgttgctacattttcctttgtaatcacttctgtttttaatacaataaaggaatgtaaaattcaatgg

SEQ ID NO: 82287 - DNA, 1454 bp, Homo Sapiens
  misc_feature (41)..(41): n is a, c, g, or t
  misc_feature (81)..(81): n is a, c, g, or t
  misc_feature (102)..(102): n is a, c, g, or t
  misc_feature (113)..(113): n is a, c, g, or t
  misc_feature (123)..(123): n is a, c, g, or t
  misc_feature (132)..(132): n is a, c, g, or t
  misc_feature (136)..(136): n is a, c, g, or t
  misc_feature (144)..(144): n is a, c, g, or t
  misc_feature (191)..(191): n is a, c, g, or t
  misc_feature (193)..(193): n is a, c, g, or t
  misc_feature (218)..(218): n is a, c, g, or t
  misc_feature (241)..(241): n is a, c, g, or t
  misc_feature (253)..(253): n is a, c, g, or t
  misc_feature (271)..(271): n is a, c, g, or t
  misc_feature (294)..(294): n is a, c, g, or t
  misc_feature (324)..(324): n is a, c, g, or t
  misc_feature (1129)..(1129): n is a, c, g, or t
  misc_feature (1225)..(1226): n is a, c, g, or t
  misc_feature (1295)..(1296): n is a, c, g, or t
  misc_feature (1360)..(1360): n is a, c, g, or t
  misc_feature (1387)..(1387): n is a, c, g, or t
  misc_feature (1405)..(1405): n is a, c, g, or t
  misc_feature (1423)..(1423): n is a, c, g, or t
  misc_feature (1431)..(1431): n is a, c, g, or t
catcttagcacccagctttacattatgctcccgctcgttgntgtgtggatgtgagcgatacaaatccacaccaggaacagntatgacatgatacgaattatnacgactcactntagggattgnccctcgagnccangaatcgcnacgagatcccagatgggaacctccatgatccgactctgagggtgtcntncgagacttaaaattatcagatgctntgccagtagagatgatcaaagtngcacctgtccanttgaatgtcgttgaaacntcaagtagtgtaggggaaagaanaaagaaggaaaagaaacaaaagcctgtgcntgaagagcaggtcatcaaagaaagtgacgcatcaaagattcctggcaaaaaagtagaacctgtcccagttactaaacagcccacccctccctctgaagcagctgcctcgaagaagaaaccagggcagaagaagtctaaaaatggaagcgatgaccaggataaaaaggtggaaactctcatggtaccatcaaaaaggcaagaagcattgcccctccaccaagagactaaacaagaaagtggatcagggaagaagaaagcttcatcaaagaaacaaaagacagaaaatgtcttcgtagatgaaccccttattcatgcaactacttatattcctttgatggataatgctgactcaagtcctgtggtagataagagagaggttattgatttgcttaaacctgaccaagtagaagggatccagaaatctgggactaaaaaactgaagaccgaaactgacaaagaaaatgctgaagtgaagtttaaagattttcttctgtccttgaagactatgatgttttctgaagatgaggctctttgtgttgtagacttgctaaaggagaagtctggtgtaatacaagatgctttaaagaagtcaagtaagggagaattgactacgcttatacatcagcttcaagaaaaggacaagttactcgctgctgtgaaggaagatgctgctgctacaaaggatcggtgtaagcagttaacccaggaaatgatgacagagaaagaaagaagcaatgtggttataacaaggatgaaagatcgaattggaacattagaaaaggaacataatgtatttcaaaacaanatacatgtcagttatcaagagactcaacagatgcagatgaagtttcagcaagttcgtgagcagatggaggcagagatagctcacttgaagcaggannatggtatactgagagatgcagtcagcaacactacaaatcaactggaaaagcagcagtctgcagaactannataactacgccaggattatgctaggttggtgaatgagctgactgagaacacaggaagctacagncagaagaagtccaaaagaagaatgctngagcagcagctactcagntggaggttcaactaccanaaactganagaaagtgggaagaagttcccac

SEQ ID NO: 82288 - DNA, 952 bp, Homo Sapiens
  misc_feature (304)..(353): n is a, c, g, or t
  misc_feature (490)..(520): n is a, c, g, or t
ggtccgaattcccgggatatcgtcgaccacgcgtccgggcggcggcggcgcctcggagcgggcggcccgggctgtagtgccggcgccgccgcgtcttcccggtctcctttcccggccgcacagggttttataggatcacattgacaaaagtaccatggagttttatgagtcagcatattttattgttcttattccttcaatagttattacagtaattttcctcttcttctggcttttcatgaaagaaacattatatgatgaagttcttgcaaaacagaaaagagaacaaaagcttattcctacnnnnnnnnnnnnnnnnnnnnnnnnnnnnnnnnnnnnnnnnnnnnnnnnnntccagaatggaaacctccatgaatccgactctgagagtgtacctcgagactttaaattatcagatgctttggcagtagaagatgatcaagttgcacctgttccattgaatgtcgttgaaacttcaagtagtgttagnnnnnnnnnnnnnnnnnnnnnnnnnnnnnnncctgtgcttgaagagcaggtcatcaaagaaagtgacgcatcaaagattcctggcaaaaaagtagaacctgtcccagttactaaacagcccacccctccctctggaagagctgcctcgaaaaagaaaccagggccagaagaagtctaaaaaagggaagcgatgaccaggataaaaaggggggaaactctcatggtaacatccaaaaggcaagaaagcattgccccctccccccaggagactataccaagaaagtggatcaggggaagaaaaaaagcttcctcctaggaaacagaaggaacgaaaaatggtcttcgtaaaatgaaacccctttattcatggcaactactttatatttccctttggaggggataatggctgaactcaagctcccggcggtacaaaaaagagaaagggcaattggaattttgcttt

SEQ ID NO: 82289 - DNA, 1232 bp, Homo Sapiens
  misc_feature (206)..(233): n is a, c, g, or t
  misc_feature (241)..(336): n is a, c, g, or t
  misc_feature (374)..(514): n is a, c, g, or t
  misc_feature (868)..(889): n is a, c, g, or t
ggtcgagatgccaagaagggctatggaactatgcaggtggctagtggtcagactgaagtcaccagctgaataccttaaggaggactcttgaggctcataatggagttcctggggcacagggattagttatgagcattaaagttcctaagacccagtgacagtactgggagaaaccaaggctgaagagtcaggttgaagcacaggcnnnnnnnnnnnnnnnnnnnnnnnnnnnnagacagannnnnnnnnnnnnnnnnnnnnnnnnnnnnnnnnnnnnnnnnnnnnnnnnnnnnnnnnnnnnnnnnnnnnnnnnnnnnnnnnnnnnnnnnnnnnnnncctttagtaggtgggattacaggtgcataccaccacannnnnnnnnnnnnnnnnnnnnnnnnnnnnnnnnnnnnnnnnnnnnnnnnnnnnnnnnnnnnnnnnnnnnnnnnnnnnnnnnnnnnnnnnnnnnnnnnnnnnnnnnnnnnnnnnnnnnnnnnnnnnnnnnnnnnnnnnnnnncaagcacaggcttttgaatggtctccctctccccagcccaggtacatgaggccaaggtgaactgtgcatcctgagaccttgtgtccctgagtctcctttctgagtgcaagctgcactgtgagctggctgtgggatactcacacattcccacattctcctttctgccacatctcgcccttctggacctgcactgggagaaattcaggacaggagtgaactcaaggccatgaactcactggatttccatttttaggcacccatagggatgtttttaggatgtaagtttctgaggagaaagctagctctagcatgaagcttttttggattggcttctccatcgtgttggggtaacannnnnnnnnnnnnnnnnnnnnncccaaaacatcgtctcagctcatttatcaagtaggtaaaatgagccttttgtgtacacacagaggcacatgtgcacgcacacacaacttgtgaacacacatttctgttaaagaagttagaaaatgagagatgggttggggcttgaagtgcatcagaggtatgaatgttgtaaaactgtcaggagatgtaaaattcctttctgaagtgtctcttctgtgaaagggttcagagcagattttgcttactatgtagtgttgcccttaagtacagtggtgtaattttattcaagattgtgctcttctatcaaaagcctctggaaataaatgttccgggatcaaaaagg

SEQ ID NO: 82290 - DNA, 1325 bp, Homo Sapiens
gcatatgagctgttttaatttttgttgcaaaggatttctggggagtcaaggggtatgtcagaaattagagccctagggcagaacttacaaaaaccttttagctacttccttctccccggcctcggaaatgaaaaagccaaaaggtcacccagcgcatccgccacccagtcagccccaaggccagccgtcctcaccccagtccgggtcctcgccattggcctctccgctgcacacggccacctgttgatgccctcgcgcccacagccgagttgcaaacggccgctagagttcgttctaattccccagagcagagctgcccgggaagccccgacgcgacgcgcctgctaatctgcagggcgggcggggactccgcagagcctcccagccccaggctccctttgttttctcgctgcgctcgaagcttctaaactagcccccagaccgcatcccctcgtccccgcccgggagctgcccaagagtccacaggccagcccagggggaaacaaggtacatctgggcaggaatgcgcggcgcacacaggttgccgcctgagatcccgaagtgtacccagatcccgaattccttagagctctttagccgagcactgtggcaggagcgcggcgcccggaatacaagttcatggttccgagccggcgggcgaagggcagcgcgatcccccgccacctttgctctaaggcgcctacgggaacctgggggctgccgcggtgagagctccgctcccactgggaacattggagtcccagttgcgaaagcgacccgcctagcttccgagggacttctctgcgagcaccgcaggcgtgtgcattccttcgaatctgagaattccagcgaactcgggctctaccagagtttaagtcggcccctggggcgtctgtttgtttattggctcttaagggaaaaaagtttgaagatctttaaccagcctcagacctggcgcgggcggaaatcccggaatctccccaagcaaaagtgatataacttcaagtcgttatataagtggggggctccttcttcccctccctacgccgagccttctcattatcattccgggaaaaaaaagtgtctcgctcaacatagttttaaaatcgttattattattttcctgagcctgaagccgggccaacggcagcagccccagggtgcgtggtggccccacccgcgcacagtcccacgcaaagggtacggggcccgggtaccgccagagacgggcctgcaagcgcgccttcggtcccacggtccgcaactccacgtggtcaagatcaacagtttgttgagctcatcagtgacaccttgaacttttcata

SEQ ID NO: 82291 - DNA, 1034 bp, Homo Sapiens
  misc_feature (132)..(132): n is a, c, g, or t
  misc_feature (151)..(152): n is a, c, g, or t
  misc_feature (160)..(160): n is a, c, g, or t
  misc_feature (166)..(214): n is a, c, g, or t
  misc_feature (266)..(284): n is a, c, g, or t
  misc_feature (287)..(367): n is a, c, g, or t
  misc_feature (390)..(398): n is a, c, g, or t
  misc_feature (569)..(683): n is a, c, g, or t
gtagccacgcatagttgatagtcatcatagcacccagctacacttatctccgctcttgtgttggatgtgacgatacaattcacacaggaacagcttgactgatacgatttatacgactcctataggaattgnccctcgagccagaatcgcnnacgaggtntatatnnnnnnnnnnnnnnnnnnnnnnnnnnnnnnnnnnnnnnnnnnnnnnnnncccagatcactaaagtgttcatacgtgctgtatctttcatgctttctctgtnnnnnnnnnnnnnnnnnnnaannnnnnnnnnnnnnnnnnnnnnnnnnnnnnnnnnnnnnnnnnnnnnnnnnnnnnnnnnnnnnnnnnnnnnnnnnnnnnnnnttactaaaaatgattttctcagnnnnnnnnnctcccacaattctggaactataatactgtaagccttagaataaataatactttcaagttccaatctaaagttctttttgagttttgttgcccgttttatgcttgatgtgtatagtaatagggtaggctatttattttattaaaattttttttagagacaaggttttgctgnnnnnnnnnnnnnnnnnnnnnnnnnnnnnnnnnnnnnnnnnnnnnnnnnnnnnnnnnnnnnnnnnnnnnnnnnnnnnnnnnnnnnnnnnnnnnnnnnnnnnnnnnnnnnnnnnnnatacccgaagttcatttcctttgtctccctaaaactgaactgtaattttgggaggttttcattagtggaagctcttcatttataaagctatttgaaggggtttaggaatttatatcacatggtaattgtagagaaaaagaagctatatacctcaaaatcgtgccctctttacatatgtcttatcaggtataacatgttgaaatgtcacattagtagtaaagtggggtttatttatatagtggttaagaaatgtcagtttacactgctgtatacttcttcttctgtgtccctaaggcctggtacagtgccaagcacatacttggtatccaataaatatttgttggatgaatg

SEQ ID NO: 82292 - DNA, 910 bp, Homo Sapiens
tttttttaggagtacaagagtagctttatcatggatttagggctgtggttacaaggaagctgtaaggaataaaatgactcccatgaagacgtaccgtgcggacgagtggaaggagaaatttggccattacaaagacacaggaatatgttaagaagtgaggggcaggatgaaatcatctagggtaggtatttagagggagggcgccgtgcaaaataaaatcctcactatgaaacaaaggcggaggcaggaggctgcgttaggtggaagcagcggaggaaggagacgaaagggattgtcattttcatgtcgtggctttttagaagacagccatgtcctctactctgattctatcaaaatgtgttctcggggtgctggtaacgttcagccaacgaaataattcctatggcggcagtaggaataacaaaacgcagaagcgggaacgatgtctttttattcctccccagacgcaaacgtggatgcatgaggtttggtaacaggcaaagtcatctggttaacgtgactgatgcaaaaagtccaggcctgggcaaaaagaagtcactgggtgaatgggatggatcagactccctgtcctgagggggagatggtttcttgcagaacgaggtgaaggaggtggttctgctcagcagtcaacagtggccacatctccacctgcagcgacttgatggcttccgtgtccttttcgtgggtagccatgaccaaagactggagcagcagaaagagctcctcgggaagctggccgctgctctcctgcccgtggctgtcaaaagcctcccaggagtacttctccagggtctgggcgtgctccggcagcagcttggcgggcggtgcttgcaggaggagcagcagcagcacgcgggacacctcgcagcggaccagcacgtccgagaag

SEQ ID NO: 82293 - DNA, 795 bp, Homo Sapiens
  misc_feature (109)..(109): n is a, c, g, or t
  misc_feature (151)..(151): n is a, c, g, or t
  misc_feature (209)..(209): n is a, c, g, or t
gcgcccccttcgggggggttttaaaaaagaagggagaaagtcccccccttttgggcgtgtttttaaaatggaccccgaaaatggttttccttaatgtgcagagttcccntacccttgttcctcttagttggtaattcccaatgtacctaangtattgtgtctgatattctgaggcccagtaactattaatatctagttctcagagcatntggaaaggtatctgtaaatggctacctaaattgaaatccttttcagaaaaaatataattgcaaataggtaggactggcctaaattatctaatgtaataaagtcagacaaaatgcatactttatagtttcaagattttcagtatataaaatctgtcctttcctacctggacatgtcccattaaaaagtggaagattttaaataatttctttacagatgttttatttaagcaggtagcacaatctactaatgttgtttgatctgtgtttgttatactggttgtaattaatttttttaattcatgaactagcggaaaatttattaaattaactattaaccacattcaccttgtaaatgactgtataaaacttgttgacaatgcactgactttagaaagatgttaatgtgcataaatagagtgtaaataaaatagtgttgatgtactgaaatatgaactgtataaaaagtattggtaattgtatatggggtgtacctatttatctgtaactgttatccaaacaaattaaatactgtggatgcctctatgtgctgtttttcctcatacaagtaaacacagaatgtcaaatc

SEQ ID NO: 82294 - DNA, 1725 bp, Homo Sapiens
  misc_feature (20)..(20): n is a, c, g, or t
  misc_feature (36)..(36): n is a, c, g, or t
  misc_feature (76)..(76): n is a, c, g, or t
  misc_feature (78)..(78): n is a, c, g, or t
  misc_feature (131)..(131): n is a, c, g, or t
  misc_feature (135)..(135): n is a, c, g, or t
  misc_feature (167)..(167): n is a, c, g, or t
  misc_feature (271)..(271): n is a, c, g, or t
  misc_feature (1657)..(1668): n is a, c, g, or t
cgggggggcttcccaccgcnaatcaaaggagttatnttgaaatcacttcttagaaagatggttggactggtgttgntnagtaaaatttggtgagggcatacgggacctatcttcagtgaaagagcagcatnagcnggaaggctttgtcttgatgtagagaggtgatnaaaatgcccagagagatatgaacagatcatcagaactacgccgctccgagagccacacagattgactttctctagagagctgactatgattgaacgcccgctcnaacatcaaatcaaaagaagataatattggaaatcagctgctgagaaagatggattggactggtggttggtttaggtaaatctggtgagggcatacgggagcctatctcagtgaaagagcagcataagcgggaagggcttggtctggatgtagagagggtgaataaaattgccaagagagatattgaacagatcatcagaaactacgcccgctccgagagccacacagatttgactttctctagagagctgactaatgatgaacggaagcaaatacatcagattgcccagaagtatggtcttaagagtaagtctcatggggtgggccatgataggtacctagtggtaggtagaaaaagacggaaggaagacctactagatcagctcaaacaggaaggccaagtgggccattacgagcttgttatgcctcaagcaaattgagatcttactaatttattttgtaaatgcctaatgaggcagatttttgaattaaagaaatgctacatgttccggttgcagagtatattcataagatgtctcaccttgttcatttcacatagtggtttattagatattggaacctaaagaattctgtccacttgtattagcttaatccagcagatgatattgtgcagttactgtttgtgtctttgatattgctgtgtccctcagattttagtagtttgacaagcaagaacacatatccaaatggaattttaccctgagaaattatcattttaaagggcatagcacagcaatctgcaacaatatgtaaagttgatattgactacaataaaaatccagtcttaattccagatttactgaaaatgtcagatcattttgtattaatctattttcatctttgtgtgaagccagttatagaatgtttgacaataaattgtgctgtacacgtaaatgtccttaccaactaaatgatgtaaaacttttcttaaagtaattttagtgttcatttatttataacttctaccatgtgatttccagactattggaagtgatttactgtatcttgtgatatatgggttttaacaaattctagtcttcacgctgagagagcactacttgagagagcagttgaaagtttcaaaaactttggttcaatctgaagaaaggaagcttgaactgtttgttcttggtgccttgcagagagactcacagcaactctccattatagctttcacacggtttggatgtgcagcacatccaaggcaaccacagctgtggtagagcttggtaaaagactgaagatacattggtgctttgatgaaaaggtcagttggctggtccctctctcaaaaagcttattaagcctgaaaagccaactttgtaacatatttaaaactgctattttcgcttatttctggaatgtnnnnnnnnnnnntgtataaaaagaattagtgtatgcttcctgaataaaaaggagccaaagttgatcaga

SEQ ID NO: 82295 - DNA, 1195 bp, Homo Sapiens
  misc_feature (61)..(110): n is a, c, g, or t
  misc_feature (750)..(750): n is a, c, g, or t
gtgccaagctaaaattaaccctcactacaagggaataagcttgcggccgcatacgcggtcnnnnnnnnnnnnnnnnnnnnnnnnnnnnnnnnnnnnnnnnnnnnnnnnnnaattcttcccttggattaatattttctactgaaaagaaatgaaatctcagttccactatgataaaagaaacgaatcaccagtgtctgtcagtgcccccactgctcctcctcataccagcattgacactggtagctgaggaaggggactgctcaatttctaatgtgatctattcaagaagccacatataaaaaggcattgagggctcactgtccaaagaattgcttttgtaaatgctccacaacgtatgggcaaaagtttaaggactactgcctgatgtaccaggaatcctgagttctgtgaaaatctgttcattccaaatctgttaagcatttccaaacatccagagaatggtctcactgttgagggtgcatgtggcaaaatctgtctctctctgcacctgtcttctgttaccatccctggacagtgacagattttaagccagccaccagaattcttttcgagttaaccatttcttagtttctgtaaattcatgacttgtcttactgaactacagcctggtttgtagacttccaacatctacactgctgctcttcaccattggaattcactgtggtatttatagtattggcttcagtccgagccacaggcaataaaaggatatcagctgtagttctcagntacatcatggtgtatagatgctgttattcaggcgaacttgctcatgggtggactaacacctggtttggtacagagactgagaagtttttcattctggtgtcaaagttttgttacattatgggtgtgaagggcatttgatatatttttcttaactatggggtttatttttctaaatgtgggttgattgactgttaattgattcagggtacccttaaaagaaaagaagttttcccattgtgaaccttaaatgatcagagaagtaagttcattgattaaattctctgttgggagaacaaaacttttctcccttgacactttattatctttgatttttcaaagggccttgattggtggttgtgtctcggttaaaatttatgggactttgctatgtagttggcatttataaaatctgaagtatcataaataaagttatttatttaattat

SEQ ID NO: 82296 - DNA, 1102 bp, Homo Sapiens
  misc_feature (413)..(414): n is a, c, g, or t
cagtcgacggtaccggacatatgcccgggaattcggccattacggccgggcaccctgcccacctacgagcagctgaccgtgcccaggaggggccccgatgaggggtcctgaggaggggatggggctgggggatgggcctgagtgagaggggaggccaagagtggccccacctggccctctctgaaggaggccacctcctaaaaggcccagagagaagagccccactctcagaggccccaataccccatggaccatgctgtctggcacagcctgcacttgggggctcagcaaggccacctcttcctggccggtgtgggggccccgtctcaggtctgagttgttaccccaagcgccctggcccccacatggtgatgttgacatcactgccatggtggttgggacccagtggcagnnggcacagggcctggcccatgtatggccaggaagtagcacaggctgagtgcaggcccaccctgcttggcccagggggcttcctgaggggagacagagcaacccctggaccccagcctcaaatccaggaccctgccaggcacaggcagggcaggaccagcccacgctgactacagggccgccggcaataaaagcccaggagcccatttggagggccttgggccttggctccctcactctcaggaaatgctgacccatgggcaggagactgtggagactgctcctgagcccccagcttccagcaggagggacagtctcaccatttccccagggcacgtggttgagtggggggaacgcccacttccatgggttagactgccagctcttcctagctggagaggagccctgcctctccgcccctgagcccactgtgcgtggggctcccgcctccaacccctcgcccagtcccagcagccagccaaacacacagaaggggactgccacctccccttgccagctgctgagccgcagagaagtgacggttcctacacaggacaggggttccttctgggcattacgtcgcatagaaatcaataatttgtggtgatttggatctgtgttttaatgagtttcacggtgtgattttgattattaattgtgcaagcttttcctaataaacgtggagaatcac

SEQ ID NO: 82297 - DNA, 362 bp, Homo Sapiens
gcggccgcctactactactatacggctgtgagaagacgacagaaggggactgccacctccccttgccagctgctgagccgcagagaagtgacggttcctacacaggacaggggttccttctgggcattacatcgcatagaaatcaataatttgtggtgatttggatctgtgttttaatgagtttcacagtgtgattttgattattaattgtgcaagcttttcctaataaacgtggagaatcacaggctgggctgggcactgctctcaccttggttcctggggcatccatggggtctctcacagacaggacccctgcagttcccctggaagcagtgcccaggtggctgtggaataggaacgct

SEQ ID NO: 82298 - DNA, 1081 bp, Homo Sapiens
  misc_feature (130)..(782): n is a, c, g, or t
cccccatctcgttgatctttacatggtttcaggggtagttttctcccggtgctcaagcgtatacggttagccagcgtcggttaacggggtcgtcaacaaccagttgggcgacgacctacccgaattgagnnnnnnnnnnnnnnnnnnnnnnnnnnnnnnnnnnnnnnnnnnnnnnnnnnnnnnnnnnnnnnnnnnnnnnnnnnnnnnnnnnnnnnnnnnnnnnnnnnnnnnnnnnnnnnnnnnnnnnnnnnnnnnnnnnnnnnnnnnnnnnnnnnnnnnnnnnnnnnnnnnnnnnnnnnnnnnnnnnnnnnnnnnnnnnnnnnnnnnnnnnnnnnnnnnnnnnnnnnnnnnnnnnnnnnnnnnnnnnnnnnnnnnnnnnnnnnnnnnnnnnnnnnnnnnnnnnnnnnnnnnnnnnnnnnnnnnnnnnnnnnnnnnnnnnnnnnnnnnnnnnnnnnnnnnnnnnnnnnnnnnnnnnnnnnnnnnnnnnnnnnnnnnnnnnnnnnnnnnnnnnnnnnnnnnnnnnnnnnnnnnnnnnnnnnnnnnnnnnnnnnnnnnnnnnnnnnnnnnnnnnnnnnnnnnnnnnnnnnnnnnnnnnnnnnnnnnnnnnnnnnnnnnnnnnnnnnnnnnnnnnnnnnnnnnnnnnnnnnnnnnnnnnnnnnnnnnnnnnnnnnnnnnnnnnnnnnnnnnnnnnnnnnnnnnnnnnnnnnnnnnnnnnnnnnnnnnnnnnnnnnnnnnnnnnnnnnnnnnnnnnnnnnnnnnnnnnnnnnnnnnnnnnnnnnnnnaagaattcggcacgaggttttattatgaaaacaaaacaaatgccccaggagaagggtccatgattaccagaaacatcaaagagtactttctaccatttttattctgttgtgttgaggccagcattgcaataaacaagctaaactacttacattggactcattttcagtaactgacatttacaggaatatactagaaacggcactaaaaagtttaagaaaagttacggtaaacttgcatgcacatcatacagaaaagtaacattttaaatataaaaagaaaaacttcctggaagcattat

SEQ ID NO: 82299 - DNA, 588 bp, Homo Sapiens
aagatttcggcacgagggtttgcattggcaagccattcctgtcttgagtatgagaacaggatcttgtgttcacttacccagaaacgtgagtttgggatttagtatatggtttatgttgggcaactcattaatcactgtgcttcagtgtcatccatgaaactagggataaaacatgcatgggatgtgaagattaaaagtcaagaatatgaacagtacaagagagtaccataacaaatacaattttatttacaaatatacatggttggaccataccttggaatctacttgctaatgcagctgctgttaacagttcttgtatctgctcaagagatttctatgatcatataaaaatgcctttttaggttttcagtgttcatgccctgagtagtagtctgcagtttgctttaatacatggtaatacagagatcggctttaaatggctggctggttactgttgaatgaatgtatgataaattttttttcagaaccaacagtgtgaataatcctttcagttgtctatcagcatgaatttaaaaattactttcaatattcaacattacacaataaaacttagagttcttgcaatag

SEQ ID NO: 82300 - DNA, 1777 bp, Homo Sapiens
  misc_feature (61)..(61): n is a, c, g, or t
  misc_feature (70)..(70): n is a, c, g, or t
  misc_feature (87)..(89): n is a, c, g, or t
  misc_feature (121)..(121): n is a, c, g, or t
  misc_feature (133)..(133): n is a, c, g, or t
  misc_feature (138)..(138): n is a, c, g, or t
  misc_feature (145)..(145): n is a, c, g, or t
  misc_feature (163)..(163): n is a, c, g, or t
  misc_feature (169)..(169): n is a, c, g, or t
  misc_feature (172)..(172): n is a, c, g, or t
  misc_feature (178)..(179): n is a, c, g, or t
  misc_feature (181)..(182): n is a, c, g, or t
  misc_feature (190)..(190): n is a, c, g, or t
  misc_feature (195)..(195): n is a, c, g, or t
  misc_feature (199)..(199): n is a, c, g, or t
  misc_feature (202)..(202): n is a, c, g, or t
  misc_feature (208)..(208): n is a, c, g, or t
  misc_feature (265)..(265): n is a, c, g, or t
  misc_feature (272)..(273): n is a, c, g, or t
  misc_feature (1656)..(1664): n is a, c, g, or t
cctacccttatctcggctctttgtgttggatgtgacggaaaccatccacccagaacagttngacttgatncgaattatacgactccnnntagggattggccctccgagcccagaattcgcnacgaggctgtcngaatntgtgctnggtatgctcctcccacanccacangcntccagnnannggattccntgccntgtntgncactgnaagcgtttcccgcaaagtaggggaagactccactttgcctgatttctagagtaggantctcgtnntaaatcttggaaatccactgctttgctcccaagagccatctcttccctcactgagggatccaagagccagctagccaggcatggttgataggggcagggcactcattaaagtgcatcacagccagagcctgttgtgtctcagttgggtggtccccaggacactgcctgtggggacctgccctgcccctcttaggtttggagcagaagtggaggtgcccacagcaggtacccactggccccctcctcagtggagaccccaaggagctgcagctgaactgcaggggagggaaggaggagcagcctgggctgccccttgacattcaggatgtagcttcctgcccaccgcataccctggcgcctcactcctcacacgggaagacagcgggcctggctgggcatccctgtgcctgtccctggcggccaggccattgccttcccactatgcagccagggatgcccctgccccccatggctctgtgctgctcactttagggggctcaattctccactctgctcagtccctacagggaaagctcaggtcgggtctttctgagggtccaccagccatcctaccctctccctgcctggcacatgcctgccagcgttgtgtcatgcctgtccacaggggattcgtggggctcacttcatcagagtttgaagcccaaatgaaacgctgaagtgactgagaacctggcttcagtatattttctgctggggcttaataaagcagtagacagggcttgttccatccctctgtgctcagctgcatttcctgctggggtcctggttcttcaggagagagagaccacagggtgagagtgagccaggaacagcaaggacgttgattggttggggcaggggggccagagtagctgatgtaggagtactgggaggccagacggcacgaggtctccaaggccccagcaaagccatggcttctacccccagttcccctgacaggaagttcttggcgggtttggagccagggatggcatggagtgatgtggctttgaagggtcctctggctgctgagctgggatgaggcaggtaagggtggaacaggaggggtggggaggaagccggggcagtcaccgagtgaccaagaggaagacccgccccacggcggggacagatgcggggtacgttaaagggagagccagagaactcatggggtgaggatggagtcgaggagactgctgggagccgccgtgtgggtcagagatggagaaggctgagtgcagaaggtggggggtgactgggacccagctttgggcctcccagcagagcagccagcacagtgtgtcctggggtcataaaactcagggactctatctccaggagttcagctttcctggggaggcacttggatggcgctaggctcannnnnnnnnttttcccaaatggccggggtgcggttggaaggggccagggccgggcacaaacacggggggggcggagagggctccccaaaaaggtttgctcacggggtgaaagccggttaaaa

SEQ ID NO: 82301 - DNA, 996 bp, Homo Sapiens
  misc_feature (33)..(33): n is a, c, g, or t
  misc_feature (73)..(73): n is a, c, g, or t
  misc_feature (100)..(100): n is a, c, g, or t
  misc_feature (102)..(102): n is a, c, g, or t
  misc_feature (203)..(203): n is a, c, g, or t
  misc_feature (259)..(259): n is a, c, g, or t
atccccagacagttgctggtcgattatcgctcnttaggattgcctgggcaagatcgcagagacttgactttcngatgacatgaatctgtgctctaagcantncaacgtgacacgctcaaacgtgccgaggatcgcgtgccgtaagagcttgcgtgcggaggtggctccgttttccgaatcccggacgagggagagtgaggctngcagccccgccgcccgattacgcttgagaagcgaggcgagagagtcgtccagcccntggggcccagccctagagagcggacgcggctgcgggcctggcggcctggacggcggagcgtgaaagctcccccagggataggaagtcagccgaaatcaacgattgaggtcagtgaaggagcggacgcttgaggccttggaggggaagcaggtttctccaggagggaacccgggcctccgctttgctcagcgctcccctggcgaatgtgttgagcacctgttatgtgctgggggtacagagggtctgagcacctccctcatgcagacagagccccggctcccatgttcaccatgctgagaaagacctgcgggggacagcaggaggacagccggggaatgggcccgcacttgcccagaggccctgatggtgtcgtcttgggagtggaggaacctgagggaaaagcccagggacgagtcaggggagagctctgccatggtgcccttgcacgtatccacatgggccacagctgcacccggctctcagcagagggcatcgccatgctcctgggcacagccaggccctctcgcctccctgcggctcctgatgcctctccaggctccgctgaggtcaccttgggcacttagcgtggctgcagctctttgcagccccgtgtcctgtcatccatgtggccgtcatgtggtcacttttgggcattgccctgcgcaaggtccatggggactgggcacctttggccattctttctttggttgtctgtgcaagtaataaactaaatctga

SEQ ID NO: 82302 - DNA, 973 bp, Homo Sapiens
  misc_feature (40)..(40): n is a, c, g, or t
  misc_feature (99)..(146): n is a, c, g, or t
aggcgggctcctgcagccgaagggaattctcccctgtttntgctgtgttctgtttgtgtaggttcagccccggggaggaggttccacaggacagacagnnnnnnnnnnnnnnnnnnnnnnnnnnnnnnnnnnnnnnnnnnnnnnnngcccccacgcagccacctgtgtctgtgttcttgccactgtccctaccctccaggagtgggtctggtctcatcagggagggcagcgctctcttcactctgtccttactctggtgtttcactgtgattttaaaaactgaaactgcacttgttaccccttgacagagctgcaccctgagagggcctctgcgacgcccctccttctcttaagcctttccaagctgtctgacgatttttaaatcccatttcctgagtgacacagagcatcttttcttaagcttatgagtgacttatttgtgttttcctcaaagctagaggggacccccaatctgtttgtttccagaggccctgatggtgtcgtcttgggagtggaggaacctgagggaaaagcccagggacgagtcaggggagagctctgccatggtgcccttgcacgtatccacatgggccacagctgcacccggctctcagcagagggcatcgccatgctcctgggcacagccaggccctctcgcctccctgcggctcctgatgcctcccaggctccgctgaggtcaccttgggcacttagcgtggctgcagctctttgcagccccgtgtcctgtcatccatgtggccgtcatgtggtcacttttgggcattgccctgcgcaaggtccatggggactgggcacctttggccattctttctttggttgtctgtgcaagtaataaactaaatctgaaaaggtcttcaatttattcaccggccaatctgtcagccttggccttgccttgtgcttgacagagtggaggggaaaggaggacagactcggtgggggcgggggtggg

SEQ ID NO: 82303 - DNA, 1023 bp, Homo Sapiens
  misc_feature (490)..(490): n is a, c, g, or t
tgaatttttttatgtatttataaaaattgtatattgaacattggaaatagatgattagatttttgtgtcattttacaattaaatctaaaatgcttaatccaatatcatcatcaaaattcagtgaaatcccaaaacagtgccaagaattttgctgaatgaaacaatcaaacaaagcattttaaggtgtaagttatagtacctgtacttgcagataagaagcttactatatcattattataagtagcatatattactttcaaatacctatattagaaagatattgatctgactgaaatataacctacctgccagtaaggtccaaaggctgaatttgttttgaatgagttccttgatctttaagcactgatgattttcttatatatgaggatgcaaagcattcaagagtttcagcctgttctggtgaggggctccctgacttacataaagttttcagtgcaattttaatagtacatatgctctaatttatttntcttctgcgtgtggtcagacccaattacactgtggctaagactctcaaagtgccagggtttctgtgatgattctgagaatgctgaatacaaatataccttatattctttaaggaaaacggaaaggaaagatcagcagaaatagggttttctcatcttcaccatcaataaacatttattgcgtacctcctatattctgcaaattttccccaaatagaagccagttcagtccacaccatctcttctttgagttgtttatggcctcccttaaggcattttacaaacccataagcctacaatagatgagtatttttactatttgtattaagtgtcataatagcatcaatgtgcacattaccagtatagactgttggagttcactgattgttttcatagatgatgcttcttggggaaaaatagtataggatgtgaaagttttgaattacggttatttaaaaactaacatttgctatggccaaagtgtttacaataagcaataaagtgaaagaacctattataacacagattaaaaaaa

SEQ ID NO: 82304 - DNA, 1018 bp, Homo Sapiens
  misc_feature (1)..(1): n is a, c, g, or t
  misc_feature (592)..(815): n is a, c, g, or t
  misc_feature (836)..(836): n is a, c, g, or t
  misc_feature (862)..(862): n is a, c, g, or t
  misc_feature (876)..(876): n is a, c, g, or t
  misc_feature (883)..(883): n is a, c, g, or t
  misc_feature (955)..(955): n is a, c, g, or t
ntaatatatataaatagctcttcatttaaaaatacagtttccccaggttgaggtatgtggtggcctgttgtcacggcagcatgagccacggcggcgcccagggcgggggcggaagggcctagctggagactgccatcacgtagttcttggaggggctgctccggcccagcagcacttggttcttgcaggtgaggagcccacaggaggcggccagtggggcctcctcgtacaagacgcaaatggagccgtcctccccaatgcggtaggacacctcataggggtccacccacagggtcagctcgctgggcagcagctggtgcagctggggctggctgagtccgatctggctggccaccctgctgatgatggggtccatcttgtggttgatgcgaatgcagcggtagccggagcccttggacggcttttcgggaaaccagtggtgtttgtagtgctctgtgagtgcctcctggagcgccccgctgaagaccttaagcctctgctcgctcacgcagccccgggtcctcaggaggctggagaggaagcccacggcggcggcgatctccgggagcatgtcggcctcgtgccgaattcnnnnnnnnnnnnnnnnnnnnnnnnnnnnnnnnnnnnnnnnnnnnnnnnnnnnnnnnnnnnnnnnnnnnnnnnnnnnnnnnnnnnnnnnnnnnnnnnnnnnnnnnnnnnnnnnnnnnnnnnnnnnnnnnnnnnnnnnnnnnnnnnnnnnnnnnnnnnnnnnnnnnnnnnnnnnnnnnnnnnnnnnnnnnnnnnnnnnnnnnnnnnnnnnnnnnnnnnnnnnnnnntgaaatcggcacgcgcggganaggcggtttgcgtatggcgctctccngctctcgctcactnatcgctncgctcgtcgttcggtgcggggagcgtatcactcactcaaggcgatacgggtatccacatcaagggtacgcangaagacatgtgtgcaaagcacaaaagcaggacgttaagcgcgtgctgggtttccaaagcgccc

SEQ ID NO: 82305 - DNA, 783 bp, Homo Sapiens
tttttccttttaagacagaaaaggttggctggatttaaaagcaaaaatgaattcaaattgtgacttttatgaagcaaatcctactttcaactgcacaaatcactcctttgttagattttcagagtagatggtaatgtcactaaaagctgtttacagcccagcaggtgtgttttggtttaaaaggatgtgctttccttttaaactcgagtattcaattaccttcccagccgcagggaaagtgtgagctagggaccaagcgagcttcagaggcagctctgaagatgcaggcaggagggagtggggcagggggagctccacaaggaagagcaacaggggagccaatgccttggactacgcgggatcagtctccttgctctcttcagaactgggaattctcacgacagatgcaccctcgccaatcacgcaggactgaccggggcgtcggaatcgccgtcattctagatgatctacaccttcccggtgccagacgcgccctcgccacaatcacgcaggactgactggggcgtcggaattgctgtcattctagacaatctacacctttcccagtgccagacactcacggagcagaacaatgtgccgcctggtcatcagttatttgccttttgaacgttaaacgctggtttagagtgacaggctcaaaaaccaaatatttcaaaattgatgggcctgtcacagacgtttctgaaaaaagacacacagatctctgggaaggaaacatccctattttcctggcatggcactgattaagaaacagtcaaaaaa

SEQ ID NO: 82306 - DNA, 450 bp, Homo Sapiens
taggtaacttcagtatattatgaacaaatcaaagaatgtttacttccccgcaaactgggtgaattatagaaagcaatccagatgtggttaactctggccacagtctaatgtcattcacttcatttgatggggtcacttgttagctgtcactaataatggaattaatgggaaacacttgataaatgaaactgtaccgttaaatacaatagctgagttttccccagtgtattgtaaaattgacacacactaatacaagatggattatcaggatgtatctaaatgtcccgagagggttaaaagctaactgtaaattactttaactttcactttcaaatctgacaaatcttgtttatatggtatataaaactttgttttcatcagatttgggggggttttatattaaagaaaaaaagaccacactatttaaataaacgtttcctgtttctgact

SEQ ID NO: 82307 - DNA, 1017 bp, Homo Sapiens
  misc_feature (169)..(210): n is a, c, g, or t
  misc_feature (306)..(849): n is a, c, g, or t
  misc_feature (854)..(855): n is a, c, g, or t
aaaaatgaccaatgatgttaataaataactatttatatacacataagctcgggaagtggttcccaagggtggcgcggcagcagcagcaggggcagcgctagccaggcggggactcacagcgggctggacttccgtagaaaattgccgaaccttacaaaaaaagtctccnnnnnnnnnnnnnnnnnnnnnnnnnnnnnnnnnnnnnnnnnnaaagttgaggtaaaagcttcagtgtatggaaacctgcaggctgcatacacagccgcggccgctccaacatcagaatggcctcgttccgaattcttnnnnnnnnnnnnnnnnnnnnnnnnnnnnnnnnnnnnnnnnnnnnnnnnnnnnnnnnnnnnnnnnnnnnnnnnnnnnnnnnnnnnnnnnnnnnnnnnnnnnnnnnnnnnnnnnnnnnnnnnnnnnnnnnnnnnnnnnnnnnnnnnnnnnnnnnnnnnnnnnnnnnnnnnnnnnnnnnnnnnnnnnnnnnnnnnnnnnnnnnnnnnnnnnnnnnnnnnnnnnnnnnnnnnnnnnnnnnnnnnnnnnnnnnnnnnnnnnnnnnnnnnnnnnnnnnnnnnnnnnnnnnnnnnnnnnnnnnnnnnnnnnnnnnnnnnnnnnnnnnnnnnnnnnnnnnnnnnnnnnnnnnnnnnnnnnnnnnnnnnnnnnnnnnnnnnnnnnnnnnnnnnnnnnnnnnnnnnnnnnnnnnnnnnnnnnnnnnnnnnnnnnnnnnnnnnnnnnnnnnnnnnnnnnnnnnnnnnnnnnnnnnnnnnnnnnnnnnnnnnnnnnnnnnnnnnnnnnnnnnnnnnnnnnnnnnnnnnnnnnnnnnnnnnnnnnnnnnnnnnnnnncctgnnagctcctcgtggctctctgtttcgacctgccgctacggaactgtcgcctctccctcgggacgtgggcttctcaactaccttagtaccattcgttaagcgtcgtcagtggcggttgacaccccttagcgacgtcgctaccgtatacgctggtcaccgtagaca

SEQ ID NO: 82308 - DNA, 1058 bp, Homo Sapiens
  misc_feature (707)..(707): n is a, c, g, or t
  misc_feature (722)..(791): n is a, c, g, or t
  misc_feature (797)..(797): n is a, c, g, or t
  misc_feature (834)..(834): n is a, c, g, or t
  misc_feature (885)..(885): n is a, c, g, or t
  misc_feature (899)..(899): n is a, c, g, or t
  misc_feature (941)..(941): n is a, c, g, or t
  misc_feature (970)..(970): n is a, c, g, or t
  misc_feature (973)..(973): n is a, c, g, or t
  misc_feature (975)..(975): n is a, c, g, or t
  misc_feature (994)..(995): n is a, c, g, or t
  misc_feature (1006)..(1006): n is a, c, g, or t
gttggtttgtttttgtctatttctcaaaccagacccttgagggtcagaagatatatcctcagcgcctggatgggctatattctttggtcaagtctgaggacttgcagtgggcaatgtcagtgagaaggtagtggagtgacagagggctgggccctcggcagatttgtctcctagcaggaagaggtgctaggtgagccggatgcacttaacctgcacgtgatgcataagccagtgccactttgggccccacatgcagggccttccagcccctcagagactgtccaggccatttttactccctccctggacccctagaaggccaacccaggactcaccttctacaggcaggtggggaccctgggctctgggcctatccagcaaggatggcctaaaatgcagaccctgggtcctgggcaggggtcctgtgcagagtggctgatgaaccagactagcagtgcacttccagcagggcgaggctcttggagatggggcagcagctggatagggtctggacaaagccatattgcatcaacgtccggctggccagggggttcacgggctcagcacccagcgctcccagggcctctggcatgctccacctccagtcccatccccagcctcaagctcctccacccaaccctctctggggtgtctacctcagtctgtcttccatccaaggattcagtagtctgcactgtccccagatnagtggctaagatggnnnnnnnnnnnnnnnnnnnnnnnnnnnnnnnnnnnnnnnnnnnnnnnnnnnnnnnnnnnnnnnnnnnnnnatctgnaaaagtgaaaatacagttatctccctggatgagtgcntaggaggatgacatttgacagcacgtgagacacatggcattcagtcatgangcattagcactatnattgcccagttctgctgctgcaggtgttggcacttggagccncgtgcgaaatcttggcctcgagggcagtnccnanaaggagtcggattaatcgnnatcaggcaaanctgtgccgtgtggaattggttccgtcacaatcacaaagcaaagagcggagaa

SEQ ID NO: 82309 - DNA, 924 bp, Homo Sapiens
  misc_feature (154)..(154): n is a, c, g, or t
  misc_feature (373)..(394): n is a, c, g, or t
  misc_feature (450)..(708): n is a, c, g, or t
  misc_feature (758)..(758): n is a, c, g, or t
  misc_feature (790)..(790): n is a, c, g, or t
gtgtgagccactgcacccggacccactatggtactctaaaagcattctttaggttcctcctgtattggctttagtggaaaaattctttcccagaaggttgaaacaaaagtactcgtactatcaggtattcaaaattaaagaggtactataggtnagctagagagcataagcatacatatatgtagttcctccacctgagggaggctccgtcaatagatcctgctttgaccatttatcacagtgatcgggaatttgtgctgacctggcacactcaccttaccacacttgtgatcaactgcatacattaaaaagataaatggtgagagctacagagaagctactagcaacttgcccttctttactttcttaggtnnnnnnnnnnnnnnnnnnnnnngcctacagccgcggccgctccaacatcagaatggtaaccctcgtgccgaattcttnnnnnnnnnnnnnnnnnnnnnnnnnnnnnnnnnnnnnnnnnnnnnnnnnnnnnnnnnnnnnnnnnnnnnnnnnnnnnnnnnnnnnnnnnnnnnnnnnnnnnnnnnnnnnnnnnnnnnnnnnnnnnnnnnnnnnnnnnnnnnnnnnnnnnnnnnnnnnnnnnnnnnnnnnnnnnnnnnnnnnnnnnnnnnnnnnnnnnnnnnnnnnnnnnnnnnnnnnnnnnnnnnnnnnnnnnnnnnnnnnnnnnnnnnnnnnnnnnnnatggggctctccgcttctcgctactgatcgctcgctggtcgttcgctgcnggagcgtatcactcatcaagggcgtatacgtntcacagatcggggaacgcaggaagaatgtagcaaaggcacaaaggcagacgttaagcgggtgtggggtttcaaggtcgccccttagagaaaaaatcacctaataaagggggaacccgcgacttaaacagggttg

SEQ ID NO: 82310 - DNA, 608 bp, Homo Sapiens
  misc_feature (366)..(390): n is a, c, g, or t
atattcgctgtgattaccatcagtccattttaccgaggaaggagccaaggtccaggcccactgaaggacttgcataacattacaatagcagtggcagaaccagccatgcttctgcaaatcacaacctctttgagcctctgtcacctgaactgcaaaatgagtgggttagacaaaatcatctgttgggacctcctagttccacgtgctatcattctactaactggcaccctaaggttgaaagtgcttatctgctttccaatgtggcttccttacagtctggaactgacaatatgcaggagcagtaaactggcagaaaaccaggaatcagagaaaaaaaatataattttaactttaaagatgtaaatnnnnnnnnnnnnnnnnnnnnnnnnnttttaaagctttatatgcctcaaatatcagggaaaggagccaagtccttggtatttagtttggtgaatacttgcattgaatacatgtcaagatgtcaagtcatttttgaatgtgtctcagggatttctatgctacacattcttttaacaaatcaagtatttatgtacacatgttcagattttttgacaaaatgattaaaataatgagatgaaaaatga

SEQ ID NO: 82311 - DNA, 991 bp, Homo Sapiens
  misc_feature (111)..(111): n is a, c, g, or t
  misc_feature (130)..(130): n is a, c, g, or t
  misc_feature (542)..(542): n is a, c, g, or t
  misc_feature (569)..(569): n is a, c, g, or t
gagaacccccaccaccccatggtccttgatctctttggagacaaccacaatggcttaacaagcagctcagcatcagaaaagatctgtaatgcccacgggtgcaaaatggcncatgagactaatgtagccntcaacaggacccagtgtaccttccggaacttcaccagtgctacccaggcattgacagagtggtacatcctacccaggccaccaacatctttgcacaggtgccacagcaggagctagtagagatgagctaccccggcgagcagatgatcctggcctgcctattcggagctgagccctgcaactaccggaacttcacgtccatcttctaccctcactatggcaactgttacatcttcaactggggcatgacagagaaggcacttccttcggccaaccctggaactgaattcggcctgaagttgatcctggacataggccaggaagactacgtccccttccttgcgtccacggccggggtcaggctgatgcttcacgagcagaggtcataccccttcatcagagatgggggcatntacgccatgtcggggacagagacgtcnatcggggtactcgtggacaagcttcagcgcatgggggagccctacagcccgtgcaccgtgaatggttctgaggtccccgtccaaaacttctacagtgactacaacacgacctactccatccaggtgggaaggtggtgcacgcctcatgccccggggcccctttccgggtttatggggccaaggcctcagtactccgggagagctggccccagcaagtctggctctgctgggcctttgtaggttgccacggggcaccccgggcctgtgggaccagtcactttcctgggctctctcaccagggcctagggttggccacttctcatccccacattggcaggtgtacccctggggaagcccaggggattatggggatcttactctggggtttcccaagatgaaaacaaaaaatagcagctaacacc

SEQ ID NO: 82312 - DNA, 1032 bp, Homo Sapiens
  misc_feature (49)..(49): n is a, c, g, or t
  misc_feature (65)..(65): n is a, c, g, or t
  misc_feature (306)..(306): n is a, c, g, or t
  misc_feature (338)..(338): n is a, c, g, or t
  misc_feature (516)..(516): n is a, c, g, or t
ccatttgggcattaatcaagaacgcaggtgcacttttgtgatctgactncccgagaactgttgantgcaaggtcctttgaagactcgagctgaatttctgctgactcacagctactgcacatagcatgacgtccacatcagttatccaggacgtgtaggaagtaatcatgacatgacattgctatggatgatggaagctgttttccaatggctcccgcagaccctttttgacagtcaagtgatcggtatgctgacctctatgcagcatcttcatcaacctgctgtaatacccttcagcgtacatcntcaggactgcccatgtcatgatgcctcatgantcaacggtgagcacacacacgtagatatcaatgagatggagtctcctcgtgccacccggaaccgcacatcagtggatttcaaagacactgactacaagcggcaccagctgacacggtcaattagtgagattaaacctcccaacctcttcccactggccccccaggaaattacacactnccatgatgaagatgatgatgaagaggaggaggaggaggaagaataaggaggaaaaccaaaaccccaagcacccattaaacaagtcctggcaggactcacaggaacaaacgaggtccctgttagggttctactcgggggagggagggggctccatgaaaggtacgtctgaaaagtttctgaagattttattatcatagatacttgttttggttttgtgtatctgtactctctgcagatggtccaaaattgtaatggagtctgtattagaagaaaataagggtaaaatcaggctgaactgcatgtatatggctccactgtggcttgtgacacttttaaaatcatccgtatgtcagtgtatctggatacacgaggaaaaggaaagagtctcagagtggaacaaagagtgggaagaggtgatctgtaatgttacaaattgtgctattactccaaggtccaacttttccagtgcattacatggtattgtatatcagtggagaaatgtattatttccatgat

SEQ ID NO: 82313 - DNA, 1080 bp, Homo Sapiens
  misc_feature (187)..(187): n is a, c, g, or t
catccacgccttccgggtgcgtatatcatgcagcagtccgatgagcgcgtgccagcatatgtggtgtcatctagccccagcttcatttgctccgtcgttgtgttgatgtgacgatacattcaccaggaaagcttgactgatacgaattatcgactcctataggaattgccctcgagccagaatcgcnacgaggtgccagtgagatatatatcctattaaacagaaaagtcccacttaccgattcattctttcactgttgtatctgcgcccagaattctcagtgacgtgggggtgagggtgggtggcgattgccttagagggaacccctaaattggttttggataagtttgagcccttgaccttaatttcattgctaccactctgatctcttagcacatttcttaggattaagggtccaaaaatgctgatctaaggggttgccatggtgttgaacaatgcaactttttatttaaaaaagctctgcactgccatgtatgaaagtctctttatgatgtttgtttttttgtcatttttgttctttacatcaagaaattttatgtttaaatatgcggagaatgtatattgcctctgctcctatcagggttgctaaaccctggtacatcgtatataaaatgtattaaaactggggtttgttaccagttgctgtactttgtatatagaatttttataaattgtatgcttcagaaataatttatttttaaaaagaaattaaaagttttaaactcacatccatattacacctttcccccctgaaatgtatagaatccatttgtcatcaggaatcaaaacccacagtccattgtgaagtgtgctatatttagaacagtcttaaaatgtacagtgtattttatagaattgaagttaacattcttattttcaagagaatttatggacgttgtagaaatgtacaaatgcatttccaaactgccttaaacgttgtatttttatagacatgttttttaaaaatcctaagtttttaaataactatggatttgtgtattttttttggttatttgtttcattaaaacatgtacatcagtaaagagttttaaacaatga

SEQ ID NO: 82314 - DNA, 1393 bp, Homo Sapiens
  misc_feature (12)..(12): n is a, c, g, or t
  misc_feature (63)..(63): n is a, c, g, or t
  misc_feature (136)..(685): n is a, c, g, or t
  misc_feature (988)..(1002): n is a, c, g, or t
gctgacggggtngtcacacaccagctgagcgacgcctacccgaatggatcctacagctgagtntgagaagcccacgctcccgagggagaagcggacagtatccgtaagcgcagggtcgaaccagagagcgcacgannnnnnnnnnnnnnnnnnnnnnnnnnnnnnnnnnnnnnnnnnnnnnnnnnnnnnnnnnnnnnnnnnnnnnnnnnnnnnnnnnnnnnnnnnnnnnnnnnnnnnnnnnnnnnnnnnnnnnnnnnnnnnnnnnnnnnnnnnnnnnnnnnnnnnnnnnnnnnnnnnnnnnnnnnnnnnnnnnnnnnnnnnnnnnnnnnnnnnnnnnnnnnnnnnnnnnnnnnnnnnnnnnnnnnnnnnnnnnnnnnnnnnnnnnnnnnnnnnnnnnnnnnnnnnnnnnnnnnnnnnnnnnnnnnnnnnnnnnnnnnnnnnnnnnnnnnnnnnnnnnnnnnnnnnnnnnnnnnnnnnnnnnnnnnnnnnnnnnnnnnnnnnnnnnnnnnnnnnnnnnnnnnnnnnnnnnnnnnnnnnnnnnnnnnnnnnnnnnnnnnnnnnnnnnnnnnnnnnnnnnnnnnnnnnnnnnnnnnnnnnnnnnnnnnnnnnnnnnnnnnnnnnnnnnnnnnnnnnnnnnnnnnnnnnnnnnnnnnnnnnnnnnnnnnnnnnnnnnnnnnnnnnnnnnaagaattcggcaagaggaggaaggccatcaccctgaactacgtgctcactgagatcttcttcgaaaaaatcaaagattagttccaggttatctggttccatcgtctgtatgctgtactctgtccaacgatcaggctgcaagccataaccacactccggctgtgaatgcctgcacttgaactcattgtcgcttattaaggatatctccaagctattggacattttgtggagtacagtgggagataccctatcatcgtcatcttcctccaggccttctagtgtcagcttcaccctaaatctagannnnnnnnnnnnnnncttggttattgacacaggaggtttttcagaataatgcaaacgtaatcttatttcagtctgacatgtcagccatccagaatccagagtttcaacaccattgtggattccaaattgtccatcgtcaataataatttcgctttctagaatttaaggaaaatagaaaatttagttaaaactcttgatgcatacccagtgaacaactgagaaattacccaccttaaagatcgtttataatattaaatctacagcttaaaagcagcccaaggtgaataagcatatttattgtagccctcaataaagaattccctttaaaggaggctagcaaacagtaatggttcttacatacttcgttgattgtccattatgttaaaaagaagaaaaagaaaactct

SEQ ID NO: 82315 - DNA, 1219 bp, Homo Sapiens
tgcctccttcaccactttgagactgggtggatgaccactgagcagcagcaatagccgtactagctacagagaaggcgctgacgcggttaccatctgagaggaccaagtcttttctggcactttttgcaaaatcaaccccaatagttttgccatcaattttcaaaggaggatggagactctgtaatatctgaagcagctgagaagcatccattgcagaggacagctgcacaaatgcgaagcctctgttctgctgggtctgtttgtcttttatgaggcggatgttattgacagctaaagacgcgtaaggagacagtgctgtcatgatggaatccaccacagtgtgtggagctatgttccgaagaatgatcgtatcacagtagtaatccacagactgaaccgactctgtggttccaggaggcacttcctgttcagagtcaaacttgtctgctccacatcggaagcattttagtcttttcctgaaattgttaaggcagcacttgttacaaagccaatcttcaaacttaggtctgggattgctataatgcattgcaatgtgctttccttgaatcaccaactttttctgattggcttccatccagctggtagcatcttgcaagtgataaaactccacgaaggcgaaaccacggcttacacctgttttcctcttcatcagcctcacatccgcaggctgagggccttcgaaggactccatcatttctcgaatatcgctctctgtgatggtgatgggaaggccgcgcagcatgatggtcttgctctccctctcgtcactgatgtcatgcctatagtcgtgctcaccatagtcaccatctgaatggtagccatcttcggatcggtcactgttccttctttcacgctctctctctggactgtcatagtctcggtagtcatcatatctatcacccctccgatcatcactagatcttttgtaatctgagtccctccgcctgcttcgggattcacgctcatcacggtcatccctgtctatgatggaaccgtatcttccactacgctctgttctactcactcttttgtctgaacccattgtcccactgaagatttagcacacagctccaaaaggttcaaattgttattttttcccaaggagagaccgaagcagcagtagcggttctgcgccccagacctccacaggttcggcggctacctcgtgccgattccaccccgcctcgtacctagcctt

SEQ ID NO: 82316 - DNA, 1299 bp, Homo Sapiens
  misc_feature (25)..(25): n is a, c, g, or t
  misc_feature (478)..(478): n is a, c, g, or t
  misc_feature (562)..(562): n is a, c, g, or t
  misc_feature (668)..(668): n is a, c, g, or t
tccctcaaggaattgacaggctganagctatttttaaagttttctttctgcttattcaaactcttagcccagcgttccatgtctttggcaatctgctgggctgttttgctcttgggtttctccttcttctctttcccctcttttgcaggaggcaggcccgactgctggtgggagctagactctgcagctggcacgtaggtctctttttccccatcccagtaaaggtactgctgggtcaaggaattatagtagtattgcgagttggggtcataatagagccctgttgtcggatcatagtaatatcctgaagattcatcatactggtaagtggacgtgtcaggtactgcatatttggtaccaggaactacaccagtaggggaagcggctggggcctgtgtacttgtgctagtgctaggctgtgcttcctccagtcgggagagccaggtgggattggaggtttgattatacagctgagganctctgggacactacagccgctgaggtggtggtcactgctgtgcctgatgcagatgatgcatcagattccaatcctccagcttgnttgttgataaaactgctgataatcctgtgaatactgagcatattgggcatagccatcttgacctggttgcagataactgtagtcaacactgcctccttcaccactntgagactgggtggatgaccactgagcagcagcaatagccgtactagctacagagaaggcgctgacgcggttaccatctgagaggaccaagtcttttctggcactttttgcaaaatcaaccccaatagttttgccatcaattttcaaaggaggatggagactctgtaatatctgaagcagctgagaagcatccattgcagaggacagctgcacaaatgcgaagcctctgttctgctgggtctgtttgtcttttatgaggcggatgttattgacagctaaagacgcgtaaggagacagtgctgtcatgatggaatccaccacagtgtgcggagctatgttccgaagaatgatcgtatcacagtagtaatccacagactgaaccgactctgtggttccaggaggcacttcctgttcagagtcttgttacaaagccaatcttcaaacttaggtctgggattgctataatgcattgcaatgtgctttccttgaatcaccaactttttctgattggcttccatccagctggtagcatcttgcaagtgataaaactccacgaaggcgaaaccacggcttacacctgttttcctcttcatcagcctcacatccgcaggctgagggccttcgaaggactc

SEQ ID NO: 82317 - DNA, 999 bp, Homo Sapiens
  misc_feature (52)..(52): n is a, c, g, or t
  misc_feature (102)..(591): n is a, c, g, or t
ggaaggcgacagtatccgtagcgcaggtcgaacagaggcgcacgaggacttncaggggaacgcttgtatcttatagtctgtcggtttcgccactctgacttnnnnnnnnnnnnnnnnnnnnnnnnnnnnnnnnnnnnnnnnnnnnnnnnnnnnnnnnnnnnnnnnnnnnnnnnnnnnnnnnnnnnnnnnnnnnnnnnnnnnnnnnnnnnnnnnnnnnnnnnnnnnnnnnnnnnnnnnnnnnnnnnnnnnnnnnnnnnnnnnnnnnnnnnnnnnnnnnnnnnnnnnnnnnnnnnnnnnnnnnnnnnnnnnnnnnnnnnnnnnnnnnnnnnnnnnnnnnnnnnnnnnnnnnnnnnnnnnnnnnnnnnnnnnnnnnnnnnnnnnnnnnnnnnnnnnnnnnnnnnnnnnnnnnnnnnnnnnnnnnnnnnnnnnnnnnnnnnnnnnnnnnnnnnnnnnnnnnnnnnnnnnnnnnnnnnnnnnnnnnnnnnnnnnnnnnnnnnnnnnnnnnnnnnnnnnnnnnnnnnnnnnnnnnnnnnnnnnnnnnnnnnnnnnnnnnnnnnnnnnnnnnnnnnnnnnnnnnnnnnnnnnnnnnnnaagaattcggcacgaggcaagcaaaagaataaaaaaccagagaaaagtagtagctccgagagttccgacagcagcgacagccagagtgacgaggaaaccgcagacgtgtcgccccaggagctgctgagacggctgaaaagtcttccactaagaaggcagtaattgaatgctgccctggctcgtcctagaatcatttctcctccatgatggaagcccagtgattgttcagttaacgcattgtacagagtgtatttatatgtaaattcctgctgtaaaataatttttaaaaccttgacatttcaaagactgccttgaaaggtcgcagaaattgatttctatttttaatttcagttagtatcgggggaaaaaaatccagactgaacagtttaattaaagtggaatttttct

SEQ ID NO: 82318 - DNA, 1214 bp, Homo Sapiens
  misc_feature (279)..(279): n is a, c, g, or t
  misc_feature (334)..(376): n is a, c, g, or t
  misc_feature (444)..(444): n is a, c, g, or t
ttgaggcgtgggcaccatattgatgtcatcttgccccagtacatttgtccgtcttgttgtgattggcgtacattcaccagacgttgactgtacgattatagatccttaggattgctcgagccagatcgcagagcacttcgttgggaggtgcacgcttgatccatttcctcctttccctgctttgggaagctctccagcggccgccgatggcgtgagatggcgccctgagagctcccagaggccccgcggtcgccgcgaccgcgctcccaaaacaacatntacagcgcctgcccgcggcgcgctcgtggagcggacgctgcaggcacaggggagnnnnnnnnnnnnnnnnnnnnnnnnnnnnnnnnnnnnnnnnnnntgcaggtgtctgaatctccctggctccatgccccatctctgaagaccagctgtgaatacgtgagcctntaccaccagcctgccgccatgatggaggacagtgattcagatgactacatcaatgttcctgcctgacaactccccagctatcccccaaccccaggctcggactgtggtgccaaggagtctcatctatctgctgatgtccaatacctgcttcatgtgttctcagagccctcatcacttcccatgccccatctcgactcccatccccatctatctgtgccctgagcatggctctgcccccaggtcgtcttgcacaccttggcagccccctgtagttgacaggtaagctgtaggcatgtagagcaattgtcccaatgccacttgcttcctttccaagccgtcgaacagactgtgggatttgcagagtgtttcttccatgtctttgaccacagggttgttgctgcccaggctctagatcacatggcatcaggctggggcagaggcatagctattgtctcgggcatccttccccagggttgggtcttacacaaatagaaggctcttgctctgagttatgtgacatgcctcagccccatggactaagcaggggtctggtataaaaacactcctggaaacgcctttgccctgatccaaatgttagcacttgctagtgaacgtctacttatctcaagttctatgctaaaggcaatttatcttgatgtgatgataaaccaaacttattagcaagatatgcatatatatccataaattctctttactctgtctccatcacttgatgcacataagtgccctgacctcagcatctcccctct

SEQ ID NO: 82319 - DNA, 1037 bp, Homo Sapiens
  misc_feature (32)..(32): n is a, c, g, or t
  misc_feature (110)..(110): n is a, c, g, or t
  misc_feature (122)..(123): n is a, c, g, or t
  misc_feature (143)..(144): n is a, c, g, or t
  misc_feature (184)..(185): n is a, c, g, or t
  misc_feature (195)..(195): n is a, c, g, or t
  misc_feature (217)..(217): n is a, c, g, or t
  misc_feature (226)..(226): n is a, c, g, or t
  misc_feature (348)..(348): n is a, c, g, or t
tagtcatcatagcacccagcttacattatgcncccgctctatgtgttgaatttgagcgatacaagtccacacagaaacagtttgacagattacgatttaatacgactcantataggaattgnnccctcgagcccagaaatcgnncacgagggagttctccctctgcttctgactcgtgctatanngaaaatcatntcagtagtcagccttccacatnttcagactntaaactgacaccaagagtgcagctctcaacagcagtctgcagtagattcatctgttcactcggcatgtatgtattcaatagctagtacatacatagcagggtagtagatcagtcagactggngaaggaaacaaaataatgcagcagagacaatgctaatatcatttaagaatgacaattacagtgctgctggaattgaagaagtagcttgcaactgcactgcaagttggatttctgttgcttcatgttgaagcagttcggttagatgagttcactaagccctaacacataaataatttcacttagctttaggagaccctcagactaatgatcgcttcatgaaaggtgtatttagttgttgaatccacacattcctaccccagatctctagccagacatgcttagttccccctctgttgttggcaccaataggatatgtgtccctttcgatccatgatggtctcattctctcggcagacacgctgctcaggaaggggcagaaaggtctccaccagggtcccacttttctgccccagccacattaccaatggtcaggttgaactgcaagcgacccttgtctctagcaaagctggaaaatggacccgtgtaaatgacacatggaacccagagccgaaagcatgtgatttctcaaaaagtgcttctcctgagagccatgcttttttcagttacgagctcagatgagattgcaacctagagcgtatttgtagaaagcacttagtttttttctcctcttcaccaatgcagtgggccagtgtcactaaataaataaagcaaaatgctacatcaggctc

SEQ ID NO: 82320 - DNA, 1516 bp, Homo Sapiens
caaagatgcaaattcttgtttggatttatgctctgcctcttcccagcattttcttatctgtagccctgcttgcttgagagtatacttggataagaagtattgctgttgagggagctataagaaaaggattcttcttccagaagtaaagaactcatctttagagtacctttaaatgaattttgtttttctttcctattttgaggtggattggtcttctcttttttggggtttccagctcactgggactctcagaccttacctttccagctcaaacaccattagttaaattccttcattctcattagaatgcagcctgctgagtatgtgggtttcactgccggagtccatcatttagccagtatacatagaggaactgcttcgaatcaaggcaactggtgaagggcttagcatgttggcagcaatatcccagagattgaatctgtttgcattttcctcatctagcataacagctgcttgaagccagggctcttagccctttgcattccccttgagcgaggaagccacactgcctttctgtgtctggttcagagctcttccttcttggcatgttttctggactacatgcacatgggcagctatagattaatctgcaaaacctagtcacttacctacccataatatctgggaaggtgtggtatttgttttaaagaaacattgtttctttgggagggcagtttctgtctggactttgaggtggacttagttatccctacagttctttaactctcagcttttaataaaagatgaaatcagatattgatgcagttgggtcacaattctttagaatgcttctaccccagggccgcttcctgttcctagtcatggttttccagtttagtagtggagtttcttgaggctaacttacagaaatttctaactgaaaactttaagagttattgatacttgttttttcagtcagtcacttacatcacctagcctactctctggaatttaaatttatttctctaggctggtcctggaagttgataaccttttggcaaagcttagatttaggagaaggcttgagtccctgttcagcgggtctgtggattctctttgcttatggctctctgcctgcagccctggcagaccatactgtatgtcatggatacccagtggaaatattactgagatgaaacacatttccaagggtatttaaactctcactctgccacctttctaagggtgggaggctggcagagatgctgcaatgcttgataatcatttggccacactgaaatttccaaagggagctcttgccggtgcttaaaaccaaaactcctggacacttagaaaattccatgaatctagcaccaaaatatccattcttgcacaagtgtatcccctttctctccagcttatcttgagagaataaactataaaaagccaggccaagggtactttcaagggaaacggggaagagggaaaaaactaacagggagaaaaagagggttggggtaagaacagatatacggagaagtaaaaatgggatcgc

SEQ ID NO: 82321 - DNA, 919 bp, Homo Sapiens
ctattttcacttccagatctgtcagctgccatggaggaataatagaaaaccagaaatgcgtgtagagggagatttctaaaacttcccttgtgtcgcccatagttgtagttttgggttctggcaggtggaacacctgaaacctggaatcattctatgagaatacagttcagactttgcagactccagcccatactaactgtcatgaagcttgacttcttgtcataatgcagccatcttggaggaaattggccatttctgcttagatggttggcagggtcgcgctcagctttgctttctacactaattacatagcattattcaagtattgttttccatttcccatccctgatttccagcttcttaaagctgactgttcttgcaggggccacttgcttctcctagagtaccaaaagtaagggccttccttactaactgcagggtctctctattacacctcaaccatacacactttgctgctactgtttgtactgtctacagtagaatttccttatcttgctcctggtagtgcattacaggcaagcatgaaatgtaaagtatttatttaaataaaaagaaaacctctaaattggtaattgaattacctccctgtagctttatagtttgtgacatttcttgaccttgctagttctttcattagatctgcgcaagatctagtcatctggttaaggattttaagcagatgcaactataaacccaagaaactgtattactattactgttggtcatactaaacctgtctatttcctgaagtatatgacccacaaggatgtggaataactaggagaaactgtttttgtacactgtacatccttagtatttttacacgtatatgatagggatgaacatgattttccttcgtacagacagcttaaataaagcactatgtcaatctgctaaa

SEQ ID NO: 82322 - DNA, 1071 bp, Homo Sapiens
  misc_feature (50)..(50): n is a, c, g, or t
  misc_feature (58)..(144): n is a, c, g, or t
  misc_feature (148)..(148): n is a, c, g, or t
  misc_feature (158)..(570): n is a, c, g, or t
  misc_feature (822)..(844): n is a, c, g, or t
  misc_feature (966)..(982): n is a, c, g, or t
cgcaggtcgaaccgagagccccggaggactatcaggggaacgcttgtatnttatagtnnnnnnnnnnnnnnnnnnnnnnnnnnnnnnnnnnnnnnnnnnnnnnnnnnnnnnnnnnnnnnnnnnnnnnnnnnnnnnnnnnnnnnnacgngtcttgcccnnnnnnnnnnnnnnnnnnnnnnnnnnnnnnnnnnnnnnnnnnnnnnnnnnnnnnnnnnnnnnnnnnnnnnnnnnnnnnnnnnnnnnnnnnnnnnnnnnnnnnnnnnnnnnnnnnnnnnnnnnnnnnnnnnnnnnnnnnnnnnnnnnnnnnnnnnnnnnnnnnnnnnnnnnnnnnnnnnnnnnnnnnnnnnnnnnnnnnnnnnnnnnnnnnnnnnnnnnnnnnnnnnnnnnnnnnnnnnnnnnnnnnnnnnnnnnnnnnnnnnnnnnnnnnnnnnnnnnnnnnnnnnnnnnnnnnnnnnnnnnnnnnnnnnnnnnnnnnnnnnnnnnnnnnnnnnnnnnnnnnnnnnnnnnnnnnnnnnnnnnnnnnnnnnnnnnnnnnnnnnnnnnnnnnnnnnnnnnnnnnnnnnnnnnnnnaagaattcggcacgaggcaggctatgaccaagacatcagggccgctaaatcctcaaacccatctattgcacagaagaattttaaaaccagatccaaatcaaactccagttgcaacgtagtgacaataaggatggacatgccaggaaaggacaataaagaagatgcttccattctctgcaggcttctggaagaaagtacaatgacagaaacattcacaggacctcagcagcccctccatttcctattaccaannnnnnnnnnnnnnnnnnnnnnnatactgaaactgcacagaaagcaacaaacaagtcttttcaatgttacatttcattcaattcaaatagatctgtaatctcacagtgatgagaggaaagagtcaggcctttaataattataatnnnnnnnnnnnnnnnnngcttacaaacagcaatgcaacatttcctccccctcagagtgatggattaacagctggtagaggatgcaatgactcagaattaaaaaata

SEQ ID NO: 82323 - DNA, 1321 bp, Homo Sapiens
  misc_feature (62)..(62): n is a, c, g, or t
  misc_feature (149)..(149): n is a, c, g, or t
  misc_feature (245)..(246): n is a, c, g, or t
ggaatgtgacggaaacaatttacaccagtaaagctgtacttgatacgattaataagactccnatagggatttgccctcgagccaagaatcggaacgaggtatgtagcagtcagagctgatgcccaatgcatctccacaaatacgtgatntctatggagcagacagtgagcaagctgacattgcgaggatgctatataaagacacatgtcatgagctggatgaactgcagctgtgcaagaatgctnntacctgtcaaatgctcgtcctgacaactggtctgtcatccttgtatacataatcatgagctgtctgggctaaaatgaaaggtttgggttttggccagccaaagtcatgcagaaagaagacaatcaagtcgacgttcgcttctttgtccaccaccacccagagggcctggattcgttctgaaaacattcaagatatcacagtcaacattcatcggctgcacgtgaagcgcagtatgggttggaaaaaggcctgtgatgagctggagctgcatcagcgtttcctacgagaagggagattttggaaatctaagaatgaggaccgaggtgaggaagaggcagaatccagtatctcctccaccagtaatgagcagctaaaggtcactcaagaaccaagagcaaagaaaggacgacgtaatcaaagtgtggagcccaaaaaggaagaaccagagcctgaaacagaagcagtaagttctagccaggaaatacccacgatgcctcagcccatcgaaaaagtctccgtgtcaactcagacaaagaagttaagtgcctcttcaccaagaatgctgcatcggagcacccagaccacaaacgacggcgtgtgtcagagcatgtgccatgacaaatacaccaagatcttcaatgacttcaaagaccggatgaagtcggaccacaagcgggagacagagcgtgttgtccgagaagctctggagaagctgcgttctgaaatggaagaagaaaagagacaagctgtaaataaagctgtagccaacatgcagggtgagatggacagaaaatgttaagcaagtaaaggaaaagtgtaaggaggaatttgtagaagaaatcaagaagctggcaacacagcacaagcaactgatttctcagaccaagaagaagcagtgggtaaataccagtcttttttagacccttatttctgaaaatgtaccacaggtatgatgcccgttaattcagaaggtagctgtggcacatgcagaagatgtttctgaaataagatcaaatgtgaaatggtcagctttagttttaaaaattttattaaaagtcctatgatctctcaaaaa

SEQ ID NO: 82324 - DNA, 1991 bp, Homo Sapiens
  misc_feature (1036)..(1036): n is a, c, g, or t
agtaggtagaggccgggggtgaatcggcacgaggtaccagaggtggcgtgctgccgacttcgcgtttgccttgctggatgattccgcttgtttgccggctgcgtgagtgcttagagcttttcggtggaagatgccggacagtaacttcgcagagcgcagcgaggagcaggtgtctggtgctaaagtcatcgctcaggccctgaaaacgcaagatgtggagtacatatttggcatcgtaggcatcccagtgaccgaaatcgccattgctgcccagcagctaggcatcaagtacatcgggatgaggaatgagcaagcggcttgttatgctgcctccgcgattggatatctgacaagcaggccaggagtctgccttgttgtttctggcccaggtctcatccatgccttgggcggtatggcaaatgcaaacatgaactgctggcccttgcttgtgattggtggttcctctgaaagaaaccaagaaacaatgggagctttccaggagtttcctcaggttgaagcttgtagattatataccaagttctctgcccgcccaagcagcatagaagctattccttttgttattgaaaaggcagtgagaagcagtatctatggtcgtccaggtgcttgctatgttgacataccagcagattttgtgaaccttcaggtgaatgtgaattctataaagtacatggaacgctgcatgtcacctcctattagcatggcagaaacctctgctgtgtgcacggcggcttctgttattaggaatgccaaacaaccccttcttatcatcgggaaaggtgctgcttacgctcatgcagaagagagtatcaagaaattggtggagcaatataaactgccatttttgcccacccctatggggaagggtgttgtccctgacaaccatccatactgtgtaggtgcagccagatccagggctttgcaatttgctgatgtaattgtgttatttggtgccagactaaattggattttacattttggactgcctccaagatatcagccagatgtgaagtttatnccaggttgatatctgtgcagaagaattggggaataatgtaaagcccgctgttactttgctaggaaacatacatgctgtcactaagcagcttttagaggaacttgataaaacaccatggcagtatcctccagagagcaagtggtggaaaactctgagagaaaaaatgaagagcaatgaagctgcatccaaggaactagcttctaaaaaatccctgcctatgaattattacacagtattctaccatgttcaagaacaactacctagagactgtttcgtggtaagtgaaggagcaaatactatggacattggacggactgtgcttcagaactaccttcctcgtcacaggcttgatgctggtactttcggaacaatgggagttggtttgggatttgctattgcagctgccgtggtggctaaagatagaagccctgggcaatggatcatctgtgtggaaggagacagtgcatttgggttttctggcatggaggtagaaaccatctgcaggtacaacttgccaatcatactgttggtagtgaataacaatggaatttaccaaggttttgatacagatacttggaaagaaatgttaaaatttcaagatgctactgcagtggtccctccaatgtgtttgctgccaaattcacattatgagcaagtcatgactgcatttggaggcaaagggtattttgtacaaacaccagaagaactccaaaaatccctgaggcagagcctagcagacacaactaaaccttctcttatcaacatcatgattgagccacaagccacacggaaggcccaggattttcattggctgacccgctctaatatgtaaataaagacgccagttggtggtcttgagttttctctttcttgcaagatgaaattttattttccacagcaaaattactctactgttaaaattgtgcaaaataaaataaacatttaaaatgacaaa

SEQ ID NO: 82325 - DNA, 1554 bp, Homo Sapiens
  misc_feature (65)..(99): n is a, c, g, or t
ctatgggcgcaccgctagtagtcgaacgacgagcgcagcgaagtagtgagcgaggaagcggccgnnnnnnnnnnnnnnnnnnnnnnnnnnnnnnnnnnncagtcgacggtaccggacatatgcccgggaattcggccattacggccggggctcagtgggcgtcgcgcgaaggctaagggagtgtggcgggcggctccgggagccaacatgcctcggtatgcgcagctggtcatgggccccgcgggcagcgggaagagcacctactgtgccaccatggtccagcactgtgaagccctcaaccggtctgtccaagttgtaaacctggatccagcagcagaacacttcaactactccgtgatggctgacatccgggaactgatcgaggtggatgatgtaatggaggatgattctctgcgattcggtcccaacggaggattggtattttgcatggagtactttgccaataattttgactggctggagaactgtcttggccatgtagaggacgactatatcctttttgattgtccaggtcagattgagttgtacactcacctgcctgtgatgaaacagctggtccagcagctcgagcagtgggagttccgagtctgtggagtttttcttgttgattctcagttcatggtggagtcattcaagtttatttctggcatcttggcagccctgagtgccatgatctctctagaaattccgcaagtcaacatcatgacaaaaatggatctgctgagtaaaaaagcaaaaaaggaaattgagaaatttttagatccagacatgtattctttattagaagattctacaagtgacttaagaagcaaaaaattcaagaaactgactaaagctatatgtggactgattgatgactacagcatggttcgatttttaccttacgatcagtcagatgaagaaagcatgaacattgtattgcagcatattgattttgccattcaatatggagaagacctagaatttaaagaaccaaaggaacgtgaagatgagtcttcctctatgtttgacgaatattttcaagaatgccaggatgaatgaagagtttactaaaagtaaccatctaaagagcttgtggccaaaccagcagaacattcttctcttcaaaggatgcaatagtagaaagctacttattttaatgaaaaaaagtaaaacttcgttctttatcagcctcatgcctgaatcaaatttttaattattctgaaactgctgctgtttaaagtggaatcttttagtattataacagcatcactttagattttgtaagtcaaaattgaaatgaatgcacatagatttatatataaattagcacctgagctaaggttaaggctggtctaaacttattttcactttttgtattatttttgagatgcaggaattactgtaacaaaatatgtatgtccgaagggaaaaagctgcaaggatatatataagaccactgcttatctgtatcttcccattttcctatattgaaaatgtatattatttatataacttaaaaagtaaaaataactatgttttgagataaaaaaa

SEQ ID NO: 82326 - DNA, 1101 bp, Homo Sapiens
  misc_feature (73)..(93): n is a, c, g, or t
  misc_feature (801)..(801): n is a, c, g, or t
  misc_feature (849)..(967): n is a, c, g, or t
tttaacgacggccagtgccatgccaaaattaaccctcactaaagggaaaaagcttgcggccgcctgctcaggnnnnnnnnnnnnnnnnnnnnnaagaatcaaataataaactttaatttgaatataatacagtagaatataataattattttgaggtacaaaaataattataaaatacttttcccatttgcaagtaatgtatgctatagactataaatagtacactgatgccagaaactgtacatatttcactacatgcctaagtctgggtcttcctctctcctccatcatcacatgtaagaaaaccagctatgcaatactactttgcaatcttgaaactctgttaagacatttcagaagtagctatctttaataaaagaattagatggtacctttctttaaaatagtatgtatgttttttggctcaatcctatagatgaaaaagtttacaaaaattagatttctgccatttttggaatatctgcttttttttcccaaaagacaggaaaatgtcagagagaatctagagtgctgaattcaacacaagctcatttgaaagtaagtctccatcaatggaaaagctttttgactataggcaatttgaaaataatagcaattcactggaagacaaatttcactgccaaaacctgcagacgagttctccctgtcttttctattactgtgtttcctaatattttaagtgaggtaagaattacaagagtgattctaaaaattatagcaggttctacccagatgggacccatctagttcctaagatgctgagagccatttattatttanaaagtaggaacaacatgaggcctcgtgccgcctcgtgccgaattcttnnnnnnnnnnnnnnnnnnnnnnnnnnnnnnnnnnnnnnnnnnnnnnnnnnnnnnnnnnnnnnnnnnnnnnnnnnnnnnnnnnnnnnnnnnnnnnnnnnnnnnnnnnnnnnnnnnnnnnngtgtaaagctggggtgcctatgagtgagctactaaattattgcgttgcgctcatgccgctttcagtcggaaactgtctgcagtgcattatgatcggcacgccgggaaagcgttgctatggggtctcgctccccc

SEQ ID NO: 82327 - DNA, 1003 bp, Homo Sapiens
  misc_feature (86)..(86): n is a, c, g, or t
  misc_feature (90)..(90): n is a, c, g, or t
  misc_feature (97)..(97): n is a, c, g, or t
  misc_feature (100)..(100): n is a, c, g, or t
  misc_feature (106)..(106): n is a, c, g, or t
  misc_feature (117)..(118): n is a, c, g, or t
  misc_feature (171)..(171): n is a, c, g, or t
  misc_feature (175)..(175): n is a, c, g, or t
  misc_feature (184)..(184): n is a, c, g, or t
  misc_feature (221)..(221): n is a, c, g, or t
  misc_feature (231)..(231): n is a, c, g, or t
  misc_feature (240)..(241): n is a, c, g, or t
  misc_feature (249)..(250): n is a, c, g, or t
  misc_feature (261)..(262): n is a, c, g, or t
  misc_feature (311)..(311): n is a, c, g, or t
cttatctccgctcgtatgtgttggaatgtagcggtacaattccacacaggaacagctagacatgatacgaatttatacgactcctnatanggattgnccntcgagnccagaatcgcnnacgaggagagatacaaagtggctcacgcaggtgcccccaaagctgtcatgatnaagnccatgtgangagaggctaggaaacacagcgctgaccttgagcttanggagaggaantcagagccnnctgcaacnntgaagggaccnntgaagaggaccctgtaggaagacagaacactttccctgtagaggagccnaaaggaggaaggacatggtgttccgggcactctgactatagggattttatatgctgtgtcatggagggacagcagtcagacccctcccccatgtcttatccgtagacttgaccacatcgtgatgacggtgaagagcatcaaagacaccaccatgttttattccaagatcctgggcatggaggtcatgacttttaagtaggaagaccggaaagcactgtgttttggagaccagaaatttaacctccacgaggtgggaaaggaatttgaacccaaagccgctcacccagttcctggctccctggacatatgtctgatcacagaggtgcctttggaggaaatgatccagcacctcaaggcttgtgatgtccctattgaggaggggccagtccccagaacaggggcaaaagggcctatcatgtccatctacttccgagaccccgacagaaatctgattgaggtgtccaactacatctcctcgtgatggaggctggacctcctccattctgtcccccttgatgtcgccctctcctttccttcctgcaaacccccacccaggcccaaagatctccaaagactgaggacttaggcacttcacacatcctgctgaggggggacccaagacaggtttgggaccaaacctacatgtctgtatgtcatcaaagttggcctaataaatgcataacctctcaatg

SEQ ID NO: 82328 - DNA, 503 bp, Homo Sapiens
  misc_feature (219)..(228): n is a, c, g, or t
ttagtcatggagggacagcagtcagacccctcccccatgtcttatccgtagacttgaccacatcgtgatgacggtgaagagcatcaaagacaccaccatgttttattccaagatcctgggcatggaggtcatgacttttaaggtaagcacttccccaaatgccaaaattcaggtgggctaaaatttgttgataacactttaacatataacttaactctnnnnnnnnnnccacaggaaatctgagagaaaatataaagagatcaatagaggagattccaaactgaatatttggacttccagagagagaatggagaaaaaagagaggaggaaattatcatagaaacaatgcaagataactttgcagtctctacatggaaaaggttaaccaagtatccagcatgttgacacttaacatggatccttctaaaattatagaacatcaaactgaaaaagtagatcctaagagctttcatagagattaaaaagtagattatctacaaagg

SEQ ID NO: 82329 - DNA, 1236 bp, Homo Sapiens
  misc_feature (77)..(789): n is a, c, g, or t
  misc_feature (807)..(835): n is a, c, g, or t
catgctgctccagtgcgatagtcgttctaccggttgactcagacgatagtaccgataggcccagcgtcggcttaacnnnnnnnnnnnnnnnnnnnnnnnnnnnnnnnnnnnnnnnnnnnnnnnnnnnnnnnnnnnnnnnnnnnnnnnnnnnnnnnnnnnnnnnnnnnnnnnnnnnnnnnnnnnnnnnnnnnnnnnnnnnnnnnnnnnnnnnnnnnnnnnnnnnnnnnnnnnnnnnnnnnnnnnnnnnnnnnnnnnnnnnnnnnnnnnnnnnnnnnnnnnnnnnnnnnnnnnnnnnnnnnnnnnnnnnnnnnnnnnnnnnnnnnnnnnnnnnnnnnnnnnnnnnnnnnnnnnnnnnnnnnnnnnnnnnnnnnnnnnnnnnnnnnnnnnnnnnnnnnnnnnnnnnnnnnnnnnnnnnnnnnnnnnnnnnnnnnnnnnnnnnnnnnnnnnnnnnnnnnnnnnnnnnnnnnnnnnnnnnnnnnnnnnnnnnnnnnnnnnnnnnnnnnnnnnnnnnnnnnnnnnnnnnnnnnnnnnnnnnnnnnnnnnnnnnnnnnnnnnnnnnnnnnnnnnnnnnnnnnnnnnnnnnnnnnnnnnnnnnnnnnnnnnnnnnnnnnnnnnnnnnnnnnnnnnnnnnnnnnnnnnnnnnnnnnnnnnnnnnnnnnnnnnnnnnnnnnnnnnnnnnnnnnnnnnnnnnnnnnnnnnnnnnnnnnnnnnnnnnnnnnnnnnnnnnnnnnnnnnnnnnnnnnnnnnnnnnnnnnnnnnnnnnnnnnnnnnnnnnnnnnnnnnnnnnnnaagaattcggcacgaggnnnnnnnnnnnnnnnnnnnnnnnnnnnnncagaaagaaagaagtcaaattttatttgtttgtagatgacatgaccttctgtgaagaaaatcacaaagagtcagccaaaatgcaactggaactaacaaacacattcagtttatttgcagaatagaataacagcaccaaaaattagttgaatttccatacattaacaataaataattttaaaagaaaattaaaaaccaattccatttgctaaagaacttaaagtaagaaatatttaggaataaacataaaaagtgaggtttgtaccttgaaatctataaacattgatcaaaatgattaaaaacatgtataaatagatataaatcccatactgattggaaaaatgaatatcgctcaatgattatatacccaattgtgatttagattcggtacaatactcatcc

SEQ ID NO: 82330 - DNA, 625 bp, Homo Sapiens
  misc_feature (159)..(193): n is a, c, g, or t
  misc_feature (277)..(285): n is a, c, g, or t
  misc_feature (322)..(330): n is a, c, g, or t
  misc_feature (409)..(417): n is a, c, g, or t
tttaatcactagtctgtgctttgcgaacagaatcaagacattaacaaagatcagcttctctgaagaaaagcatttctatagaacaaagacagctacatgtttcgctgccattacacagctccaaagcaggaaaagaaaatatttacaaaatacaagggnnnnnnnnnnnnnnnnnnnnnnnnnnnnnnnnnnncaaggcaaaaagggttattcaaaattttcaaccttataaatagaagaagcactttatgcatagggatagggggcattattgtannnnnnnnnaaagaaacaatgacaaaccctttaacttgcaaacagnnnnnnnnntcactaatgttgaaaattgggaaaaaaccccaaccattaagcagttgtctactatttttatacgattacaaaatggccnnnnnnnnngagtcttctcccccctccccctttttggggatgtgatcatacaggagacaggcacaaggttaacagagaagggtgaagggggaacaatgggaaccacagctaggaccagacaatgttccacaggcaaggggagcgtgaaagaccaagagtggaactaacaccgacagggatctggatgtgaaggaaacatggcaaaataaatcagagg

SEQ ID NO: 82331 - DNA, 871 bp, Homo Sapiens
tttgaggattgcagacctgtggactggttaccccatctccaccctctcccctgttcctctgtctggctccctccagggcaaggaaaacctagggtccttggtcttgggggtggggggaccttttccagcatattcccctgggcctttagttaacatccgagtgacgaagccgggttccccagtacagtgtcttttgggtgcggtcattgtgaggaaggggatgagtgagtgtgggtgtggctggaggaggagctagatgccggtggacagtgggcaggtggatttggggaggagaggatcagcagcagcagcagtactcagtgatagggggctggctgggtcaggaatggtgagatgaacatgcaagtggaagagagaatagttgaaaatgtgaatgaaagtagctctggagcctctcccttaccccaccccacacacacgcaacagctctgtacccctgcccagaacttggaacctcccaggaatgctgccttccttcagcccagcctccagtcctgggttccctcaggaattcgaagaccttggctaggtggtgagcttggaagagctgggctttgttttctgtctcctctaacctctttccttactccttatcccatcccatttgagttcaggggtgaggcttaagatcttaataaataataccttactgcttaatctgtggcttgacctgtgagtagtagccttagaatcagccttctgggagctcagcttcagagtttacaagggagcagtttctgggcccaccctagcagcctggtactttggacaaccaaacagatgaacgaacgggacacagcagtgctatgaaagttactgtaagcctgaaataaactgtatttttcttaaa

SEQ ID NO: 82332 - DNA, 1685 bp, Homo Sapiens
  misc_feature (161)..(680): n is a, c, g, or t
  misc_feature (714)..(724): n is a, c, g, or t
gtttccgtagccacgtcggtagggggtctcccaacccactgacgacgcctaaccgagtgagaccacgctagtgtggagcccacgttccgagggagaggcgacagttcgttagcgcaggtcggacagagagccacgaggagctccaggggaacgcctgttcnnnnnnnnnnnnnnnnnnnnnnnnnnnnnnnnnnnnnnnnnnnnnnnnnnnnnnnnnnnnnnnnnnnnnnnnnnnnnnnnnnnnnnnnnnnnnnnnnnnnnnnnnnnnnnnnnnnnnnnnnnnnnnnnnnnnnnnnnnnnnnnnnnnnnnnnnnnnnnnnnnnnnnnnnnnnnnnnnnnnnnnnnnnnnnnnnnnnnnnnnnnnnnnnnnnnnnnnnnnnnnnnnnnnnnnnnnnnnnnnnnnnnnnnnnnnnnnnnnnnnnnnnnnnnnnnnnnnnnnnnnnnnnnnnnnnnnnnnnnnnnnnnnnnnnnnnnnnnnnnnnnnnnnnnnnnnnnnnnnnnnnnnnnnnnnnnnnnnnnnnnnnnnnnnnnnnnnnnnnnnnnnnnnnnnnnnnnnnnnnnnnnnnnnnnnnnnnnnnnnnnnnnnnnnnnnnnnnnnnnnnnnnnnnnnnnnnnnnnnnnnnnnnnnnnnnnnnnnnnnnnnnnnnnnnnnnnnnnnnnnnnnnnnnnnnnnnnnnnnnaagaattcggcacgaggggccgcggctgtaggcnnnnnnnnnnngctttccttgaagtcagctttggaccacaataatttcactgtagatgatatgctaggatcaaagttaaacagcattcttcactgcaggacatctcagagcatgtaacataactgcatgattatatactctaagcaatagagagccttcaggactgagtaagagttttgaaggtcagaagtgaatcaagtgcccacagatttgcaggcttaagcagaacaagggaagattgatatttttggatatgctatagcagctttctcctatgaaataaaactgatgatgtttggaagtatactactctcaaaggtgtctttaaagtacaggttaatggtgaacattttcccccagtggcttcacctcattcctcccactggccttaccccttccttccccagtggaagcattttcaaaagcaaagataattttcgctggtgaacttcagaacttgccttcagggttagcttcatgtaattttaccatttcccatccccattccccaccacattatgtcaagattcaagttataaattaacgttttacttagactttgaaagagatttcatgagtaatttgaatgaaccttgctgaattaatctgaatagcaactgtctgacttgataactccagtgccagtatagtggctgctgcatagacactattcagtaaatgtctgatgaaagaaatggactttttccctttaatactgatgatgcaattttgaaatgttgcttgttctggaatacttcggaagttaaacaataaagtcagcttggagaggagatcatgatctttatactgtgaatagcagaatgtcacagatgaagaatattaaaattaggggcgtccactccaaaacatatcaccagagtgacaacttcagccctcagcctctgcaatccatatatatcctggtcttgggagtccatagaatactgtttccttctaataaaggtttcaaac

SEQ ID NO: 82333 - DNA, 1762 bp, Homo Sapiens
  misc_feature (226)..(226): n is a, c, g, or t
  misc_feature (756)..(769): n is a, c, g, or t
  misc_feature (1178)..(1249): n is a, c, g, or t
  misc_feature (1405)..(1429): n is a, c, g, or t
  misc_feature (1553)..(1565): n is a, c, g, or t
cactgacgctgtttattgcgtgttgtcccctgcaccccgtcgtataattgactgctgcacgttccatctaagagtattcaattgcgagacgaatagtggccaatacttccactcagtgtatcacagtctagcgacagtgtgagatgatctggatgagatcacccacagttagatcgaggaggatggatgtgcacacacaaagtcttggacaactgaacctgatatntaaggacatgaaccaactatagggaaactcagaaaatgtattaagaagagagaccatgaatttggcatcccagatgagagcacaggttctctagtagattagcagctacacaagatctgccttttattcatcagtcttctgaattaggtgacttagatacctggcaggaaaataccaatgcatgggaagaagaagaagatgcagcctggcaagcagaagaagttctgagacagcagaaactagcagacagagaaaagagagcagccgaacaacaaaggaagaaaatggaaaaggaagcacaacggctaatgaagaaggaacaaaacaaaattggtgtgaaactttcataacacatgttcaaattttatcatgccagtaggagaaatctcagctccacaacccaagcaacatttgtatggatttaagagtattttaagaagacatactgcttgattttaatacattgatcaggccatccaggacaccacgattctcccaaagtaccttgaactcttagtgattgagactcnnnnnnnnnnnnnngacttgagacaatgttttcttcaacatgctccaaatataagacatttgtttgctgtacagaaagtatcacaaatggaatatatcagtacctctcaagctagtgtttctagctaaataaatgggtgtatataattttatggtggaaaagaactgtactgtctgttatgatttccttcaatgtgcataatgataaaataaataattttaatattcttttgtttccatggttacctgacctaaattagataaattgtagggctttagctttcttatttttgtcaaaagttggtgttgacatacattccctctaatttgaactggtattgtttacgtttgatacaacattaaggaatttgatgattttcatttcatgaaaatgacattaaatgcaataattttacttatcctnnnnnnnnnnnnnnnnnnnnnnnnnnnnnnnnnnnnnnnnnnnnnnnnnnnnnnnnnnnnnnnnnnnnnnnntaaacacaaaaatttgtcggcccgccttcggcccccaaaaaattttccaaaacatttcgtttgggcgggccgggccacataaggcaaaggtgcccctgggcccttaccgcgttcccaaggaaaaccctgggaattgtgacaaggggctttgaattnnnnnnnnnnnnnnnnnnnnnnnnngcgggccaaacccgaagggcctgtgaaacaaaacccaaattgggagtctcttaaggcccctttccttggatccttttcaccccgggaattccaaaaagcgaggctccctatccccaaattatannnnnnnnnnnnnttggaccacttttttccaagagaacgtggtttgatattctccttttagcgtctcctccccccgaaactgtggtaaaccccctccccaccaacagggtacatggacgcaaaccctgaaaattcgcccaagcggacttttcacacacccctttggctcaccccctgtccggcattaaaataactccggccgccgttggg

SEQ ID NO: 82334 - DNA, 1058 bp, Homo Sapiens
  misc_feature (150)..(150): n is a, c, g, or t
  misc_feature (175)..(175): n is a, c, g, or t
  misc_feature (209)..(209): n is a, c, g, or t
  misc_feature (234)..(234): n is a, c, g, or t
  misc_feature (238)..(238): n is a, c, g, or t
  misc_feature (240)..(240): n is a, c, g, or t
  misc_feature (244)..(245): n is a, c, g, or t
  misc_feature (247)..(251): n is a, c, g, or t
  misc_feature (253)..(279): n is a, c, g, or t
  misc_feature (284)..(284): n is a, c, g, or t
  misc_feature (337)..(337): n is a, c, g, or t
  misc_feature (348)..(348): n is a, c, g, or t
  misc_feature (426)..(426): n is a, c, g, or t
  misc_feature (462)..(462): n is a, c, g, or t
  misc_feature (500)..(500): n is a, c, g, or t
ccgaagttgctgtggattatgctccttggatgctgggcagatcgcaggggttttcctgaagaatggaggatactgcgagagtcagtgcggggcaacttgcgaccccaggccatttacatttgacccgcaaacttccttgccttgtccgtntcagcgtcctttgggtccacacttnggagccgccctccctgagttttgagagagcggtnaccacttcccccccggggtcccccnttcntncacnncnnnnntnnnnnnnnnnnnnnnnnnnnnnnnnnnaaaanccccccttccacccgaacctacgccacctgggaaggaggttgacttgtacatnccacccctctncacggctgagaactttgccccgagcgaggaagcgaccggcccacggccacacgcccggagtgggtaaatatctactcnatgggattgctgggctgtatgggggcagcatctttntactatgtgcatctacattggatggcagtggagcaacnacagattgttttctgacaaaaatcagccaagtactaggagaggcaggactttagaagtggaggagatggagaaggaagcttaggttactatggagtgtgcaaaaaggtcctgtggatttagataccaccacacacaaatggtatgtaatactcacttgaagacaaatcagccagagggatctaacagcattgacccattctctggtcttctagcatccatcatagttttgtgctccttttccatgaaacacagctgttgttggaaggtacctgcccagataaggactgcatttcctctagcatccagatgggaccaaatgactgctggccaatagaagtgagtggaaaggactgactccagttccaggttgggcctccaactgctctgggcacgtcgatggaacagaacaccacctccaccccaataccaccaattcaactttacatgaattataagcgagaaataacttggactgtgttaagtcattgagtttctggggtttaactgttattatagttaagaatgactttaactaatatagtcaatgacatctaaaa

SEQ ID NO: 82335 - DNA, 1326 bp, Homo Sapiens
  misc_feature (935)..(935): n is a, c, g, or t
  misc_feature (984)..(1187): n is a, c, g, or t
  misc_feature (1232)..(1232): n is a, c, g, or t
gggacataattgggcaatttatctctcacatttgagaactgaccatatagataactacaacactaatagctaatgttaattggtttcttattatatgggtgacaccattctaagcatgacttgtattgattgatgtaacccttcctacaactctaagcagtacatactattatcatgcccaatttcccagatgaggaaaatgagaaacagagaggttaggcaacttgcccaaagccagacagctagaaaatggtggtgggggagtaacaacctaggcaccgtggctccagttcatgcatccaaccacacactatgctgcctccccaaccacgcactggttgttatggacaaagataccgaacaaacacccacaatacaaaacaaaaaagtcctacaagttttggggaggtacaaaatatattacttttataccacatagagttttcggactagtttgtacagaggtgcatttggtttgggtcccattatttcccccaagatgaactggctgtgtctcttaataaaaaagcagaaaaaagatgtggaaattctttaaacacgtcacaccttgcaagttccctttcatttattagatccagacacctgaggtggcaacgcttgctttgtgtgtatctagagttccttttggtggggaacaggcaggcgagtcacctgagtgatttgagtaactgtaactaaggctgggttgactgcgtgtttgcctttatcgtgcctatcagaacgttgacagtgcgtgtacctccctggtgatgtgcggctcacttgctctttcaggacctacctgacttggaagatgatgatgaaacaggcaaatctctggaagaccaggttaaggtcattagaaaccattttcccacaggcagcttaattccaccttcgttcttgtcgtttaccgtttctctcctaaacttganagtaaaatgttccctgtgcataaaaaaacctcgtgccgaatttcttggnnnnnnnnnnnnnnnnnnnnnnnnnnnnnnnnnnnnnnnnnnnnnnnnnnnnnnnnnnnnnnnnnnnnnnnnnnnnnnnnnnnnnnnnnnnnnnnnnnnnnnnnnnnnnnnnnnnnnnnnnnnnnnnnnnnnnnnnnnnnnnnnnnnnnnnnnnnnnnnnnnnnnnnnnnnnnnnnnnnnnnnnnnnnnnnnnnnnnnnnnnnnagctgcattatgaatcggcacgcgcgggagaggcgtttgctatgngcgctctcgcttctcctcatgatcgctggctcgtcgtcggtgcggaacgtacactcataaagcgtatacgtatcaagatcaggatagcagaaga

SEQ ID NO: 82336 - DNA, 497 bp, Homo Sapiens
ctcccatggtgcgccagctgctagtcaagatgagaatctcattcaaacagtcaaaaacccgacttaaagtagctcagacacgcatagaagggattggctgctgttgtggactctccgagggtggctcccatctgcaggcactgttggaaccagtacccaaggatgatgtcccagcatctgtctctccgggatctcacctttgtaccctgccctcactggctgcgtctcatatctgcttccctctgtgtggcttcctgttggtggcagggtgaggcccccaggacagcaggcagcctcagcctcaccctttcccagtactgagacccagaatctcactgcggactccttgagacaatcccagggaaggctttgattggcttagcttgaggcatcactgctcatccctggaccattcagaacctcggtggtgctccctgattgaccacctggtttagtgccgcttctgtgctggaggtaggagccatgtgaggaagtcc

SEQ ID NO: 82337 - DNA, 916 bp, Homo Sapiens
  misc_feature (410)..(420): n is a, c, g, or t
caattttcctggctaggtatggggagaactcttaaagcataacatatgtgcaacagtgcctgcatgtaatagtcctaagtgtgtggacttgtcactgacaagtgttcggccagcattgtgcaccttgtgtggcgcgtctggtgccgtgtttttatgtcactgtaaataatactacccagtacgttatcttgggagggcttctcatcctgagaatttaattgtacggtatagtgctggattaggacagagataatcttggcttctccctcttctcacctctaaatatggcccttaaaaaaagcaagcattttaaaaggcatatattttctcatttattgtatggatatatggtaacatttccttctttccatactctgaagtagaacaaaggcaacatgctcagaactttnnnnnnnnnnngatgtgttaatggcattcagagatgcagttatttgccctaagaataggtagagctctgaaaaatgtcttgtggtttgaattttactgaaaaattggaaggatagcatcactactgtgaacttttctatttggtattattttgacttcaaaagctctgaattttgagattaagtatacaaattcttaaaggataaaaatttaaaggagatctccatgtatcatcaagagcttatacatcacttagatatggccaagattataatattttggaaggtgtattctcaaacatgagtgtttgtggagggatatggggaaatattggatattttcccataatcagcaaactttttctgtaaaaggtcaggtagtaaatatttccatctctttagatcatacatagggtctctcacattcaactctgtgattgtagtgctaaaatagccatagacaatatgtaaattgtagataaggctgttccagtaaaactttatttaaa

SEQ ID NO: 82338 - DNA, 1414 bp, Homo Sapiens
  misc_feature (220)..(220): n is a, c, g, or t
  misc_feature (270)..(270): n is a, c, g, or t
  misc_feature (279)..(279): n is a, c, g, or t
  misc_feature (400)..(400): n is a, c, g, or t
  misc_feature (887)..(929): n is a, c, g, or t
  misc_feature (1095)..(1103): n is a, c, g, or t
  misc_feature (1113)..(1122): n is a, c, g, or t
  misc_feature (1140)..(1203): n is a, c, g, or t
ctatgtgatgctcatcatagcacccgctttcattttctccgctgtatgtgttgaatgtggcgataacatttcacacggaacagtatgactgataggattatacgactccttagggatttgccctcgagccaggaatcggcacgagtcactctcgtctccttcccaccccgagtaaaggggcgaataagagaagatggtgtgctcaccgcggtcctcctgntgctggccgcctatgcggggccgccccagagcttggggtccttcgtgcantgcgagccntgcgacgagaaagccctctccatgtgccccccccagccccgtgggctgcgagctggtcaaggagccgggctgcggctgctgcatgacctgcgccctggccgaggggcagtcgtgcggcgtntacaccgagcgctgcgcccaggggctgcgctgcctcccccggcaggacgaggagaagccgctgcacgccctgctgcacggccgcggggtttgcctcaacgaaaagagctaccgcgagcaagtcaagatcgagagagactcccgtgagcacgaggagcccaccacctctgagatggccgaggagacctactcccccaagatcttccggcccaaacacacccgcatctccgagctgaaggctgaagcagtgaagaaggaccgcagaaagaagctgacccagtccaagtttgtcgggggagccgagaacactgcccaattgtgaccgcaaaggattctacaagagaaagcagtgcaaaccttcccgtggccgcaagcgtggcatctgctggtgcgtggacaagtacgggatgaagctgccaggcatggggtacgttgacggggactttcagtgccacaccttcgacagcagcaacgttgagtgatgcgtnnnnnnnnnnnnnnnnnnnnnnnnnnnnnnnnnnnnnnnnnnngactccagccagcgcctccctccaccccaggacgccactcatttcatctcatttaagggaaaaatatatatctatctatttgaggaaactgaggacctcggaatctctagcaagggctcaacttcgaaaatggcaacaacagagatgcaaaaagctaaaaagacannnnnnnnntttaaatggnnnnnnnnnngaggcaagttggatgaannnnnnnnnnnnnnnnnnnnnnnnnnnnnnnnnnnnnnnnnnnnnnnnnnnnnnnnnnnnnnnngagaaagacgaatagagttaggaaaaggaagacaagcaggtgggcaggaaggacatgcaccgagaccaggcaggggcccaactttcacgtccagccctggcctggggtcgggagaggtgggcgctagaagatgcagcccaggatgtggcaatcaatgacactattggggtttccaggatggattggtcagggggagaaagggaaaggcaaa

SEQ ID NO: 82339 - DNA, 1622 bp, Homo Sapiens
  misc_feature (833)..(841): n is a, c, g, or t
  misc_feature (851)..(860): n is a, c, g, or t
  misc_feature (879)..(924): n is a, c, g, or t
  misc_feature (1547)..(1556): n is a, c, g, or t
aaatcttaggctaggtagcgaggctgggtggcgaattcggcacgaggcggcaggacgaggagaagccgctgcacgccctgctgcacggccgcggggttgcctcaacgaaaagagctaccgcgagcaagtcaagatcgagagagactcccgtgagcacgaggagcccaccacctctgagatggccgaggagacctactcccccaagatcttccggcccaaacacacccgcatctccgagctgaaggctgaagcagtgaagaaggaccgcagaaagaagctgacccagtccaagtttgtcgggggagccgagaacactgcccacccccggatcatctctgcacctgagatgagacaggagtctgagcagggcccctgccgcagacacatggaggcttccctgcaggagctcaaagccagcccacgcatggtgccccgtgctgtgtacctgcccaattgtgaccgcaaaggattctacaagagaaagcagtgcaaaccttcccgtggccgcaagcgtggcatctgctggtgcgtggacaagtacgggatgaagctgccaggcatggagtacgttgacggggactttcagtgccacaccttcgacagcagcaacgttgagtgatgcgtccccccccaaccttttccctcaccccctcccacccccagccccgactccagccagcgcctccctccaccccaggacgccactcatttcatctcatttaagggaaaaatatatatctatctatttgaggaaactgaggacctcggaatctctagcaagggctcaacttcgaaaatggcaacaacagagatgcaaaaagctaaaaagacannnnnnnnntttaaatggnnnnnnnnnngaggcaagttggatgaacnnnnnnnnnnnnnnnnnnnnnnnnnnnnnnnnnnnnnnnnnnnnnntgtttgtgtagaagagagagaaagacgaatagagttaggaaaaggaagacaagcaggtgggcaggaaggacatgcaccgagaccaggcaggggcccaactttcacgtccagccctggcctggggtcgggagaggtgggcgctagaagatgcagcccaggatgtggcaatcaatgacactattggggtttcccaggatggattggtcagggggagaaaggaaaaggcaaaacactccaggacctctcccggatctgtctcctcctctagccagcagtatggacagctggacccctgaacttcctctcctcttacctgggcagagtgttgtctctccccaaatttataaaaactaaaatgcattccattcctctgaaagcaaaacaaattcataattgagtgatattaaatagagaggttttcggaagcagatctgtgaatatgaaatacatgtgcatatttcattccccaggcagacattttttagaaatcaatacatgccccaatattggaaagacttgttcttccacggtgactacagtacatgctgaagcgtgccgtttcagccctcatttaattcaatttgtaagtagcgcagcagcctctgtgggggaggataggctgnnnnnnnnnngtgggctcgtatttatctacaagactccatatagtcatatataggcatataaatctattctttttc

SEQ ID NO: 82340 - DNA, 693 bp, Homo Sapiens
aggcatccccttacacgttgctgctgtcgaaggtgtggcactgaaagtccccgtcaacgtactccatgcctggcagcttcatcccgtacttgtccacgcaccagcagatgccacgcttgcggccacgggaaggtttgcactgctttctcttgtagaatcctttgcggtcacaattgggcaggtacacagcacggggcaccatgcgtgggctggctttgagctcctgcagggaagcctccatgtgtctgcggcaggggccctgctcagactcctgtctcatctcaggtgcagagatgatccgggggtgggcagtgttctcggctcccccgacaaacttggactgggtcagcttctttctgcggtccttcttcactgcttcagccttcagctcggagatgcgggtgtgtttgggccggaagatcttgggggagtaggtctcctcggccatctcagaggtggtgggctcctcgtgctcacgggagtctctctcgatcttgacttgctcgcggtagctcttttcgttgaggcaaaccccgcggccgtgcagcagggcgtgcagcggcttctcctcgtcctgccgggggaggcagcgcagcccctgggcgcagcgctcggtgtagacgccgcacgactgcccctcggccagggcgcaggtcatgcagcagccgcagcccggctccttgaccagctcgc

SEQ ID NO: 82341 - DNA, 1024 bp, Homo Sapiens
  misc_feature (61)..(61): n is a, c, g, or t
  misc_feature (172)..(172): n is a, c, g, or t
  misc_feature (191)..(191): n is a, c, g, or t
  misc_feature (245)..(245): n is a, c, g, or t
  misc_feature (300)..(300): n is a, c, g, or t
cattgctcgctgttttggatgtacgaaacatccccagaacgtgactgtcgattatcgctcnttagaatgcctgagccagatcgcagagagtatcagcgtgatttctctccacatttagtgtgtgtgatcagagtgctgattctatctagctatgtgattttcagattagttnggacagatagagccatgtntcttcctatcagtgctggctgttcttgaatcctctgtccagaccacccagaccntgactttgagatcaggaaacacccagaaagcctaatgacctcatagcactctccnaaaagacaacagaactggaatgagaggcctgggtctgtctcctgccttagcaggcctatcaatttcttgtcaatctctttttttccttgctcacattaaaaggaagcatggagttctaatgctcccataaactatgtattttggcaagacacttcactactccaggtctcactttccccatctgtaaaacagggtttggactaggtgttccctggtattctgtgatctgcctcttgctgccattctttctctcctctgcttctctgtatttttcttctgttatccctgggggtgctcaggttcacttgattgtctgtatttctgtgtggttgtagcaaggactcagcctcatgtagcacgaataggggtgtggttcatggcgtgttgacccagcagagcactccctcccactaacttgttctgcatgtgtagagtctccccattttttttaacgcaaccctttcccctttttcctaccccacagctctgttccatgtaagttgccaacagtttcactgaacagtggggtatgtgatggttttggcatgacatcttcagtatgagggggacagtttgacttcactttgagggtgtgatgtctgtagctatgtggaaggtaaaaatagtggtgtgatcatgaaccaaaggaatttatgttttgtaacttgggtactttattttgcattttgttatactattaaataattttttcctgttaaaaaaa

SEQ ID NO: 82342 - DNA, 505 bp, Homo Sapiens
ttttattaaccagtttcaggtacctatacgtgtatttttggacctatcctcattgccctatatacctttaagcaagccagtggaactcttaagactagatttaatgactccgtatttgaacacctctaacagagaagtaaaggtatacgtttgtaaatctggaagactgactgctattccattttggtatcatatgtaccttgatgaagagattaggttggatacttcaagtgaagcctcccactggaaacaagctgcagttgttttagataatcccatccaggttgaaatgggagaggaacttgtactcagcattcagcatcacaaaagcaatgtcagcatcacagtaaagcaatgaagagcagttttccaatgaaaactgtgtaaatagagcatcaacaagtacaaaattcttgtcttaattagtgggggtatataaaaattccttgtaatggtcaaatattttttaaaattgacattaataaagcatattttaaaagattct

SEQ ID NO: 82343 - DNA, 945 bp, Homo Sapiens
  misc_feature (35)..(35): n is a, c, g, or t
  misc_feature (69)..(69): n is a, c, g, or t
  misc_feature (274)..(274): n is a, c, g, or t
cgcaaaaattgggcaggtgacatattcatgccatntgtctctcttgacataccggccatgattccagtntgagatgcattcctgtgatacgcgtgtaagcaccagtgccgtccgatcgcagagtatttacccagactctcactctgtcatgtcagtcccagggcatgattgggatgtgggcacccatctggccagagcaccaagcgtgcgtgacctgtgagagttttcccgatgcagctgtgcagactgctgcccccccgagaacacgcctgcncaccgtgagcggatctccgcatggccgcgcttccgcgaacagcccctgctctttgagctgttaaagctggtagcagctgcaccccaagccctgtgctactgttccgtgctgcttcggaggctgctggcagccctcttgggccattgggaagcctctcgccaccctgacacgacccactccccctggcacctggaggcatcctgcaccttagtggctgtcatggctgagggaagcctcctgcctccggccctgggtaatatgcatgaagtatttagccaactggcacctttcgaggtgcgtctgctgctgctcagtgtctggggttttctccgggagcatgggcccttgcctcagaagttcatcttccaatcagagcggggtcgcttcattcgggacttctccagggagggtggaggtgagggtggaccccatctggctgtgctgcacagtgtcctccaccgcaacatcgaccgcctaggtcttttctctggccgtttccaggcaccttcaccgtccactctccttcgacaggggacgtagccttttcttgctctggaagcccagggaggttgagcagtgagagagggaagggactaacgtgctccggaagggtggaggtttctcttctaagtccttggtctaaagagcgctgtcacttttttctctcccgc

SEQ ID NO: 82344 - DNA, 1096 bp, Homo Sapiens
aggtatgtctataacagttttcaaaaagcaggctgtacggtcggaatcccgggatatcgtcgacccacgcgtcgcgggtccggcctgagtcgcggccacccgcaggtctgagctgtgggctgaggcagcgcagccgctgccgcagggtgcgcgatgccttgaacctgggaaactatgtgaagcaacactctggattttgaaagacatcttttcatcatgggacagcaaatttcggatcagacacagttggttattaacaagttaccagaaaaagtagcaaaacatgttacgttggttcgagagagtggctccttaacttatgaagaatttctcgggagagtagctgagcttaatgatgtaacggctaaagtggcttctggccaggaaaaacatcttctctttgaggtacaacctgggtctgattcctctgctttttggaaagtggttgtacgggtggtctgtaccaagattaacaaaagcagtggcattgtggaggcatcacggatcatgaatttataccagtttattcaactttataaagatatcacaagtcaagcagcaggagtattggcacagagctccacctctgaagaacctgatgaaaactcatcctctgtaacatcttgtcaggctagtctttggatgggaagggtgaagcagctgaccgatgaggaggagtgttgtatctgtatggatgggcgggctgacctcatcctgccttgtgctcacagcttttgtcagaagtgtattgataaatggagtgatcgacacaggaattgccctatttgtcgcctacagatgactggagcaaatgaatcttgggtggtatcagatgcacccactgaagatgatatggctaactatattcttaacatggctgatgaggcaggccagccccacaggccatgaccttgaagtgaaagtcttctgttgctattgtgggctcaaatatttggtcatgggggaagaatgtagggttgtggcactggcacagacacaggaaaatccattttccccactcttttatttttgctattctgatcatttgtcccccttttaaaaataaacttcccatgtcttccatttgtggtactaa

SEQ ID NO: 82345 - DNA, 141 bp, Homo Sapiens
caatgtaaacactaaaaacaaaatggccaaaaaaacacacaaaggttttatgaacagcagactctatgtaaaggcattttagtatcaaattttttattgataacttgcttaagaataaatatatggactattgtaaaaaaa

SEQ ID NO: 82346 - DNA, 665 bp, Homo Sapiens
  misc_feature (562)..(595): n is a, c, g, or t
aaataacttttgactttatttcactagagataaaaccagcagcatcacagcttgagccccttacccactcttctctctccttctctcggcgttcccgctccttcatgcggatcttgcgggccatggctcgaagctcgtcttcccgctcctggccgctcatgctcctgctgtgggcgagaagctgaaaaagaccgaacctgccgctggtaaagagacaggagctgccaaagtcacccaagctgacgcctcaggagaagctgaaactgaggatgcagaaggcgctgaacaggcagttcaaggcggataagaaggcggcacaagaaaagatgatccagcaggagcatgagcggcaggagcgggaagacgagcttcgagccatggcccgcaagatccgcatgaaggagcgggaacgccgagagaaggagagagaagagtgggaacgccagtacagccggcagagccgctcaccctccccccgatacagtcgagaatacagctcttctcgaaggcgctcaaggtcccgatcccgaagcccccattaccgacattaggcagaagagtnnnnnnnnnnnnnnnnnnnnnnnnnnnnnnnnnnctcaagctgtgatgctgctggttttatctctagtgaaataaagtcaaaagttatttaattcccaaaaaaa

SEQ ID NO: 82347 - DNA, 613 bp, Homo Sapiens
cgaggacaagtccaggaagcgtgtttaattggcgtgacatggacgacatacagcaggagcttggggaggctggggcatgctacacggcccctgtccacccctgggcctcgccctgaccctggcgccagagacacacaccggcaggttcagacaggacggcaccccaaaaagagactcaaagggggctggggaggcaagcaggaaaggaaataaccacaaccagaagacattgccttttgtttgtttgtttttgcaagcattataccaatttctcccccaagtggcaggctccgggtgggaggcagcagcagtccaaaccgctactcttgggcaccgtcctccacttctgtgaggggctttgatgatgacactcacatttgggtctcaccaggcccctgcaaggcaggcccagcaaagactcttgctcccatccaaaggatggggaaattgagacccaatgagcagaactgacttgcgcaaagtcctgaaggaagccagccaccgagtcaggctgggagtgaggtgggcctccctggggccgggagccactgcaggaacagggacaacagggaatgtgcagactggggagggcgactcggggctacccatcctg

SEQ ID NO: 82348 - DNA, 968 bp, Homo Sapiens
  misc_feature (167)..(176): n is a, c, g, or t
  misc_feature (879)..(922): n is a, c, g, or t
aatttctgcccagttacaacaacgaaatgggaaaccacaattaaaattcacaaaccatggcatgaaaaacaacacgcaccccatcaggaattacaccaaaccccttttcctttttattcattcaaaagagagtccaatacacaagtgtcaaatatgagcactgtcannnnnnnnnncttagaagggggaaaaacatttattttggcagtgctttgacaatttcaggaagtggttttgataccacaagttgcaggaatagaaaccctaacaaacttggagggcatttgtttgagaggcaagggacgccttgcttagaaaacattcctcttgtgcttagtgaatcacctatcgcctcagtgggctgctgtgtctttccaggtgctgaaagagaaaacggaatttcttgcatagacagctgaagagtcctgtagagcagagtgatttttgtatctccaaccctcctcccaacttgaaacaaattctcaagcttctctggagcatcttttggtcacatgaccctcgatcatggtaacccttttgctaagacacatgtgacaccaaggtttcctctgacactgcttctctagggttcagatgacagcataaaacatcactggtcaaaaatattagatattaagaatgtgggcgtttatgttcgtaacagcaaatactttgtagggtgtgtcacccaaaggagcatttttgtcatttaatatggtccccggggagttagcccaaaatcatacaaataagcctttttctaaagacaggtcaaagttggttaatttaacagttgaggaaccgtctcatgccaattaaaaaattcttacttcccaactattcaatggtccaaaaagcaattaaatgtgaccagttttnnnnnnnnnnnnnnnnnnnnnnnnnnnnnnnnnnnnnnnnnnnngagaactgtgacaaaaggattcaccagattaatcttgtgactgtgt

SEQ ID NO: 82349 - DNA, 1864 bp, Homo Sapiens
  misc_feature (1010)..(1027): n is a, c, g, or t
  misc_feature (1059)..(1815): n is a, c, g, or t
gggttcctctgatgatgaaagtgaaaagcaagtactactgaagtctggaaatataaaagctgtgcttggcctgacaaagaggaggctagttagtagcagtgggaccctttctgatcaacaagtagaagtcatgacgtttgcagaagatggaggaggcaaagaaaaccaatttttgatgccccctgaggagactatactaacttttgctgaggtccaagggatgcaagaagctctgcttggtactactattatgaacaacattgttatttggaatttaaaaactggtcaactcctgaaaaagatgcacattgatgattcttaccaagcttcagtctgtcacaaagcctattctgaaatggggcttctctttattgtcctgagtcatccctgtgccaaagagagtgagtcgttgcgaagccctgtgtttcagctcattgtgattaaccctaagacgactctcagcgtgggtgtgatgctgtactgtcttcctccagggcaggctggcaggttcctggaaggtgacgtgaaagatcactgtgcagcagcaatcttgacttctggaacaattgccatttgggacttacttctcggtcagtgtactgccctcctcccacctgtctctgaccaacattggtcttttgtgaaatggtcgggtacagactctcatttgctggctggacaaaaagatggaaatatatttgtataccactattcataagttagggtaaagtgaaaacacaattttctggatatattgggcctcttagtattttttggagttttaaatataaaggagaatatctgaatgacacttaaaatgattgcttgtttatgtccagacagacttattttttattctaatgatggtagcaccactgatcttggatgtacatttatgtatactttgagaaaaagggttttaggttgatttttgtaatttcccacatttgtacatgtgcttttaaaggtgtacataaagcttcaaatggcaataaatatttatttttatnnnnnnnnnnnnnnnnnngcctacagccgcggcctcgtgccgaattcttnnnnnnnnnnnnnnnnnnnnnnnnnnnnnnnnnnnnnnnnnnnnnnnnnnnnnnnnnnnnnnnnnnnnnnnnnnnnnnnnnnnnnnnnnnnnnnnnnnnnnnnnnnnnnnnnnnnnnnnnnnnnnnnnnnnnnnnnnnnnnnnnnnnnnnnnnnnnnnnnnnnnnnnnnnnnnnnnnnnnnnnnnnnnnnnnnnnnnnnnnnnnnnnnnnnnnnnnnnnnnnnnnnnnnnnnnnnnnnnnnnnnnnnnnnnnnnnnnnnnnnnnnnnnnnnnnnnnnnnnnnnnnnnnnnnnnnnnnnnnnnnnnnnnnnnnnnnnnnnnnnnnnnnnnnnnnnnnnnnnnnnnnnnnnnnnnnnnnnnnnnnnnnnnnnnnnnnnnnnnnnnnnnnnnnnnnnnnnnnnnnnnnnnnnnnnnnnnnnnnnnnnnnnnnnnnnnnnnnnnnnnnnnnnnnnnnnnnnnnnnnnnnnnnnnnnnnnnnnnnnnnnnnnnnnnnnnnnnnnnnnnnnnnnnnnnnnnnnnnnnnnnnnnnnnnnnnnnnnnnnnnnnnnnnnnnnnnnnnnnnnnnnnnnnnnnnnnnnnnnnnnnnnnnnnnnnnnnnnnnnnnnnnnnnnnnnnnnnnnnnnnnnnnnnnnnnnnnnnnnnnnnnnnnnnnnnnnnnnnnnnnnnnnnnnnnnnnnnnnnnnnnnnnnnnnnnnnnnnnnnnnnnnnnnnnnnnnnnnnnnnnnnnnnnnnnnnnnnnnnnnnnnnnnnnnnnnnnngagtccaccgggtagaacgactatcgcactggcacagcactggtacaga

SEQ ID NO: 82350 - DNA, 520 bp, Homo Sapiens
  misc_feature (384)..(384): n is a, c, g, or t
  misc_feature (428)..(428): n is a, c, g, or t
  misc_feature (466)..(466): n is a, c, g, or t
  misc_feature (472)..(472): n is a, c, g, or t
  misc_feature (496)..(496): n is a, c, g, or t
ctctgcaaaggggcaattattcctggataaggcaagataattgtggtcacaagagaagcagccaaatgcagatctgttgagctaacagggggagtgtctcagtcagtctttcccagctttgcaatcagctcatcacagatttttgtcagttcttcaatttcttggttctgaaagacaaatgacataattatgcaggccactttgtattctgaaataaaggcaaatagagttaactagtcccaagtctggatctaccctaccctagacatcctaattcagtgatttttaacttttctacatcagagatgctttaaagaaaaaaaggctacacacctcaaaaaatgtactcataaaatcatgcttaaattgagtaaagggtgaggncagtcaccagccctctgaaacttgtcccatggaatctcttaggntccccaattttcttgttatcagagggattactgggggnacttgnccaaaaacataggatctgggggcncactcaatccttggcatatctggg

SEQ ID NO: 82351 - DNA, 580 bp, Homo Sapiens
ctagttaagggaactgaagctcagagaggtgtcaccagcaggtgttcattcccatgccagccttgccccccggcttttcccaggcaggctcctgcgtgcccactggctccagcctggtcctctgtctcttggctgcttcactcctgctctttgtcccgactctggccctgcttacaggggccactacctgctggtgcctccataacaagcgtctggcgttgagacccctggcatggcaggggctttggggtctggtttccacaaggcttagccatggcagaacctcgttttattttaactctttgcccctacaaacaaacagcagtacttgccagaaccattcttgggattcaggagctcgggcgactgccttggcctctggccgcacccaggagggtggggttggatctgtgtagttgccaggcccacacctgccagcagggggctgactggatccatgctttactgtgtttaatgggggtaacaggggtccctacagccctcccagctaaacatttggaacaaaacaccagcccttttgtagtggatgcagaataaaattgttaatccaatcacctcc

SEQ ID NO: 82352 - DNA, 632 bp, Homo Sapiens
  misc_feature (220)..(229): n is a, c, g, or t
attagtatttttccagcttatgttttcccatgagctattttactttgctgaattttgtgggtaatttggtggatatatcctgccttatttaggattatagctggataagaaaattgccttttcattgtaagtgcccagttttggtctctagtttgaaggtactacatactgccgataaaggaaaacactcccctacaccccagtttttgtgttaccaagnnnnnnnnnncagtattggtttcatagtaggactcaaccagaattggtcctacatatatgtgagtgttcagtttttgcaaataaggtttttgagtgtgataaaacactacagaagtgctaagtgtattgagaatttgctgctgattgtatttataacaattacttgacgtttgcagaaatttagcactttccctccaaatttataggtgtaagagaagcgggggcaaggtgcaccacattttaaaactgcaaatgtgtgaaaatttatttagagattcagattcctaaaaggaaatttcaccacccaagtcatgcacttcttagccttttacaagccaacagactgacatgaagattgttcacagttcctaagatttagcacatatacaaaaataaaactttataaattcaaa

SEQ ID NO: 82353 - DNA, 700 bp, Homo Sapiens
cagcccaggaggaaccagcctctgccttaccaggccatcaatccctgaagccagggatctgccctgccagacacgggcatgtgtgtgtgtgtttcaggcttatcatccttgcattgctgggggtttcgcaacacggggaacgttgctggtctggctgaggtttctgtcgtgccacccctcctgccctgcttatggagctactgtatgtgtcagggccgtttgcatcctgttactagtcagtctatcttaatgcactttaagaaactcttccctttccttgcacgtgctttgcgtatactagttccccataaagaatgtcactgcctgaaacagaacattctgtgaaatgcagggctgttggattcacatgttaaattgtttcatctcaatcacgagggttgtgtaggatccagggaagatttatcccggggggtcaagagatatcgatgccctcccagaaggagttgccagcccactgacaagggtggttctgccctcttgcctggcactggatctcaagtatttaagaagaaaagaatggaatacaaagaagttagaagcgctttggggcagattttccagcaagactggggtttgtctgcccctagggccactacactggtagtgtgcattgcaaatcatggtgggagaaaggtaccatttgatttaacatatcacttttccacctttacctaactac

SEQ ID NO: 82354 - DNA, 500 bp, Homo Sapiens
acggttagcgagagagggatcacggggagaggcgaaggggcggagcgagggcggccggaaaaggagcaggacccgcgcctggagaaggacaatatatgaagagcttagtgaagtttgattggaactgaaaaacatcagtatgaaagcatcaagtggataaatctcagaaacataatctctagaggaacaagcaaatcacagagaaatacctacagtgtgattccattgatataaagtcaaaggcagggaaaaccaacagtatcttgtgtaggaatatggacatctctgataaaacaatgaagaacaagtgaataattatcacaaaattcagcataatggtgaccacctctagaggaggacagaagagggtagcattggagccttctcttacgttggatagcacattcatgtatgttaattttactactcttctttagagctaacatatattttataaatatcattttttatctgtcttatatttaataaaaacacatttt

SEQ ID NO: 82355 - DNA, 1171 bp, Homo Sapiens
  misc_feature (88)..(88): n is a, c, g, or t
ccgctgaagcggcagtggcgcacgcaataatggagtagtcactctttgcaccccagctgtcattatggtccggctcgttgtgttgganttggccgatacaattcacacagaaccagttagacatgatacgacttaatccgaccactataggaattggccctcgagccaagaatcgccacgagggtcatacttgcattaattagacgaaacggggagtaatgatgacacgaggtacttatgtttatttcttagtgagctggattatcctgaacctgtgctattaaatggaaatttccatacatcttccccatactattttttataaaagagcctattcaatagctcagaggttgaactctggttaaacaagataatatgttattaataaaaatagaagaagaaagaataaagcttagtcctgtgtctttaaaaattaaaaattttacttgattcccatctatgggctttagacctattactgggtggagtcttaaagttataattgttcaatatgttttttgaacagtgtgctaaatcaatagcaaacccactgccatattagttattctgaatatactaaaaaaatccagctagattgcagtttaataattaaactgtacatactgtgcatataatgaatttttatcttatgtaaattatttttagaacacaagttgggaaatgtggcttctgttcatttcgtttaattaaagctacctcctaaactatagtggctgccagtagcagactgttaaattgtggtttatatactttttgcattgtaaatagtctttgttgtacattgtcagtgtaataaaaacagaatctttgtatatcaaaatcatgtagtttgtataaaatgtgggaaggatttatttacagtgtgttgtaattttgtaaggccaactatttacaagttttaaaaattgctatcatgtatatttacacatctgataaatattaaatcataacttggtaagaaactcctaattaaaaggttttttccaaaattcaggttattgaaaatttttcatttttattcctttaaaaaactagaataaccggatattttaaaagtgtttaatcttttgtggctaatatgggaatggaaatacactaattggacctccggtgtttttggaatttatttaaagggttcctaacaaaaggc

SEQ ID NO: 82356 - DNA, 1105 bp, Homo Sapiens
  misc_feature (1074)..(1074): n is a, c, g, or t
cgtatgtgaagacctacctgttgcccgacagatcctcccagggaaagcgcaagactggagtccaaaggaacaccgtggacccgacctttcaggagaccttgaagtatcaggtggcccctgcccagctggtgacccggcagctgcaggtctcggtgtggcatctgggcacgctggcccggagagtgtttcttggagaagtgatcatttctctggccacgtgggactttgaagacagcacaacacagtccttccgctcggcatccgctccgggccaaggcggagaaatacgaagacagcgttcctcagagtaatggagagctcacagtccgggctaagctggttctcccttcacggcccagaaaactccaagaggctcaagaagggacagatcagccatcacttcatggtcaactttgtttggtagtgctaggagccaagaatttacctgtgcggccagatggcaccttgaactcatttgttaagggctgtctcactctgccagaccaacaaaaactgagactgaagtcgccagacctgagcaagcaggcttgcccccagtggaaacactcatttgtcttcagtggcgtaaccccagctcagctgaggcagtcgagcttggagttaactgtctgggatcaggccctctttggaatgaacgaccgcttgcttggaggaaccagacttggttcaaagggagacacagctgttggcggggatgcatgctcacaatcgaagctccagtggcagaaagtcctttccagccccaatctatggacagacatgactcttgtcctgcactgacatgaaggcctcaaggttccaggttgcagcaggcgtgaggcactgtgcgtctgcagaggggctacgaaccaggtgcagggtcccagctggagacccctttgaccttgagcagtctccatctgcggccctgtcccatggcttaaccgcctattggtatctgtgtatatttacgttaaacacaattatgttacctaagcctctggtgggttatctcctctttgagatgtagaaaatggccagattttaataaacgttgttacccatgtctacganaccaaaaatccagcccccaagcgatacctgt

SEQ ID NO: 82357 - DNA, 867 bp, Homo Sapiens
  misc_feature (799)..(800): n is a, c, g, or t
gggatcggcgctttgccacttgtacccgagtttttgattctcaacatgtccgagactgctcctgccgctcccgctgccgcgcctcctgcggagaaggcccctgtaaagaagaaggcggccaaaaaggctgggggtacgcctcgtaaggcgtccggtcccccggtgtcagagctcatcaccaaggctgtggccgcctctaaagagcgtagcggagtttctctggctgctctgaaaaaagcgttggctgccgccggctatgatgtggagaaaaacaacagccgtatcaaacttggtctcaagagcctggtgagcaagggcactctggtgcaaacgaaaggcaccggtgcttctggctcctttaaactcaacaagaaggcagcctccggggaagccaagcccaaggttaaaaaggcgggcggaaccaaacctaagaagccagttggggcagccaagaagcccaagaaggcggctggcggcgcaactccgaagaagagcgctaagaaaacaccgaagaaagcgaagaagccggccgcggccactgtaaacaagaaagtggctaagagcccaaagaaagccaaggttgcgaagcccaagaaagctgccaaaagtgctgctaaggctgggaagccgaaagccgctaagcccaagggttgtcaaccctaagaaggcggcgccccaagaaagaaaataggcgaacgcctaacttctaaaaaccaaaaagctctttttcagaaccaccactggatctcaataaaaaaagctggaataatttccttcttggagcgggaccatcaaaaannaactaacattggccgcccgcccttcgggccctcgagagagtctttttctaaaccatttcgtgttggg

SEQ ID NO: 82358 - DNA, 851 bp, Homo Sapiens
  misc_feature (771)..(790): n is a, c, g, or t
  misc_feature (792)..(794): n is a, c, g, or t
ggggcttcatcggcgctttgccacttgtacccgagtttttgattctcaacatgtccgagactgctcctgccgctcccgctgccgcgcctcctgcggagaaggcccctgtaaagaagaaggcggccaaaaaggctgggggtacgcctcgtaaggcgtccggtcccccggtgtcagagctcatcaccaaggctgtggccgcctctaaagagcgtagcggagtttctctggctgctctgaaaaaagcgttggctgccgccggctatgatgtggagaaaaacaacagccgtatcaaacttggtctcaagagcctggtgagcaagggcactctggtgcaaacgaaaggcaccggtgcttctggctcctttaaactcaacaagaaggcagcctccggggaagccaagcccaaggttaaaaaggcgggcggaaccaaacctaagaagccagttggggcagccaagaagcccaagaaggcggctggcggcgcaactccgaagaagagcgctaagaaaacaccgaagaaagcgaagaagccggccgcggccactgtaaccaagaaagtggctaagagcccaaagaaggccaaggttgcgaagcccaagaaagctgccaaaagtgctgctaaggctgtgaagccgaaggccgctaagcccaaggttgtcaagcctaagaaggcggcgcccaagaagaaataggcgaacgcctacttctaaaacccaaaaggctcttttcagagccaccactgatctcaataaaagagctggataatttccnnnnnnnnnnnnnnnnnnnnannnaaaacatgtcggcccgcctcgggccctcaagaaagcttttctagaccatttccggtt

SEQ ID NO: 82359 - DNA, 1060 bp, Homo Sapiens
  misc_feature (273)..(344): n is a, c, g, or t
  misc_feature (963)..(997): n is a, c, g, or t
ggcttgcgccatgaaatgtcttccggattcctggttgtgtaacgttacgccttaataggtaaccgtccgcaccgacacgagcgcgcagtcatgacgagaacgaaaggcgccattagcgaacccatctcccggcgttgccgatcataatgcagatgcaagacagtttcagactgaagcgggcagtgaggcaacgcattaattgaagtagtacactcattagcaccacaggctttacactttatgctaccgactagtatcttgttagaaatgtgnnnnnnnnnnnnnnnnnnnnnnnnnnnnnnnnnnnnnnnnnnnnnnnnnnnnnnnnnnnnnnnnnnnnnnnntggccgtcgaggccaagaattcggcacgagagagaatgtcacaaccacatgattgggattgggccagtcttaaatatctacccatggaataaagagctgtatttgatcaggtacaacaactatgaccgggctgtcatcaataccgttccttatgatgtcgtccatcgctggtatacagcacaccggactctaacgatagagttgaggagacctgagaatgagttttgggtcaaactaaagcctggcagggtgggtcctaatctctaaagatgtcaagcaagcttgtaatactgaagcagtgaagaacgggtacttacttaatatgtgagtcacgatgttgcaaaggaaaaagagaaaagagtccttggttttgtttatggtcctgccgcccactcactgaatgctctggaagcaagcctcatcccatctctaaggcatcagtgactctatttgtatgatgaaggggtttaactagatgacccccaagggtccttccagcttcatgattccatagtttttatttttggtatttcctctggatgaaaaataccttcagcttagcataaaatgtcatgagataatttaaccctttgagaaagggtagaataagaattaaagnnnnnnnnnnnnnnnnnnnnnnnnnnnnnnnnnnngcatacagccgcggccgcaagctttttccctttagtgaggttaattcgagcatggcactggcc

SEQ ID NO: 82360 - DNA, 1108 bp, Homo Sapiens
  misc_feature (60)..(78): n is a, c, g, or t
gtgccaatgctcaaattaaccctcactacaagggaataagcttgcggccgctgctcaggnnnnnnnnnnnnnnnnnnngaaagttggttttattaggtgttccctaatttttaccgtaataggtcatctcagcttatatgaaagtcaagtggggaactgggaaagccaaagtcagtcttgagcagagggagcacattttgtggacctggttccacctttccattccaaaccacctgtttccccttccattagcagaaactctgggggaactttgtgtctcagtcctagaatctccccaagtgagtggaagtgacatgatgcagtcttcctcatggggcacctgaaagaaattagtgtgggtgcttcgatctaccttgtctgtcagagttgaatatctctttccctatcatgctgcttctgaaaattcagttttggagcaagtcctgtgagcaagataagaatctatagaaccaagatgctcattttcagaagaaatatgttcaacctgggatcagacttccatgctctggggaatccaagtggtagcacctgtaaccctgtgtactaagtgctttgaagagaagagcaggcctcagacaccttttaattgcttaggagaaaccattatctctgactgcaggtttgaataagttgaagaccagagaaaagtacacactgggctacaaaggaatttggagatagccaaggaacaggatttcccctagcaagctaccttctgttcaaatcatgaaaaaagactatttccccttagaatagggaagcttgctattttaaagctcttgtagtgcttttcttttaagggagatgtagtaaaagggaaaatgtagctcttagtttacacttcaaagatctgggggtctttcagagaactaagaataaccgttttatgtgccgagagagtttgccagatctgaagcatatacctcattgactaggctgttactttgggataggttgcagtaccagccacagccagcagatagaggaaaagacacacataaactcgcttctgagcgtccacttctgcactctctgctctgctgttacatcaagcctgggagtttacaccatgatacctagtaccctc

SEQ ID NO: 82361 - DNA, 1804 bp, Homo Sapiens
  misc_feature (84)..(84): n is a, c, g, or t
  misc_feature (114)..(114): n is a, c, g, or t
  misc_feature (116)..(116): n is a, c, g, or t
  misc_feature (153)..(153): n is a, c, g, or t
  misc_feature (159)..(159): n is a, c, g, or t
  misc_feature (197)..(197): n is a, c, g, or t
  misc_feature (205)..(205): n is a, c, g, or t
  misc_feature (215)..(215): n is a, c, g, or t
  misc_feature (371)..(371): n is a, c, g, or t
  misc_feature (1450)..(1467): n is a, c, g, or t
  misc_feature (1490)..(1661): n is a, c, g, or t
atgctgagcagatcgagagcatagccctctgaccgaccgtgaggttggatgtttgtgtcagacagaccccgttagatggcattnacagagaagtgtgctcctttcttcttctcntnttccttaagccacagatcagtcatccaaagcttctgntgtacntgagacattgaggggaatgcgatggatatagactctcnccatctcnggcctgaccntgacccttccaccaacccaaagacagctgtgggtttccccttggagacaatcctgcgtttgcctgggccggccctggctgccctcagctttcgctgatctgcccggcctggagcctcccatcaccccgcttcttgttgggcctcaggcactggtanccagaaggggtctgggtctgctcaggatcatgttttgtagcacctcctgggttggaggggtggagggatgttcccctgagccaggctgagaactagaaccccatcttccctgagccaggctgagactagaaccccatcttccccaccacgccacccctgtggctgctacaggagcacagtagtgaaggcctgagctccaggtttgaaagacccaactggagcgtggggcgggcaggcaggggttagtgaaaggacacttccagggttaggacagagcatttagccttctggaagaacccctgcctggggtgggactgtgcaggccagagaaggtggcatgggcctgaacccacctggactgacttctgcactgaagccacagatggagggtaggctggtgggtgggggtggttcgttctctagccggggcagacacccagctggctgggtccttcctcagccttgcctcctcctgtccccaaccctttcctttcctcctgcttgcggactgctggtcccctctccttccctccttccagctgtttctagttaccacctacccctggccgtggactgatcagaccagcattcaaaataaaagtttgttccaagttgacaggtgtggtgctccctgcccagcccctccaggtggaggtgctgccacgggaacgcagttgctctgcctgccctggggcccctggcgacagctgggaagcaggggcagtgctgtgaggagcccagcttacccagtcaggcaggcatggctttccgtgtccaagctccctcaccagctggtgacacgggaacaagcttacaaaccttctctgaacctcagttttctcatttacaagaggcaaagccatccatcaccttgtgtggattcagagaatgtgaggccctggggtgtcctacacaagggaaaggcttgctcagtgagcggtctgcacaccgttagccaccctgccacctctgtgccctgggcaggctccaaaggaaagctctggctgggactgccaggagtctcacacgctcctgttgacattcccagcagccgcccctgaggtcgatgtttgttctgnnnnnnnnnnnnnnnnnngagacggagtctcgctgtgttgnnnnnnnnnnnnnnnnnnnnnnnnnnnnnnnnnnnnnnnnnnnnnnnnnnnnnnnnnnnnnnnnnnnnnnnnnnnnnnnnnnnnnnnnnnnnnnnnnnnnnnnnnnnnnnnnnnnnnnnnnnnnnnnnnnnnnnnnnnnnnnnnnnnnnnnnnnnnnnnnnnnnnnnnnnnntgatctcctgactcatgattcaccgctcagctccaagtggcgggttcggttgaccacgacgggctgttctattttctgttagggactgggtcgggggttcccgggtttccttgcgtgccccgtttccggggcccgggccggcc

SEQ ID NO: 82362 - DNA, 620 bp, Homo Sapiens
  misc_feature (509)..(521): n is a, c, g, or t
  misc_feature (539)..(557): n is a, c, g, or t
accttattgttcagagaacgttgttctgtggtgttggaaaaataagctcaggagtactcagctgctttcctctgctgtctctaccagctctgagcaggcagcatggccagccaccttgattatatgacctccaagcttcacagactttcaaggtagatgatattgttgaaatctttgattcagtaagctcacctaacctgcccaaagcaagggtgactaagttattgtcaaactgagtcacttgtgagaataaaaggccgtgctattctatttatgccagcacaaacagcataaaccaggactgttccagacccagcaagcaggaagtataggcagccttcctccggtcaaagagttcgcaggtggtgctgaacgactccagaacgtgaactgccctacagcaggcatcttctacagtcaagctgaggtctcctggaggttacaagcacctgtaaaagtgatttgccaacatcttgtccaaataatttctctcatctttatttttattnnnnnnnnnnnnncagtcaccaccaaccacnnnnnnnnnnnnnnnnnnngcatacagccgcggccgcaagctttttccctttagtgagggtaattcggcatggcactggccg

SEQ ID NO: 82363 - DNA, 1070 bp, Homo Sapiens
  misc_feature (37)..(37): n is a, c, g, or t
  misc_feature (68)..(91): n is a, c, g, or t
cggccaagtgccattctcgaaattaaccctcactaanagggaaaaagcttgcggccgcctgctcaggnnnnnnnnnnnnnnnnnnnnnnnnagcaaatagaccattttaatcagttttattgattcatgcttccagttcttattcagttaaaaacaaggcacattaaatacatcctcttattgctctataaatgcatgcagctcattctgtgtatcaaaagtaataaataatggccataaaacaccaagacagttataaaaatgacaacccagcctcaaacatagtatttaacagtccagtctagaacaataacccaacatgatacataaaagtgccacatatgaaaacatgcggtgtgtatatccactctagcactgagcttacacttgctatttaaaaacatagtagggctttttcactccttcaaaaaggttgacatgatgcaaacatcgcaagttatagcatcattgactttaatattacattcatatgccaaaaatctttacagatacataagagaaaaataacatcaatgatgactcctacagtatatttagtaaaagtgagaatgagttttttgttgtacaaaagaggaagctacatattttgaaacagacaaagcatagccagaaactgaagcatgatacagagcatgcatttaatagcagaaatcctaaagttacactcagtataaattgattgaaagcaataatattgccacagtatgatggatagcaggcagacatccttggcttaccaataatccagcattatcattattgttatgactgtggtgggggctatttaaggagtatctactctctagcaaaatgggggttccttcactgaatctcttcattgctttggaaaaatcacttgataatataggaatcctggataccacccgagccaacaaatcattgaggtcaggttaatcgtagggaaaaattctttgggttgcatgatttgatagtctcggcaattctggctgatggtaatctctaagtggcgttaatccgaccagctattgttctgtggaatttaccgcccatccaaaaagtagcgagta

SEQ ID NO: 82364 - DNA, 993 bp, Homo Sapiens
  misc_feature (765)..(765): n is a, c, g, or t
  misc_feature (777)..(778): n is a, c, g, or t
  misc_feature (827)..(827): n is a, c, g, or t
  misc_feature (846)..(846): n is a, c, g, or t
  misc_feature (923)..(923): n is a, c, g, or t
gaagagtatttaatgtcgttttattgctctcaaagcatacagagcacttccaattactccaagaaataggaaataaaaaatatgactctaagtagaatttgcattaggtttaactttataggcatgggtgatttatacttagtagcctgaataaaatatgctcatatgcctcaaaataacaagtcagtctactccaaatttgatcagtttcaaacacataagggaagataatataatgttttgctattagtccatgtaacccaatgctcccattggtcaagaaatgttctctgacttttctttttactcagactgttgtcaaaccaatgataactatatacttcttaactccagtattgctaacataaaactaacactgtgtgttccatatacgcagatgtttgtgtgtttgtttggctagagacaaagcttctctggagtaaaaatgttagttatacatctagacacatagtggaataaaagttttagtttatacatctagacacatataccacattacactgattattttacttacgtaaaagacaagtaggtagaaatgaccccacacgaatacacttgcacaagtccctgagacatcacttcacaccaatacaccagagacagacccagatggatatccccagtaggctaggggagaaggttgatgagaggccggataacttggcagataaaagcatatgaataggtgggggatagagggatagagcatgtgaaagaggagacaagtgacacagcaagcangcggtttagtannttactatatttgatctctgggcctcagaagtgtgtttccttaatcattngctcatctcctctcagttntaagagactgcctctgagaagaagagagacaaagggacagtgtcaagagaggtcaagagattgaaactgggaaatangtaatcagcatctctccctctctcacaaacacacagtagtggaagacagctgtctgaatctgaacggaaa

SEQ ID NO: 82365 - DNA, 1000 bp, Homo Sapiens
  misc_feature (102)..(102): n is a, c, g, or t
  misc_feature (118)..(119): n is a, c, g, or t
  misc_feature (170)..(170): n is a, c, g, or t
  misc_feature (173)..(173): n is a, c, g, or t
  misc_feature (212)..(212): n is a, c, g, or t
  misc_feature (220)..(220): n is a, c, g, or t
  misc_feature (234)..(234): n is a, c, g, or t
  misc_feature (275)..(275): n is a, c, g, or t
  misc_feature (284)..(284): n is a, c, g, or t
gatgcagagctaacattgctgatgttttgatagtgatagttatctctccttaaagctgatcaaatattaaagcgtgttgttcgactcaccattaaacggatntaagcgtattacaganntgaagcacattgtgatcttattttacactcagttctaatcatgatcgtgcntcncacagacccttccctatacatacttgagtgtgtgtagtntcttcagncagtattctctgcntagagagggaagagaaatgtgtctccaggactgatcccctntgtagattntgtacctgaagagttacctggcagggcaccacccttggctaggcccaggtgtatgtttctttcttgcctggcatggaccccgaggcaggtgatgtggggcctggcgcacctcccagctttggcagctgtggcctccctggccagtgcccttgcaggaggccggccggcagcctgatgacccgcactctttagtcactgacgtcagattatttttataacgttccctgacagttcagagtcccttcgaattgcacttttctggtttcgcttatttaattaaaagagatgagtgtaagtataaaaaatgaaggtgaaataaccattggaattgtatttggttacttaatactgttccacaacatcttgggacgtctgttttcctttggagagtgaggccttgttattattcttttctgataaagaaaacattttatttcctttgggcttgcattagctctttcctagcaacccattatcccagctcagtacctttcaaacagaaaactagagtctggggttttgttgtgatctgaatttgtaagttattaatgtgaaagggggagcaggaagctccccctttgcacaaagggggatttgtttgcacaaagttcactgtaaatactgtgagaattgaattctgaaaaggtcatatttagtgatttcaaaagcacacacttacaatgaagactgactaaataaaaggtaccacacaaaaa

SEQ ID NO: 82366 - DNA, 1077 bp, Homo Sapiens
  misc_feature (996)..(1014): n is a, c, g, or t
gtccgccataacgcattccaccatcgcataatatccaaataagagaacagatccccattgggaatggccgacaacaacacacgccggcgcaggatcaataaagaaaccgaaaaccccatcgccaacacctcccagccccgtgccggtaatagtgcagtgccagaccaagtccgacgtgaaaagggcgtgagggcaaccaaatagttgagtcacacactcatgggacccaccagccaaacaacttttgataccagctcgtatgctgtatgaaatgtgaacgcaaaaaatctcacacaagaaaccaggtatgacatgattgcgaatttaatagcactcactgtagggaatttggccctcgggaccaagaattcggcacgaggtatgcccaagctggagagaaagaggctgcaggtggagcaagcgcccccacagtagccccggggccaaactggtgaagctggcagacaagctgtacaatctgagggacctgaatcgctgcaccccagagggatggtcagaacatcgagtccaggaatacttcgagtgggcagcgcaggtggtgaaggggcttcagggaacaaaccggcaactggaagaggctctaaagcatctgttcaagcagcgggggctgacaatctgatcagtgcttgaagctatccagaggcacaactccagcctcgttcaggccggacaggattcatacgccatcttttctgtgtctcctgagctccctccatccttcccagatattagaggccaaaaaaagacttgcattttttctcagtctgaaggtctcctgctaactaagctgagccccgcgtggtgggaatcagatgtacccatccatttctgatgcactcaccgcctctccccaagtcttgggtctgtttgctattttgcatggtgggatctctggcccctcagggacttgagattatttaagtactagttcctaacacgttctggaaaataaaaataactctgggttaaggtttnnnnnnnnnnnnnnnnnnngcatacagccgcggccgcaagcttattccctttagtgagggttattcgagcatggcactggcc

SEQ ID NO: 82367 - DNA, 552 bp, Homo Sapiens
agacttggggagaggcggtgagtgcatcagaaatggatgggtacatctgattcccaccacgcggggctcagcttagttagcaggagaccttcagactgagaaaaaatgcaagtctttttttggcctctaatatctgggaaggatggagggagctcaggagacacagaaaagatggcgtatgaatcctgtccggcctgaacgaggctggagttgtgcctctggatagcttcaagcactgatcagattgtcagcccccgctgcttgaacagatgctttagagcctcttccagttgccggtttgttccctgaagccccttcaccacctgcgctgcccactcgaagtattcctggactcgatgttctgaccatcctgcataagagtcgacagaaacttgctagcgtgatgtcaaggaaagcactgccttttccccacttcctggcaagcttggttcaaggccatgagttcctgatgcaatgagctgtcctgaaaacttccccttggcccagctattgtatttttactgtatgaaagaagaaaaaagagtgaaaaaa

SEQ ID NO: 82368 - DNA, 881 bp, Homo Sapiens
  misc_feature (215)..(215): n is a, c, g, or t
  misc_feature (777)..(777): n is a, c, g, or t
ggggatgggctctgaggcggcgcagctgctggaggctgccgacttcgtggctcgcaagcaccggcagcagcggcggaaggaccccgagtggaccccctacatcaaccaccccatcggtgtggcacggatcctgacccacgaggcgggaatcactgacattgtggtgttacaggcggccctgctccatgacacggtggaggacacagacaccaccnctgaatgaggtggagctacacttgggggcacaagtgcggcgcctggtggaggaggtaacagatgacaagactctgcccaagctggagagaaagaggctgcaggtggagcaagcgccccacagtagccccggggccaaactggtgaagctggcagacaagctgtacaatctgagggacctgaatcgctgcaccccagagggatggtcagaacatcgagtccaggaatacttcgagtgggcagcgcaggtggtgaaggggcttcagggaacaaaccggcaactggaagaggctctaaagcatctgttcaagcagcgggggctgacaatctgatcagtgcttgaagctatccagaggcacaactccagcctcgttcaggccggacaggattcatacgccatcttttctgtgtctcctgagctccctccatccttcccagatattagaggccaaaaaaagacttgcatttttttctccgcctgaaggtctcctgcctacctaacctgagcccccccgtggggggaatccaaaggtaccccatccactttctgatggcactcaccgncctctccccaaaggcctggggcctgttttgctattttgcatggaggggattcctgggcccctcaaggaaatgggaaatattttaaggacctacttccctacccg

SEQ ID NO: 82369 - DNA, 987 bp, Homo Sapiens
  misc_feature (191)..(210): n is a, c, g, or t
gtccgatgacggcgtggccaccatagttggtgtcatcatagccccagctacactatctccgctcttgttgtgaattgacgatacaattcacacagaacaggttgactgatacgaattatacgatcacttaggaattgccctcgagccagaatcggcacgaggggtttcctaaatatcactttctttcagtnnnnnnnnnnnnnnnnnnnngcccagcatggttgactgatagacacgcataattatatgaatataaattcccatgttgttctgttcctaaaccagagtacggggtccctgagaatttaagtagctacgcattatctattattagactgcaagttcctgcaataactgcttagttcacagccccgtttcaccagtggagttctgggcagttattgctgtcctaaggcattactgtcgtttgcttactctatacttgtgtggtcacagtcttcttgtaattaccatctacaccagcatttcaggtatagctctttataactctggagacatgtaaaacatgtttaacacccacgagttttgaaagttgcattccttattagagtaggaactctctagcccaactccattctatgttctcagctccctccaccccccaaaatacatcagactagcaaggcagtcctatgtttacaaaacgagtttagattgtcatttcattccataactcttaataatactcaagttttatacattcacgtattttaaatgctcggtctgtagaagacactaggagaattgcattccaattactggatggttgctgctctggctttttagaacttgaaattaatttttatttagagcaaaggaggaaatcttttaagaggctaaaatcatgctgctattattgctgtgaaattgtataaagattaggattcatgccagtttttattttaaaaaataatgtgcattttaagggtttatatttagaaaaaaataaaatgtttcaagaacaac

SEQ ID NO: 82370 - DNA, 970 bp, Homo Sapiens
  misc_feature (44)..(44): n is a, c, g, or t
  misc_feature (217)..(526): n is a, c, g, or t
cgctaagagttgcacacctaacactgagccacaacatttgatanctcgtcgggaggagcggcctattgaaaaacatccagcaacggcggcattataacaggtcctggcctaatgctgcccttttctcaccctatctgtgcaggcagtatcccgtgattagttggtaacaggtataccacactttgggtgagatgtaaccactcactgcaaccgaaannnnnnnnnnnnnnnnnnnnnnnnnnnnnnnnnnnnnnnnnnnnnnnnnnnnnnnnnnnnnnnnnnnnnnnnnnnnnnnnnnnnnnnnnnnnnnnnnnnnnnnnnnnnnnnnnnnnnnnnnnnnnnnnnnnnnnnnnnnnnnnnnnnnnnnnnnnnnnnnnnnnnnnnnnnnnnnnnnnnnnnnnnnnnnnnnnnnnnnnnnnnnnnnnnnnnnnnnnnnnnnnnnnnnnnnnnnnnnnnnnnnnnnnnnnnnnnnnnnnnnnnnnnnnnnnnnnnnnnnnnnnnnnnnnnnnnnnnnnnnnnnnnnnnnaataattcggcacgaggggtgatggacagaagtgggatgagcttattcctgctgccccagagctccaaccccagagcagaggacaaggaaggaggggcacaaagggatccaggtaatgtagtgtgaagagcactagactggaaggagttcaaagaccatgaactagctggcggacaatgggcatgccagactctgcaagctctggactctgtctgaaatgtaagcaggtagtgatcaggtcagcaacaccacagctctccaagaaggtggcagaggacacagggccactgcagaagagcttggcgaaggctatcatctccatgagtcccagccggatcactgccgccttggtgttgtcgccaaagcccaggagttaatgctacagtgaaatatgattgcaccactgcacttcagcctgagtgacaaaacaagaatctgtctctt

SEQ ID NO: 82371 - DNA, 878 bp, Homo Sapiens
  misc_feature (41)..(75): n is a, c, g, or t
caacgacgagcgcagcgagtcttgagcgaggaagcggccgnnnnnnnnnnnnnnnnnnnnnnnnnnnnnnnnnnncagtcgacggtaccggacatatgcccgggaattcggccattacggccgggggagggagtgtggcactgagccggctcaggcagagacgcggcaccactggctagcaagaaagtctgcattgtaggctccgggaactggggctcagccatcgccaagatcgtgggtggcaatgcagcccagctggtctacagtttgacccacgggtgaccatgtgggtatttgaggaagacattggaggcaaaaagctgactgagatcatcaacacgcagcatgagaatgtcaaatacctgccagggcacaagttgcccccaaatgtggtggctgtcccagatgtggtccaggctgcagaggatgctgacatcctgatctttgtggtgccccatcagttcatcggcaagatctgtgaccagctcaagggccatctgaaggcaaacgccactggcatatctcttattaagggggtagacagagggccccaatgggctgaagctcatctcggcaagtgattggggagcgcctcggcatccccaatgagtgtgctgatgggggccaacattgacagcgaggtggctgatgagaagttctgtgagacaaacatgggctgcaaggacccggaccaggggacaactcatggaaagagctgatgcagacaccaaacttccgtatcacagtgggtgcaagaggtggacacagtagagatctgtggaagccttaaagtccattggagcagatggagaaagagttgctgaatgggcagaaactgcaggggcccgagacaagccgggagctatacagcatcctcc

SEQ ID NO: 82372 - DNA, 939 bp, Homo Sapiens
  misc_feature (670)..(670): n is a, c, g, or t
  misc_feature (740)..(740): n is a, c, g, or t
gctggtaccggtccggaattcccgggatcgctcgggagcccccacctgagtgggagcaccatggctagcaagaaagtctgcattgtaggctccgggaactggggctcagccatcgccaagatcgtgggtggcaatgcagcccagctggcacagtttgacccacgggtgaccatgtgggtatttgaggaagacattggaggcaaaaagctgactgagatcatcaacacgcagcatgagaatgtcaaatacctgccagggcacaagttgcccccaaatgtggtggctgtcccagatgtggtccaggctgcagaggatgctgacatcctgatctttgtggtgccccatcagttcatcggcaagatctgtgaccagctcaagggccatctgaaggcaaacgccactggcatatctcttattaagggggtagacgagggccccaatgggctgaagctcatctcggaagtgattggggagcgcctcggcatccccatgagtgtgctgatgggggccaacattgccagcgaggtggctgatgagaagttctgtgagacaaccattggctgcaaggacccggcccagggacaactcctgaaagagctgatgcagacaccaaacttccgtatcacagtggtgcaagaggtggacacagtagagatctgtggagccttanagaatgtagtggccgtgggggctggcttctgtgatggcctgggctttggcgacaacaccaaggcggcagntgatccggcctgggactcatggagatgatagccttcgccaagctcttctgcagtggccctgtgtcctctgccaccttcttggaaaaactgtggggttgctgacctgatcactacctgctatggagggcgggaaccggaaagtggctgaggcctttgcgcgtacaggaaagtccattgagcagctggagaatgagttgct

SEQ ID NO: 82373 - DNA, 1466 bp, Homo Sapiens
gggagagcgtgcgttcggtggcccataggggaagatggcggctgctcctttggaggagcgggattgagaggatcggggtggggagaccaaacaagagagacatttctggctctgaaggcgaacgcttcgctggccatttaggagctctgctcaaagccagacgtatcctagaaggaaaacatcaccatggctacagaaattggttctcctcctcgttttttccatatgccaaggttccagcaccaggcacctcgacagctgttttataagcgacctgattttgcacaacagcaagcaatgcaacagcttacttttgatggaaaacgaatgagaaaagctgtgaaccgaaaaaccatagactacaatccatctgtaattaagtatttggagaacagaatatggcaaagagaccagagagatatgcgggcaattcagcctgatgcaggttattacaatgatctggtcccacctataggaatgttgaataatcctatgaatgcagtaacaacaaaatttgttcggacatcaacaaataaagtaaagtgtcctgtatttgttgttaggtggactccagaaggaagacgcttggtcactggagcttctagtggggagtttaccctgtggaatggactcactttcaattttgaaacaatattacaggctcacgacagcccagtgagggccatgacgtggtcacataatgacatgtggatgttgacagcagaccacggaggatatgtgaaatattggcagtcgaacatgaacaacgtcaagatgttccaggcacataaggaggcgattagagaggccaggtttatacacaatataccattttctgtagtccctattgtcatggttaaattattctctaagtgtattctgggtgcagagatgcatgggctctgtcagtttctgggaaactttctgcaccctataaacacaatatttttctttgttttcacacattcaccattttgctggcacctttctgaagtagtgttgtcccggtatcagcctttgcaatatgttagagatgtactgtctgccgcattttgcactggttttctcttttcatttatgattaataatgtgtatacgttattcctttttattatctactgtgtaagacaagaatatttcattccaaataaagaattcagtctttaattatgcaactgaataaaatctaaagcctacagaaaacaacttcagaattcacacaaagtggaaaaaggcttaagtgaagacctggttggcttggttatgccacgacttccaaaggaaagtataggactaaaaccctcacagataactggatgtggcaaacattaacggagtaatgaatgggttcttcaagctttgcagctgtaagcagatcattgtcaagaagactctaggacttttcttctgattcactgttgataacatcacttatgcaaatgtatacaataagtggagtttaaaat

SEQ ID NO: 82374 - DNA, 621 bp, Homo Sapiens
  misc_feature (153)..(162): n is a, c, g, or t
tttagtgatttccaagaacgatctaagacagtaaaacacaaacttttttcaaaatatcacccatttggtgtttagcttgaagtgtaagactatgtaacaactatagctactttgtaaaaaatgtactctcacctaaagcctaacatgattcannnnnnnnnnccaggaaacagaaaatgtctttggtctggtattaatatcaaaagaatttaactttaaaactgatcccaataagcatggcccttacacagttcatgaccaatatttagttatatgaaaatggttcattctcttctagaatctaatccagtgcagtcatctggtgaaagactggaagtcagaagacttttcaaaagcttctcactgaaatggtaatttggtaacacgggataaacagaattttgcataaatagcagaccttagtcactgaataccccattaaacagtactgctggaccatgatacttatatctgggagatgacttagttttaaattttttatgcagtttcttttcttgaaggaaaaacttccagacttcagaattttggaagctgaacgatgagcaggtttttcatattttgctgtctcagacatttttcctatttctcagactttacagt

SEQ ID NO: 82375 - DNA, 973 bp, Homo Sapiens
  misc_feature (160)..(168): n is a, c, g, or t
aaaaggtgtacgcacacacctgcacacccctatcaacctgcgcccaggtcgtattagcggatctcggggggccaatccacccccgaacacatttgactggaaagaaacaagggaccacgcgggaagaagtggcatcgaggccgaggaacccagagagagnnnnnnnnnttacgaggctgctgtaccgaggcccaccacatcgccctcccacatgcccacatcgaggccgagcccagagagtgccaatgaagcgaaaatggttaagaactcttaaggtgtcctctgaggaagagaaaagaaaaaacacttgcatagccaaaaatgtattcttaatatggtttgtaatgggaaaacctggagtaaagatgtgaattgcatcacatagatattacgtcctgtgtactctgaaaatgatgctgaactgacacaagatcaggaggtggcccagatatatatggattacaaatggagataggatgagttaggaagagaaacctgataggtcattcttgagccatccagggatcttttcaaaatctccatataaagggcctaattggagaaagaaagggagggaaatgatcttcaaatatattagaaaaaatagttttgattgaatataaagaacttagggcactaaaacttgttagtagaaagagtgtcaagaagattctggtatcatctctggaaatatttcaagtattaggtattcttggagagtttggtatgaccctgttatcaaataaaagattgcatcagtgagtggatttggttcaatagagttttatttcatgtatttggagagaatggcctggaaaatggacttgtgctagcatttaaaaagtctaatatttataaatcttagcaagtggagggtgtgtttaaggtgcttttgtccttccaattgggcactcttctctctccttggacatacagcactctcagatcactttttgtctattcatccctggac

SEQ ID NO: 82376 - DNA, 922 bp, Homo Sapiens
tggaggcccatcagccggagccacgtgaaaggtactgaagaaagctgagacccggctgtgaggagcgcctcagcggtgaggtggtttagggataaatgtttctggaaccctgtggtcccccataatgttgatagaatatcatatgcactgggagttaaatatatttaatttaatgatcattatatatgtgggggttaatatgttgtttttctgtccctttaaagtctttacatgtaattgtagctgtataatcgttatttttcttttgcatcttaagtcttagaaattaagatattccatcgtgaggatgagagaggtcctcagtgtgtttttggtctggttgtagggaaggactcaagtcctggaatgtcctccactggtctactgagttgcagtcacactgttccaatggattatttgctttcggttgtaaatttaattgtacatatggttgatttattatttttaaaaatacagactaactgatgtaatgtttatgtataagttgcaccaaaaatcaaggacaaaaataagtgtgtatgtttttacaggtgtgaaagtcacagcttgtaaataagtgttgtatgtattaaaccttttccagttctccaaagcgatgtatttttgtacacttgaaatagagtactcttaatttactgggcaaatgtgcttggaatcgaacttgacaagattagctcaagcagatagagtcgggtccagcagtggggtggccctcgtgtgaatccccgtggatgtgcaagttgtggagagaaggagcaccgggttcctgcccagcactgtgcttgcgggaggcggtggggcatgggaggaaggaggcacagaccggggaaatatgacagccgtcatttccagtattctctgtgttgtcttttagctcattcaataaataaaggtggtgtga

SEQ ID NO: 82377 - DNA, 957 bp, Homo Sapiens
  misc_feature (48)..(87): n is a, c, g, or t
  misc_feature (91)..(125): n is a, c, g, or t
tagagaacctttggatgtagatcactatagggcgctagctcgcggagnnnnnnnnnnnnnnnnnnnnnnnnnnnnnnnnnnnnnnnnccgnnnnnnnnnnnnnnnnnnnnnnnnnnnnnnnnnnncagtcgacggtaccggacatatgcccgggaattcggccattacggccgggggaaggaaaaaaggaagtgtttggacgacagcgagcgggagaagcggggtcaaagggagcactatgtctgcggaagtccccgaggcagcctccgcggaggagcagaaggaaatggaagataaagtgactagtccagagaaagcagaagaagcaaaattaaaagcaagatatcctcatctgggacaaaagcctggaggttcagatttcttaaggaaaaggttgcagaaagggcaaaaatatttggattctggggattacaacatggctaaagcaaaaatgaagaacaagcaacttcctactgcagctccggataagacggaggtcactggtgaccacattcccactccgcaagaccttcctcaacggaagccgtcccttgtgtgctagcaagctggctggctgattaagaggctgaactgcatgaatctgctaaatctcattatttctccttaatatgttacttatctactttttatttcctttcattcactagtcatttgagactgacagctttgcaggtagcagtagtgtgtgctgctattgtggaatatacgtgttgtagagttcttgattaattataacagtgcactgggtgaagaggacatgttagagcaacataagtaaactaattggaaaatagtggtcatatattacctaaccttctagtggtagtactgggttctaacaaagtaaacaagcaagtgttcaaaatttcactggtgggggcttccattactttcatctttaagttataaggcttggatgttactcgtatggagtat

SEQ ID NO: 82378 - DNA, 1209 bp, Homo Sapiens
ttttttgaggttgtgcaaaactactgtatttacaaaaatggcacaaaagtgaattcaacagttaatgcacatgcatacttcattcacatcttcaacaacaaaaggtattctaactctacagaactgaatattagcttcaacggcagctgttaagcactagagtcacataagttacaccagaatgggcaaatattgcccaagtaaaattctactgttaaagctgaaacaggtttaaggccattcaagttcaagcacagagatacaaatctttcagagccccatctagttgtgtttgaaatatgtgacctttcttctaacttgtggtcttaaacttctgttttacaaaatccaaaaggtaaatacagaagaaatcaatacaatagagattatattaaataagagtaacatacaaagctataattaagatgaagtaatgaaagccaaaacattaaaattttaaaacttgcttgttacttgttagaaccagtactacactagaagttaggtaatatatacaactattttcaagtagtttacttatgttgctctaacatgtcctcttcaccagtgcactgttaaactaatcaaaaactctacacacgtatattccacaatagcagcacacactactgctacctgcaaagctgtcagtctcaaatgactagtgaatgaaaggaaataaaaagtagataagtaacatattaaggagaaataatgagatttagcagattcatgcagttcagcctcttaatcagccagccagcttgctagcaacaagggacggcttccgttgaggaaggtcttgcggagtgggaatgtggtcaccagtgacctccgtcttatccggagctgcagtaggaagttgcttgttcttcatttttgctttagccatgttgtaatccccagaatcaaaatatttttgccctttctgcaaccgtttccttaagaaatctgaacctccaggcttttgtcccagatgaggatatcttgcttttaattttgcttcttctgctttctctggactagtcactttatcttccatttcctaaaataatttcaaataaattacttctctattacaactcagttatttaaaataattcacctttaaaaatctggattctgaattctagttgttaaatgccaagtaccacagcatctgactaagaaatcaaacccagaagcctttaaaacaatcccgggaattcc

SEQ ID NO: 82379 - DNA, 1127 bp, Homo Sapiens
  misc_feature (269)..(269): n is a, c, g, or t
  misc_feature (384)..(384): n is a, c, g, or t
  misc_feature (985)..(993): n is a, c, g, or t
gtgagcctgcactgtctccagaaagtgcttgagattccgcctccagggttatgccatgttgcagaggattatgtagtgaagcataacacagagttcgatggattgagactgatgggaggactatttgcagaagtacaacgactgacacgagacctcggagctgagcggagttgggcctgcagagtgctccgaacaccaccagtgtccaagtgtgatgggagagtcacatccgcgactgcgagagagacactgtgaagacaaagcaaccnggagcaaaacccgcctctgctggttcttcatgcatcaccctgatggctgcgctctgtccacggactgctgcccgtttgcccatgggcctgcggagctgcggccaccccggaccanccccgaggaagaagatttcatgagctgcatccttgccagccgaggcctggttggggaggccaaaccaaggagagcttccccagcagtcgtcagtgctgtggtctctgctctggctgtgtttcagcccacctcctcccagctttctccacatcctcacagtgatgaaccgtatttcataaacatcacacgccagagaagccacagttactcggaagcccccagctgactgcctggcttgtttcagatgcagccgcttgaaacgtgcgcagcatcttcatatcataaagattgtgcacggatccttacaatgtctcctgggggagagcggctgaggctgccttgcacaggcccttcccagggcgctgtccgacgcctgccccaccatgtccacatctgtgaagaggatggggctcctcgagaagtaagaccgtatctgccagcgtttctcaccacactggagagcagctgctctggagcagggatccaccagattggtatttttaaaaaaggtgtcaggcttgctatgttgaggttgtttttagagttacagagaataaaaacactcataatttcctgacatgggccactctaagtggcatgnnnnnnnnntcctaagtgaattgttgacagggctttaaaaatgtaaatatcacagatgacaaaggtaagacctacaccctcctccctcctccatgagaccctctccccagaaatactgcagcagtcctttttagtccttccag

SEQ ID NO: 82380 - DNA, 524 bp, Homo Sapiens
  misc_feature (1)..(1): n is a, c, g, or t
ntattgacacctgtgataacaaggaaatgactcttaagggcagtttgttgtcctgggggaaaaaatcataagtgttataaagaaatattattgtgcaaaggaggaatgtaatatttaaggttcatttacaacgggcatttggcgtcgacagaaaaagtctttctatgtatacattcaacattttgcagcatatttacattcaagttacatttccaaattctatgccaaatacagtctaactcaccatcaacaatccctcagatattactaaaatcctgtttatttggtaggagtgcaatattatcttattaggaaataattttatgttcctactaagtcaactgcatttttactactttaacaaaattcactgacatttttatcccagttgaagtcaagcctcttttagacaaagtcaatactaactcaaatgttgccagttataaaattatataataatcttttcctccctccttagagacagtattacaactttcaatgaaaggacaccagctatgataaat

SEQ ID NO: 82381 - DNA, 562 bp, Homo Sapiens
acgtatggctaggtagcgaggccgcgtgtttaattcggcacgaggacgtcaccggctgcgcccttcagtatcgcggacggaagatggcgtccgccacccgtctcatccagcggctgcggaactgggcgtccgggcatgacctgcaggggaagctgcagctacgctaccaggagatctccaagcgaactcagcctcctcccaagctccctgtgggtcctagccacaagctctccaacaattactattgcactcgcgatggccgccgggaatctgtgcccccttccatcatcatgtcgtcgcagaaggcgctggtgtcaggcaagccagcagagagctctgctgtagctgccactgagaagaaggcggtgactccagctcctcccataaagaggtgggagctgtcctcggaccagccttacctgtgacactgcaccctcacggccacccgactactttgcctccttggatttcctccagggagaatgtgacctaatttatgacaaatacgtagagctcaggtatcacttctagttttacttttaaaaaattaaaaaattagaga

SEQ ID NO: 82382 - DNA, 426 bp, Homo Sapiens
tgcgtacctgggcgtatgggcatgacctgcaggggaagctgcagctacgctaccaggagatctccaagcgaactcagcctcctcccaagctccctgtgggtcctagccacaagctctccaacaattactattgcactcgcgatggccgccgggaatctgtgcccccttccatcatcatgtcgtcgcagaaggcgctggtgtcaggcaagccagcagagagctctgctgtagctgccactgagaagaaggcggtgactccagctcctcccataaagaggtgggagctgtcctcggaccagccttacctgtgacactgcaccctcacggccacccgactactttgcctccttggatttcctccagggagaatgtgacctaatttatgactaatacatacgcccaggtaagcacaacgcccagtaagca

SEQ ID NO: 82383 - DNA, 1117 bp, Homo Sapiens
  misc_feature (123)..(123): n is a, c, g, or t
  misc_feature (140)..(140): n is a, c, g, or t
  misc_feature (194)..(424): n is a, c, g, or t
  misc_feature (467)..(494): n is a, c, g, or t
ttaccattttgtctttagggcgaccttgaaaaccaacaacgctttacgtctggccttgtgctttgccaatgtcttctgctatccctgtttttgaaacgtatccgcttgatgagtgtaccctcncgcaccgacgaccagcnaggatcatgagcgggagcgagagcgccaatacgcaaccgcctctcccgcgcgtnnnnnnnnnnnnnnnnnnnnnnnnnnnnnnnnnnnnnnnnnnnnnnnnnnnnnnnnnnnnnnnnnnnnnnnnnnnnnnnnnnnnnnnnnnnnnnnnnnnnnnnnnnnnnnnnnnnnnnnnnnnnnnnnnnnnnnnnnnnnnnnnnnnnnnnnnnnnnnnnnnnnnnnnnnnnnnnnnnnnnnnnnnnnnnnnnnnnnnnnnnnnnnnnnnnnnnnnnnnnnnnnnnnnnnnaagaattcggaacgagggttggagcgcccgcggctgtaggccnnnnnnnnnnnnnnnnnnnnnnnnnnnnaagaagaatataggtaaacaggtaatgattcttgattggagataccatttgactcttgatgagagttgtacgaagatggaaatgagggatgattccaggcgttttagggggaaggctgcagataccattctaacccccaagatactgtgttctcaagacctcttagaactaggtgttgtcagggataatttgaggagggcttagtcttcagaacaatcctgcagtcttgacagaaatctaaaatctccaaaaactcctaccctttaaccttaccctagggggaactgatctatgaatattacatgtgtgattatgaaaggtgaagttgagtgagaggagttgaggaacgtggaagacagtgagctctcaccctaacactataagaagcatgatctcaatagaccaataattcacctttttatacatctgtaaataaatggaatgtttttaagaatataattatgtcagatttagcattttcttttatatattaaatatatatatctttccttttctgctttcgaaaagtgactatttttttagaaatctaagaacagaagtttggtgattgaaaggtagaatatataaacctgaaataaagcagttaaaacaattaaagcaaa

SEQ ID NO: 82384 - DNA, 1099 bp, Homo Sapiens
  misc_feature (139)..(139): n is a, c, g, or t
  misc_feature (162)..(162): n is a, c, g, or t
  misc_feature (202)..(202): n is a, c, g, or t
  misc_feature (210)..(210): n is a, c, g, or t
  misc_feature (230)..(230): n is a, c, g, or t
  misc_feature (292)..(292): n is a, c, g, or t
  misc_feature (302)..(302): n is a, c, g, or t
ggaagcatatgtgatgctcatctagcaccccagctaccattatctccgctcttgtgtttgatgtgacgatacattcacacaggaacagctagacagatacgaattatacgactcatatagggattgcccctcgagccangaatcgcacgaggtgtaagctanagctataaaactctagaaagaaaacatagacgtaaatctntgtgactntggatagcaaaaggatttcntaaatataccccaagcataggcaacaaaagagatacaccaactggacttcatcaaaactaanaactgttgtntgaaatgacaccatcaagaaagtgaaaagacagctaccagaatgggagaaaatatttgcaaatcataaatgtgataagggacttgtatcttggtggtatataaagaactcgtaactcaattataaaaagacaactttgaaatgggcaaaatagctcaacaggcttttctgcaaagaagaaatacaaatgaccaagaagcacatttaaaaattttcagtactattactcatcaggaaaatgcaaatcaaaaccacaagacacccaatgtctacaatcaaaaagataataactagtattgatgaggatgtggagaaattgaaattctcataacatgctggtaggaatgtaaaatggggcagccactttggaaaaagtctggtagttcttcaaatggttaaatgtagagttacgatatgatccagcaattcctctcccaggtatatacccaagataaatgaaaacttatatccacataaaaacctgtgcacaaatgtccatagcagcgttattcataatagcctaaaagtggaaacaatcccagttccagaatgaggaaggggagaaactaatgtgtattagctattgtgtgctaagcattaaactagattatttacaaaccttgtatcatctcaactctttaaagactgtattgcaatgttttgaatattcagagagaaaaaagtcgttgctaaaacattttccaaggttctgcttattttgatttgttcagtcgtggctgtgatagttcaggcccatctagaccaggtaaataaaatatctagaggcattcttgaaaa

SEQ ID NO: 82385 - DNA, 987 bp, Homo Sapiens
  misc_feature (374)..(374): n is a, c, g, or t
  misc_feature (667)..(667): n is a, c, g, or t
cccataaaagactcaatatatttggcaccctcattttatagtactcctttttggtacagaatcattttgccaaaatactcctgtgatacagatgcacatgataaactgtaaaatggaatttcacccattgaagagccccaaaagaacaatatggtagtgcagcatgaactaacatgcaatttctaattttcaatatccccaaattgcaaaatactaatagctaatatatatactatatgccaagtattaagtactttgtaatattatcataatctgttataaccgcactatgaggaaagtagaatagtacaattatctcactttgcagatgaagaagctgaggtatagagatcaatttacacaaaatcatatanggctgttaggctctcaagtctagctcttaagagttgataaatgtggagcctttggctagtaagctttgctacttctggaaatgaatttagccttagaagtatgttgaaaactactgtttatgatttgctgttagaccaacaggtaaacagtgaactataagtcagtgtcacgaaaatatcagtgtcatgaaaaggctagagtacatggagggggaagataacttctggcttgggaggtggccagagggtcaaagaaagctttgcagcagtggcatttgagccaggccttgganagataaaaacatttgtgtcctatacttagtaggagcttggtcaagacaccacaaatattacacaactaatgacctagatgacatttagaaatataccctaaacaggatgcacacacatgtgtgacaatatcttgcttcattcatatccacttaccctattgtctgattccagttgggcctcgggccaatcttggctcgagggcaaattccttaagggagcgaataaatccgaacagtcaagcgtttctgggggaattgtaccgccaaattcacaaaaatcagcggagcataatgtaactgggggccaagaggagtaccaa

SEQ ID NO: 82386 - DNA, 1093 bp, Homo Sapiens
  misc_feature (72)..(92): n is a, c, g, or t
  misc_feature (760)..(760): n is a, c, g, or t
  misc_feature (842)..(842): n is a, c, g, or t
  misc_feature (877)..(877): n is a, c, g, or t
  misc_feature (886)..(887): n is a, c, g, or t
  misc_feature (906)..(906): n is a, c, g, or t
  misc_feature (938)..(938): n is a, c, g, or t
  misc_feature (948)..(948): n is a, c, g, or t
  misc_feature (969)..(969): n is a, c, g, or t
  misc_feature (980)..(980): n is a, c, g, or t
  misc_feature (1021)..(1021): n is a, c, g, or t
  misc_feature (1039)..(1039): n is a, c, g, or t
  misc_feature (1066)..(1066): n is a, c, g, or t
tttaacgacggccagtgccatgctcgaattaaccctcaataaagggaataagcttgcggccgcctgtcaggnnnnnnnnnnnnnnnnnnnnnagttgtaaaataatttactaaaggcactattgttaaacatcaaactaataacttgttgccaataaggtacatcgttgtaaacataacaaaattttaagagatacatggctaataagcaaacaatacaatttttagttacagctttcctacttacaagatcatgtcccttccagccattacaagggcatacagtgatgccattgctcccaacagttacctgggaagggagcttggagctcctaattggtttgagatcatgactgccaaggtctttaaaagctccaaaagtcttcactcataaaggtcaattctaaaattgctgggtttagaaatcaagatacttgctttatacttccacatcaaaaagatacggactcaaccccaaaggagctagctggagggcccagccctgacagtatgtccaggcatgaactggcgagctctgctgctagccacagcatcacagagaatggagacattagtcaaatgtggctactgaacattagcaccataataaacatagctcatacagctaaaacctagattgtttcccgacaaggtaacattcatttatagctctaatgctgaaagagcagctttttaatgtaacagatgatctaggtacacaagtcataggtttctcttcctaggataaaaacgttcaacanaatacaaactaaacagcatcccagaggcaataaatctcattgtactgaaacatatacaaattaaggctaccttgatatatanatgatttagaaattatgatggaacattccccatanattatttannatatagaatcaatttgtcnaagatcagtagtgggctcagtttcaacaattnatatacatcnatacatttcacttatacattnagccgctatanggaaagtactgtacgtcactcctgaatacactagtatgttnagatccaactgtcaaggngaagtatacagcattgctcatgatganaagtcagatttcactattttctactga

SEQ ID NO: 82387 - DNA, 927 bp, Homo Sapiens
  misc_feature (43)..(61): n is a, c, g, or t
  misc_feature (125)..(125): n is a, c, g, or t
  misc_feature (209)..(210): n is a, c, g, or t
  misc_feature (283)..(529): n is a, c, g, or t
  misc_feature (534)..(551): n is a, c, g, or t
gagactgatctcactccacctcagcaatagagtagatgtctcnnnnnnnnnnnnnnnnnnncctcccattttcaaacataccgtagagatatttcaggtgccatttatagtatagcagcaggctnttactctgtgtatgcacagatgcagtctgggcaatggtttgtgtgctggactttctcatgcccatcatcagtatgctatggatnntgatgacaggcatagcctgggcatatcacctcattggtaaagggctagagcctttcttttttatggcacttcnnnnnnnnnnnnnnnnnnnnnnnnnnnnnnnnnnnnnnnnnnnnnnnnnnnnnnnnnnnnnnnnnnnnnnnnnnnnnnnnnnnnnnnnnnnnnnnnnnnnnnnnnnnnnnnnnnnnnnnnnnnnnnnnnnnnnnnnnnnnnnnnnnnnnnnnnnnnnnnnnnnnnnnnnnnnnnnnnnnnnnnnnnnnnnnnnnnnnnnnnnnnnnnnnnnnnnnnnnnnnnnnnnnnnnnnnnnnnnnnnnnnnnntttgnnnnnnnnnnnnnnnnnngagaggtatgattctttctagagattttttctcatggctactattagatcaggaatgggtgattggagattattagattctaggttaacttctaccactttaccctaatacataaaactttttcctaaataaatgatggaaggaataatacttggttacctggcattatttttcagtaagaaaaaagctttactaaccactacatttatggaaatttgtaggggtaagtattttataggtcataaaaaacaccataatataacgaatctcattttctttaaatgtgaattaaatcctaacagcatctttataaaatgaccataggctaaaatcttacgtgtaagtactactacaataaataatttctgaaaccttt

SEQ ID NO: 82388 - DNA, 590 bp, Homo Sapiens
ggatcttaaatttatgtgaatacttttttagaaaatgataaagaaaaatggaattacttcaaagtgtttcttgagtcattgattcttttagcatctcaaatgttaattagaataattggaatcactttttagacttttcaagttaccttccttgggaagtttgtgcagtgttatagtttagtttagctcctcttacagggtaatggtttgctagtttaaaactgtaaccaaacgaactggtcagacaacatatatctaaaacacttaaaatgttaggaagtttgggaatgttataacctaaacgtttttgctggtaactttttgttatttatagatatttgtgtatttaacatacatacttcaggaaatatatgcctttcctaaaacttaaccatgcattcaataccatggcctatctatagaattgaatattttggaccatgttatctgtggcacagtcagtgctgtgtttgaggtaaatgcagtaacggttagttttctactttgtcttatagaaggtagaaaccatgtgtatgttatgtttgtctataaaacaaaaaacactaatattaaataatttataaagaaaa

SEQ ID NO: 82389 - DNA, 491 bp, Homo Sapiens
aatgggcattgtgaatgaaaatatgtaatgtcaacctttactttatggtatcttaggtttgtcttcttccccttcatagttttcccctttgaggataacccttcaagctcaaaagggcacaaaagctaaaacgttattcacgtacaaaataccaagtatatagctgttctgcagtttgatacagaacaaaagaaaataacttttctaattaaatccctcattctgtacttaggccagactccatccccactacagttttacttgtattaacaggttaagagcaatctaggaacatttggcaaacaagtacattttttacatggaaaaaactcaatcaacatcaccattctctggtacaagaaatacaaaacacatttcctttaaaaaatcctcccagtgctgaagtatcttctaagcttcccagagtatgtcctaagctttataaataataaatctttcagacatgtcagtatgaaaatgagactggtctc

SEQ ID NO: 82390 - DNA, 1157 bp, Homo Sapiens
  misc_feature (68)..(102): n is a, c, g, or t
  misc_feature (759)..(759): n is a, c, g, or t
  misc_feature (774)..(774): n is a, c, g, or t
  misc_feature (783)..(784): n is a, c, g, or t
gctggttttattataggccggaaaacggaaaccagagcgcagcgagtctgtgagcgaggcagcggcgnnnnnnnnnnnnnnnnnnnnnnnnnnnnnnnnnnncagtcgacggtaccggacatatgcccgggaattcggccattacggccgggagaaagagctgtccctgaaaatggtaacttgggtccaatacaagctgaagtgaaaggggcaacaggggaatgtaatatatctgagagaaagtctcctggagtagcaaataaaaagtttgagagcaattggatagtggcattggcaagtgcataaaatagctgaaggtttttcagaatccaagaaaaggtcatcagcaagcatgacaaatgcaacaatcaaacatagcagtttcaggacagcacacaggcaggcatttgaagggggcaggattccttggacagaaagaaacgttccctatctggcatcatcaccaagtacttccgcatggaggaactgactcacctggtactgcgtccccatctcctacaaagactactccatctcctcggcataaacaaaagtgattcttcaggtcaggagtacagacttgtgaaaactcaccaaaatgaatagtagtcatcgtgacatttagatgaaagttaaactttactgaaatttcagtacatgagtgtttgacactaagaactttacaagataaaattggacattcatttagtatctttttaacagaattacttggaataatgagatacgaattacaaaccnttttttttccaaaantttaatctnnctttttggacatttggaaatttttttaattttacaagtacatttaacagatcatttataaagcaggagtccattttaacacttaccgactttttttggctttggaaacatattaccacgtcttaataggatggtgcccatataggtgagcatccctttagatcatgggaaccagcagacttcattcctaatcttcattatgcctgagacttgtcttacaatgttacctttaagtgaatcaccttattcgtctttggaaacttggtcttcccaaaaacttattgtggattgccaaggggtgttaccagaatatctcgcacgaagggggcaaggctcgggcacaaaccttttcccgctgattccaaaaaacctag

SEQ ID NO: 82391 - DNA, 1355 bp, Homo Sapiens
ggtccctatctggcatcatcaccaagtacttccgatggaggaactgactcacctggtactgcgtccccatctcctacaaagactactccatctcctcggcataaaaaaagtgattcttcaggtcaggagtacagcttgtgaaaactcaccaaaatgaatagttgtttcgttacatttagatgaaagttaaactttactgaatttcagtacattagtttttacactaaaactttacaagataaaattggacttcatttagtatctttttaacagaattacttggaataatgagatacaataatcatatctcttttgacattttggaaatttttttaattttacaagtacatttaacagatcatttataaagcaggagtccattttaacacttaccgactttttttggtttggaaacatattaccacgtcttaataggatggtgcccatataggtgagcatccctttagatcatgggaaccagcagactgcattcctaatcttcattatgcctgagacttgtcttacaatgttacctttaagtgaatcacataattgtctttggaacttggtctcccaacacttattgtgattgcaaagtgtttaccagatatttgatgaggtgctatgtttgtgaaaaacatatcatgtaattcaaaaacactattgatattgaataccagataccactatgtagtaagtcttttaggatgattttaatttagtcgtgcgtcattttctgattctcatcattgggagatcttaaatcttagcaagcattagcaatattaaatgccaaaattccattgaaactttcaagttggagcaattgtctgtgtttgaaaagatgaaataaaaataataatcaagggcaaagctttgagtgcccagaagggaaagctgtaccagttgctaacctgtcttgtttcaggagccaccatgttttttcttttcagtgttaacaacaatcatgataattaaattaaaacactagtttgttcacttgtaggactgcagttctgaattttgggttaaaggttttggctgctgtaagaatgtgaatttgaatgtattttgaattgtaagagcaaaagaacgtttttgtacaattttttttcatttaattggaatgatcttcaggtttctacaaatagggtaattgtaaatttaaagcattagcatttattggtgaataatgtatatatccccattccaagaaatataagtgagtgaagttgaaataaaatctttaaaatttactatattgccagtggtttcacaacagttctcttgtatttatttatcaattaaatcaaataaaaatgattatgtcaatgcgttttcagttatttaagtaa

SEQ ID NO: 82392 - DNA, 1610 bp, Homo Sapiens
  misc_feature (22)..(22): n is a, c, g, or t
  misc_feature (125)..(822): n is a, c, g, or t
catacaccctttatatcctatnacgatggtgttccgtgcgataagtcttttaaccggtgaactcagacgatattaccgataaggcccccgtcggatgaaacgcggttacgtcaaaacacccaaannnnnnnnnnnnnnnnnnnnnnnnnnnnnnnnnnnnnnnnnnnnnnnnnnnnnnnnnnnnnnnnnnnnnnnnnnnnnnnnnnnnnnnnnnnnnnnnnnnnnnnnnnnnnnnnnnnnnnnnnnnnnnnnnnnnnnnnnnnnnnnnnnnnnnnnnnnnnnnnnnnnnnnnnnnnnnnnnnnnnnnnnnnnnnnnnnnnnnnnnnnnnnnnnnnnnnnnnnnnnnnnnnnnnnnnnnnnnnnnnnnnnnnnnnnnnnnnnnnnnnnnnnnnnnnnnnnnnnnnnnnnnnnnnnnnnnnnnnnnnnnnnnnnnnnnnnnnnnnnnnnnnnnnnnnnnnnnnnnnnnnnnnnnnnnnnnnnnnnnnnnnnnnnnnnnnnnnnnnnnnnnnnnnnnnnnnnnnnnnnnnnnnnnnnnnnnnnnnnnnnnnnnnnnnnnnnnnnnnnnnnnnnnnnnnnnnnnnnnnnnnnnnnnnnnnnnnnnnnnnnnnnnnnnnnnnnnnnnnnnnnnnnnnnnnnnnnnnnnnnnnnnnnnnnnnnnnnnnnnnnnnnnnnnnnnnnnnnnnnnnnnnnnnnnnnnnnnnnnnnnnnnnnnnnnnnnnnnnnnnnnnnnnnnnnnnnnnnnnnnnnnnnnnnnnnnnnnnnnnnnnnnnnnnnnnnnnnnnnnnnnnnnnnnnnnnnnnnnnnnnnnnnnnnnnnnnnnnnaagaattcggcacgaggattgccctccaacacaccaaatgttcgcaggaccaagagaacacgtttgaaacctttggagtactggcgaggagagcgaatagattatcaaggaaggccatcaggaggattcgtgattagtggagtactatctccagacacaatatcgtctaaaaggaaggcaaaagaaaatattggaaaagtcaacaaaaaatctaataagaaaaggatctgtcttgataacgatgaaagaaagactaacctaagggtaaatctaggtatacctcttggagatcctttgcagcccaacgagggtaaaggacccagaaacaagagagattattctcatggatcttgtaaggccacaagatacatatcaattttttgttaagcatggtgagttgaaggtatacaagacattggatacaccctttttttctactgggaaattgatattaggaccacaagaagaaaagggaaagcagcatgttggccaggatatattggttttttatgttaactttggtgaccttttgtgtactttacatgaaacaccttatatattaagtactggggattcgttctatgttccttcaggtaactattataacatcaaaaatctccggaatgaggaaagtgttcttctttttactcagataaaaagatgaaagatcaaccaaccttaaatatatgtatgtatatatgtatatgtgaaaaacagtttgtatagttggaatatttgtctttgtaattacttgtgatgttttaaaataaaaattttattcagttttc

SEQ ID NO: 82393 - DNA, 994 bp, Homo Sapiens
  misc_feature (36)..(36): n is a, c, g, or t
  misc_feature (68)..(68): n is a, c, g, or t
  misc_feature (96)..(96): n is a, c, g, or t
  misc_feature (134)..(197): n is a, c, g, or t
  misc_feature (249)..(250): n is a, c, g, or t
tcccggcgtgccgatcataatgcagtgcacgacagnttccgactgaaacggcatgagcgcacgcaatnattgagtactcatcatagcaccccagcnttcacttatctcccgctctatgttgttgaaatgtgacnnnnnnnnnnnnnnnnnnnnnnnnnnnnnnnnnnnnnnnnnnnnnnnnnnnnnnnnnnnnnnnntgccctcgagcccaagaatcgcacgagtttgtctgatctgtatattcattcnntaaaagaaaagccccaaaacccaagtgctgttttcctgggtctgtgggaaacagagtctccgagggaattaggctagacatgggtaaggaacaaagttctgttgtgataaaagctttggcctgaggttccaaccattcagtttgccagctcagacttgatcttgaacgaaggcggggttctgtgactggagaccatttctctccttttgtatttgttggtgtgtccaaaaacctcagatctcccagcttcaggcttctttgagggcagtgctaaattggttgaaaccttatttgaggcagttcctgaaaagggtaggtgaaatttcctgctgataaaaggcatcctgtgtcttgttcatccttagcaaattgccaattagcaaagaagagagggcagatgaagtaccagccaatttgaaattggtgtggacttccatcaaggtatattaattcattttacctagatgattcgaaattagttgcttttttcttttaatcctaaaaggataattttcttcatgttcttcttgtcatgtcagccaaatcctatagtgtcaactttcagtaaatgtatcttagaaataactatggaccaatctagatctttctctctctatcatctatacagtttagagattttaaaactcttaccacttagtttgaaattttattttaatttataaaatgatatattcttatgtaaaaaattcagacaataaagatgtatttaaagtaaaaggcaaa

SEQ ID NO: 82394 - DNA, 883 bp, Homo Sapiens
  misc_feature (570)..(570): n is a, c, g, or t
  misc_feature (648)..(648): n is a, c, g, or t
  misc_feature (660)..(660): n is a, c, g, or t
  misc_feature (675)..(676): n is a, c, g, or t
  misc_feature (775)..(775): n is a, c, g, or t
  misc_feature (777)..(777): n is a, c, g, or t
  misc_feature (780)..(780): n is a, c, g, or t
  misc_feature (784)..(784): n is a, c, g, or t
gtgaggatatatacaagaaaaggctagacaaagattgattttgatggtggctgtccttggggaaatggactttcactttctaagtcatatacaccaaaaaatattaaaatgtacagaatgaagtaattctactttttggaatttatcctacagaaataattaaggatgcatggaaaaattcaactataatgatattcatagtagaacttttataataaaaaattgaaaactatagacaaatcatttaaacaaatgatggcaaattcacatactactatacatctatagtatttatccattagagatggggtactgttaaaagatactcatttatcatgaaaattcacaaaatattaagaaaaacaggagcatgaagtattatgtatctgatttcattttcatcaaagaaaaggcatatatgcattgaacatcactgagaaagatgtacaccaaaatgttaacaagttgtaaggtaaaattaaaggtgatttttcttttggcttattgcatgcattctcaacaggagcagtatcaccaccaatggggtgaaaattggctcttgaggggcanaaaatattcttattcttttagtgcataaacacagattacatacatacataacaaatatacagttatatctgtggcatnaaatttcatganggggacaattagaannatatctaaaaggctgagaaatatgtctattggtacttattttttctacagtgacttggtatactgagttgactaagtatctagtacatttactattganantanacanacatacatggaactagaatacatatttcatatactataatgtctcttatctatgcttaaataataaacattttactctgcgatcttgctcgagcaatcc

SEQ ID NO: 82395 - DNA, 980 bp, Homo Sapiens
ggtggaatcctcaagcacatttaaacttgacatagattgtaaaatttattagagtgggagtaaacgacatcctccatgtggacagacactcccattaacaagtccctaggatcagagagaaaagcagacccgtggtcatcactaggtgtctcttggtgtctcgctaaagatggagtcctatgtaggttggcctaagttggcctcagagggaggtgcctgagcagcaaagcaagacagcatgtgtgtaaccagccaggcaaaataacaagtctgtgctacctggagtgtattttcaggaaaacaggaccatatggagtgtggggcagggacatttcgctgtgctaaactgccactgtaaaagcacactgttgaaagcatgcaggacagaaaactgcaataattcagagcttgaaaacaagaaataacagaaatatgaatatttcaaatacacacttcatatactgaaaataagagcatttgaagaaaggctggaatggttttccaaagactcacacattttggggttccaaattcaatgttctaagcttctctatcacaaagagatcaagaacaaaagcaaagctgggggtcctggccaggctgagtggtaccttgagccggtccctgtgtcctgagggtccctgggccccatatcccatccataacccaagtctgctcagctacagtctgccctggtgctcagtgaacagccacagagtcccacttctgcacaggatgggccttcagagtgatgagagagcatctcccgcacagtgcaaacccccaaaggccagaaatgggaacgctctaactaaggctctccttccactccctcactgttcctttaatattactctctcagcaagtagaaaaataggctataaggaggcttaggcagacacacactcaaacagcctcttggaataaagcaaatctgcctccacatacttgtttgtatattgttctggcttctcccagga

SEQ ID NO: 82396 - DNA, 876 bp, Homo Sapiens
  misc_feature (262)..(316): n is a, c, g, or t
  misc_feature (574)..(582): n is a, c, g, or t
aagtgatgaaagactgaccagtagaaggtggtgaagatgaagaatagtggaactggcaagtaagaactgttcagacaagcattcattgtgtaatatccataaacaaaactataatccaaaggacttccattttagtatgttctgatgatgtactctagactgtcacctcctctggcttacagaataatccagaactttccatagacattaatcttgcttaacaaaggctgtttacctattatacacacacatttttaagggnnnnnnnnnnnnnnnnnnnnnnnnnnnnnnnnnnnnnnnnnnnnnnnnnnnnnnngatttatacaaatgtataaataaacataatacttttcaatctttccattgacaaggcaagttcacattcagcaaagtgccaccacatcccatatacacatctctgtacagatatacacataagggtctgttttcacccttcaaccgggagaattttttctagcaaatcccattaaccagcaactgaagggagaaatggcaccagtacaaactcccttctttcatttgcatgcatatgtacaagaaatatgcagatctnnnnnnnnntcccaaaacaagagtgaatgaaaccaggagatgctgcaaaaatacaactgtagaaaagaacagcatatagagctttcctagatcttcactatatctaagatgaagtaaatgatgctcaagagacaactacaaattcaggtatattatcagaagttgctttgacatatttcaaagtacatgattttttaagtattaaaaataaatgtcattggaacatttaataccaactctacttttgactatttcagaccaccagatactccagtaataaatgtatagcaaaataacaactta

SEQ ID NO: 82397 - DNA, 1198 bp, Homo Sapiens
  misc_feature (713)..(713): n is a, c, g, or t
  misc_feature (729)..(729): n is a, c, g, or t
ccctggctgagagatcttcacaacctttattgcacaaactgggaaaaaggaacagggttatacctcccaaccccaccatcctcttcatttaaagcatcaacctcctcccctgccatttctgttcagggaggcacaatgttccccatctgtccaaggctgcaggtccggcaacggggccccgtcccaactccccaagcctggtggagctccaagcctaacctgtgcactgtcctctgaatccaggcccttgtaggtccccaaaatggtgggggtgcagggacaaaaaacttgctgttctgctcctgatgtcacacaggggcttcctgtgcgtcctggcatcaagatggccttccacaagtcaagtggccacatcctcaaggagctggctcagccactcacagctcctcccgaacccgaggtgcccttccagtcttgtctgcgtgcactgggtgactcaggtccatgcgctgctcttgctctccttctatggcgctgcggcacaccaggtgggtgaaggacagatgcaggggccgttccggggagaagtaggcctgggtcaaggtccgcacccgctcgctcacctccagaagcagcttagcaacctgactgcccactgtcccagcccgggccagctgagcagccttaagcaccgtgagcccctcgaagcgttcatggggggtgtgaggggaacggcgaccacgatagccagaccntggctccagccccagnctgcagtccttagccagctgcagcatgcaccccacactcgcctggggtgagcagcccatccaacaccgcccgctccgacccattcagctgcctggaatcctgggtcaaggtcacaccctccaggagaaggacatccttccagtaggtcaagggctttggcttcacgggctcatggtcccaaggcctcttctcttgatcctctctgagcttttctctaagtgcctcagggatgagagctgcaggggtccaggggtcaggatccttgaagctggtccccaggtgctccatggcactagtagagctgcctcttctcccccagggatcggaggatgaagcgctggatgtcctctctgggtccgaggccaggtctcggctctcccagctgggcctggtactggttcagagccctctcctcgtgccgaattcgccacccaggcctcgctaccttagaaccgttagagttactgcc

SEQ ID NO: 82398 - DNA, 852 bp, Homo Sapiens
ccggcagtaactctcacggtttataggtagcgaggcctgggtggcgaattcggcacgagggagcagcaggtggctgaagaagaggaggatggggctgcgagccagggggcctctatgaggccattgcaggacactggattcaggtcctgcagtgccggcaacgctgtgtgggggaaacagccacacgccctggtcgcagcttccctgtcccagacttccttcccaaccagctgaggcggctacatgaggcccatgctcaggtgggcaatctgtcccaggctatagaaaatgtcctgagtgtcctgctcttctacccggaggatgaggctgccaagagggctctgaaccagtaccaggcccagctgggagagccgagacctggcctcggacccagagaggacatccagcgcttcatcctccgatccctgggggagaagaggcagctctactatgccatggagcacctggggaccagcttcaaggatcctgacccctggacccctgcagctctcatccctgaggcacttagagaaaagctcagatgtccttctcctggagggtgtgaccttgacccaggattccaggcagctgaatgggtcggagcgggcggtgttggactgggctgctcaccccagccgagtgtggggtgctgctgcagctggctaaggatgcagctggggctggagccaggtctggtatcgtggtcgccgctcccctcacaccccccatgaacgcttccgaggggctcacggtgcttaaggctgcgcacgctggcccgggctgggacagtgggcagacaggctgcttaacctgcttctggaggtgagcgagcgggtagcggaccttgaccca

SEQ ID NO: 82399 - DNA, 688 bp, Homo Sapiens
  misc_feature (58)..(58): n is a, c, g, or t
actgcttctggaggtgagcgagcgggtgcggaccttgacccaggcctacttctccccnggaacggcccctgcatctgtccttcacccacctggtgtgccgcagcgccatagaaggagagcaagagcagcgcatggacctgagtcacccagtgcacgcagacaactgcgtcctggaccctgacacgggagagtgctggcgggagcccccagcctacacctatcgggactacagcggactcctctacctcaacgatgacttccagggtggggacctgttcttaacggagcccaacgccctcactgtcacggctcgggtgcgtcctcgctgtgggcgccttgtggccttcagctccggtgtcgagaatccccatggggtgtgggccgtgactcggggacggcgctgtgccctggcactgtggcacacgtgggcacctgagcacagggagcaggagtggacagaagccaaagaactgctgcaggagtcacaggaggaggaggaagaggaagaggaagatatgcccagcatagacccttcgccagagccccctagccgcaggcaccagagggtccaagacaagactggaagggcacctcgggttcgggaggagctgtgagtggctgagccagctccttgaggatgtggccacttgacttgtggaatgccatcttgatgccaggacgcacagga

SEQ ID NO: 82400 - DNA, 1003 bp, Homo Sapiens
  misc_feature (619)..(619): n is a, c, g, or t
  misc_feature (666)..(666): n is a, c, g, or t
  misc_feature (673)..(673): n is a, c, g, or t
  misc_feature (691)..(691): n is a, c, g, or t
  misc_feature (736)..(736): n is a, c, g, or t
  misc_feature (738)..(738): n is a, c, g, or t
  misc_feature (768)..(768): n is a, c, g, or t
  misc_feature (773)..(773): n is a, c, g, or t
  misc_feature (778)..(778): n is a, c, g, or t
  misc_feature (802)..(802): n is a, c, g, or t
  misc_feature (815)..(815): n is a, c, g, or t
  misc_feature (817)..(817): n is a, c, g, or t
  misc_feature (824)..(824): n is a, c, g, or t
  misc_feature (828)..(828): n is a, c, g, or t
  misc_feature (834)..(834): n is a, c, g, or t
  misc_feature (856)..(856): n is a, c, g, or t
aggaaacaggtttggagaggtgacacgacctgtcccaggcatcacagccaggacaggacctgtcccaggcatcacagccgggatgtgcatagcaggggtttggaactatgaggtgcccaggacccagggttggagtgaaaaaaggcgcaagggactaagaataaccagacagtgtgtccccagccctggggagagtcttgggaccagtctgatgcccttgtattttcccaggctccaggctcctcgccggggacagtgtctctgttgggtgcgtgctggatccctgggggacgtggcacatccccaggcttgctaaacattgggtgggttctggcatttgcttttgtaacgtttctgggtcactcccgcctgtggccacccggccttaggggagccgtgtgtccttggggctttgctgggtggtctcgagggtgggagaagaatgggttctcctggaccaatggagcccgtgcccctcggggccacattgctcctgcgctccctgactgcggacgcgtgtgtctcgcggcatgtctctgtggagatggcctcctcctgcctggcaacagcaccacagaattgcatcagaccaccccacccgttgtttgtgatgatgtancttagggctctctgtctgccaggccggtcactggggactctgtccangtcctgntggttcctgcttcccagncactgatggtgtccatgagagcaaccctcgggagctgtccgggananaagggcgctggtggctgctgcggtcatcanagggnctgancgcaacacgtgcctcagcttccanattcatgactgtnanggcgctngcangcacanctgcttcagctgttctcccagnccaggattcagcgcgtccacggatgcctctcccggcgatcctaaaggtttcaagttggggcctgggacggtttaacaccggatctgagcctgggattcttggaaaatctgacacaccacgggggagctgagccatctcgcccaagaa

SEQ ID NO: 82401 - DNA, 750 bp, Homo Sapiens
  misc_feature (115)..(115): n is a, c, g, or t
gcccttatagttcgggaacggatttaaggtgctgacaatattgatgtttctcatcccatcatttacagaggagctgtttatgcggataatatggaatttgagcagtgtatcaagntgtggcttcatgccctgcacctcagacaaaaagtgtgcatctctaccaaaacacagtgcagcgaagaagatcagtgcaaaattaacaagcagatctacaacctgattcaccttgatcccagaactcgtgaaggtttcaccttgctgcatctggctgtcaactccaatactccagttgatgatttccacaccaatgacgtctgcagctttccaaatgcacttgtcacaaagctcctgctggactgtggtgctgaggtgaatgccgtggacaatgagggaaacagtgcccttcatattatcgttcagtacaacaggcccatcagtgattttttgaccttgcactccatcatcattagcctagttgaagccggagctcacactgacatgacgaataaacagaataagactccgctagacaaaagtacaactggggtatctgaaatactgcttaaaactcaaatgaagatgagtctcaagtgcctggctgcccgagcagttcgggctaatgacattaactaccaagaccagatccccagaactcttgaagagtttgttggatttcattaagtgactggatatgtaaagtcgtttaatgtggtgctaaaaagtaaaggacttttaatcacagacagtaaa

SEQ ID NO: 82402 - DNA, 954 bp, Homo Sapiens
caaaatcggcaagagtttgtcgatgctaatgtggattcatattcaataaatcagtggcttccttatttgatgcttttcatgcgggctttcataaggtctgtgaaggaaaagtccttctgctctttcagcctaatgaactacaagcaatggtcatggaaaatacaaattatgattggaaggaactggaaaagaatacagaatacaaaggggaatattgggcagaacatcctacgataaaaattttttgggaagtatttcacgaattaccattggaaaagaagaaacagtttctgttatttttgacaggtagtgatcgcattcctattcttggtatgaagagtctgaaactagtcatccagtccacaggaggtggtgaggagtatctcccagtttcccatacttgttttaatcttctggatcttccaaaatatacagaaaaagaaactctacgctctaaactgatccaagctattgatcacaatgaaggcttcagtttaatataactttggagttataactattcagtttagtgcaaaagcattaaactatttgtgtttttcttgtggtgatgaattcagcaaggtgacagaggtactattataattcttacttgcagaatgttcaatctacgagtgttcatggaagccaaaaaatattaaaggaaaatgaacaaactgttaatattattgtacagaaccatggattttttttgaccatcttctaataaacatagcaagtattatgaatacattaaagttttactaacatgaattttaagagtttgcatatttcagaaatgatctggtgtgagtgcatggaaatattgcttaatttttcttcaatcattgagtgaaaaacctttaactttggcctgcaatagtcatttgattattttttcattttgtaaataatgttaagttttgtaataaaatagttatgttctgataccaaaaa

SEQ ID NO: 82403 - DNA, 1027 bp, Homo Sapiens
  misc_feature (74)..(74): n is a, c, g, or t
  misc_feature (144)..(144): n is a, c, g, or t
  misc_feature (199)..(199): n is a, c, g, or t
  misc_feature (207)..(207): n is a, c, g, or t
  misc_feature (424)..(424): n is a, c, g, or t
  misc_feature (445)..(445): n is a, c, g, or t
  misc_feature (462)..(472): n is a, c, g, or t
cgctaggttagactatctcccaagggggcctgtgtggtgaattttccccatcataacaatagtggtgccggttntatcagccgctgctggggtgagtcacatcatgagggcagggaggtccacttttccgctccgccaggggcntgtgcatgagtgacaccccacaccctgtaaccgccttctgtgggctttcccaatntagcgccncagtgaatgctgctgctcagcagctcagcacgagagctgggagagatctctggtggggagggctgctggagctgttggacccaggggtctccccgaggggctcaaggggagcaggcatcttggggtaccctgggttgaggcagaggctgcacgtggaagatggcccgagtcagtggatggtgccagtcagacagggccatggtcccaggtgcatccnaggggctctgtcatggccacncctggggaccctgcttnnnnnnnnnnntctgcaccagccatttcctgggctcgtagatctagcaggatgtgatgggtggaggtgggctgggcctgtgccatgggctagagcgtcactggggaggcccacaccgccatcagaatcctcctcccagcgcctccccaacctgagggcctgctccctccgcagcctgctcactgcacccactgcctgcctgccttctgagtcctgcactcacccgtccaccaggacagggatggctgtcaggatgtagtgttgctgggagcaagtcaggtcctgctgtgaggagagacctaagagtgttggtgtgtgtccacacacccgtgcatgcctgtgtacctgtgcacactatggatgctcctgcacacctgtgtacaactgcacgcctgtgtatggccatgcatgcataccccatgtaaccgtgcgtgcctgtgcacactcgggatctgccagtggggcagtccagggataaaagactcctgagaactccttttggagaattgtgtccttcctgtgacagtgaaggctgcttgcaaaccaagagtcagtgtaaaaggtcaa

SEQ ID NO: 82404 - DNA, 1043 bp, Homo Sapiens
  misc_feature (38)..(38): n is a, c, g, or t
  misc_feature (40)..(40): n is a, c, g, or t
  misc_feature (103)..(103): n is a, c, g, or t
  misc_feature (156)..(156): n is a, c, g, or t
  misc_feature (160)..(161): n is a, c, g, or t
  misc_feature (196)..(196): n is a, c, g, or t
  misc_feature (252)..(252): n is a, c, g, or t
  misc_feature (278)..(278): n is a, c, g, or t
  misc_feature (329)..(329): n is a, c, g, or t
  misc_feature (335)..(335): n is a, c, g, or t
  misc_feature (404)..(404): n is a, c, g, or t
gcttcttcaagagcgtagtttgctaggggggactttcntncccagatctgagtgcagtggcacccatcccggttcacaccgccgtgagcggtagagaggcccntcaaatgcccacgtgatcagtgtgacgcagacgcacggggcgtgcacaccacntctnncatgcagaatgtgatgagtcaccagtgcttcgccntgcgcaggccagcgccccaacccgacaagctgccgcctgccaccccggtgcctccngcagcgcgcgctggacctgctgcctncaggttgagcgctcagccgccggctgcagccgtacacactcagctgtcacnctgggngactggagtgacccactggatcctgatgctgaggcccagacagtgtatcggcagctgctcctggggcgngaccagctcaggctgaaattactggaggattctaacatggatacaactctggaggcagacacaggggcctgtcctgaggtcctggcccggcaaagagcagcaactgcccgcctgctggaggtgctcgcagacctggatcgtgcccacgaggagttccagcagcaagagcgagggaaggcggccctgggcccccttggcccctaaggaaatgccagagctagcccggaaggaggagcaagagccagggggccctcttcagcgcatcctgccccgggagtctcctgtctccttggacctctttgattctgtggtttggaggctcccagagacgtgcctagtcctgtgtgccttgagtccagaactcagggcatggaagccctttggcaggggccagccttgcactgagtgaaacttgccctctggcttgattcagactggagtggataggataaggaacctgacttatttgactgagactggggtctctacttcaccaaactggcctctatccataccaaggaggccagcctggccctgagctgctggatacagctggacctgaattcctgatgcccatgtgatgttgttgccccagatgggcactaaatggcctcactccttcctgttttcatgtctgct

SEQ ID NO: 82405 - DNA, 1008 bp, Homo Sapiens
  misc_feature (63)..(63): n is a, c, g, or t
  misc_feature (71)..(274): n is a, c, g, or t
  misc_feature (287)..(287): n is a, c, g, or t
ccagggatcagtagcgaggaagcggagacggccaataagcaaccgcctctccccgcgcgtgcncgatcaannnnnnnnnnnnnnnnnnnnnnnnnnnnnnnnnnnnnnnnnnnnnnnnnnnnnnnnnnnnnnnnnnnnnnnnnnnnnnnnnnnnnnnnnnnnnnnnnnnnnnnnnnnnnnnnnnnnnnnnnnnnnnnnnnnnnnnnnnnnnnnnnnnnnnnnnnnnnnnnnnnnnnnnnnnnnnnnnnnnnnnnnnnnnnnnnnnnnnnnnnnnctggccctcgagnccaagaattcgcacggaggcgtcagccgcacccggaagcccctggcccgccccaactcacgcgctgccgcccccaaagccactccagtggctgctgccaaaaccaaggggcttgctggtggggaccgtgccagccgaccactcagtgcccggagtgagcccagtgagaagggaggccgggcacccctgtccagaaagtcctcaacccccaagactgccactcgaggcccgtcggggtcagccagcagccggcccggggtgtcagccaccccacccaagtccccggtctacctggacctggcctacctgcccagcgggagcagcgcccacctggtggatgaggagttcttccagcgcgtgcgcgcgctctgctacgtcatcagtggccaggaccagcgcaaggaggaaggcatgcgggccgtcctggacgcgctactggccagcaagcagcattgggaccgtgacctgcaggtgaccctgatccccactttcgactcggtggccatgcatacgtggtacgcagagacgcacgcccggcaccaggcgctgggcatcacggtgttgggcagcaacagcatggtgtccatgcaggatgacgccttcccggcctgcaaggtggagttctagccccatcgccgacacgccccccactcagcccagcccgcctgtccctagattcagccacatcagaaataaactgtgactacacttggcaaaaaaaa

SEQ ID NO: 82406 - DNA, 1589 bp, Homo Sapiens
  misc_feature (97)..(97): n is a, c, g, or t
  misc_feature (107)..(311): n is a, c, g, or t
  misc_feature (321)..(322): n is a, c, g, or t
  misc_feature (1006)..(1084): n is a, c, g, or t
  misc_feature (1236)..(1270): n is a, c, g, or t
ccttgatgactgtaccctccgcagcgacgacgagccagcgatcatgaggagaagcgagacgcccatacgcaacgcctctcccggcgtgccgatcatnaatgcagctnnnnnnnnnnnnnnnnnnnnnnnnnnnnnnnnnnnnnnnnnnnnnnnnnnnnnnnnnnnnnnnnnnnnnnnnnnnnnnnnnnnnnnnnnnnnnnnnnnnnnnnnnnnnnnnnnnnnnnnnnnnnnnnnnnnnnnnnnnnnnnnnnnnnnnnnnnnnnnnnnnnnnnnnnnnnnnnnnnnnnnnnnnnnnnnnnnnnnnnnnnnnnaggaatcgcnnacgaggctgggaactgcagcacgagatcgagggtaccgcaaaaccgtgattgcccagtggagggcgctggacctggatgtggtgctgacccccatgctggcccctgctctggacttgaatgccccaggcagggccacaggggccgtcagctacactatgctgtacaactgcctggacttccctgcaggggtggtgcctgtcaccacggtgactgctgaggacgaggcccagatggaacattacaggggctactttggggatatctgggacaagatgctgcagaagggcatgaagaagagtgtggggctgccggtggccgtgcagtgtgtggctctgccctggcaagaagagttgtgtctgcggttcatgcgggaggtggagcgactgatgacccctgaaaagcagtcatcctgatggctctggctccagaggacctgagactcacactctctgcagcccagcctagtcagggcacagctgccctgctgccacagcaaggaaatgtcctgcatggggcagaggcttccgtgtcctctcccccaaccccctgcaagaagcgccgactccctgagtctggacctccatccctgctctggtcccctctcttcgtcctgatccctccacccccatgtggcagcccatgggtatgacataggccaaggcccaactaacagtcaagaaacnnnnnnnnnnnnnnnnnnnnnnnnnnnnnnnnnnnnnnnnnnnnnnnnnnnnnnnnnnnnnnnnnnnnnnnnnnnnnnngagaggggcgcgcgcgcgcgtcctcatcagtatcgtctctctccctgcgtggggcggaccctactagtcccctcctcgccgccccgcgctcttttctgtttctatcagcgggcgctccgccctctctgctagtgggcgtcgttctttatttnnnnnnnnnnnnnnnnnnnnnnnnnnnnnnnnnnntcattcgtctttctcccacccgctcgcgatcgcggcgcgctgagtggaacaacagacagacgggaggctcacggaggggcgctcactcctcctcgctgctggtagtacaaccgcggccgccggcgcgccggccgccatcctatgcagtatcctgctgctccagtgggagagcggggcggcggtggaggaggaccagaaaatagtgctgcggtggcgggcgcagaagatcttctcttatctcccgtgcggggaggggtatagttttctctacgaggggcgcgcgctcttgcgcagggggggcgcggggatagtgggtcta

SEQ ID NO: 82407 - DNA, 1016 bp, Homo Sapiens
  misc_feature (13)..(13): n is a, c, g, or t
  misc_feature (63)..(63): n is a, c, g, or t
  misc_feature (86)..(107): n is a, c, g, or t
  misc_feature (119)..(119): n is a, c, g, or t
  misc_feature (137)..(138): n is a, c, g, or t
  misc_feature (141)..(141): n is a, c, g, or t
  misc_feature (147)..(148): n is a, c, g, or t
  misc_feature (153)..(153): n is a, c, g, or t
  misc_feature (155)..(155): n is a, c, g, or t
  misc_feature (163)..(163): n is a, c, g, or t
  misc_feature (170)..(170): n is a, c, g, or t
  misc_feature (178)..(179): n is a, c, g, or t
  misc_feature (241)..(241): n is a, c, g, or t
  misc_feature (273)..(273): n is a, c, g, or t
  misc_feature (277)..(277): n is a, c, g, or t
  misc_feature (289)..(289): n is a, c, g, or t
tattgtatcctanccagttaataggcaatacacttatagatccacgtactggatctgtaaccntgaggatagcttctgcttaaaannnnnnnnnnnnnnnnnnnnnncacgggaaaccnttatttaaaagtcagtgnntgngcaatnngaaantnaagaccanaaggacntcactctnntcaaatgtgtgagcagtagaagagaccacatttacagtcaatagaaatattgaaaaaaaatnaggtgtttagtgtattttaaacagttttgttntgtnttacttgagggngacgtcccaaaataaaaggaatggagaaataatcaaaatcatgtataccatcttctatttccagctcctgattccccataggtaacatcccttaggagcgaagagttcaattagtaatgtttatgtgttatgtcaggagatgaaacccttgttcttaggatcacagaatactaaagcacctcaaaaaaacaggtatcatgtgaaacagtggttgccaaaagtggagcgaggatgatttcactaggcatttggcaattcttagagacatttccggttgtcacaattggagggatactagtagcatgaattgggtagaggccagggatgttgctaaatagattataatacacaaggaaagcagcctcaaagaattacccctcccaaaatgtcagaagtgctgaggctgagaaaccctgatgtaaagatcagtcccagttataaactgaaaacagctatttacaaagcagtaaatgcaagaaagaaaaggaagtcgcaaagagaaagtgatgtaatgcaaattgaggattttacaagatcagatactgctgctttaagtcaagggtgaataatctcaacaaacagcaaatagcaatcactttaccagctgcatattgcacccacataggtaactcttcattttaggaacaaactgaatttgaacactgagccttttgaactcagccatctctatatattctttccttaaaattcatgattttgggcaaaa

SEQ ID NO: 82408 - DNA, 605 bp, Homo Sapiens
ggggagaaggccctgatgaaagcagtcgcaactgtggggcccatctccgttgctatggatgcaggccattcgtccttccagttctacaaatcaggcatttattttgaaccagactgcagcagcaaaaacctggatcatggtgttctggtggttggctacggctttgaaggagcaaattcgaataacagcaagtattggctcgtcaaaaacagctggggtccagaatggggctcgaatggctatgtaaaaatagccaaagacaagaacaaccactgtggaatcgccacagcagccagctaccccaatgtgtgagctgatggatggtgaggaggaaggacttaaggacagcatgtctggggaaattttatcttgaaactgaccaaacgcttattgtgtaagataaaccagttgaatcattgaggatccaagttgagattttaattctgtgacatttttacaagggtaaaatgttaccactactttaattattgttatacacagctttatgatatcaaagactcattgcttaattctaagacttttgaattttcattttttaaaaagatgtacaaaacagtttgaaataaattttaattcgtatacaa

SEQ ID NO: 82409 - DNA, 1018 bp, Homo Sapiens
  misc_feature (58)..(58): n is a, c, g, or t
  misc_feature (71)..(71): n is a, c, g, or t
  misc_feature (78)..(79): n is a, c, g, or t
  misc_feature (85)..(85): n is a, c, g, or t
  misc_feature (94)..(94): n is a, c, g, or t
  misc_feature (110)..(111): n is a, c, g, or t
  misc_feature (116)..(489): n is a, c, g, or t
tttcccactttgattaggtgattttgatgcgtcagggggccggactatggaaaacgcnagcacgcgccttntacgtcnntgcctntgctgcctntgctcacatgtcttcnntgcgnnnnnnnnnnnnnnnnnnnnnnnnnnnnnnnnnnnnnnnnnnnnnnnnnnnnnnnnnnnnnnnnnnnnnnnnnnnnnnnnnnnnnnnnnnnnnnnnnnnnnnnnnnnnnnnnnnnnnnnnnnnnnnnnnnnnnnnnnnnnnnnnnnnnnnnnnnnnnnnnnnnnnnnnnnnnnnnnnnnnnnnnnnnnnnnnnnnnnnnnnnnnnnnnnnnnnnnnnnnnnnnnnnnnnnnnnnnnnnnnnnnnnnnnnnnnnnnnnnnnnnnnnnnnnnnnnnnnnnnnnnnnnnnnnnnnnnnnnnnnnnnnnnnnnnnnnnnnnnnnnnnnnnnnnnnnnnnnnnnnnnnnnnnnnnnnnnnnnnnnnnnnnnnnnnnnnnaagaattcggcacgaggcttcctgccccaggctggcgcggggcactttgtacaaatccttgtaaataccccacaccctcccctctgcaaaggtctcttgaggagctgccgctgtcacctacggtttttaagttattacaccccgaccctcctcctgtcagccccctcacctgcagcctgttgcccaataaatttaagagagtccccccctccccaatgctgaccctaggattttccttccctgccctcacctgcaaatgagttaaagaagaggcgtgggaatccaggcagtggtttttcctttcggagcctcggttttctcatctgcagaatgggagcggtgggggtgggaaggtaaggatggtcgtggaagaaggcaggatggaactcggcctcatccccgaggccccagttcctatatcgggccccccattcatccactcacactcccagccaccatgttacactggactctaagccacttcttactccagtagtaaatttattcaataaacaatcattgccccatg

SEQ ID NO: 82410 - DNA, 907 bp, Homo Sapiens; identical to SEQ ID NO: 830
  misc_feature (738)..(803): n is a, c, g, or t
  misc_feature (833)..(833): n is a, c, g, or t

SEQ ID NO: 82411 - DNA, 1779 bp, Homo Sapiens
  misc_feature (1386)..(1386): n is a, c, g, or t
  misc_feature (1428)..(1428): n is a, c, g, or t
  misc_feature (1476)..(1476): n is a, c, g, or t
  misc_feature (1488)..(1489): n is a, c, g, or t
  misc_feature (1493)..(1620): n is a, c, g, or t
  misc_feature (1760)..(1760): n is a, c, g, or t
aataagaaaatgtgccttgctaactgtgcacattacaacaaagagctggcagctcctgaaggaaaagggcttgtgccgctgccgttcaaacttgtcagtcaactcatgccagcagcctcagcgtctgcctccccagcacaccctcattacatgtgtctgtctggcctgatctgtgcatctgctcggagacgctcctgacaagtcgggaatttctctatttctccactggtgcaaagagcggatttctccctgcttctcttctgtcacccccgctcctctcccccaggaggctccttgatttatggtagctttggacttgcttccccgtctgactgtccttgacttctagaatggaagaagctgagctggtgaagggaagactccaggccatcacagataaaagaaaaatacaggaagaaatctcacagaagcgtctgaaaatagaggaagacaaactaaagcaccagcatttgaagaaaaaggccttgagggagaaatggcttctagatggaatcagcagcggaaaagaacaggaagagatgaagaagcaaaatcaacaagaccagcaccagatccaggttctagaacaaagtatcctcaggcttgagaaagagatccaagatcttgaaaaagctgaactgcaaatctcaacgaaggaagaggccattttaaagaaactaaagtcaattgagcggacaacagaagacattataagatctgtgaaagtggaaagagaagaaagagcagaagagtcaattgaggacatctatgctaatatccctgaccttccaaagtcctacataccttctaggttaaggaaggagataaatgaagaaaaagaagatgatgaacaaaataggaaagctttatatgccatggaaattaaagttgaaaaagacttgaagactggagaaagtacagttctgtcttcaatacctctgccatcagatgactttaaaggtacaggaataaaagtttatgatgatgggcaaaagtcagtgtatgcagtaagttctaatcacagtgcagcatacaatggcaccgatggcctggcaccagttgaagtagaggaacttctaagacaagccctcagagagaaactctaaatccccaacagagtaatcatgaggcctgtatattgccaaccccttttacaggcctacaaccccacagagagaaacggtgacccctggaccaaactttcaagaaaggataaagattaaaactaatggactgggtattggtgtaaatgaatccatacacaatatgggcaatggtctttcagaggaaaggggaaacaacttcaatcacatcagtcccattccgccagtgcctcatccccgatcagtgattcaacaagcagaagagaagcttcacaccccgcanaaaaggctaatgactccttgggaagaatcgaatgtcatgcangacaaagatgcaccctctccaaaagcaacctcgtgccgaattcttggnctcgaggggcannattnnnnnnnnnnnnnnnnnnnnnnnnnnnnnnnnnnnnnnnnnnnnnnnnnnnnnnnnnnnnnnnnnnnnnnnnnnnnnnnnnnnnnnnnnnnnnnnnnnnnnnnnnnnnnnnnnnnnnnnnnnnnnnnngctactcacattattgcgtgggctcatggcgctttcagtcggaaactgtcgtgcagctgcataatgaatcgcaacgccggggaaaggcgtttgcgtatggcgtctccgctctcgctcatgaccgctggctcgtcgtcggntgcggagcgtacagtcatc

SEQ ID NO: 82412 - DNA, 1001 bp, Homo Sapiens
  misc_feature (134)..(134): n is a, c, g, or t
  misc_feature (137)..(137): n is a, c, g, or t
  misc_feature (143)..(711): n is a, c, g, or t
aaagcgtatacggatagccaccgtcgcttaacggggtctgcaacaccagctggacgacgctaaaccgatgagtactacagcgtagtatgagaagcgcacgctcccgagggagaaagcggacagtatccgtagcngcnaggtcnnnnnnnnnnnnnnnnnnnnnnnnnnnnnnnnnnnnnnnnnnnnnnnnnnnnnnnnnnnnnnnnnnnnnnnnnnnnnnnnnnnnnnnnnnnnnnnnnnnnnnnnnnnnnnnnnnnnnnnnnnnnnnnnnnnnnnnnnnnnnnnnnnnnnnnnnnnnnnnnnnnnnnnnnnnnnnnnnnnnnnnnnnnnnnnnnnnnnnnnnnnnnnnnnnnnnnnnnnnnnnnnnnnnnnnnnnnnnnnnnnnnnnnnnnnnnnnnnnnnnnnnnnnnnnnnnnnnnnnnnnnnnnnnnnnnnnnnnnnnnnnnnnnnnnnnnnnnnnnnnnnnnnnnnnnnnnnnnnnnnnnnnnnnnnnnnnnnnnnnnnnnnnnnnnnnnnnnnnnnnnnnnnnnnnnnnnnnnnnnnnnnnnnnnnnnnnnnnnnnnnnnnnnnnnnnnnnnnnnnnnnnnnnnnnnnnnnnnnnnnnnnnnnnnnnnnnnnnnnnnnnnnnnnnnnnnnnnnnnnnnnnnnnnnnnnnnnnnnnnnnnnnnnnnnnnnnnnnnnnnnnnnnnnnnnnnnnnnnnnnnnnnnnnnaagaattcggcacgaggtggtggggcagaggtggggataggttaatgggtacaaaaaaagtagaaagaatgagtaaaacttactatatgatagcacaatagggtgactatagtcaataaaaacttaactgcatattttaaaatacagagtgtaatcaggttgtttgtaacacaaaggataaatgttgaggggatggataccccattctccatgatgtgcttatttcacagtgcatgcctgtatcaaaacatttcatgtactccataaatatatacacctagtatgtacac

SEQ ID NO: 82413 - DNA, 1124 bp, Homo Sapiens
  misc_feature (471)..(520): n is a, c, g, or t
tgaaactgtaccagttctgaagaccgttttctgccacacccccacccccagctgaccaggaggcagaggacacctccccatcactcagcattcccagctcagggcacaggcaggctggggtcctcgctggccttgccagaggttgagccgccccagggtatgaggagatgaataactccacagctcctcctggaccctgcgcgggagcaggcagctcctgtgctgtaaagaaaattgattcgcttgcggctcacctcagtcgaggaagccctggaatgttcagcagaacaccaccactgtgacatggggctgtggcagtgggagacaccgcgcgtggcgtgggtgtgtgtggcagcgtggctcgcattcagtcctgtgtaggagaggaaagggaatcaaaagcttgagcacaaacagatacctcagcccggtaagctgcagctctgctcaactgcgtcttctctcagcccnnnnnnnnnnnnnnnnnnnnnnnnnnnnnnnnnnnnnnnnnnnnnnnnnntaccccatctcccgagggctgacctcctctggcctcagcctgcagggtgtgggcagagaagggcatctgggacgtggtgccagtgaggagcccagttggctggcactgggcccatttgaaggtgtctcagacatttggccagtatgtctttctcaggggtttggtcacaaaggatggactcttcccacccagaggatgcagggaaagcacactgtgtctttccggtcattggatcctctccctttccccaggcagctcgcctggccacaccgttggagtgaaccctcactgccctcaaggacaacagcagggtgtcacccagagcccgatgaggggtgccagcaggtgcccccacgagtggggccttggcccaagcagagcttcccctgaaggtgccatcagccagggcagctctgtcccctcctgctctccatcttatatgtattctaaccaggaaaaatgtgatagcacatgggtagcctaggcagtgagtaaatacctcagatgtcctcctgcagcaagtgtctatatgttgtggttattttctatcttacatgttctcgaatgtttatatttcaataaacctctaccatattcacacaaa

SEQ ID NO: 82414 - DNA, 1316 bp, Homo Sapiens
  misc_feature (73)..(643): n is a, c, g, or t
  misc_feature (714)..(730): n is a, c, g, or t
ttggtcctacagctgagtatgggaagcccacctcccgaggaagaagccgacagtacccgtagcggcagggtcnnnnnnnnnnnnnnnnnnnnnnnnnnnnnnnnnnnnnnnnnnnnnnnnnnnnnnnnnnnnnnnnnnnnnnnnnnnnnnnnnnnnnnnnnnnnnnnnnnnnnnnnnnnnnnnnnnnnnnnnnnnnnnnnnnnnnnnnnnnnnnnnnnnnnnnnnnnnnnnnnnnnnnnnnnnnnnnnnnnnnnnnnnnnnnnnnnnnnnnnnnnnnnnnnnnnnnnnnnnnnnnnnnnnnnnnnnnnnnnnnnnnnnnnnnnnnnnnnnnnnnnnnnnnnnnnnnnnnnnnnnnnnnnnnnnnnnnnnnnnnnnnnnnnnnnnnnnnnnnnnnnnnnnnnnnnnnnnnnnnnnnnnnnnnnnnnnnnnnnnnnnnnnnnnnnnnnnnnnnnnnnnnnnnnnnnnnnnnnnnnnnnnnnnnnnnnnnnnnnnnnnnnnnnnnnnnnnnnnnnnnnnnnnnnnnnnnnnnnnnnnnnnnnnnnnnnnnnnnnnnnnnnnnnnnnnnnnnnnnnnnnnnnnnnnnnnnnnnnnnnnnnnnnnnnnnnnnnnnnnnnnnnnnnnnnnnnnnnnnnnnnnnnnnnnnaagaattcggcacgaggttttaaataaaaaagcaattgactgaagcattttctttttttaggtaaatagcnnnnnnnnnnnnnnnnnccaaccctggcatttgcacaaataatgcaaatggagtgatatggcctttaaggaaggagttagtagaaaggaagagggaagtgaagaaaatccagagaaaatgatgtactaatttctttcttttaaaaaatttctacatgtgcaaaaaaatcatgctgtttgaggaaaacaaagggaaatgagtacataaaactaaaaacataaatatgtttgggtgactggtaaaagtagaaaccaacctgggttacaaaaaggattatacattcaagatgctcttaaacccagtgggataacttatgttaaaactgtgttaatagttacgttaaaaatctcaagtttgtttttaaatcttcacaatacaagcaaagctgttttaaaatatacactatacatatttctcatagtctcttcaacctcattaatgcgcattaggctttttcatatactaaaacaagggggttctgaaagcgaaattgctcatagtaacccatccattattttaaatggttgtcttaagttttaagtgggctaaaaaactttagcagacttacataaatagaatttagcaacacaagtgttaattaaa

SEQ ID NO: 82415 - DNA, 1020 bp, Homo Sapiens
  misc_feature (63)..(63): n is a, c, g, or t
  misc_feature (115)..(115): n is a, c, g, or t
  misc_feature (176)..(176): n is a, c, g, or t
  misc_feature (189)..(189): n is a, c, g, or t
  misc_feature (195)..(195): n is a, c, g, or t
  misc_feature (261)..(261): n is a, c, g, or t
  misc_feature (272)..(272): n is a, c, g, or t
  misc_feature (292)..(293): n is a, c, g, or t
  misc_feature (332)..(332): n is a, c, g, or t
  misc_feature (388)..(388): n is a, c, g, or t
  misc_feature (393)..(393): n is a, c, g, or t
ccacacagtgtgcccagcgcttaacccagctgtcagcgcagatctgggttcagccccgcagantcacactgccacaagagctgtagccaacgcagtcacaggcctgatgggcccntgttctcccggtgggcagagacccgtgcctgcctggcagatgtcccacggaggcccccagntgccctccgagcncaggcntgcagcactgaaagacgacctgccatgtcccatggatcaccgcttcctgcatcttgcccctgtccntgccccattcncagggcactcctacccctgnntgccctgagccaacgccttcacggacctccctagcctcntaagcaaaggtagagctgcctttgtaaacctaggtctacccagggtttttactgtntggtntgagccaccccagtcaactcctagatttcaaaaacctttttctaattgggagtaatggcgggcactttcaccaagatgttctagaaacttctgagccaggagtgaatggcccttccttagtagcctgggggatgtccagagactaggcctctcccctttacccctccagagaaggggcttccctgtcccggagggagacacggggaacgggattttccgtctctccctcttgccagctctgtgagtctggccagggcgggtagggagcgtggagggcatctgtctgccatcgcccgctgccaatctaagccagtctcactgtgaaccacacgaaacctcaactgggggagtgaggggctggccaggtctggaggggcctcaggggtgcccccagcccggcacccagcgctttcgcccctcgtccacccacccctggctggcagcctccctccccacacccgcccctgtgctctgctgtctggaggccacgtggatgttcatgagatgcattctcttctgtctttggtggatgggatggtggcaaagcccaggatctggctttgccagaggttgcaacatgttgagagaacccggtcaataaagtgtactacctcttacccctaaaaa

SEQ ID NO: 82416 - DNA, 1062 bp, Homo Sapiens
  misc_feature (18)..(18): n is a, c, g, or t
  misc_feature (166)..(166): n is a, c, g, or t
  misc_feature (191)..(191): n is a, c, g, or t
  misc_feature (206)..(206): n is a, c, g, or t
  misc_feature (215)..(618): n is a, c, g, or t
  misc_feature (665)..(683): n is a, c, g, or t
  misc_feature (707)..(723): n is a, c, g, or t
gactggtactacagtganttgggaacccacctcccgaggagaaagcggcagttccgtagcgcaggtcgacaggaggccacgggagctccaggggacgcctgtatttttagtctgtcggttcccacctcgacttagctcgatttgtgatctcgtcaggggccgagcntatgaaaacgccagcacgcgccttntacggtcctgccctntgctgcccnnnnnnnnnnnnnnnnnnnnnnnnnnnnnnnnnnnnnnnnnnnnnnnnnnnnnnnnnnnnnnnnnnnnnnnnnnnnnnnnnnnnnnnnnnnnnnnnnnnnnnnnnnnnnnnnnnnnnnnnnnnnnnnnnnnnnnnnnnnnnnnnnnnnnnnnnnnnnnnnnnnnnnnnnnnnnnnnnnnnnnnnnnnnnnnnnnnnnnnnnnnnnnnnnnnnnnnnnnnnnnnnnnnnnnnnnnnnnnnnnnnnnnnnnnnnnnnnnnnnnnnnnnnnnnnnnnnnnnnnnnnnnnnnnnnnnnnnnnnnnnnnnnnnnnnnnnnnnnnnnnnnnnnnnnnnnnnnnnnnnnnnnnnnnnnnnnnnnnnnnnnnnnnnnnnnnnnnnnnnnnnnnnnnnnnnnnnnnnnnnnnnaagaattcggcacgaggctgatgttggagcggccgcggctgtaggcnnnnnnnnnnnnnnnnnnngagacagagtctcactctgtctcnnnnnnnnnnnnnnnnntggaacgcagggcaagaactcgtatttggaaggagatgggggaaaggagcggtattatacctaagttgtatttgcaggcaaatgagatggagccctctctgtaaagaagagtcatttgtgcaagtagacggggtctgtgggtgcaggccctggaggggcacacaattgcctggaggcttctgtgagatcgggagagggaggagaggcagtctcttgacaaaataaagtatttttattcatttgtatttattaaatgaaaaaacaatcccatggtgtccctgttgtgtggtggaacctaatgactgttgaaataaagttctgtgttttccctgccctgca

SEQ ID NO: 82417 - DNA, 1041 bp, Homo Sapiens
  misc_feature (44)..(44): n is a, c, g, or t
  misc_feature (71)..(71): n is a, c, g, or t
  misc_feature (87)..(87): n is a, c, g, or t
  misc_feature (102)..(102): n is a, c, g, or t
  misc_feature (120)..(120): n is a, c, g, or t
  misc_feature (173)..(173): n is a, c, g, or t
  misc_feature (209)..(209): n is a, c, g, or t
  misc_feature (213)..(213): n is a, c, g, or t
  misc_feature (271)..(271): n is a, c, g, or t
  misc_feature (291)..(292): n is a, c, g, or t
  misc_feature (299)..(299): n is a, c, g, or t
  misc_feature (332)..(332): n is a, c, g, or t
  misc_feature (452)..(452): n is a, c, g, or t
  misc_feature (671)..(679): n is a, c, g, or t
tggggagaatactgcttgctggtccagatctcataactggcatncaaagggaaatttgtacaggagtagtngaaaagtctattgatntactttacttttcantacagtaccaggtagatnactgtaggaagtcagtgcaaggtgcatgcttgattgatagatatgatttgttntcagtctctggggtcagtttgtgggttctgctttcntgcntaaatcaaagactattcaagtcaacaacactgaaaactgcttgtcgcctccactctancagctgtgcctaatataatnnaataatnaacgcacagccctatgtaacagacaggaattcntgtgcaatgtggagcaaatggaatgtctccttccgcaagtctttttaatcctcatatctggagtacaagggtagacctctggcttaccacatacactatgctaaagtcatcagccactgntactacatcttgccagaaggtttccctcgccaacaaacagttgaaatttaagggaagaagcaaaagctaaactgtctttgaccctaagatagatagaaagctatttatttgtcttcagtgttcaaggcatgactagtatttctaattagcctaataaattcccacactttctgaagtgaacactaatggtattgtcctactaaaactgtcattgtttcnnnnnnnnnaactggtcagtcattcacaataagctatgagggtaaataaatatgtgttataacaagtaaaccgtagttgcaagaatataccatgaagattaaagtaggctgggtttcatttccatcttcccacacatctcattgaatttgatggttgacttaattggcaccataactttgtatgatattatacattaacctttatttatgtaaagtaaaatgccttatatattaaagagtaagtgcaataatatgaaatagcctgtacattttaaaaatgttgtcaccaagttatataaatccacatctctgtaaacaaccttttttaagtaattttaaaaaaaataaacactctgcttactacttgaaaa

SEQ ID NO: 82418 - DNA, 925 bp, Homo Sapiens
  misc_feature (77)..(111): n is a, c, g, or t
tacgatccctatagggcgctagctcgtttgtagacgaacgacgagcgcagcgaagtagttgagcgaggaagcggcgnnnnnnnnnnnnnnnnnnnnnnnnnnnnnnnnnnncagtcgacggtaccggacatatgcccgggaattcggccattacggccggggaaaaatggcggggtctcctgagttggtggtccttgaccctccatgggacaaggagctcgcggctggcacagagagccaggccttggtctccgccactccccgagaagactttcgggtgcgctgcacctcgaagcgggctgtgaccgaaatgctacaactgtgcggccgcttcgtgcaaaaagctcggggacgctctgccggaggcagattcgggagcccgctctgcgagatgcgcagtggacttttgaactcagctgtgcaagagaactatcagcattcaattgggcaagcattggcaggaaagcttcagataatggtcctatggattctgacatcaaagtacttgaagatcagtttgatgaaatcatagtagatatagccacaaaacgtaagcagtatcccagaaagatcctggaatgtgtcatcaaaaccataaaagcaaaacaagaaattctgcccctcatatggaaaatttgaaatgcagaggggaaacagtagcaaaggagatcagtggagccatgaaatccttgcctgcattaattgaacaaagagagggattttcccaagttctcaggaagcagcctgttatcccccctcagaggattcaccaaggaagtcttttcccgttgtcctaggaaaccagaggcttaacctgagaacttttttacccggattggaaccccccccaaccggaaactggcttccaggaaaaccccctggccggggaactggaaaagaaaagccaaccttaagactgcccccc

SEQ ID NO: 82419 - DNA, 1482 bp, Homo Sapiens
  misc_feature (86)..(120): n is a, c, g, or t
  misc_feature (1402)..(1402): n is a, c, g, or t
  misc_feature (1420)..(1434): n is a, c, g, or t
aaatgtatacgatcactatagggcccttgcgtttatgagccgaacgaccgagcgccagcgaggtcagtgagcgaaggaagcggcgnnnnnnnnnnnnnnnnnnnnnnnnnnnnnnnnnnncagtcgacggtaccggacatatgcccgggaattcggccattacggccggggagagtgccccgcccacagttccgacgaaaaatggcggggtctcctgagttggtggtccttgaccctccatgggacaaggagctcgcggctggcacagagagccaggccttggtctccgccactccccgagaagactttcgggtgcgcatgcacctcgaagcgggctgtgaccgaaatgctacaactgtgcggccgcttcgtgcaaaagctcggggacgctctgccggaggagattcgggagcccgctctgcgagatgcgcagtggacttttgaatcagctgtgcaagagaatatcagcattaatgggcaagcatggcaggaagcttcagataattgttttatggattctgacatcaaagtacttgaagatcagtttgatgaaatcatagtagatatagccacaaaacgtaagcagtatcccagaaagatcctggaatgtgtcatcaaaaccataaaagcaaaacaagaaattctgaagcagtaccaccctgttgtacatccactggacctaaaatatgaccctgatccagcccctcatatggaaaatttgaaatgcagaggggaaacagtagcaaaggagatcagtgaagccatgaagtccttgcctgcattaattgaacaaggagagggattttcccaagttctcaggatgcagcctgttatccacctccagaggattcaccaagaagtcttttccagttgtcataggaaaccagatgctaaacctgagaactttataacacagatagaaaccacaccaacagagactgcttccaggaaaacctctgacgtggtactgaaaagaaagcaaactaaagactgcccccagagaaaatggtatccattgcggccaaagaaaattaatcttgatacatgagctctttctgtttattttgggagttgaaaataggcaccatcaacatttagattacagcctaattaatacctagataagacttaatttgaaataagaaataactcttttactagtgattcatttatacagatatagtatctctgtgcggggatatgatataatattgtatttccttactgttttatctattgtaaataaaaagcattttaaaaagtattgacacaaagcccatcagtgggcattaaaaatattaaaagtgcagacttttactgtccttaagtgccatcaactctcagctcccttgtagcttttgtgggatttaacaagtaacaaattctgttgtgtttcccctgngtatacatctttctaggnnnnnnnnnnnnnnngggcgccgctcgcgatcagcggacgcgtgggtcgacgatatcccggga

SEQ ID NO: 82420 - DNA, 556 bp, Homo Sapiens
gcggccgcttcgtgcaaaagctcggggacgctctgccggaggagattcgggagcccgctctgcgagatgcgcagtggacttttgaatcagctgtgcaagagaatatcagcattaatgggcaagcatggcaggaagcttcagataattgttttatggattctgacatcaaagtacttgaagatcagtttgatgaaatcatagtagatatagccacaaaacgtaagcagtatcccagaaagatcctggaatgtgtcatcaaaaccataaaagcaaaacaagaaattctgaagcagtaccaccctgttgtacatccactggacctaaaatatgaccctgatccagttctcaacgggaatgctttcaacttttccccattcaacatgatgttggctgtggatttgtcatatatggtttttattacttcgagcccctcatatggaaaatttgaaatgcagaggggaaacagtagcaaaggagatcagtgaagccatgaagtccttgcctgcattaattgaacaaagagaaggattttcccaagttctcaggatgcagcctg

SEQ ID NO: 82421 - DNA, 535 bp, Homo Sapiens
ccgcttcgtgcaaaagctcggggacgctctgccggaggagattcgggagcccgctctgcgagatgcgcagtggacttttgaatcagctgtgcaagagaatatcagcattaatgggcaagcatggcaggaagcttcagataattgttttatggattctgacatcaaagtacttgaagatcagtttgatgaaatcatagtagatatagccacaaaacgtaagcagtatcccagaaagatcctggaatgtgtcatcaaaaccataaaagcaaaacaagaaattctgtccttgcctgcattaattgaacaaggagaagggattttcccaagttctcaggatgcagcctgttatccacctccagaggattcaccaagaagtcttttccagttgtcataggaaaccagatgctaaacctgagaactttataacacagatagaaaccacaccaacagagactgcttccaggaaaacctctgacgtggtactgaaaagaaagcaaactaaagactgcccccagagaaaatggtatccattgcg

SEQ ID NO: 82422 - DNA, 562 bp, Homo Sapiens
ggacgctctgccggaggagattcgggagcccgctctgcgagatgcgcagtggacttttgaatcagctgtgcaagagaatatcagcattaatgggcaagcatggcaggaagcttcagataattgttttatggattctgacatcaaagtacttgaagatcagtttgatgaaatcatagtagatatagccacaaaacgtaagcagtatcccagaaagatcctggaatgtgtcatcaaaaccataaaagcaaaacaagaaattctgaagcagtaccaccctgttgtacatccactggacctaaaatatgaccctgatccaggagccaagcctggtggactagctctaggggcagtctaggagagaaggggatcggggaaccttcatcccttctgcctctggtgaactgcgcaagatgaagaggatgaagctgggtgacccagagcccgccctccctctctcggcagtcatctccaaggccggagtagactggactggagggcctctgagaggacacagccaggaagcacactgtccctgtgctcttcacccaccatgaagagacag

SEQ ID NO: 82423 - DNA, 1008 bp, Homo Sapiens
  misc_feature (88)..(88): n is a, c, g, or t
  misc_feature (151)..(151): n is a, c, g, or t
  misc_feature (154)..(154): n is a, c, g, or t
  misc_feature (190)..(190): n is a, c, g, or t
  misc_feature (202)..(202): n is a, c, g, or t
  misc_feature (242)..(242): n is a, c, g, or t
  misc_feature (268)..(268): n is a, c, g, or t
  misc_feature (274)..(274): n is a, c, g, or t
  misc_feature (296)..(296): n is a, c, g, or t
  misc_feature (301)..(301): n is a, c, g, or t
  misc_feature (846)..(859): n is a, c, g, or t
gcagcagttccgatgaagcgcgtggccacgcatattgagtagtcatcatagcacccagcttcacttatctccgctgtatgtgtgtgantgtagcgatacattcacacaggaacagtatgactgatacgattatacgactcatatagggatntgncctcgagccaggattcggcacgagcgataccctgtntgcacacatttntgctagcagatacacccttatgggaaacacacagcgtatngtaaaagttactagtaataatccctnagcatnatctaatagccagtccatatcnaaatntcaccagttgctaaaaatgccttttaacatttgaattgttccaatgaagatttaaccaacgttcatgtgttctattaggtcttgctgtcttgagcgtgtcttctctccttttttcctcttgccattgattgctttacatagcagttgcaaagcaagggtcatgatgaactaagtttctctgatttcatattaggttttctttctaccataccagtgaggaaaggaagatatttcttccaaggtctgaaagatttaattgtaactagttacatttttgtttattatagtcaagcatgtatcaaaatgaatttctattaaattcattcatttggaaaggtttagagatgttgaacagaagtctagtctaatgaaaaaaatttttttaatatttagaacttttcctaaatcctgaattaactaagaaatgaccattaaattaatcacttttttaactttaaaaggtgaaaacctgttactttttaggtgcctggaattctgttggattgctaaagcatatgttaagtcaaaaatcatagcagaggccnnnnnnnnnnnnnnaactttgtacatttcatagaaagctcatacatttcttccattctttctcagaaaaaaatggcatttaacaaatgttcggtgtataaagctgtcagtttgctagtagttataatttgttgtgttcttgaataaaaatatattgggtacat

SEQ ID NO: 82424 - DNA, 1117 bp, Homo Sapiens
gccagaacttcaaagaaagggccagcagttaccagtacataagctactcagaactgagtgcaactcaggtacagataacaacaggagccagcacagggaaggttcctctcaagacaggcaggcccaaggagacagcactgaaatgcatggtgaaaacgagaccacccagcctcatactcgaaacagtgacagtaggggtggcaggcagttgcgaaatccaaacaatttagttgaaactggaacactacccattcttcgccttgctcacttttttttactaaatgaaagtgatgatgatgatcgaatacgtggtttaaccaaagagcagattgacaatctttccaccaggcactatgagcataacagtattgatagtgaactaggtaaaatctgtagtgtttgcattagtgactatgtaactggaaacaagctcaggcaattaccttgcatgcatgaatttcacattcattgtattgaccgatggctctcagagaattgcacttgtccgatctgtcggcagcctgttttagggtctaacatagcaaacaatgggtaaggtgatgggatctactcaaatactgttttttagtagaactgaatgttcaagcattgttttgctgagttatttgtgattagctaaccaggatgaaaaataacagattatatatagtttgaactatttttcgtgtgcttttttaaactggttaacaacagacactttactatcacaattttacaaatacaaactgttcaacttatccaggaaataccgaatagtgcaatattcgcgtagaaaccaaaattaccttcctaaaaatggtcccatttcggtcagtttttgtcatgcctaagcactttgagatccgccccaacttccacgtgcggttaggaaatccatcttccttatttcctaaatagttacagccagaactttagccttcaagctttccaaggggctaagtaacttattatcctgacacacttgggggtctaagtagagcttccgataaccgttgtgtacttgagagggcacgactccttccgtacagaggaatgggcgcacagattgcgcatcaatgctcccggcacacggagcacatataattgcaccacacaa

SEQ ID NO: 82425 - DNA, 479 bp, Homo Sapiens
gagcgcacctgtgccagatgcatgccactttcagtagctgccaaatgtgcctttaattaagaacatctctaatttttttcttcagatcaagtcagcatttggggtcgggatttgggcagggaactctggggtgcaaatatctggtgaaaccaccagagaatttgtttgtcaaagtgacatgtataattttagttgagacgtgtttgtgtatatatgtgtatttgcctttgtttagtagcacggttatttgctaaaataattgtcaaaaaattgctctgtcggtcggtctttgatgtaagaacaaagtgtggtctatacatctaatatggcctttgtacctaaccatgttcataggtaatctttgtactctgtgtgcagcagtatttggtttgcatttaaagtgaaaataacggctgttatttttctggcattactaagataaactgaaaaataataaagaaaaatgccttacatagccc

SEQ ID NO: 82426 - DNA, 947 bp, Homo Sapiens
  misc_feature (163)..(163): n is a, c, g, or t
catcacacggaacagttgactgatccgattatcgactcactaaggaattgccctcggcccagattcgcacgagtgaggtacaaaggagatgatacacttttatatgtcatatccctatattcaaactaagcaatggggattatacaaatgaattatagttccntaaagaggaagagaggacagtgactactacatagagaaaaataatctcaagtatcaaacacaatattcaatttacattgtcagtggatatacactaaggacagaaaaaaatcttagactaatgaatgtggtttttcatgattaatttcacaaaatcttgatatcttttttattattaaaagtatagattaaattaataatcatgtaacattagaccccagtaatctaaatttgacatggaaacctcattatatgctttatttttctttgtaaacagtaaatatttcccactcctgtctacatgaaaaggtctagagtaattacagttcagtaacaatgagcaccactaggtacccagatggtgttctttcattttcatttgcaattaaaaggaatcagaacttatttgcaaaacagctaatagttccagggcagtaagtgtacaagttcatatctggtacaagatgtccaggattcaaggaggctcttaaagacttgggattctgtcaaagggttatacaagccaacttgaagggatttctacaggccatgtaaaaatgagacagtttgagcatgaaatatttgtatatgtgtctgtttttaactcttaataacctcatcaccgtacaagaaaggcagggtaagtgcttgatttcacttccctttattatcagttctcaggacaaattgatatgctgccaatctctaaagcaacaaaatcgaacctgtagggtagtcaaaaagctcatgctggaaaattccacccaataaagataaaagttaga

SEQ ID NO: 82427 - DNA, 1088 bp, Homo Sapiens
  misc_feature (38)..(38): n is a, c, g, or t
  misc_feature (46)..(46): n is a, c, g, or t
  misc_feature (48)..(48): n is a, c, g, or t
  misc_feature (78)..(78): n is a, c, g, or t
  misc_feature (102)..(102): n is a, c, g, or t
  misc_feature (179)..(179): n is a, c, g, or t
  misc_feature (1003)..(1025): n is a, c, g, or t
ctgcccattgtgtgccaatgtccagtgactgctcagtnacgtcacntnagggacccacgtgaagacctatcacttgcntgcagtagccgcgcatggagtacntgcagagcagagttgtgcacaggactgctgcgcggaactgcatgcggacgagtcatcacagtcaaagtggctgactntgttggcccgcgacatcctggacagggagtactatagtgttcaacagcatcgccacgctcgcctacctgtgaagtggatggcgctggagagcctgcagacctatagatttaccaccaagtctgatgtgtggtcatttggtgtgctgctgtggaaactgctgacacggggtgccccaccataccgccacattgacccttttgaccttacccacttcctggcccagggtcggcgcctgccccagcctgagtattgccctgattctctgtaccaagtgatgcagcaatgctgggaggcagacccagcagtgcgacccaccttcagagtactagtgggggaggtggagcagatagtgtctgcactgcttggggaccattatgtgcagctgccagcaacctacatgaacttgggccccagcacctcgcatgagatgaatgtgcgtccagaacagccgcagttctcacccatgccagggaatgtacgccggccccggccactctcagagcctcctcggcccacttgacttagttcttgggctggacctgcttagctgccttgagctaaccccaagctgcctctgggccatgccaggccagagggcagtggccctccaccttgttcctgccctttaactttcagaggcaataggtaaatggggcccattaggtccctcactccacagagtgagccagtgagggcagtcctgcaacatgtatttatggagtgcctgctgtggaccctgtcttctgggcacagtggactcagcagtgaccacaccaacactgacccttgaaccaataaaggaacaaatgactattaaagcacnnnnnnnnnnnnnnnnnnnnnnncctgagcaggcggccgcaagcttattccctttagtgagggtaattttagcatggcactgcccg

SEQ ID NO: 82428 - DNA, 1043 bp, Homo Sapiens
  misc_feature (104)..(104): n is a, c, g, or t
  misc_feature (123)..(123): n is a, c, g, or t
  misc_feature (134)..(134): n is a, c, g, or t
  misc_feature (170)..(170): n is a, c, g, or t
  misc_feature (175)..(176): n is a, c, g, or t
  misc_feature (203)..(203): n is a, c, g, or t
  misc_feature (246)..(246): n is a, c, g, or t
  misc_feature (624)..(661): n is a, c, g, or t
ataaggactgagacacttattggagagcatgcagatcagaattgccatatgtatttatgtattatgcctgtgactaggagagagatttcatggtcacaaaatcntagaggtccttagtagatntgtagtccctnagagaccaccgtgataaataatggagtgccctttcntgttnntgcaaaaggataaaagtcttacgcacntgtctcctccctgtctctagtgcttccagaaagtgcatacccntaacaaatcactctgagctggaggagcccaccatttgcacccacctacccaccctcacccctgttcagatgaatttccagaaagagctaaggctcataaggttcccttttaagtattatttaatagttgaggccagatacttacatgcaagtctgggttatggttgttttgcctttctcagcttgtgaagtcattctaaagctagaggaagtatgtgatatacacatggactaaggctcaggtgacactatggctagattaacatctgggattaggactggaaacacatgtcattttgaactaagggaaactctttgtcatcctaatttggaatttggtccctggatggctagggatccatgaaccaggcaggtaccnnnnnnnnnnnnnnnnnnnnnnnnnnnnnnnnnnnnnnaattaagatgggctaagatggggcttgcaacattaaacatgagctgagcatccataagcattgaattgggattaaataaagatgttgggcaggaactgaacactgctaatatgatgataaatatgcctgactaaagccactacagaaatccagagattggctgttaaaatttgttttgtggaaagactaattctctttgatactgcagaggcagtggccatggatctgttcctctgtgctaaatgtcttgtggcagggtgtgtttgtgggggagtgttcactggtactcttgagtggcctgaagtgacccattctatgaattgttaattaaggtgccaaaaaaaattaataataaagcttggttttttgaaaaacccaaaaa

SEQ ID NO: 82429 - DNA, 907 bp, Homo Sapiens
gggttcctttctatcccactttcaaggagggaatggctttggaagactatcagaggatgcttggttaccaagtaaaggattccaaagtggagcagcaagacaactttctaaaacgcatgtcagggatgatccgtctctacgctgctatcatccagctccggtggccatatggaaaccgacaggagattcaccctcatggcttaaatcatggatggcgctggttggcacagatcttaaacatggagcccttgtcagatgtgacagccaccctcctctttgacttcctggaggtgtgtgggaatgccctcatgaagcaataccaggttcagttctggaagatgctaattctcatcaaagaggactactttcccagaattgaagctatcacaagctcaggacagatgggctccttcatacgcctcaagcagttcttggagaaatgtttgcaacacaaggacattcctgtccccaagggctttctgacttcctccttctggcgctcctgatgtcactccatcacccaccatcaccgctgctgcaaagaggcaataataaaggaactgaagacagctgtatttgggagaagtcatgtcagattcagaaatttgccattatgtatttttatgtatttatgccttgtgactaggagaggagattttcatgggtcacaaaattcttggaggtcccttagtagatttggtagttccttaagagatccacgtgataaaataaatggagttggcctttcttgttttttgcaaaagtgataaaaggtctttagcacttgggtctcctcccctgtctctagtgtctttcagaaagttggcaataccttaacaaatgcactctgagctgaagggagccacattttgcaccaactaaccacctcacctgttcagatgattca

SEQ ID NO: 82430 - DNA, 402 bp, Homo Sapiens
  misc_feature (233)..(269): n is a, c, g, or t
  misc_feature (326)..(334): n is a, c, g, or t
ctttaaggaaagttttattttactgttcattttactttcttggtaacaaaaactaaaataaggaatagaaaagctgtttttcaggctgacagtccaattaagggtagccaagaccttgcatggtagagtaggaatcatagtgtcagtgaggtcccgtgagtctttgtgagtccttgtgtcatcgttcgggcactgtttttttatgcaagggcaaaaatctttgtatctggggnnnnnnnnnnnnnnnnnnnnnnnnnnnnnnnnnnnnnagatattgaggtcttcctagtgttacttaaattaagatcaaggtaagaaacattgtnnnnnnnnnttacaaaagtgctatttgtttcctaaaaacagtgatttctattaaaaaggtgtcagaactggaaaaaa

SEQ ID NO: 82431 - DNA, 397 bp, Homo Sapiens
  misc_feature (64)..(72): n is a, c, g, or t
  misc_feature (129)..(165): n is a, c, g, or t
tccagttctgacacctttttaatagaaatcactgtttttaggaaacaaatagcacttttgtaannnnnnnnnacaatgtttcttaccttgatcttaatttaagtaacactaggaagacctcaatatctnnnnnnnnnnnnnnnnnnnnnnnnnnnnnnnnnnnnnccccagatacaaagatttttgcccttgcataaaaaaacagtgcccgaacgatgacacaaggactcacaaagactcacgggacctcactgacactatgattcctactctaccatgcaaggtcttggctacccttaattggactgtcagcctgaaaaacagcttttctattccttattttagtttttgttaccaagaaagtaaaatgaacagtaaaataaaactttccttaaag

SEQ ID NO: 82432 - DNA, 1189 bp, Homo Sapiens
  misc_feature (476)..(484): n is a, c, g, or t
  misc_feature (511)..(1060): n is a, c, g, or t
  misc_feature (1118)..(1118): n is a, c, g, or t
  misc_feature (1178)..(1178): n is a, c, g, or t
ccctacagagaaaattctgatacagattattgatatattataaatgttgctgttgagcgggatgtagataaactaaatgttgtggtttgaatattattttgatttgttgagattttcttttttctcttacatcggtgtgttgaactgattctgcctctttgctgcaaaagggaattggaaagtcttattaaaagcctccagatgttttcatactcttttaaaatgtatgtaaatgcatactaatcatatctaatgtgaaagagttttaaagtatatagagagcaaaaactggcaggatcgtaagtgaaggtgactagtaatctaatttaaatcacctgcagctaagcatgattgaccctgccagaggaaaacatgcctatttgaccatttcctttaaagcagttgccattattcaaatacagagaaatagccacagggctagtgtttttcaaatgcattttaaagaacatggggannnnnnnnngtagttgtccctcgtgccgaattcttnnnnnnnnnnnnnnnnnnnnnnnnnnnnnnnnnnnnnnnnnnnnnnnnnnnnnnnnnnnnnnnnnnnnnnnnnnnnnnnnnnnnnnnnnnnnnnnnnnnnnnnnnnnnnnnnnnnnnnnnnnnnnnnnnnnnnnnnnnnnnnnnnnnnnnnnnnnnnnnnnnnnnnnnnnnnnnnnnnnnnnnnnnnnnnnnnnnnnnnnnnnnnnnnnnnnnnnnnnnnnnnnnnnnnnnnnnnnnnnnnnnnnnnnnnnnnnnnnnnnnnnnnnnnnnnnnnnnnnnnnnnnnnnnnnnnnnnnnnnnnnnnnnnnnnnnnnnnnnnnnnnnnnnnnnnnnnnnnnnnnnnnnnnnnnnnnnnnnnnnnnnnnnnnnnnnnnnnnnnnnnnnnnnnnnnnnnnnnnnnnnnnnnnnnnnnnnnnnnnnnnnnnnnnnnnnnnnnnnnnnnnnnnnnnnnnnnnnnnnnnnnnnnnnnnnnnnnnnnnnnnnnnnnnnnnnnnnnnnnnnnnnnnnnnnnnnnnnnnnnnnnnnnnnnnnnnnnnnnnnnnnnnnnnnntcgtgcgtctctgttcgacctgcgctacggatactgtccgcttctccctcggaggtgngttctatagtcagcgtagtaccattcggtagtctcgtcagtggtgttgagacccgtagcnacgtggctacg

SEQ ID NO: 82433 - DNA, 973 bp, Homo Sapiens
  misc_feature (107)..(107): n is a, c, g, or t
  misc_feature (260)..(261): n is a, c, g, or t
  misc_feature (315)..(315): n is a, c, g, or t
  misc_feature (384)..(384): n is a, c, g, or t
gatgaggcgtgcgaccatatggtgccatcttgccccagtacatttgtcgtgtatttttgaattgacgatacattcaacagacagttgctgtacgattatagatcatntaggattgcctcgagccagatcggcacgaggtctcccgtgatctgtgcatgctcaagttgagaccgctctctcatagatgctcctcccaagggaagcagtgtgaacagcagagaaagtcccgtccctatctctgactgtgcagtgagtgtgcnntaggaacaggtcccttcctaagctctagtgtccccatctgtaaaatgggctgantgccctccatggtcagagcggccatctggctgtgccatcctgcatttttaggaatggaaagcaggcctntgaggcagtggacaggaagattctcatccttgaattctagctcccattccaaactgttagtccccaaccttgtggtcacatcagaggtcaacagcagaacagaggcaggtcagggttgtccgctctgattagcagaacgacagccccttcctcctcctccctccttcccatccctactcattagctccctgctcctgggatgcttcccaagcagcccaggcctctagcctccatggctgatgacctcagctttcacactggtgaagtctgtgtacccatactgcagccccatcccatggggcccctgaagacccactgaggaattccgtagggtcttgttcccacgaccggagtgctggctctcacagtgaattttgatgcatttaaaataagattctgatgccagactgttaaaataggcgctggttctgaagcaccgatggaaacagattgatgcagatggaaggaggaagggagactgggcccactgatttccagccccaccatgtgtgctgttttcagatgtgattgaggggtgttctgccctgcctccactgtcacagcctttaataaagatgtgaatcttgaa

SEQ ID NO: 82434 - DNA, 957 bp, Homo Sapiens
  misc_feature (103)..(103): n is a, c, g, or t
  misc_feature (199)..(276): n is a, c, g, or t
  misc_feature (315)..(348): n is a, c, g, or t
tacgcctgatgcttacgtccccacgacgacggcgagggtatgacgagacggagacccatcgcaacgccttcccggcgtgccgatcataatcagtgcagacagnttccgatgaaagcgccatggccacgcataatgtgatagctcctcatagcaccccagcttacactttgctccgctcgtatgtgtgtgaaatgtgacnnnnnnnnnnnnnnnnnnnnnnnnnnnnnnnnnnnnnnnnnnnnnnnnnnnnnnnnnnnnnnnnnnnnnnnnnnnnnnaagaattcggaacgaggggagcggccgcggctgtaggcnnnnnnnnnnnnnnnnnnnnnnnnnnnnnnnnnntaaataccccaggcaaagttactaaccagcagtcttagaatgagaatgctttccagtgggacacatcatttatttaattcagttttatcaatctgaaagcctcatagctgaatactaaagaagagttgagctttgaggagaagcagagtatttcatcatggttcaaaccagtatctgaaacaagtaggtttctagggagaaaagataatctcttaccaagcatgtcagttcacctgccttcatcaaaggactgactgcataggtgttaacaatcataattctgaaagttgctctttgatatcagtatattctataatgtattattggcttttaaatacctcaccctcctcacagtctgtaggacatttttatttaacttcttgatttgaatcaaagcagctattacttcattagctcttttgaagtgttcttggttgagaaggaacagcaaggcttatagaagaaagccaacttttcaaatcagtctttcttttgatcagcgctgaatctgatactacactgtactttaatcagaggaaaaaatggagatttgccttttttctatgaaaatttatccataatgaggaaaggaataaaagatatagcttt

SEQ ID NO: 82435 - DNA, 647 bp, Homo Sapiens
cggagcgagagccgaggccgggggaagttcctgcggagtgctcaagggcagaagaggtgccgcgtcccgaagaggggaagcggagaagtttgctgctgcccgggtcgcctcgcgacgctgagagaatcgcccagccctccgcagccgcccagcgagaaccggagctgcggccccgcaccggcgtgagtccagctgagctgacacgccgagccggttgtgcctttccgagggaggaatgtgccgtggaatccaaactttggaaaacgtcccacccgaattcccagcgagcagcaaggagaccagagcgtcgatggagccaccgttagttgcgggagggctgtccccaagaggaattcatcactgtcgtccgctgggagggaccaaccttgaaatggggttggtggagagagggatagagaagagccggcgtgcttataaataactaaacttagctatgaacccttccgattcccaagtggggaagatggggtaaaattctaagtgacttctcgctccgaagagggataccacaaaaagcggagcgcagggtacttggcgtataataagccatcaataatttatgggtgaaattgagagccaaatataagatgataaactgaagaataaaaacagctgacaaatactgt

SEQ ID NO: 82436 - DNA, 575 bp, Homo Sapiens
  misc_feature (124)..(140): n is a, c, g, or t
  misc_feature (273)..(301): n is a, c, g, or t
atgctgaactgttcaatgatgctgggattctctctttgcatgtcatatgtgaatgtgtggttcaagctgtaactgttgaaattattttagaatttatgacgatttctcagcagggcctatgttnnnnnnnnnnnnnnnnnttattctttagtttttgtgatatgcttatatttttaaggaagtaagttatagcatacttttttaaaagtaggaaccacaatctttatatggagcagcttgttatatctgattttcatgtaactcattggaaannnnnnnnnnnnnnnnnnnnnnnnnnnnngcataagccagtgcacccagccgagaattagtatttttatgtatggttaaaccttggcgtctagccatattttatgtcataatacaatggatttgtgaagagcagattccatgagtaactctgacaggtattttagatcatgatctcaacaatattcttccaaaatggcatacatcttttgtacaaagaacttgaaatgtaaatactgtgtttgtgctgtaagagttgtgtatttcaaaaactgaaatctcataaaaagttaaatttttgtctg

SEQ ID NO: 82437 - DNA, 1340 bp, Homo Sapiens
  misc_feature (80)..(80): n is a, c, g, or t
  misc_feature (95)..(95): n is a, c, g, or t
  misc_feature (120)..(120): n is a, c, g, or t
  misc_feature (124)..(124): n is a, c, g, or t
  misc_feature (131)..(546): n is a, c, g, or t
  misc_feature (577)..(592): n is a, c, g, or t
acgcagtcgacagaaccagagactccagggaccctgttttatgtcttcggttcccactctgattagctcgattttgatgntgtcaggggcgaacntatgaaaaccccacacccgcccttntacngatcatnnnnnnnnnnnnnnnnnnnnnnnnnnnnnnnnnnnnnnnnnnnnnnnnnnnnnnnnnnnnnnnnnnnnnnnnnnnnnnnnnnnnnnnnnnnnnnnnnnnnnnnnnnnnnnnnnnnnnnnnnnnnnnnnnnnnnnnnnnnnnnnnnnnnnnnnnnnnnnnnnnnnnnnnnnnnnnnnnnnnnnnnnnnnnnnnnnnnnnnnnnnnnnnnnnnnnnnnnnnnnnnnnnnnnnnnnnnnnnnnnnnnnnnnnnnnnnnnnnnnnnnnnnnnnnnnnnnnnnnnnnnnnnnnnnnnnnnnnnnnnnnnnnnnnnnnnnnnnnnnnnnnnnnnnnnnnnnnnnnnnnnnnnnnnnnnnnnnnnnnnnnnnnnnnnnnnnnnnnnnnnnnnnnnnnnnnnnnnnnnnnnnnnnnnnnnnnnnaagaattcggcacgaggcgcggctgtaggcnnnnnnnnnnnnnnnnattactgttacattaatttaacatgcatttatagaagaatacattcaaagcactgatgtaggagatacacggtacttggagcagtcagccaaaaatcacagatactgctttcacttaaatggaaacaattctccgataatgctttgctttttttcttatgtcactcttgtgtactatctatttttctcctctctgggaccaagtttctttttataaagcaataatatctctgttttcatttcagaacattgtgctgtctgtcagcatatgtatatcagctacaaaatatattcaactttgacttcttttgacaaaggactttaggaaaaagaggaacaaagacattatttgagaattaaattatatatttttaatatgactgtgaccttgactgataataaagatgtaataagaattgcaagctaaatgtttccctttgcaactcatgctttgtgttttgttttgatgacctactcgctcgtaatgttttgtaaggcacttcagagagaagacagatgcatcatcctggcctccatcaaataacactatccaaggtggcacctcttctgcaatgtttaaccctgctgttgtccatttgggtttgttttttacagtctcttttgtaccacagtggatacatttgcttcatgagtgcaggaaccatgttcactgctgcattcttacccctagccctgggtccacctagcctgtaagtgccccctgagggtatcaaagcacgcggacttcc

SEQ ID NO: 82438 - DNA, 970 bp, Homo Sapiens
  misc_feature (783)..(783): n is a, c, g, or t
  misc_feature (799)..(799): n is a, c, g, or t
  misc_feature (815)..(815): n is a, c, g, or t
  misc_feature (825)..(825): n is a, c, g, or t
  misc_feature (838)..(838): n is a, c, g, or t
  misc_feature (844)..(844): n is a, c, g, or t
ttacaactctttaatttgtttaaaaaggaggcaatataaccattttaacacatttaaaccttttgcctctagaagatatatcaattaacacacaatattcaaggaaatcagtgctgtatagatatttttggtctattaaggtgcaatttataatacagaaccaacacaatactgaagcagaaaccataagttacaaagtagtaactctcacagacagtaattagaacccctgtcctacatgcccctccacatatagcaacttacattcttccagaaaacaggttctttccctgactaggatacttcacaggtctttccaaactaaagaaacacttttccactcaacactggtttttaaaaaccattagaacttttggttttacaagttacaattaattagtattcctttaaaaagaaactattttcaaaagacaatgtattttacttgttatattaacttatagtgcatttaatttcaagcagagagataattaccaaagacagcaaataaaaaattttttaaatattcaattcattaaataattgctacagatcaatcttctaaaagccttaaactagacactgaggggaaaagaacattgaccaaagaattagcttcactcttcaggagctcatcttatgcaacagtatccaccactgttacacaatttactgatattcagttattctatcaacacggcagaataaattcaattattaaaatctacattcaagccaggtgtggtggctacaactgtaatccagcatttgagaggcgaggangcaatcactgaggcangagttgagacagctgngcacatgcanaccatctcactanatacanatagcggtgtggtgattgctgtatccacactcagagtgagcagaatcattgaccggagatgagtgcatgacagtctgcatgatcagccatgcaactaatcgtcaacaaaacaaaatctcaggagag

SEQ ID NO: 82439 - DNA, 997 bp, Homo Sapiens
  misc_feature (36)..(36): n is a, c, g, or t
  misc_feature (67)..(67): n is a, c, g, or t
  misc_feature (75)..(75): n is a, c, g, or t
  misc_feature (83)..(83): n is a, c, g, or t
  misc_feature (95)..(96): n is a, c, g, or t
  misc_feature (124)..(124): n is a, c, g, or t
  misc_feature (170)..(170): n is a, c, g, or t
  misc_feature (192)..(192): n is a, c, g, or t
  misc_feature (213)..(213): n is a, c, g, or t
  misc_feature (278)..(278): n is a, c, g, or t
ttgtccaacttagttctactgattagcagatcactntgattctttcgtatcagggaatgctgatctntgcagatnccaaactntgctctgtatgnnaatggagcatgtgaaatgagtagaaatncaggccagaagtgatgcagtcagaacgctttcccagagctgtcttnttgacagcataaatagagatgntctatacatatgtgatgtgtncacatgtaaagcactgaacctgtttcctaccactttacgactctaagagcacccagaggagtgantccaaaaaccatcgtgtccactgttttgccagtcaaacacagcaagatgcaaaagccttcttgtggaatagtaccacttgcctctcctggtacatcagcagaacttcaaaacaattttatagaatacatctcttttatacatcaatatgatgccagaaaaactccgaatgagcctctccagggaaagagacacggagcttttgtacagagagagataaaaccaggcagtaggccaacagttcctaaaggagcagaggtattactgaacactccagggtcacgttcatcagaacagtccaaaaaaacagagaaaggaaactcagcggaaagcagaatgatctcaccaggtctctgccaacaaaattctcaggagctgttagagcctaaaactcacttatcagaaacagacgtcagacaggcagccaaggcatgccccagcactcttgagagcagagaaaagacctcaggcgccactcaaacaactgtaggagatgctcttttcactacgcacaagcctttaaatccaccaattaaaaaatcagaataaattaccttcttcagataaaaatctaatccctggaatatagggaaatttcacaatcatcatcttggccctcacatttacttttctgttatcagtaacttcagaacatacaatttatgtaaatggaaaaagagaaaaaagacaattaaaatacaaccaaatgttattaataaaa

SEQ ID NO: 82440 - DNA, 1017 bp, Homo Sapiens
  misc_feature (67)..(67): n is a, c, g, or t
  misc_feature (73)..(74): n is a, c, g, or t
  misc_feature (104)..(105): n is a, c, g, or t
  misc_feature (155)..(155): n is a, c, g, or t
  misc_feature (189)..(189): n is a, c, g, or t
  misc_feature (199)..(199): n is a, c, g, or t
  misc_feature (226)..(226): n is a, c, g, or t
  misc_feature (231)..(231): n is a, c, g, or t
  misc_feature (234)..(234): n is a, c, g, or t
  misc_feature (246)..(246): n is a, c, g, or t
  misc_feature (342)..(342): n is a, c, g, or t
  misc_feature (354)..(354): n is a, c, g, or t
tttactcagtttccatcacactgattgaccttttaccagagatatcttattggtttgtgtgttctgncagtgnncacgatgtttgagtgcccgtcctccttccnncccctgtgttaactgaaagagatgatcgctgatatggaatgccatccacncacgccatggcggccactgccattgcctcacccntccttatctntactatggacagataccagtatccatntgtgntgngactggtgatgnccgtgtgttttccaccttggtgtgtctcagcaggctctacactgggatgcatacggtcctggatgtgctggtggcgtcctgatcaccgcactcctnatcgtcctcacntaccctgcctggaccttcatcgactgcctggactcggccagccccctcttccccccgttttgtcatagttgtgccattcttcctgtgttacaattaccctgtttctgattactacagcccaacccgggcggacaccaccaccattctggctgccggggctggagtgaccataggattctggatcaaccatttcttccagcttgtatccaagcccgctgaatctctccctgttattcagaacatcccaccactcaccacctacatgttagttttgggtctgaccaaatttgcagtgggaattgtgttgatcctcttggttcgtcagcttgtacaaaatctctcactgcaagtattatactcatggttcaaggtggtcaccaggaacaaggaggccaggcggagactggagattgaagtgccttacaagtttgttacctacacatctgttggcatctgcgctacaacctttgtgccgatgcttcacaggtttctgggattaccctgagtctcaaacagttggaaactagcccactggacatgaaagccaagacataggaaagttattggtaggcaaatcttgacaacttatttttctttaacaacaacaaaaagtcatacggctgtcttgctactaccagataaatgatgctgctgtgtgaaagg

SEQ ID NO: 82441 - DNA, 1002 bp, Homo Sapiens
  misc_feature (622)..(630): n is a, c, g, or t
gctggtaccggtccggaattcccgggatatcgtcgacccacgcgtccgcgtcgtttctctccctgctttcctctgccgcatggtcctgggccgttggcgtcggaagcctgaagcatgggcgctgagtgggagctgggggccgaggctggcggttcgctgctgctgtgcgccgcgctgctggcggcgggctgcgccctgggcctgcgcctgggccgcgggcagggggcggcggaccgcggggcgctcatctggctctgctacgacgcgctggtgcacttcgcgctggaaggcccttttgtctacttgtctttagtaggaaacgttgcaaattccgatggcttgattgcttctttatggaaagaatatggcaaagctgatgcaagatgggtttattttgatccaaccattgtgtctgtggaaattctgaccgtcgccctggatgggtctctggcattgttcctcatttatgccatagtcaaagaaaaatattaccggcatttcctgcagatcaccctgtgcgtgtgcgagctgtatggctgctggatgaccttcctcccagagtggctcaccagaagccccaacctcaacaccagcaactggctgtactgttggctttacctgnnnnnnnnnaacggtgtgtgggttctgatcccaggactgctactgtggcagtcatggctagaactcaagaaaatgcatcagaaagaaaccagttcagtgaagaagtttcagtgaactttcaaaaccataaacaccattatctaacttcatgaaccagaatgaatcaaatctttttgtttggccaaaatgtaatacattccagtctacactttgtttttgtattgttgctcctgaacaacctgtttcaaattggttttaaggcgaccagttttcgttgtattgttgttcaattaaatggtgatatagggaaaagagaacaaatttgaatttgtaataataaaatgtttaattattaaaaaacatgaagacaccccaaaaacc

SEQ ID NO: 82442 - DNA, 565 bp, Homo Sapiens
  misc_feature (484)..(492): n is a, c, g, or t
gcggccgccgcatggtcctgggccgttggcgtcggaagcctgaagcatgggcgctgagtgggagctgggggccgaggctggcggttcgctgctgctgtgcgccgcgctgctggcggcgggctgcgccctgggcctgcgcctgggccgcgggcagggggcggcggaccgcggggcgctcatctggctctgctacgacgcgctggtgcacttcgcgctgggaaagaatatggcaaagctgatgcaagatgggtttattttgatccaaccattgtgtctgtggaaattctgaccgtcgccctggatgggtctctggcattgttcctcatttatgccatagtcaaagaaaaatattaccggcatttcctgcagatcaccctgtgcgtgtgcgagctgtatggctgctggatgaccttcctcccagagtggctcaccagaagccccaacctcaacaccagcaactggctgtactgttggctttacctgnnnnnnnnnaacggtgtgtgggttctgatcccaggactgctactgtggcagtcatggctagaactcaagaaaatgcatcaga

SEQ ID NO: 82443 - DNA, 175 bp, Homo Sapiens
tatacggctgcgagaagacgacagaagggtgaaagagctgaggaataagagcagaatcttttaaaatatctatcctaggagagagtgggaaagaccacgaaccaggagagtgctggggtcctgggatccacagaatggaatttcaagaacactgataaattgctgtagcaccata

SEQ ID NO: 82444 - DNA, 1305 bp, Homo Sapiens
  misc_feature (74)..(127): n is a, c, g, or t
  misc_feature (1213)..(1245): n is a, c, g, or t
ggtccggaattcccgggatatcgtcgacccacgcgtccggagcgctactgccagctgatgccgggagctaactnnnnnnnnnnnnnnnnnnnnnnnnnnnnnnnnnnnnnnnnnnnnnnnnnnnnnnaccgcgaggaggacggcgggggcctggagcccgcggccgtggcccgcgacctattgaggggcacatctaacatgtcatttgaggagctgttggaattgcagagccaagtggggactaagacgtacaaacaattggtagctggaaatagtcctaagaaacaagcttctagaccacctatccaaaatgcatgtgttgcagataagcacaggcctctggaaatgtcagccaagatccgagtaccatttttacgtcaggttgttcccattagtaaaaaggtagcccgggaccctcgctttgatgatctgtcaggggaatataatcctgaggtgtttgacaaaacataccaattcttgaatgacatccgagcgaaagagaaagagcttgtgaaaaaacagttgaagaagcacctttcaggagaggagcatgagaaactgcagcaactgcttcagcgaatggagcagcaagaaatggcacagcaggaacgaaagcaacagcaggagctgcacctggccctgaagcaagaacgtcgggctcaggcccagcagggccatcggccatacttcctgaaaaaatctgagcagcgccagttggcactagctgagaagttcaaggagctgaaacgcagcaagaaattggagaacttcttgagtcgaaagaggcgacgaaatgcaggcaaggacaggagacatctccctttgagcaaagagtaataaggaactatcctctgctctgccactgccccagggagacatggatctgtgaggacagatttggccacggctggtttccgttcaagggcaaggatcacagctgcccttgaatctcattgcctcagagaagactagagggctcttggactatccctagggctacacaagaatagttcagccttctgccatgccacacagcctcagcttgaatctggttcattgcgtcctcgtgttcttctctcatccttgccttaaaccagggattctgataccgaagaagaggggccaatgaaaaccatggagtctgttcgtgactcccagggctgggacattatgtaggagccacttcataaacattctctttactcatcttttnnnnnnnnnnnnnnnnnnnnnnnnnnnnnnnnngcctacagccgcggccgcaagcttattccctttagttgagggttaattttagcttggcac

SEQ ID NO: 82445 - DNA, 1039 bp, Homo Sapiens
  misc_feature (38)..(38): n is a, c, g, or t
  misc_feature (144)..(144): n is a, c, g, or t
  misc_feature (194)..(194): n is a, c, g, or t
gacctcaaaattttctcaaattagatggcttcgcactnaacaagacagagtgattacagcgacctattgttcaagactgagacgtttccagaagtcgtgcagatcagactctgtagagattcatgatactgaagttcataaccnaaagtgcttcatatgctcataaaaattgactctgtaaacaacgaaaagtntggacatagtgaaaacaagtattcgtacagtcttcccacgcatctgagtgcctgatgttgaagaagtaaatttatatcggattttcaaccgggtttttaatcgcttactctggagtcgtggccaagggctgtggaactgtttctgtgattcaggatcctcttgggagagtatattcaataaaagcccggaggtggtgactcctttgcagctccagtgttgccagcgcctagtggagctttgtaaacagtgcctgctagtggtttacaaatatgcaactgacaaaagaggatcactttcaggcattggtcctgactggggtaattccaggtatttactaccagggagcacccaattcttcttgagaacaccaacctacaacttgaagtacaattcacctggaatgactcgctccaatgttttgtttacatccagatatggccatctgtgaaacagaagggaagatcgccattggttatacataacagcaattcatttttttcctctgaagttgaacatgcaaagaacatgaccattaagtgctgttttatgtatataagacatatatatgtgtgaaaatatatgcacatatgcaccctaataacatatatttattatattaaatgatatatgaaagaagaattagcagaaaatggaatataagacttaacctttctggaaacgtaataaaccatgttaaaattgtttacacaaattatgtgaaatgtctaaaaatctgcctagggttaataattaaattcccttcctaactagaaaagggtaatttttgcctgccggagtatattaaaacccaatttggttcttggaagaattccaatttaccgga

SEQ ID NO: 82446 - DNA, 1429 bp, Homo Sapiens
  misc_feature (211)..(211): n is a, c, g, or t
  misc_feature (261)..(261): n is a, c, g, or t
cgtcgtctatgagtcagcagtccgatgagcgcatggcaccatattggtatcatctgcacccagctacattatctccgctgttgtgttgatgtgacgatacattcaacagaacagttgctgatacgattatagactcatataggaattgcctcgagccagaatcggcacgtgcatccatgacacagggaccatcactgcagtgctttgctcntgatgaagatatttgccacctactcaaacactgacagccacatttctttntggcagatgaacacgtcactgctgggaagcatcggcatgctgaactcggcacctcagctgcgctgcattaaaacctaccaggtgccccctgtgcagcccgcgtcccccggctcccacaatgccctcaagctggcccggctcatctggacttccaaccgcaacgtcatcctcatggcccatgacgggaaggagcaccgcttcatggtctaatgctgctgcctgccgccgtgactgcgttttagttctctaaattatccaagccgatgttgctctgtccttcctcacaccagattgttcccaggggcctgcccaccccagtgccatccagtggcacggccgggtcttgtcacttgtgcatgcttctcaggggcagaacccgctcgtgccatctgtcgattcagaggcacgcacacatgctctgcaggatgtggccatcctgtcaccaggtagtttttccctgccagagatggcaggggaaagccagcggttcctgggaacgctcttgttgcttggtgcaacagaagcacaaaaatcaataaacactgtgattgcactcccagcccagatcagcatttttagccatctcaaccgcacctctgaagtgctgcttgaatctggccgttctgacactgggtgttgaggtcatgtggcagtcctcacgattgaaattattgccctttgaattacctaaaatattgtttaccaaaaagattctgtgtttacatgttcttttcttctggtgattgctaggaaattactcaatccaatttcctagggtttagctaccaccttctttatcaacagctaaccaatttgagattcatgattaattatgtacacaaaaatattttccttgtagaaaatagttttccagacacttagccttctgaagtgctcatctcttgcttaaatgatagtctatttagtagtttaaaataaaaataatcactccctatgatctagttaatgtaattatccagtcactgtaactaatctcttgaagggacttttgtgataaagagccaagttcagaagcatagcgtgtaccgaaaatgaagactctcctatctactgctacagatcctgttgaagaaagagcttacccctttcccccggaaaacttgcaatcctgtagttcccatatgtgtggcatatgtcagttatgaaa

SEQ ID NO: 82447 - DNA, 674 bp, Homo Sapiens
tccaggcacaatggctgaggaatgccccagagcgtgcgcggagcctgtggcgcccaaggccacggccccgccggagaggaccagcgactactaccgcgtgagcgcggacctgccgggcaggttcaacaacccggggtggttccggggctacaggacccagaaggctgtctccgtgtacaggaccagtaaccaggcttacgggagcagagcccccaccgtgcacgagatgcctaaagtattttatccaaattcgaataaattttcccaacaacttgcagcgggtggaatgttccggaacaatactctcaatgtttacctggagaaaagcatcgtgactggccccgataactgcatcacctcctgtgaccggctcaacttccaccccagttacaacatcaacaggccatccatctgcgattgaggggctggaaactccctctaggagtcctctgaccccagggcctcctggaaaatcatcatccctcatcacccacagtcgcccgattgtgacggcacagactgcgctgccttccctgaaaatattattcgtctgcggagtaggaaaatatgcaaacggggccgtgaagtcctgccatttcacatctaataagtacatgggaaagatgctaatggttgactttgcattaaaaacgttgtcacatcctgaaaaaaaa

SEQ ID NO: 82448 - DNA, 1444 bp, Homo Sapiens
cacggggcgggcggacgctggcgcgggtaggtaagagcagcggcgggcggtggcgctcactcccggcttccaaccgcgcggagcctctgccttggagattctcagtgctgcggatcatgtccctaaggggcagcctctcgcgtctcctccagacgcgagtgcattccatcctgaagaaatccgtccactccgtggctgtgataggagccccgttctcacaagggcagaaaagaaaaggagtggagcatggtcccgctgccataagagaagctggcttgatgaaaaggctctccagtttgggctgccacctaaaagactttggagatttgagttttactccagtccccaaagatgatctctacaacaacctgatagtgaatccacgctcagtgggtcttgccaaccaggaactggctgaggtggttagcagagctgtgtcagatggctacagctgtgtcacactgggaggagaccacagcctggcaatcggtaccattagtggccatgcccgacactgcccagacctttgtgttgtctgggttgatgcccatgctgacatcaacacaccccttaccacttcatcaggaaatctccatggacagccagtttcatttctcctcagagaactacaggataaggtaccacaactcccaggattttcctggatcaaaccttgtatctcttctgcaagtattgtgtatattggtctgagagacgtggaccctcctgaacattttattttaaagaactatgatatccagtattttccatgagagatattgatcgacttggtatccagaaggtcatggaacgaacatttgatctgctgattggcaagagacaaagaccaatccatttgagttttgatattgatgcatttgaccctacactggctccagccacaggaactcctgttgtcgggggactaacctatcgagaaggcatgtatattgctgaggaaatacacaatacagggttgctatcagcactggatcttgttgaagtcaatcctcagttggccacctcagaggaagaggcgaagactacagctaacctggcagtagatgtgattgcttcaagctttggtcagacaagagaaggagggcatattgtctatgaccaacttcctactcccagttcaccagatgaatcagaaaatcaagcacgtgtgagaatttaggagacactgtgcactgacatgtttcacaacaggcattccagaattatgaggcattgaggggatagatgaatactaaatggttgtctgggtcaatactgccttaatgagaacatttgcacattctcacaattgtaaagtttcccctctattttggtgaccaatactactgtaaatgtatttggttttttgcagttcacagggtattaatatgctacagtactatgtaaatttaaagaagtcataaacagcatttattaccttggt

SEQ ID NO: 82449 - DNA, 660 bp, Homo Sapiens
gcaggcattgtacatgaaccagtggtaaaaaagcaggctgggtacggtcggaatcccgggatatcgtcgacccacgcgtcggtaaatgttctcattaaggcagtattgaacccagacaaccatttagtattcatctatcccctcaatgcctcataattctggaatgcctgttgtgaaacatgtcagtgcacagtgtctcctaaattctcacacgtgcttgattttctgattcatctggtgaactgggagtaggaagttggtcatagacaatatgccctccttctcttgtctgaccaaagcttgaagcaatcacatctactgccaggttagctgtagtcttcgcctcttcctctgaggtggccaactgaggattgacttcaacaagatccagtgctgatagcaaccctggaagaacaaagtgtgacaaaacctcaggttcccttgctgctactctcagtgagggtcatcccactgggacagggagaacaagccaaagtaaaaacaagagtccattttatagtagaaaatacctatttttaggaagccccttgcacctcatcctcttggccatgaatttaagttaaaacactgttgtgctatagtagattaaaagaaaccttttaagataatgaaataaaccatccctgttcaactaaaaaa

SEQ ID NO: 82450 - DNA, 457 bp, Homo Sapiens
  misc_feature (21)..(21): n is a, c, g, or t
gggtaaattccaagcacagcntgaatgagaagtacaactcatttcctgtaacctagatgcctttttaacacatctatgcagtctccatgtgaaaccaggtgctgttcccaaaggagaaaacactgccctccagtggtcttcaatgaagaaatggaaatagtttcaggtggaaaccaggcttcttggaagacttcaaactatgccaaatggtctgatttcaccatagagattctttgctgaagaatgcagctgtattaaaggaagaaagaaaaccaagctacagctccttataattcaacaagcatttaaaagatttataaagatggtgcaattatgtatttaagctgcttcaacacaagttcttgcctttcactcccaccctgtggcttacactggtattacatctattctgacatttaaaaatcaacattaaagaacatattgtaataatgtaaaa

SEQ ID NO: 82451 - DNA, 482 bp, Homo Sapiens
gaaaacactgccctccagtggtcttcaatgaagaaatggaaatagtttcaggtggaaaccaggcttcttggaagacttcaaactatgccaaatggtctgatttcaccatagagaatgttatactattaattgccaatttgcatatgtgtgcagctgctgttttggctctgaactcaatccgataagcttgctggaggtatcgcagagcacttggcagctttcctatttgaaaagaaagcctctcccctctacagaacagctgatcgtctatcagcgatagaccctgatggcgtgaattacaattacactacttttcacactaaatctgggtgatagctacttggaaagaagtttcatcattttttaccacaaactggaaaaagaattacatggtcatgctgtgcttttaaaggcagtttggttcacttttgtctatttaacacctaattccaagaagtccataggcatctaaaaaactgaaa

SEQ ID NO: 82452 - DNA, 980 bp, Homo Sapiens
  misc_feature (710)..(711): n is a, c, g, or t
  misc_feature (788)..(788): n is a, c, g, or t
  misc_feature (809)..(809): n is a, c, g, or t
  misc_feature (823)..(823): n is a, c, g, or t
  misc_feature (852)..(852): n is a, c, g, or t
  misc_feature (892)..(892): n is a, c, g, or t
  misc_feature (919)..(919): n is a, c, g, or t
  misc_feature (925)..(925): n is a, c, g, or t
tttttaatcaaagtacttatgtgtcaatgccaaagcaacgaagaattcccctttttccttcactattgacagcttcagtttctgtacttactgtgtcatcctatccgttcccttccctgagcctggactgctcttccaagggagactaggagtgaagggaggagtcctcccaaagttaccctttaagcttgataattagctccatagccatgctaaagcatgactgtagatccccaagtccctgacacattttcttctaagaaactggttagccaagaaagtaaagacgtaagccctgaagatggcaaaaggtgtcataatctcccaaagtcatctgtatagatgcttcatttaaccctttttcttttgcagacaaagggttaaaaatctcttctttctacctatatctttaaagagggattgacaagcccaaatttccttttatgaaaagacccaaggtttctggccaacaattcacttttttcagtctcttaggtcctcttgcatgcctgagaatattgagtattcggaatctcctaccagcccttggtaaatgaccctaccaggtggaatagtttgagctttatctgctcttttttaatgggatagaggggaaggcaacacgtcttattttatcaaaaattgcaaagctacacgctctttgtggagaagcaccaaaaggaaaaccttagtttggaaggatcattgtnnaataaaatatactcagcctcattcagggaggagaaggcatttaagctataattgaggttccccctgactcagtgttnatggtctgcaggacttctgangatttttctcatancagtgttggcgacagtgactctgctgagnatgcagttaccctcacaggtctcatgcgcatgctttgtcngaaaggtgacacacagtcaaagcaatnatctangattggtgttcactacaatgtgcatctccagatctcaatggggttcacagacgaa

SEQ ID NO: 82453 - DNA, 1111 bp, Homo Sapiens
  misc_feature (88)..(88): n is a, c, g, or t
  misc_feature (111)..(111): n is a, c, g, or t
  misc_feature (129)..(129): n is a, c, g, or t
  misc_feature (140)..(542): n is a, c, g, or t
gacgggccccgagagtccagggaaccctgttcgtatgtctgcggttcgcaccttgactaggtgatttttgatctctcaggcgcggacntatgaaaacccagcaacgcgccnttttacggtcatgccctntgctgccatgnnnnnnnnnnnnnnnnnnnnnnnnnnnnnnnnnnnnnnnnnnnnnnnnnnnnnnnnnnnnnnnnnnnnnnnnnnnnnnnnnnnnnnnnnnnnnnnnnnnnnnnnnnnnnnnnnnnnnnnnnnnnnnnnnnnnnnnnnnnnnnnnnnnnnnnnnnnnnnnnnnnnnnnnnnnnnnnnnnnnnnnnnnnnnnnnnnnnnnnnnnnnnnnnnnnnnnnnnnnnnnnnnnnnnnnnnnnnnnnnnnnnnnnnnnnnnnnnnnnnnnnnnnnnnnnnnnnnnnnnnnnnnnnnnnnnnnnnnnnnnnnnnnnnnnnnnnnnnnnnnnnnnnnnnnnnnnnnnnnnnnnnnnnnnnnnnnnnnnnnnnnnnnnnnnnnnnnnnnnnnnnnnnnnnnnnnnnnnnnnnnnaagaattcggcacgaggtttgttttggttggatgaagtccttagtacagttgaaaaacagagcattaaagactaatcaattgttttgcctcaccagtcattttaaatagtagaatacttatttctcagtgcttaaaatttctttttcaactgtgagattgaataaacagtctctatttctgtggaaaaaacaacagaaaagagatattaaataccataaaatgtaactctgccttttaaagttttgctgaagaatgtgtctgtggttaggatagcacaagcattaacttttgttttatagttatgctttttaaaattcattgtttttaaatttagacttcttatttccacactggattatgagatacttaacaatttttccaccttatatttcttttacacattttgctgttctcttttttgttattgttatgccaccataccattttgttaaaatgttttctttgtgaaacatttgttcaagttctaataaaattaatgttttcccttaacatggctcaataacttaaaaacgttcatttaaataaaattttaatacttgtttgaaaa

SEQ ID NO: 82454 - DNA, 1218 bp, Homo Sapiens
cagtcgacggtaccggacatatgcccgggaattcggccattacggccgggctaatatatacttacatacgtaaaatcataaagttggtaatgcagtttatcgttttaaaaataatccacaaagatgtttttatctcacatacttacaactcaacacacagagtgaccatgtgcagctttctttttgttagatgccacatccgaagactcatcgcagtgtgttatatgacaggacaaagcaaaaacaaacaaaaagcaagcctgtgaatataatttaatttgaaactgctcctggtattatatatttgctagttatctaatgttttaaaagaaaatatacctcatttaggtttgaattgggcgtattgtgtaaatttcaaatattcagaatgcaaagggcttgactattaaatgtttgcctttgatgtttataaaacattacaactatgttgtctttaagacatttaaaaaaccgtgaaatttgttatctttgtaaaatgacaatcatgtagaaaacctgtcttggttgacaatctctttgaaacatttccgagttaatttcccataggcttcaccaccaagaaagtaagaattgcatctttacataatgatcaaggtataatggaaaaatatacctattcttgaagtagtttattatagttttcaaattgatttataccattattaacctgatgtggtctgcttaaaaaatgaatatatcagtatttagaaataaattgcaaaggtgggaatatatacttaaataatttgtcttaagtaaattagcatttggtagtctgaaatggtgacagattacttgttaaaattgtgaaaactctgttgtgtcctctcttcctacatttgtccctgagagtactccacgattactaggttcttgattcccttatatggcaatcaggcagaggcgttccttaagcattagagagttctgaagcttaagatttgttttggttggatgaagtccttagtacagttgaaaaacagagcattaaagactaatcaattggtttgtgcctcaccagtcattttaaatagtagaatacttatttctcagtgcttaaaatttctttttcaactgtgagattgaataaccagtctctatttctggtggaaaaaacaccaggaaagagatcttaataccataaatgtaactcctgccttttaaagtgttctgaagaatgtgtctggggttagggaa

SEQ ID NO: 82455 - DNA, 1070 bp, Homo Sapiens
  misc_feature (61)..(61): n is a, c, g, or t
  misc_feature (101)..(101): n is a, c, g, or t
  misc_feature (114)..(114): n is a, c, g, or t
  misc_feature (131)..(131): n is a, c, g, or t
  misc_feature (197)..(198): n is a, c, g, or t
  misc_feature (203)..(203): n is a, c, g, or t
  misc_feature (217)..(217): n is a, c, g, or t
  misc_feature (229)..(229): n is a, c, g, or t
  misc_feature (345)..(346): n is a, c, g, or t
  misc_feature (1003)..(1025): n is a, c, g, or t
ccgtacattgtccgtcttgtttgattggcgtacattaaccgacgttgactgatcgattatngctccttaggattgcctgagccagatcgccgaggagaatnaatgaaatgcatngcaatgagagcctcacngacccagatgccagtccttgatatggacttcagtcccagatctgtgaaaattaattatgtgttagnnacacntagcctgtggtatntgtatcgcatcnaaaaactgactgagacaggcagtaaggagagaacagagtccagccttgcttcaggtccaggcagttctgccattgcccctaactcctcagtgccagtcatgggccagcccctgggnngacttggaatgagtaaaacatgcacctattgttaaggttcacctggtccagaaggggaggcagacccacctgcccaccatgacccggacagaggcaataaatacggagcacctcatggccagggcctggaggattcccaccataccctacccagcgccaataacagagggaccctggagttgtgtacacaagatagcagttcagtgcttgcacacatactagttgagaagggaaatcagggctaatgaaacagctcaactgtctggcagagccaggctccttctgccatgatacagtttggatgtttgtccctttctaatcttatatggaaatttgatccccagtgttgaaggtggggcctggtgggagatgttcctgttatcgggatggatccttcatgaatagcctggtgccatctttgtggtaacaagtgagttctcacttgattagtttctgtgagaactgtttgttaaaaagagcctggtggcacctccctcccttcttcctccttctcttgctatgtgatgctgctgccctttgccttccgtcatgagtggaagctccctgaagcccccaccagaagcaaatgctggcaccatgctgcttgtacagcctgcagaactgtgagccaaataaacctcttttctttataaattnnnnnnnnnnnnnnnnnnnnnnncctgagcaggcggccgcaagcttattccctttagttgagggtaat

SEQ ID NO: 82456 - DNA, 937 bp, Homo Sapiens
  misc_feature (76)..(76): n is a, c, g, or t
  misc_feature (195)..(195): n is a, c, g, or t
  misc_feature (204)..(435): n is a, c, g, or t
atgcttcgtccacttgataggtattttgtctgcagagcgacttgaacgcacaccgctttacgtctgcttgctgctntgtacatgcttctgcgttcctgatcttgatacgtatacgctttgatgagtgtacgctccgcaccgacgacgagccgcgatcatgaggagagcgagagcgcccatacgcaaccgccttcnccgcgcgtnnnnnnnnnnnnnnnnnnnnnnnnnnnnnnnnnnnnnnnnnnnnnnnnnnnnnnnnnnnnnnnnnnnnnnnnnnnnnnnnnnnnnnnnnnnnnnnnnnnnnnnnnnnnnnnnnnnnnnnnnnnnnnnnnnnnnnnnnnnnnnnnnnnnnnnnnnnnnnnnnnnnnnnnnnnnnnnnnnnnnnnnnnnnnnnnnnnnnnnnnnnnnnnnnnnnnnnnnnnnnnnnnnnnnnnnaagaattcggcacgaggttttattctacagccattggggtacttcagtttatgggatgtttttggaaacttctgctttgggagggatgaagatcattgataaatgttatttgctttctgagttttggggtcatttcattgcttatcaatgaagggcagacagaggagagaatatctcaagtcttttctgataaaaggcttgcttgagggagcttataacttgcacctagagggtttacccactttgtggatttgatttatccaccaaccacagcaaccaataatgtcaagattctaggagtttatgaaagaggctagtatgttttcattttgagtcagacattcttttctcattctcaaatctgttttaaatgctccaattttaaaaatgccaatgaaaattttataatgcttctgtagtaaccatatgcagtttactttgaatttaggaaaacagttttgtatgatgaaatattgtgcagaatctgtaaataaggtagctt

SEQ ID NO: 82457 - DNA, 525 bp, Homo Sapiens
  misc_feature (67)..(80): n is a, c, g, or t
cggccagtgccatgctaaaattaaccctcaactaaagggaataagcttgcggccgcggctgtaggcnnnnnnnnnnnnnnaaaccaacaaaccaaaaaaggccacaaaattaattagaggcttctcatctgccttggtcctgagtgttccaggagctctttggtttggcttcttttgatggaagaatcctgcttcacagactgagtggcaggcctcctcctgagggcagcccctggagcaccaggaagcgttgccgctggctgtgccctcccctggcactctgactgcatgctgatgagcaaggcaggcaggtctgagaggcgaaacgaatctcccggcagtgcttggaagtgtctgtggggtctcctcctcccagatccccaagatctgtgtcactggtcgattttgaactttaggtacatgtgttcttttcaaaaattcagagaatcgtcatgtgccacagaagctcagcctgggcttcagcaattgacaaaatttgaagaaatattaaacaaaaataacaaa

SEQ ID NO: 82458 - DNA, 972 bp, Homo Sapiens
  misc_feature (73)..(73): n is a, c, g, or t
  misc_feature (81)..(81): n is a, c, g, or t
  misc_feature (145)..(145): n is a, c, g, or t
  misc_feature (260)..(260): n is a, c, g, or t
  misc_feature (286)..(286): n is a, c, g, or t
  misc_feature (344)..(344): n is a, c, g, or t
  misc_feature (886)..(894): n is a, c, g, or t
cccaccttcttgtcaccagaccatcgctgaggcattgacccttgatcatcatcgcgcagtatgtactccatcnccaccctntcagatccttgaaactctactgtgacacggtgatccagacaacttgttccattgctgaccaccntgtctctaactttttccacttaatccatgtcttatcagcagcagaagattcagtggtatattccgtattgcttttgaacattttctactggctatgctctcttcatatgattttnttacttctctctataaggaactgatntcatctgaaattgaagagacaatcagagaaaaactatagaccactcatgatggttgtnatatgtgcttggctgggccatgggtcccagtgtttggtgaaacacagcagcagatgtccctgtgagtagatgttgctttgaaggtatcttttagatgtgatgaacatttgtcatcagtagactttgagtaaggcagatagcccgtcacaatgtggatgggccttatccaattagttgaaggcctttgaaaaaagactgagatcccaaacgaagaaggaattctgcctccagacagccttccaactcaagtagcaacataacctcctccctgcggctctagcctgctggcctttcctatagacttcagacttgccagccccacaatcatgtaagccaattccttaaaataaattctctgtcctgtttttgccccctctctctttctgacagcacacacatgccctcttggttctgtttctttgaagaaccccaggaaaacacacaaaggaaaaacaactcgatagacagaagattcttcaatgacaacaatggaagccatcttcaccattcaactaaacttgaatgggatattatcaaacttnnnnnnnnnttatcaactgatcgtgtaatcagtttcatcttttaagacaggaaatgaaataaagtatttacagatgaatgtaaaaaa

SEQ ID NO: 82459 - DNA, 536 bp, Homo Sapiens
  misc_feature (72)..(80): n is a, c, g, or t
ttttcatctgtaaatactttatttcatttcctgtcttaaaagatgaaactgattacacgatcagttgataannnnnnnnnaagtttgataatatcccattcaagtttagttgaatggtgaagatggcttccattgttgtcattgaagaatcttctgtctatcgagttgtttttcctttgtgtgttttcctggggttcttcaaagaaacagaaccaagagggcatgtgtgtgagggacatctgctgctgtgtttcaccaaacactgggacccatggcccagccaagcacatataacaaccatcatgagtggtctatagtttttctctgattgtctcttcaatttcagatgaaatcagttccttatagagagaagttaaaaaaatcattatgaagagagcaatagcccagtagaaaaatgttcaaaaagcacatacggaattataaccacctgaattcttcctgcctgctgcataaagaccatggcattatagtggagaaaaagttaagagacccaaggctgtcatgccacatggaga

SEQ ID NO: 82460 - DNA, 1058 bp, Homo Sapiens
  misc_feature (60)..(85): n is a, c, g, or t
  misc_feature (198)..(216): n is a, c, g, or t
  misc_feature (826)..(826): n is a, c, g, or t
  misc_feature (894)..(894): n is a, c, g, or t
gtgccaagctaaaattaaccctcaactaaagggaataagcttgcggccgcctgctcaggnnnnnnnnnnnnnnnnnnnnnnnnnnatttaaaatcataaaactttattattgtaatttccttttctcatcaaagggccagatacgacaatatttttcaaattatagacaacatttgtgagtatgcagtaaaaacactnnnnnnnnnnnnnnnnnnncttattaaatctcaaattcccaagatgttcccccatataaggtgggagctcatatcatcacatgtaacattacaaaacctgtactataaaattagatgaataaataataaacctatactattaccaaattcataataaaaagatcaacttaccaaattaaaatcagcctatttattccctttgtataaataacctaaagttccccaggtttttatttcccagtttcctacaaatgaattgatcagaatgcctctttatagatcagctttcccatagtttctctctcatttggcaataacttcccatatttacttcatttccagaataatctccccctcttgcaacccacacaaatgtaagagaatgaaggcataatttctataattcataattatttccccattattgaatttcatttttgaattattataaatcatcctgaaatctaataatataaatctttctcatcctatcagtctattaaaatatacaaaacatcatttaagatggttaacacaagaaaagatactatggcagccttcataaatcaagcaaaagatttcagaaaagtgcttcagtctgttcagttatctctaactttcactagaanattaagggaatgcactgttacagaaggtataatgcagattctaaaagtgatacatgtgtaatgtattnaatctatcagtgtcactctgatatctgtcaataaaggcaaagaacagtatgaacaatatctcaacactcaataatttgtgcgtatcacagacagtcgaatcaacaaaaactcggcgatctggctcagcaatctaaggagcatatcgatcagaatgttcgtgaag

SEQ ID NO: 82461 - DNA, 970 bp, Homo Sapiens
agccgatttacccctccagattttgcctttttattattgaggctggctttattttcttctactttttttcccgttttatagcagttaattatttttgtgattattatgcaagaagcattgcccttgagttaaactgttattgtttcataagcagctattaaaataactgagcattgttttatgaacatacactaatctgagatactgaaaagctttgcaactaaaaagcaaaacaacctacattagtcatctagccattgtttggatgttttgagttgattttttatggtgcctcttttagcttggaatattacgtttactttaatccaagtctaggccttttaaagggtccttaaaattaaagttcagaatgtgaatccctttgacatctattacaggtttataggacctttttggttgtgattactgttttcaatacgattgtataaatgaagttaactttgtcagaagttaaaatggaggtcataggagttcctggagaaatggctctcctgtttctttcattaccccactgaagttcaccccagtttctggccacaagaatatgagaaaggaaccctgttgttttccaagggaaatcattcctctctgtccccactgttgattaactaaagtcctggacaccttccttcctccactggccaagacccaccttgacccaccttgaacctcttttcagagccgagtggcatgaatatgtgtactgtttctgcttctgttgatggagtggctgtgggagaattaaaggaaatgctaatttgagcttcattcataggggaacctactatatattgcatccctgctggttggaaattatcttcatctctggactgcattgtttagaaaaatgttaatggcttacaattctgagaactttattgtgtggctctggggttaagaattctgtggtttgaaaaaaaataaatattttgtattgattctcaaaaaa

SEQ ID NO: 82462 - DNA, 1048 bp, Homo Sapiens
  misc_feature (117)..(117): n is a, c, g, or t
  misc_feature (206)..(206): n is a, c, g, or t
  misc_feature (208)..(208): n is a, c, g, or t
  misc_feature (275)..(275): n is a, c, g, or t
  misc_feature (376)..(376): n is a, c, g, or t
  misc_feature (969)..(988): n is a, c, g, or t
cttatctgatggggctgtgggtagaccagagcctttttccagttctgcaccatgagatgctttgcccccacgacctgtactgcctgcctgaggccatcagcaatctgctccggattncgccacacctgatatgtggttgcgactctgcacttgtgcctcagcgcagagacacctgcaccatgtgacgcttggcaccatgtgcctgntntgccccccgacagctctgcgctgtgtgagggctgagcccctcggggatgctcatgtgacatcaggcncagacacccactccagtgcacaagacagacttgcgaccgcttgagcccactgagcagatatggtgggggctggaggttctctttctcagtccctgcctgtntgccagcctgcagctctcctgcttgacactgacttactacttgaaactttatttattgcaccatgttggtgtggtgggcaggtggagggcctgccctggacacaggggccctgctgagcagtggcccccatcctggaacttgaccagattccccccagtgctgctgctaaccccacaccacccaggcctccacctccccagggagtctccaagagcctcgatcctctgctcactcagcccagccatccatagccctgggaattccacctgccaaggatcccagcaggctggatgagggatagtagggcatgaggagaaggagccctgtaaggactgaggccccggccagcccttctcctccaccagttccccagagcagagctggagctgatgcctggacacagctgctgagcctggcctgggcctcttacccacttggttgttttcttgtccctctgtctgtctgtctatctacttgtctgtttgggccactcctgcctgtgtgttggtctattcctgggaagctcatcactacaggccctggcaaccttcccagtctgtcccatactgttacccataaaactatctctttnnnnnnnnnnnnnnnnnnnnaactgagcaggcggccgcaagcttattccctttagttgagggttaattttagcttggcac

SEQ ID NO: 82463 - DNA, 815 bp, Homo Sapiens
  misc_feature (686)..(747): n is a, c, g, or t
ggcacgaggcgtccggatcacaagcaagattttgtagctcaatggcaggctgatttcaactcccttcctgatgacctgtgggatgatgaggaaacaaaggctgaactacatcaacgagtgaatgatctgcgagaccgcctgtgggacatttgtgatgcccggaaggaagaggcggagcaggagcggcttgacatcattaatgagagctggttacaggacactcttggaatgacaatgaaccatttcttttccctgatgcaggcagagctgaaccgtttccaagatacaaagagactccttcaagattattactggggaatggaaagtaaaatcccagtagaggacaacaagagatttactcgaatccctttggtccaactggatagtaaagacaattctgaaagccagcttagaattcctctagttcctcgaatatccatttctctggaaacagttacacccaaaccaaaaacaaaatcagtactgaagggcaagatggataactccctagaaaacgttgagtccaactttgaggccgatgaaaagttggtcatggacacctggcagcaggcttctttagcagtatctcacatggtggctgctgaaattcatcagaggcttatggaagaagaaaaagaaaaccagccagcagaccccaaagaaaaatctcctcagatgggtgcaannnnnnnnnnnnnnnnnnnnnnnnnnnnnnnnnnnnnnnnnnnnnnnnnnnnnnnnnnnnnntcaccacctatggcagaagcaactcctgtcatagtaacaacagaggaaattgctcgaatcaaaaggaa

SEQ ID NO: 82464 - DNA, 1114 bp, Homo Sapiens
  misc_feature (34)..(34): n is a, c, g, or t
  misc_feature (94)..(94): n is a, c, g, or t
  misc_feature (97)..(97): n is a, c, g, or t
  misc_feature (222)..(223): n is a, c, g, or t
  misc_feature (263)..(263): n is a, c, g, or t
  misc_feature (1037)..(1055): n is a, c, g, or t
aattgcctgagacagaatcgcagagctggtgctntccatgtgccggaataggtatcagaccggtactcccacagtcctggtagatccagatgcngantctctgatgactcttgccgaacttgtgccactccacagatgtgtgggacaaaggaggtcaaatcatcagtgaccaactcatcaggaagagcataacctcaaacaggtagcttgatcacatcatgnnccctggtaggcagctttgtgccagcagaggagccgaaaantggggcagtagacgccatcttcacacgaattcatagctgcgaatccatctcccttgccctctccaccttcatgatcgacctcaaccaggtggcgaaagcagtgaacaatgccactgcacagtcgctggtccttattgatgaatttggaaagggaaccaacacggtggatgggctcgcgcttctggccgctgtgctccgacactggctggcacgtggacccacatgcccccacatctttgtggccaccaactttctgagccttgttcagctacagctgctgccacaagggcccctggtgcagtatttgaccatggagacctgtgaggatggcaacgatcttgtcttcttctatcaggtttgcgaaggtgttgcgaaggccagccatgcctcccacacagctgcccaggctgggcttcctgacaagcttgtggctcgtggcaaggaggtctcagacttgatccgcagtggaaaacccatcaagcctgtcaaggatttgctaaagaagaaccaaatggaaaattgccagacattagtggataagtttatgaaactggatttggaagatcctaacctggacttgaacgttttcatgagccaggaagtgctgcctgctgccaccagcatcctctgagagtccttccagtgtcctccccagcctcctgagactccggtgggctgccatgccctctttgtttccttatctccctcagacgcagagtttttagtttctctagaaattttgtttcatattaggaataaagtttattttgaagnnnnnnnnnnnnnnnnnnncctgagcaggcggccgcaagcttattccctttagttgagggttaattttagcttggcac

SEQ ID NO: 82465 - DNA, 475 bp, Homo Sapiens
  misc_feature (84)..(84): n is a, c, g, or t
gatccaaatgtgcaaccacctccacatcagagctccctttcattcctagtcctactgggcctgggtctaggtccacaggatttntgaccttatttccctctctccccacactccccttactcctcccaccttcttgcttgttcctaggtctcagacttgatccgcagtggaaaacccatcaagcctgtcaaggatttgctaaagaagaaccaaatggaaaattgccagacattagtggataagtttatgaaactggatttggaagatcctaacctggacttgaacgttttcatgagccaggaagtgctgcctgctgccaccagcatcctctgagagtccttccagtgtcctccccagcctcctgagactccggtgggctgccatgccctctttgtttccttatctccctcagacgcagagtttttagtttctctagaaattttgtttcatattaggaataaagtttattttgaag

SEQ ID NO: 82466 - DNA, 559 bp, Homo Sapiens
  misc_feature (139)..(192): n is a, c, g, or t
  misc_feature (358)..(413): n is a, c, g, or t
ggatcagacaagtcaggcaaaagagagaagaccatagcatctgacagtgaggaaaaagacaaggaaaaggacagagagagagaacgggaaaaagagcatgagaaggatcgagacaaagagaaggaaaaggaacaggacnnnnnnnnnnnnnnnnnnnnnnnnnnnnnnnnnnnnnnnnnnnnnnnnnnnnnnaaggataaaaaatccagaacaccacccaggagttacaatgcatcgcgaagatctcgtagttccagcagggaaaggcgtaggaggaggagcaggagttcttccagatcgccaagaacatcaaaaaccataaaaaggaaatcttctagatctccgtcccccaggagcnnnnnnnnnnnnnnnnnnnnnnnnnnnnnnnnnnnnnnnnnnnnnnnnnnnnnnnnccgggacaaggaacgggaaaaggaccgggaaaaagacaaggaaaaggacagagagagagaacgggaaaaagagcatgagaaggatcgagacaaagagaaagaaaaggaacaggacaaagaaaaggaacgagaaaaagacagatccc

SEQ ID NO: 82467 - DNA, 622 bp, Homo Sapiens
caagaatagagtatggtgtatattataaatttctttgataagatgtattttgaatgtcttttaatcttcctcctcctctccaaaaaaatcagaaacctctttaagaaaacatgtaggttatatatgctagaattgcatttaatcactgtgaaaagactggtcagcctgcattagtatgacagtaggggggctgttagaattgctgctatactggtggtatggattatcatggcattggaattttcatagtaatgcagatccaatttctttgtggtacctgcagtttacaaaataatttgacttcagtgagcatattggtatctggatgttccaatttagaactaaaccatatttattacaaaaagatattaatccctctactcccaggttccctttatatgttaagatataatggctttgaggggggaaaaaataaacctaggggagaggggagtttcctgtagtgctgtttcattagaggatttcagtaaattaaattccacagctaattcaataaataatggtacatttaagtgttctgattttaataatatatttcacatttatccacacagtaacaatgtaatatgttaatgtaaataaaattggttttgatactcag

SEQ ID NO: 82468 - DNA, 385 bp, Homo Sapiens
aattgattagttgatttaagaaacatttagatttgggatgagctgttttggatgtttatcctcaatgaaactcatgttcaaacttaatctccaatgtggcagtactgagaggtggggcctctaagcgtggttgggattaacctgtcgatggattcatggattaaagggttatcaccggagtgggactggtgacttcattagaagaggaaggaagacctgagctggcctgtgaatatgctccgccccctggccatgtgacacctgcgccaccctcaggactctgcagagtccccagcagcaagaaggccctcaccaggtgcagcccctcaaccttggacttctcagcccccagggctgtaacaaataaattcttttttaaagtaaa

SEQ ID NO: 82469 - DNA, 527 bp, Homo Sapiens
ttacgataaaagcagatgtggcatccaatcctaccacccagcaaagagaaaccccaggcattcaactgcagcacaaaatcgtgggtgtagccttcttgaagactcagggacagtctcatcgaactcaaggaatcttcagcaaagctctacattaatcatactcctccaccactgtccaagagtaaggagagagaaatggacaagaaagatttggacaagtcaagggaaagatccagagaaagagagaaaaaagatgaaaaggacaggaaagagcggaaaagggatcactcaaacaacgaccgtgaagtgccaccggacttaaccaagagacgtaaagaggagaatggaacaatgggggtttcaaaacataaaagtgaaagtccttgtgaatctccttatccaaatgagaaagacaaggaaaaaaataagtcaaaatcttcaggcaaagaaaaaggcagtgattcatttaaatctgagaagatggataaaatctcctccggtggcaaaaaggagtccaggcatgataa

SEQ ID NO: 82470 - DNA, 258 bp, Homo Sapiens
  misc_feature (42)..(42): n is a, c, g, or t
cccggtgtccaccgcgttgaactgccgtgtgtgactccagtnggcgtctcagcagtctccggtgtccacgcgttgactgccgtgtgtgactccagtcggcgtctcagcagtctccggtgtccacgcgttgactgccgtgtgtgactccagtcggcgtctcaatagtctccggtgtccatgcgttgactgccatgtatgactcccaggtattgagttcatcttcaacttctcccaacaatgaactggagttttctgtgg

SEQ ID NO: 82471 - DNA, 820 bp, Homo Sapiens
  misc_feature (175)..(175): n is a, c, g, or t
cagtcgacggtaccggacatatgcccgggaattcggccattacggccgggtgcccagaccagaagtgtctatatacctgtcagatcaaggatggtggtgtgcagcctcagtttgaaattgttcctgaagatgacccccagaatgccattgtcagctcttctgcagatgcttgtcnatgcagaactgctcaggactataagcactactatggggaaactaatgcctaacctgcttccagctggagctgacttttttggattttctcatccagccatccacaacctgatccagagctgtccaggagctcgaaaatgcatcaattaccagtgggtgaaatttgatgtgtgcaaacctggagatgggcagctacctgaggggctgccggagaatgatgcagctatgagctttgaagcctttcagagacagatctttgatgaagatcagaatgatccccttctgccaggatccttggacctcccagagcttcagcctgcagcctttgtgtcttcttaccagcccatgtacctgacacatgaacccttggtagatactcacctgcagcacttgaagtctccatcacagggtagcccaattcagtcttcagattgaacaagaagggatcagatgccacatcgtttttgtcgtgattaatttaacttaaactaaaattttgggtatatgaaagaaggcagcaattcagaagtaaagaagatactaacgtatttcatcatggaaggtcctgtggtgatggttttccctgggaaaaccttcagctgctttatttttagtaataaatttctcttgtcaattctgtctaaaa

SEQ ID NO: 82472 - DNA, 945 bp, Homo Sapiens
  misc_feature (625)..(642): n is a, c, g, or t
aattttcaaactcatactttattttcatttgaaatgtttttcacaccttttgcattacataataattttgtggaagcattttgccctttagaataaatattagattgatatagctgaaatgtgacttccagttctttgatattccccttgttattcaaatagaaatatggaaatgctttatatattactgttaaatttcttagtgcagaaataacattattaatagagtattgttttcaaaacagatgattaatttcaagaggtttaacagtgaaattgtgtcaatattttgcatttaaaatgaatttaattgaccgatattttctgtagttaaatttagtcacaatatcacatatgttcttcaagaaacacatgaaattattaataaagtaattaaaaaatttttaatgtataacagaattgaccaataggccagttttctggtaacttatgatagtagattgtttctttagaaactgggcagaagctctgcattctcacttgtactttgatttcttatttcttgggcaggcaatttgaggaaagaagaaatggcatggggaatatatatgttttgtttcttagggaaaacagtctgagaaatgaataaaaagcatgaagtacnnnnnnnnnnnnnnnnnntaccatggaaaaggatattcacagtagtacagttctcaatatttttaattagatgtcatatttttttaatatagtaaaaccttgggatatagaatattacatcttttgagaatgtatgtgtctctaagtaagtaaaatctaatgcgtataggagactgatagctaaaaatgaatggaacattaatgtacttttataattaaacctcttatctatcagaaattgtaagagaatagatacatgttttgaatgtaaagttgaaaagtctggtttacttaataaattgaaagtgatttataaaatct

SEQ ID NO: 82473 - DNA, 750 bp, Homo Sapiens
taatgtgaataaatagggtgccttcatctgggtttctttagtacctaagtctacaaccctttctctttttctattgtgtttcgaactccacattgcaatactctgttgtcatggaatacaacctttagatgtttactgctgaagtaggtcagaaattgtattatttgatttgcctcaaacatccactgtaatgttacatgcaccttttttgaagcatgaactctgaattatgtttttataaatctgactaggcaaacctagattctggtttcacaatggatttattttctctctcagtctccattttaacagtgcttttgaagtttatacagaaagctttaaaagttagtttgtgcccttggtttttattcttaaaactgctaaaatacctctgtaagccttatcctttattctttcatatgttgtataataaatgtatagatttcattgaccaactaaaatgttgggtgtctgtaaatgagaccaaaacgtgggttgcttttttcataaaataatttctattgggggttactgttcaatgacagcaggtaacctataactgtgaatgcttcgtgtcgtcagtatttgcattacattcataaaagtgtgcaagtcctgtgactcccagcttaactgaaatactgttatgccacctaacttgagtacagcaaactggttttaggtttcaatgacattgatgtaaaatgatatcccatgaataaaaagtatttgtgtttggtttcagaaaaa

SEQ ID NO: 82474 - DNA, 2113 bp, Homo Sapiens
tagaagatggcaagcagaaactggagaagaaggatgaagaaatcagtagactgaaaaatcaaattcaagaccaagagcagcttgtctctaaactgtcccaggtggaaggagagcaccaactttggaaggagcaaaacttagaactgagaaatctgacagtggaattggagcagaagatccaagtgctacaatccaaaaatgcctctttgcaggacacattagaagtgctgcagagttcttacaagaatctagagaatgagcttgaattgacaaaaatggacaaaatgtcctttgttgaaaaagtaaacaaaatgactgcaaaggaaactgagctgcagagggaaatgcatgagatggcacagaaaacagcagagctgcaagaagaactcagtggagagaaaaataggctagctggagagttgcagttactggttggaagaaataaagagcagcaaagatcaattgaaggagctcacactagaaaatagtgaattgaagaagagcctagattgcatgcacaaagaccaggtggaaaaggaagggaaagtgagagaggaaatagctgaatatcagctacggcttcatgaagctgaaaagaaacaccaggctttgcttttggacacaaacaaacagtatgaagtagaaatccagacataccgagagaaattgacttctaaagaagaatgtctcagttcacagaagctggagatagaccttttaaagtctagtaaagaagagctcaataattcattgaaagctactactcagattttggaagaattgaagaaaaccaagatggacaatctaaaatatgtaaatcagttgaagaaggaaaatgaacgtgcccaggggaaaatgaagttgttgatcaaatcctgtaaacagctggaagaggaaaaggagatactgcagaaagaactctctcaacttcaagctgcacaggagaagcagaaaacaggtactgttatggataccaaggtcgatgaattaacaactgagatcaaagaactgaaagaaactcttgaagaaaaaaccaaggaggcagatgaatacttggataagtactgttccttgcttataagccatgaaaagttagagaaagctaaagagatgttagagacacaagtgggcccatctgtgttcacagcaatctaaacaagattcccgagggtctcctttgctaggtccagttgttccaggaccatctccaatcccttctgttactgaaaagaggttatcatctggccaaaataaagcttcagggcaagaggcaaagatccagtggaatatgggagaatggtggaggaccaacacctgctaccccagagagcttttctaaaaaaagcaagaaagcagtcatgagtggtattcaccctgcagaagacacggaaggtactgagtttgagccagagggacttccagaagttgtaaagaaagggtttgctgacatcccgacaggaaagactagcccatatatcctgcgaagaacaaccatggcaactcggaccagcccccgcctggctgcacagaagttagcgctatccccactgagtctcggcaaagaaaatcttgcagagtcctccaaaccaacagctggtggcagcagatcacaaaaggtcaaagttgctcagcggagcccagtagattcaggcaccatcctccgagaacccaccacgaaatccgtcccagtcaataatcttcctgagagaagtccgactgacagccccagagagggcctgagggtcaagcgaggccgacttgtccccagccccaaagctggactggagtccaaaggcagtgagaactgtaaagtccagtgaaggcactttgtgtgtcagtaccccctgcgaaggtgccagtcattgaataaataagcctgtgcctacaggaccttctctttagtcagggcatgctttattagtgaggaaaaaacaattccttaaaagtccttaaatatattgtactctttagatctcccatgtgtaggtattgaaaaagtttggaagcactgatcacctgttagcattgccattcctctactgcaatgtaaatagtataaagctatgtatataaagctttttggtaatatgttacaattaaaatgacaagcact

SEQ ID NO: 82475 - DNA, 1075 bp, Homo Sapiens
  misc_feature (16)..(16): n is a, c, g, or t
  misc_feature (465)..(593): n is a, c, g, or t
  misc_feature (597)..(889): n is a, c, g, or t
  misc_feature (903)..(919): n is a, c, g, or t
tgtaagcaatctgtgngcatgtgacatatgcatctgttttcagggaaagaaaagctgttaaagccaattaaggttatgaattcttgctactactttaatattaaacctttaagtgaaaatttattgaacactattacaaatgtggcaaactgacatagctggtttactgcacaaactttaatgtcaaagggattagatcagagctccagtctcacttactgggcctataaccattgtgcagggcacttatctcacctcaggaaaatggaaagtaactgcttcattttacagaggtattaaaatgaaagaaatgagaaaagctataaaccaacattgaagccctgaattattgcttagtatttaaagtctagtacaattgcaatgtttttaataaaaaaactcattgataggtgtatttttacagtgtatctaaaagcagcatttaacattaaaaacttagtattnnnnnnnnnnnnnnnnnnnnnnnnnnnnnnnnnnnnnnnnnnnnnnnnnnnnnnnnnnnnnnnnnnnnnnnnnnnnnnnnnnnnnnnnnnnnnnnnnnnnnnnnnnnnnnnnnnnnnnnnnnnnnnnnnaacnnnnnnnnnnnnnnnnnnnnnnnnnnnnnnnnnnnnnnnnnnnnnnnnnnnnnnnnnnnnnnnnnnnnnnnnnnnnnnnnnnnnnnnnnnnnnnnnnnnnnnnnnnnnnnnnnnnnnnnnnnnnnnnnnnnnnnnnnnnnnnnnnnnnnnnnnnnnnnnnnnnnnnnnnnnnnnnnnnnnnnnnnnnnnnnnnnnnnnnnnnnnnnnnnnnnnnnnnnnnnnnnnnnnnnnnnnnnnnnnnnnnnnnnnnnnnnnnnnnnnnnnnnnnnnnnnnnnnnnnnnnnnnnnnnnnnaatgccatctattnnnnnnnnnnnnnnnnngagtacacaaccacaaagcactgggccaaatgcattgtttccatgtttgcaaggatttaccatagaaatattaggttgatgcaaaaattaaatttccagactgcgaatttcggacgcgtgggtcgacgatatcccgggaattccggaccggtacca

SEQ ID NO: 82476 - DNA, 830 bp, Homo Sapiens
tggagctaatgtctactcagtgcccaaggaagtggttcctatttgggtggcaagaggcttacgggtccagagagcgggtaatgaggactttgctgcctttcgagcctgcctgcgctgctatggcatgccaggcatgagctccctgcaggactggcatggccgtacctatctggttccaggctaagagagcagaaaggacttcacgcctgcaatgggctacagcacccttctccgaccctatccccctgcaaccctgggagtcacccctgggcaggataggaccctccaactccaacaccagtgtcctgcaggtgcgcaagtcccgcaaataagaaatccaaggccacacagctgagtcctgaggacagagtggaggacgctttgcctccaagcaaggccccttccaggacacgaagggcaaagagagaccttcctaagaggtactgcaacccagcggcctgaggggaccagcctccagcaggacccagaagctcccacagtgcccaagaaggggaggaggaaggggcgacaggcagcctctggccactgcagaccccggaaggtcaaggctgacatcccatccttggaaccagaggggacctcagcctcttagcaggaggctctccttgcttgcactcaccctttcttattgtcttgccctgcatctgggggtctgaatttttgggagcaggcaatatctgaaggtgcaaacaggccctacggctgttccctgcacaactctcatggttttaattgtaccccatcttccacatctttaaagctcatgtgaaaaatgctgcatttttaataaactgatacatttgaacttc

SEQ ID NO: 82477 - DNA, 779 bp, Homo Sapiens
  misc_feature (176)..(211): n is a, c, g, or t
ggggctggaccggtccggaattctcgggatcttccagtgcccggcgttcctcccttccccctcgccgccgaccgagttcttccttttcagaccgggtcgccttgctgtcgtcgcggtgattttcctgctactgctactgctgctgctgccaccgccactaccactgggctcatttnnnnnnnnnnnnnnnnnnnnnnnnnnnnnnnnnnnnacacaagatgtcagaggatttagcaaagcagctggcaagctacaaagctcagctccagcaagttgaagctgcattatctggaaatggagaaaatgaagatttgctaaaattgaagaaagatttacaagaagttatagaactaaccaaagaccttctgtcaactcaaccttctgagacgcttgcaagttcagacagttttgcttctactcaacctactcattcatggaaagtaggagacaagtgtatggcagtctggagtgaagatggacagtgttatgaagcggagattgaggagatagatgaagaaaatggcaccgctgcaatcacctttgctggttatggcaatgctgaagtgactccactgttgaacctcaagcctgtagaagaaggaaggaaggcaaaggaggacagtggcaacaaacccatgtcaaaaaaagaaatgattgcccagcagcgtgaatataaaaagaagaaagctttgaaaaaagctcagagaataaaagaacttgagcaggaaagagaggaccagaaagtgaaatggcaacaattcaacaacagagcctattct

SEQ ID NO: 82478 - DNA, 716 bp, Homo Sapiens
tccatgttcacttgtcttggtcgtcgctttcctgctcaagtgtctttatgctctgagctgtgtgtcaaagctttcttctgtccttatattcacgctgcgtgggcatcatttcgttgtgtttgacattgggtcgtgttgccactgtcctcctttgccttcctgcgcttctgtctacaggcttgaggttctacacgtggagtcaccttcagcagtgccatccacctggcaaggtgattgcatgcggtgtccattttcgttcatctatcctcctcaatctccgcttcataacactgtccatcttcactccagactgccatacacttgtctcctactttccatgaatgagtaggttgagtacgaagcaaaactgtctgaacttgcaagcgtctcagaaggttgagttgacagaaggttctttggttagttctataacttcttgtaaatctttcttcaatctgtagcaaatcttcattttctccatctgtccaatagcatctcacttgctggacctgagcattttagcctccatttgcttagctaatcttctacattttgtgtgggatgaggcgggcggcgggaaggggtcggggcaaatgagcccagtggtagtggcaggtggcagcagcagcagtagcagtagcaggaaaatcaccggccgacgacagcaaggcgacccggtctgaaaaggaagaactcggtcggcggcgagggggaag

SEQ ID NO: 82479 - DNA, 418 bp, Homo Sapiens
cctctattctcaaagacattaaatcacgttgagtaggtacatgtaagagacttgcccagcaatattatgattgggatgtccttttttgatagcagataactaacttcaaccactcttttgtattctctttgctgaaacaaccatttgattatagaagtttcattatagacacatgtaataattttatcactacagtataagtcttgtaggctgagtactaaacctttactcacctgcttacagccatgatatctttacaggtgttatgaagcggagattgaggagatagatgaagaaaatggcaccgctgcaatcacctttgctggttatggcaatgctgaagtgactccactgttgaacctcaagcctgtagaagaaggaaggaaggcaaaggaggacagtggcaacaaacccatgt

SEQ ID NO: 82480 - DNA, 623 bp, Homo Sapiens
tcgcggggacagcgatagcgctaggtagcgaggctggtgttaattcggcacgaggcgccgggtcaaaggccagcggcgcaaaatggcggcggcgatgaccttctgccggctgctgaaccggtgtggcgaggcggcgcggagcctgcccctgggcgccaggtgtttcggggtgcgggtctcgccgaccggggagaaggtcacgcacactggccaggtttatgatgataaagactacaggagaattcggtttgtaggtcgtcagaaagaggtgaatgaaaactttgccattgatttgatagcagagcagcccgtgagcgaggtggagactcgggtgatagcgtgcgatggcggcgggggagctcttggccacccaaaagtgtatataaacttggacaaagaaacaaaaaccggcacatgcggttactgtgggctccagttcagacagcaccaccactagagcgtgtggcacgccgggggtcccgcagcatcctgtgagcatttccgcggggaagctgagcacgtgaagctcgctggttctgtgcgaagggtattcctggtgctgaataaagggtgttgctgtcaaggctgaaaccctttacatgaaccccaaaaaaataacttgt

SEQ ID NO: 82481 - DNA, 331 bp, Homo Sapiens
aacatcatagtgttttattgacaaaaccataggaaaaggcagttttaggatgtaaagtaaaaatggttctctgaaatatctacacaaacgtgaattctgaaaagttttcattaaaatcgtatttcatacaattataaactaatgaggaacaaaacaattttcaacttctccataacccagactgagcttgatttatgcttgccatacagaagcaggaactcttcccagagagggtggtggctcccacacagctgacagccaggtttggctgttacctaagccccatcttcccagtcggtgttcaaaacaagggcacaaggtctggcttttc

SEQ ID NO: 82482 - DNA, 1065 bp, Homo Sapiens
cagtcgacggtaccggacatatgcccgggaattcggccattacggccggggaggtcaattgtgcctgcaggatcagttgagcccctgctggtgtgctgcagggtgtgatgaggtgggagccctcagtgccagcctcatcactgtgtgaccctgggtctgctcttagcctccccatggctcacgttcctgccctggatgggatgtgagtggggcccacatcgtggagctgtggtggggcctgcagtcatgaatggcaagtggtccctgatgtgcagtgtctcattagttgcactgcagttaactgtggctcctgcagggcaccctgcccagaatgcccagaagagaaccatgcatacctgcactgcatttgagagccatgagctggaggctgtggttcgtgccagcaaggagcctactgtctggtgtgctgtaggcatctggagagggagagggcctgggtaggagctgggaggaagataattttcaactatggggcttcagtactgcagcgccccgagccaggctctgtgcttctgcctttaaggcctgttctcagcacaatgtctcaaaaataggtcatatcctgccactcccgtcgcagagccctttaatggttccaaaccctaagtccacacatagcccctggctctggcatctctccagccccactggccccgagctgcttgactcaccggcttcctatttgatgcacccaggcccccttgtggccaactccctccccttctcactgaggcagaagcactgaggtgggctggacatgggtgccctccacgtccctcatatccccaggcacactctggcctcaggttttgccctggccatgtcatctacctggagtgggccctccccttcttcaggccttgaatcaaaagccactttgttaggcgaggatttcccagaccactcatcacattaaaaaatattttgaaaacatgcagtaaagttgactcttggggtgcagtttttgcacacgtagggcacaccaggtccatccccagaacacttcccatgctgtcctattgtggtcatgtgcttctccacccc

SEQ ID NO: 82483 - DNA, 623 bp, Homo Sapiens
gatgaaaacatccattttaatatttattatcttcagtgactaagaaacacaatcctaaacgacatgtattataccgtaagaaagtctttggagttatcataaggctctccagcacaaggtaaacttcaaggcaatttatcaagaactaaatttttttgaactaccgagatagtggcatatgaaggtaaaaagaaatgtcaaggttagccgattgttttccaaatactaggatctaaagaataccgggggaaaatagaatgtgggaatgaggtgctattggacagtaacagatggctaaaaacaggtactgagactagttagcattaactagtatataatgtatcttaattcattagtcaacattgtcctcatgtatataattatttcaggatagcatttctacaaattttattggttcatttagtttatcaagtcagcttgcaaataaattttgattccgagtatctaacgttatagcaactataattgcattttgatgtttatccctaagtatatctggcactgtcagccatggctcttgaatacgttgtttcttgatataatatcactaaaaacagaagtgatattgaaaaaaataactacttatctaaaactcaagattc

SEQ ID NO: 82484 - DNA, 713 bp, Homo Sapiens
  misc_feature (49)..(49): n is a, c, g, or t
  misc_feature (77)..(77): n is a, c, g, or t
gaaagccagaagctaaacattgtcttgtcatgtgtttaggtggttgatntggagaaaatgattgtttagcatcttancagatggagaggacagagtcagtctccttcggataattccaatcgtcttccttttacaggtggataaagtagattaggacaagatcacacattctatctgtgtctgtggctgcatattttgcaaaaccagaaacaaaatcgcagactcccgtggtttagaccatttataatgtcaaaactgtaatgacaaatttctgttcacttttatgctaccagtatgactttataggggagaaggaaagccttttaattagccacctgggaattactcttttaaaaaatgccttttctcaaaagaacatgataccactccaagtaaatcattgccactaggggttttcctccttccttctgttgcccatgcccctgcctgaaagtgtagggtaagaggaaaaacaagtaaaaccttagtgttgatggtaaactgagaactctgtagcttaccttggattccagagcagaagactggtttacattcagtactcatccttattgacgttaacaccaggaatctccatgtttattatttttcgtggaaactccatgtttattatttttggtggtctctattgaccaatgtatttcaaacttttttgactgcaagtcataataaaaataactttttacatcaaaaaa

SEQ ID NO: 82485 - DNA, 1167 bp, Homo Sapiens
  misc_feature (501)..(539): n is a, c, g, or t
cagtcgacggtaccggacatatgcccgggaattcggccattacggccgggggaaaggaaaaggtgggaaatacaccaagagtgatttcaaggagtatgaaaaagaacaggataaaccacctaatttggttctgaaagataaagtagcccaaacaggatacaaaatacgatcttatattagatgagcaggccgaagactcaaaatcaagtcactcacacacaagtaaaaaacacaagaagaaaacccatcactgttctgaagagaaagaagatgaggactacatgccaatcaaaaatactaatcaggatatctatagagaaatggggtttggtcactatgaagaagaagaaaagctgttgggagaaacaaaagagtgaaaagagagaccgaactcagaaccgaagtcgtagccgatctcgagagagggatggacattatagtaatagtcataaatcaaaataccaaacagatctttatgaaacgagaaaggagtaaaaagannnnnnnnnnnnnnnnnnnnnnnnnnnnnnnnnnnnnnnaaaatctaagtatagatgaaagatgaagaggcagaattgagaggctaacatatttactcttgtctaacttaagagtgccaggaaagcagatgcttagattttgtgtcaaagcttgttatttttttcatactaggattatggtctttagattaatactgattatatagagcacggaaagataaagaattgaacattttctttgtatacttttttacactaattttattgttatacataaatggtagtcttcatttttgaagtcttacattttcactctttttttaatgaagtatttcatactacaaaaatacataaacgtatatataaagggataataaatgtaaatatctgtgtactcatcagccagcttaagatacagatgttgtcgacattttagaagttccctaaggccctctccctctcaaataattatttggaattttgtgtttgtcatttgtctattatagttttacaacatacgtatgtatctgtaagtgaaatgttaattttgtatgtttctgaattttatataaatggcaaaatgtttacttctgtgactttctttcatttttattgctatatagtattatataaatatactacaacttattcattcttgatggaaaaa

SEQ ID NO: 82486 - DNA, 2003 bp, Homo Sapiens
  misc_feature (1854)..(1882): n is a, c, g, or t
  misc_feature (1919)..(1932): n is a, c, g, or t
gggctcctcccggggtttgtagcggaggaggagcgggcgccatggcggttctactggagaccactttaggcgacgtcgtcatcgacttgtacaccgaagaacggccgcgtgcctgcttgaatttcttgaaactgtgcaaaataaaatattacaattattgccttattcacaatgtacagagggattttatcatacaaactggcgatcctacagggactggccgtggaggagagtctatctttggccaactgtatggtgatcaagcaagcttttttgaggcagaaaaagtcccaagaattaagcacaagaagaaaggcacagtgtccatggtgaataatggcagtgatcaacatggatctcagtttcttatcaccacaggagaaaatctagattatcttgatggtgtccatacggtgtttggtgaggtgacagaaggcatggacataattaagaaaattaatgagacctttgttgacaaggactttgtaccatatcaggatatcaggataaatcatacggtgattttagatgatccatttgatgaccctcctgatttattaatccctgatcgatcaccagaacctacaagggaacaattagatagtggtcgaataggagcagatgaagaaattgatgatttcaaaggaagatcagctgaggaagtagaagaaataaaggcagaagaaagaggctaaaactcaagctatactttttggagatggtgggagacctacctgatgcagatattaaacctccagaaaatgtactgtttgtgtgtaaattgaacccagtgaccacagatgaggatctggaaataatattctctagatttgggccaataagaagttgtgaagttatccgagactggaagacaggagagtccctctgttacgcttttattgaatttgaaaaggaagaagattgtgagaaagcattcttcaaaatggacaatgtgcttatagatgacagaagaatacatgtggattttagccagtcggttgcaaaggttaaatggaaaggaaaaggtgggaaatacaccaagagtgatttcaaggagtatgaaaaagaacaggataaaccacctaatttggttctgaaagataaagtaaagcccaaacaggatacaaaatacgatcttatattagatgagcaggccgaagactcaaaatcaagtcactcacacacaagtaaaaaacacaagaagaaaacccatcactgttctgaagagaaagaagatgaggactacatgccaatcaaaaatactaatcaggatatctatagagaaatggggtttggtcactatgaagaagaagaaagctgttgggagaaacaaaagagtgaaaagagagaccgaactcagaaccgaagtcgtagccgatctcgagagagggatggccattatagtaatagtcataaatcaaaataccaaacagatctttatgaaagagaaaggagtaaaaagagagaccgaagcagaagtccaaagaagtccaaagataaagaaaaatctaagtatagatgaaagatgaagaggcagaattgagaggctaacatatttactcttgtctaacttaagagtgccaggaaaaagaagatgctttagattttgtgctccaaagccttgctaattttttttcataactaggaattatgggctctttaagcattcaaatacctggatttataattagaagccactggggaagagcataaaaaggaaatgtgcggaaccacttttttccctttttggaaaataaccttttgtcttctttaaacacctttaaaatttttctataattttgcggcttatcctaccccctttccaacactttgtggggccaaaaaagtttcccnnnnnnnnnnnnnnnnnnnnnnnnnnnnngaggaaaccaaggccccccccttgttaaaacacaacnnnnnnnnnnnnnnaacaacccccttgtccatcctatttctttttttattttctaaaaaaagttggcggcacaaaaggttttaca

SEQ ID NO: 82487 - DNA, 839 bp, Homo Sapiens
  misc_feature (149)..(176): n is a, c, g, or t
  misc_feature (695)..(739): n is a, c, g, or t
ctgtacaaaacctgaaatatttttacttttttaaaactttgatctaagttgccttagacctcatggactcgatacaagagtaatatgaattgggaaataaaacactttaatagccacgataaactttgttagaaatgtacatgttgccnnnnnnnnnnnnnnnnnnnnnnnnnnnngagagagagagaacagcttgatgtccaggttagattatataaatgttcaacaagggcagggtaaaggaaactttaaaaacaccagttctgaataagcctggggccccgtgagactccccctctcccacccagtctcgggccctagggactgcgtccctccaaacaggacaagtgggagtggataaggcctccaccaagctgcctctcccagtggacaaaaacatccaggtaatgggtatataaacaaagctcataagaaatgtacaaatataaaaagctacaaacattaataaattacagcatcacaaaacacggaaacacttcacaaggtgctagtaaaataactgtatcccccaatcccctcatcatacaaggaaaacaaagagctggtattaaagttgaagattcatcttcaaaatgtgtctgaaatagatcttttgtgtactatttgcttctgtaaagacagagtgtaaggctgcacagacatcacttgtttttcaggcaataccttagttcttnnnnnnnnnnnnnnnnnnnnnnnnnnnnnnnnnnnnnnnnnnnnncatcagaacccaactgtccatctgactcagcaaaaaactcgtataaatgttaatgaagaactctatagaaagaaattcctaaagatacttttactcttat

SEQ ID NO: 82488 - DNA, 1012 bp, Homo Sapiens
  misc_feature (84)..(84): n is a, c, g, or t
  misc_feature (950)..(963): n is a, c, g, or t
cagcattctcgggaattcagctgattaaaaactcttctcagtaaggcagaaaacaagcaaagggatgtgcagaaagagtatganagacacagactgtactctcagaactgaagttgaagtttgaaatgactgagcaggaaaagcagtcaatcacagatgagctcaaacagtgtaaaaacaacctgaagctgctccgagagaaaggaaataatccttccatattacaacccgtcccagccgtattcatcggcctattcctggctttcctgttttggtgtttcggtccattgtggtagagaaagaaaccctggccctggatgcccatgttggctgccctggttgcagtaacagccatcgtgctgtacgtgccaggtctggccagagcttctccatgagagcgttccttgagtccgtacaccgtcctccctctagaagctggcatcacactcatgctggggacaaacagaaccattttcttcctctttacctcttaaaacagcagaagtacaagaatacagctgtagggtcattgctttaaattatataaaatgtatctgtctataaagaagatataaaattgtgactttattctactgtaagcaataatttgcttgcaatttttcatgtaatttttaaattagtatgttaagattctgaatattatggtggcctaaagtaggcttcttggtacaccagattatttataacattaaatttatgagtattttactctgaattctgatcaccagataattcatttttctgatttgataactacccaaaccaaacaaccaatacatacatgggaagagaggccctgtgtgctcagtgcctatcagtttgaaatatatacacatatatatattttttacatatttacgccatttttacttgttatgaaaccactgagctattgggaacaagacttagagacaactatttgcgtggannnnnnnnnnnnnnaaggaaaaatacgtttggaaaataaactgttatggtgataatttgggga

SEQ ID NO: 82489 - DNA, 970 bp, Homo Sapiens
gtgcatttgaaaacaactggcagcctgataggcagattccatttcatgatgtcagattcccacctcctgtaggttataataaagatataaatgaaagtgatgaagttgaggtgtattccagagcaaatgaaaaagagccttgctgttggtggttagctaaagtgaggatgataaagggtgagttttatgtgatagaatatgcagcatgtgatgcaacttacaatgaaattgtcacaattgaacgtctaagatctgttaatcccaacaaacctgccacaaaagatactttccataagatcaagctggatgtgccagaagacttacgacaaatgtgtgccaaagaggcggcacataaggattttaaaaaggcagttggtgccttttctgtaacttatgatccagaaaagtatcagcttgtcatttttgtccatcaatgaagtcacctcaaagcgagcacatatgctgattgacatgcactttcggagtctgcgcactaagttgtctctgataatgagaaatgaagaagctagtaagcagctggagagttcaaggcagcttgcctcgagatttcatgaacagtttatcgtaagagaagatctgatgggtctagctattggtactcatggtgctaatattcagcaagctagaaaagtacctggggtcactgctattgatctagatgaagatacctgcacatttcatatttatggagaggatcaggatgcagtgaaaaaagctagaagctttctcgaatttgctgaagatgtaatacaagttccaaggaacttagtaggcaaagtaataggaaaaaatggaaagctgattcaggagattgtggacaagtcaggagttgtgagggtgagaattgaggctgaaaataagaaaaatgttccacaagaagaggaaattatgccaccaaattcccttccttccaataattcaagggttggacctaatgccccagaagaaa

SEQ ID NO: 82490 - DNA, 1433 bp, Homo Sapiens
  misc_feature (928)..(956): n is a, c, g, or t
  misc_feature (1238)..(1238): n is a, c, g, or t
  misc_feature (1247)..(1247): n is a, c, g, or t
  misc_feature (1277)..(1277): n is a, c, g, or t
  misc_feature (1384)..(1384): n is a, c, g, or t
ggccgtatacggtctaggtagcgagcctgggtggcgaattccgcacgagggttcaaggcagcttgcctcgagatttcatgaacagtttatcgtaagacaagatctgatgggtctagctattggtactcatggtgctaatattcagcaagctagaaaagtacctggggtcactgctattgatctacatgaagatacctgcacatttcatatttatggagaggatcaggatgcagtgaaaaaagctagaagctttctcgaatttgctgaagatgtaatacaacttccaaggaacttactacgcaaagcaataggaaaaaatggaaagctgattcacgagattgtggacaagtcaggagttgtgagggtgaggattgacgctgaaaatgagaaaaatgcgccacaagaacaggaaattatgccaccaaattcccttccttccaataattcaagggttggaccctaatgccccaagaagaaaaaaaacactttacatataaaggaaaaccccacccattttttctcaacctaccagtcacaaaagccccagagggggaagggccacccctttgtttttttgggcgacacaagggacagccatccgttaatggccacttgtttccctttgcggattatcccccctgaaccctattttaaagggaaagtcagcaccccactttggccgttttggcgaccaccacttaacacaaaccttggaatggacccacagttttgccgcaacacacaaacttggtgacgccctagaactttctcctagagaaaacgcaacgccgacacgcaaaaagagtgcgctgtacaccgggcggtgaggaggcggcaaacaatagataatgcgctcttatcgctgctggcgaccccttcgcgcaattggaaaaagtggggggctccgccaccaaggtggaaaaaaacnnnnnnnnnnnnnnnnnnnnnnnnnnnnnaaaagctcagagacaaaaccccctttttgcacccaaaggaaaaaagactacacgccgagcggggggctcgacccccctacgctaccctaaacacgcccgggcggggccagctcgggggcggcgacagaaaaaaactttcttccaaagggggggagcaccactccaactaccctcgcctggcacagagcgacaattcctccatcactgtcgcgtatctcccgcggacgaacaaacgcgcgcgaaaattgccgttggaccccccaccgcgggagaagcaccccnaaaagcttncattttcagcccaacgcgtgggccgcactntctcatcctcttctacattcgcggcgacgcgcgcaaagaaaaccacgacgcggaatgaaatactctctcgccttttggcggtgtcccacacgagaacgctgccggcncccccgcggtcgcgcttgcactgatctgagcggggtacggtacgaacca

SEQ ID NO: 82491 - DNA, 1247 bp, Homo Sapiens
  misc_feature (241)..(440): n is a, c, g, or t
cttcgatgcggaagcgcaggcgcaggtgcgccgcctcggcccgcgcaggcggtgggcccgtctggggcaaggcgctcggaagcgcctggttggttcagaaaatcggaccgcagcgggagggcgggcaccgtgcgcgtggtctcagtggccccaggcgaaccctgatgagcagcagccgcaagtggcttactaaaggagccactttctacgtttgtctggaatttacgtgaattaagctggnnnnnnnnnnnnnnnnnnnnnnnnnnnnnnnnnnnnnnnnnnnnnnnnnnnnnnnnnnnnnnnnnnnnnnnnnnnnnnnnnnnnnnnnnnnnnnnnnnnnnnnnnnnnnnnnnnnnnnnnnnnnnnnnnnnnnnnnnnnnnnnnnnnnnnnnnnnnnnnnnnnnnnnnnnnnnnnnnnnnnnnnnnnnnnnnnnnnnnnncctgagccagaccgctctggactgtcttaatttattcagccttaatacctgccagaattttaccttactatgtatctttgtccttacgtatataaatttcatatacaattgagattatcctgtataggcttttcccccctcacttagatatggtgactatttctcatgataggctgaatactaacatttaggaaactgtcggcctgaaacacgagcggagacaacagttcactctaagtagcagagtcaatctgggccacacttgagcacaaattcaaggcgccctgaatgtgtactccgattagcagttaacagtggattttaaaggcaaaaaagggggccagggagtggactaataggaacttgtttgtgaggaattctcactggtttacagaaataaattgattagtgactgactatatgttgttcagctattgagtgtgggtatagtgtccattgtggcgtcattaggttaatttatagctgtttgtggcgctgttgccaccagtagcagtttaaagaggtgaacacaggtcaaggggtagtagggcgcgattgtcgcctcatttgaatgtctctctcggcctgataattaaaagaactcgcgttcctcagataaaaattctcttttctcaaaaccatttaaatgtggtaattagaatggcccagaatgggcacagtgccttttagccctcgccattacttgctcttaggagtgcattttttgtagctgtgggtttttgactatctctgctgctttctccagcccctaccctcgtgactacaagggaaaacgtgcggcgctca

SEQ ID NO: 82492 - DNA, 689 bp, Homo Sapiens
  misc_feature (77)..(77): n is a, c, g, or t
attcggcacgaggcgaacataaccatgactagttatcaccatctgatagtgcttcctttgcatgtaaatcatgcttntgttttgggacattcataaagaatagggattaactgaagtggcactgccatgtaacaatagcataattccagtttgttctacttaccaggcttgccctccatgaaaatatacaattgtagataatcttttttaattggagagatttcctcttatgtccaattttatacataaagtaagacttttttattgtgtgcctaaatttgtgtaaatatgactgcatcgtattagtaaactgaattaggtagtgcattcacataaaatttaacatcaccaagaaggctttaccttaagaatgtaatgatgaatcaccattttagatagactgataggtaatttattaactgatttaaaagagaaaagacctatatcatctcagtgagtaccaaaaagcatttaataaaattcaatactcattcctaaagttccaagcaaactagaaagataaggaaaattcccacaaaactacagcaaacatcattcttgatggtgaagcattggctgcatttgcattaatgctcagaacaggaagaaaatacccaacaccacaaccatcagtaatctactagagttcttagtaattcagtaaaacgagaaaaagaaatgtgagatag

SEQ ID NO: 82493 - DNA, 1000 bp, Homo Sapiens
  misc_feature (236)..(236): n is a, c, g, or t
gcacgaggtgaagtaggttgtagaggctagaaacctgattaatagagcagtattagacaattctaactgaagtaggttgcagaggctagaagaaacctgattaatagagttagcttacaaagataaattttatgcagaaaagtattccaggtagataaaagagtagtgttattactctcagggttacatttaacagctgcccagatagctgaacaattatttcatataattcaaantaatttaaatatgcagtttaataacagtcgttacataagcttgaagttaaagtgatcagagccaagggggaaaaacccacaaatgataaagaagaataaaaagtaagaggactctagaagaaagttgtttttcacagcactgattgtttttatcatatttttctcctgccattgatacaagacatgtaagatgctgcaaaacctaactatgacagttccatgtaatatttttccagttaattttgtttaaaagtgagatgataatataaaaggatctcatataatagaataaaaataataaaaatttgttaatgaaacgtagacatacctacccattcttgttagttaagttagggtttgctgaaatcattcgcactcacgtaaagtataaatggggacctgaaagagcttttgtaaactcaagatatgcgggatctgagctgataatcagttaggctccatgttgagttgtgcgtgactcagttgtccttaaatttcgccttcatattttgtcataaatgggctctcaaatctttataagaaaacaaaatttgcctagatgcataaacatttaggtaaagttggattagtgtaatatttattcaagcataattttaaacactgcatctgaagtgccaacagttgcaagaaatgtcacaatttcagagatgttaaattgaaaaagtgatgtcttggaatcaatgaaatataaatatggatatgtataatcagttatacataaaaatttgctatagaggaattat

SEQ ID NO: 82494 - DNA, 515 bp, Homo Sapiens
aaatattgctgtattagacaattttaactgaagtaggttgtagaggctagaaacctgattaatagagcagtattagacaattctaactgaagtaggttgcagaggctagaagaaacctgattaatagagttagcttacaaagataaattttatgcagaaaagtattccaggtagataaaagagtagtgttattactctcaggtttacattaacagctgcccagatagctgaacaattatttcatataattcaaataatttaaatatgcagttttataacagtcgttacataagcttgaagttaaagtgatcagagccaagggggaaaaacccacaaatgataaagaagaataaaaagtaagaggactctagaagaaagttgtttttcacagcactgattgtttttatcatatttttctcctgccattgatacaagacatgtaagatgctgcaaaacctaactatgacagttccatgtaatattatcatctcacttttaaacaaaattcctcgtgc

SEQ ID NO: 82495 - DNA, 1018 bp, Homo Sapiens
  misc_feature (49)..(83): n is a, c, g, or t
aaaaccgagaccgagcgcagcggagtcgagtgagcgaggaagcggccgnnnnnnnnnnnnnnnnnnnnnnnnnnnnnnnnnnncagtcgacggtaccggacatatgcccgggaattcggccattacggccgggagttctgcaatgtggtatgcagagttggctttcaaagaatgtactcgacaccttgcgatccaaaatacggagctggcatatacttcaccaagaacctcaaaaacctggcagagaaggccaagaaaatctctgctgcagataagctgatctatgtgtttgaggctgaagtactcacaggcttcttctgccaggacatccgttaaatattgttcccccaccactgagtcctggagctatagatggtcatgacagtgtggttgacaatgtctccagccctgaaacctttgttatttttagtggcatgcaggctatacctcagtatttgtggacatgcacccaggaatatgtacagtcacaagattactcatcaggaccaatgagaccctttgcacagcatccttggaggggattcgcaagtggcagccctgttgattaatctctacatcattttaacagctggtatggccttaccttgggtgaactaaccaaataatgaccatcgatggctcaaagagtggcttgaatatatcccatgggttatctgtatggactgactgggttattgaaaggactagccacatactagcatcttagtgcctttatctgtctttatgtcttggggttggggtaggtagataccaaatgaaacactttcaggaccttccttcctcttgcagttgttctttaatctcctttactagaggagataaatattttgcatataatgaagaaatttttctagtatataacgcaggccttttattttctaaaatgatgatagtataaaaatgttaggataacagaatgattttagattttccagagaatattataaagtgctttaggtatgaaaataaatcatctttgtctgattaactggctctg

SEQ ID NO: 82496 - DNA, 737 bp, Homo Sapiens
ttttatttgtttgcttatttttaaattaactgttttgagctttgaatacttaaggctttagagggagaacccaattttcaattatgttggctttttataaagcttgagttatgtaagatttaaataaaagtttgctaccaagatgattgccttattgaataggtcactattaaattcctttaaatgttgatatctgccatttgtggaaacaacgtaaattctacttaagtgtaaacaaggcaagcctcagaccagcaataaattactcagtttggataacattattttgtgcagttaatcaaatttgccaaagtctttatctgcccctttaacaagttgagtaaaaataaaaggtattttttagtcaatgtgttccatgattttgcttaaattaatacttttaagtaatggaacttttttcaaaggcaaatttaaactatttaagaaatagctcctaatacttgggatcttgtttagagaatccactttctggaagttctcagcataattagtgttgagagtggttcagttgtctttaatgtttgtcatgtggaaatggaagtagcctctttttgttctgaaattgagtttattcaaagtgtaaaagcacatactgcattttctgctgaaagatcattatgtttaacaggcacttaatctcagtaaagtcagttgccagttaagttccacccagtagtcagtcccctttgtagttagtgggattatttgataattgg

SEQ ID NO: 82497 - DNA, 624 bp, Homo Sapiens
  misc_feature (98)..(98): n is a, c, g, or t
ggggagcgggtctgctcccaaggggcctgagcagtccttggcctgctaaggtcttggaacttgcctgcctttccatccatggccagcagcacctgccntacctgccccacttgtccttagcctggacctctgacagcagcatctctaccttctccccagctcccaggaccacaggctcaggcaggggcctccatgggccccaggggaacactggggacttggcctctctctagggtacatggtgctggttcaggctgggagaggcagcccaggaagtctcatctggggagcaggcagccagcatctgggccttggcctggagcacaaagaccctggctttcattttctctcaggtgaaaggaaattaaggcaacaaaagaagcccggctcctggtcacctaggaagcctcagattccttcccatggagggagggagtggtttgcaggtggccaagttcctctaacttggctcacactcgacatgaaaattcagaattttatactttccctaccctctagagaaataagatcttttttgtcagtttgtttgtatgaaactaaagcctttatttgttaatagttcctgctaaaacaatgaataaaaactcaaggagcaactaaaaa

SEQ ID NO: 82498 - DNA, 1494 bp, Homo Sapiens
  misc_feature (780)..(780): n is a, c, g, or t
  misc_feature (881)..(985): n is a, c, g, or t
  misc_feature (1129)..(1154): n is a, c, g, or t
  misc_feature (1340)..(1348): n is a, c, g, or t
ggggttggtccgcgcgttgctgcgttgtgaggggtgtcagctcagtgcatcccaggcagctcttagtgtggagcagtgaactgtgtgtggttccttctacttggggatcatgcagagagcttcacgtctgaagagagagctgcacatgttagccacagagccacccccaggcatcacatgttggcaagataaagaccaaatggatgacctgcgagctcaaatattaggtggagccaacacaccttatgagaaaggtgtttttaagctagaagttatcattcctgagaggtacccatttgaacctcctcagatccgatttctcactccaatttatcatccaaacattgattctgctggaaggatttgtctggatgttctcaaattgccaccaaaaggtgcttggagaccatccctcaacatcgcaactgtgttgacctctattcagctgctcatgtcagaacccaaccctgatgacccgctcatggctgacatatcctcagaatttaaatataataagccagccttcctcaagaatgccagacagtggacagagaagcatgcaagacagaaacaaaaggctgatgaggaagagatgcttgataatctaccagaggctggtgactccagagtacacaactcaacacagaaaaggaaggccagtcagctagtaggcatagaaaagaaatttcatcctgatgtttaggggacttgtcctggttcatcttagttaatgtgttctttgccaaggtgatctaagttgcctaccttgaattttttttnaaatatatttgatgacataatttttgtgtagtttatttatcttgtacatatgtattttgaaatcttttaaacctgaaaaataaatagtcatttaatgttgnnnnnnnnnnnnnnnnnnnnnnnnnnnnnnnnnnnnnnnnnnnnnnnnnnnnnnnnnnnnnnnnnnnnnnnnnnnnnnnnnnnnnnnnnnnnnnnnnnnnnnnnnttgggggggccccctccgccccccgagaaattttcaaaacttttggttggggccgccgcggccccagaagggaaagggaaaccgggggccataagtggttccctagggaaaacccggggccaagaaacaagggggttgggattnnnnnnnnnnnnnnnnnnnnnnnnnngggggggaaaacccaggggtgtttttgagaacaaaaccccacagggggtgcggttcctgggagggccctttctctgggggattcttttccaacagggggagttcccaaaggcggagtctctataatttaacaaaattaaaaccccccccgcgccccgggggcgcttatatttggggaaagaaagcnnnnnnnnnacaatttctccattaaagccactttttgtggccgaaaattgtggggaaaccccttctcccaaaacggcgggtgtgtgggaaaaaccctcggaactcccgcacggggcggataattacacacaccccttggggcgcgcttggtagag

SEQ ID NO: 82499 - DNA, 795 bp, Homo Sapiens
ggggttgtgaggggtgtcagctcagtgcatcccaggcagctcttagtgtggagcagtgaactgtgtgtggttccttctacttggggatcatgcagagagcttcgcgtctgaagagagagctgcacatgttagccacagagccacccccaggcatcacatgttggcaagataaagaccaaatggatgacctgcgagctcaaatattaggtggagccaacacaccttatgagaaaggtgtttttaagctagaagttatcattcctgagaggtacccatttgaacctcctcagatccgatttctcactccaatttatcatccaaacattgattctgctggaaggatttgtctggatgttctcaaattgccaccaaaaggtgcttggagaccatccctcaacatcgcaactgtgttgacctctattcagctgctcatgtcagaacccaaccctgatgacccgctcatggctgacatatcctcagaatttaaatataataagccagccttcctcaagaatgccagacagtgcacagagaagcatgcaagacagaaacaaaaggctgatgaggaagagatgcttgataatctaccagaggctggtgactccagagtacacaactcaacacagaaaagggaaggccagttccagctaattagggaatagaaaaagaaatttccatccctgaatggtttagggggaactttggccccttgggtccatctttaagttaaaatgggggtcccttttggcacaaaggtgggaatccttacggtttggccctaccccctttgggaaa

SEQ ID NO: 82500 - DNA, 1222 bp, Homo Sapiens
  misc_feature (796)..(805): n is a, c, g, or t
  misc_feature (852)..(881): n is a, c, g, or t
aggattcagctatatgataatgacatttattttattccaaggaatgtgttcatcagttcaagacagtttcagctgtatgcagtttagcatggcatattcggctcaaattatatcactcagaggaggacacttctcagaatacagctactcatgaaacaggcacatcatcagattccacatcatctgttcttggacctcacactgacaacatgatttgtgctgtaagcaaagcctccttggattctgttttttcagataaacttcattctaaatatgaattacagcagattaaacatgaacctattgcatctgtaagaatcaaggaagaacctgtgaatgttaatattcctgaaaagactacagcactgaataatatggatggcaagaatgttaaagcaaaattggatcatgttcaatttgcagaatttaagattgacatggattctaaatttgaaaatagcaacaaagatttaaaggaagaattgtgccctggaaatctaagtctagttgatacaaggcaacacagttcagcacattcaaatcaagataaaaaagacgatgacattttgtgctaaatttgcatataccatctaaaatccttttttaaaaaaatttaatgtaataaagattcatgaattctgaaagcaagccaaggacttgctcctatgtctgttacaaaacatagtttatgtagctttgtaacattcctcagtgcctgtccataactgtgaagtattaagcacttagggccagatgcactgtaaacattgcaggtttaaacataaaggagtctttnnnnnnnnnntcatttacgttggaattttaggttttagaatagagctgacattaacnnnnnnnnnnnnnnnnnnnnnnnnnnnnnntttgtaatatgagccagaattctttttcaacaatttaaagcttttccatagagcttatttatatccttttttttcattttaaatgtgtcagcactgtagtgtaaatagcttttaaatatctttttagtgtgatttatactgaaatgtgagccacttaataaaggttcatatgttcatattaataaatatgttttctgttgagtctgtaaagacaaactgacaattcatttaagtcatttgataatgattctctgctggtatatctatttagtgtggtattgtagtgcaaatgtacgtaattcaaatctagtaaatatttaagttcctcacactgtgcaggc

SEQ ID NO: 82501 - DNA, 1182 bp, Homo Sapiens
  misc_feature (272)..(280): n is a, c, g, or t
gctgccacttgcggagaccaagtctattctgtgcgcaggcggcagaagccaagtgacagagctgactcgcggcggagctggcatgaagagagcccctttgaaaagcagtttaaacgcagaagctgccaaatggaatttggagagagcatcatgtcagagaacaggtcacgggaagagctggggaaagtgggcagtcagtctagcttttcgggcagcatggaaatcattgaggtctcctgagaagaaagacacttgtgacttctatagacaannnnnnnnncttgttcacaaaaaaattccctgtaaatctgaaatatatatatgtacatacatatatatttttggaaaatggagctatggtgtaaaagcaacaggtggatcaacccagttgttactctcttaacatctgcatttcagagatcagctaatacttctctcaacaaaaatggaagggcagatgctagaatcccccctagacggaggaaaaccattttattcagtgaattacacatcctcttgttcttaaaaaagcaagtgtctttggtgttggaggacaaaatcccctaccattttcacgttgtgctactaagagatctcaaatattagtctttgtccggacccttccatagtacaccttagcgctgagactgagccagcttgggggtcaggtaggtagaccctgttagggacagagcctagtggtaaatccaagagaaatgatcctatccaaagctgattcacaaacccacgctcacctgacagccgagggacacgagcatcactctgctggacggaccattaggggccttgccaaggtctaccttagagcaaacccagtacctcagacaggaaagtcggggctttgaccactaccatatctggtagcccattttctaggcattgtgaaaaggtaggtagctagtcacacttttcagaccaattcaaacagtctatgcacaaaattcccgtgggcctagatggagataattttttgttcttctcagctttatgaagagaagggaaactgtctaggattcagctgaaccaccaggaacctggcaacatcacgatttaagctaaggttgggaggctaacgagtctacctccctctttgtaaatcaaagaattgtttaaaatgggattgtcaatcctttaaataaagatgaacttggtttcaaaaaa

SEQ ID NO: 82502 - DNA, 414 bp, Homo Sapiens
  misc_feature (67)..(78): n is a, c, g, or t
ctttcggagacagtctagctccgtcaccctgcactccagcctgggtgacagagtgagactcaactcnnnnnnnnnnnncagaggtgggagtgtgaacacaggcaggagctccaattcctgaccccagcgctgtcctgacccagatggagtgctgctctcacatctcagagacttagcactcagccctgccctgccctgacaggcagccagtcatcgtgggcagcagggccatctacttcccccactgcggcgtcaggggtggccagagtgtgtggaagtggaaagaacgtcctctcaaaatgcaagaggccagaggatggttcactgctcgtgtgttctgctagctagaattctgtgtaccttgcaatttggggagaggggttagaataaatttgtaaatgaagctgaaaaaaa

SEQ ID NO: 82503 - DNA, 366 bp, Homo Sapiens
  misc_feature (324)..(324): n is a, c, g, or t
  misc_feature (327)..(327): n is a, c, g, or t
acagtgagtatgtgatagcaaagaatacagtgataactagtcaagtttggtgccactatcttgattcatgctaaggcaccaacagtcttaccctctattgctttggcaccatcactgcaaacgtcaacacaatgaaaaaggcaaataatgttttagcattattatgaaaatagttttgactctatgggccaccaagggttcacaacacattttgagtagcactaccatatggaataccaaactgaccaacaattaaaccaaaaatacacaatatatcaagtaaagctattacctaagaaatccaagtcattgaacaatcagcantanagtgtcacctgggttcattgaaacatgaactcctttgct

SEQ ID NO: 82504 - DNA, 1336 bp, Homo Sapiens
  misc_feature (61)..(91): n is a, c, g, or t
  misc_feature (597)..(611): n is a, c, g, or t
  misc_feature (827)..(849): n is a, c, g, or t
gcagtgctaacctaaattaacctcactaaagggaataagcttgcggccgcatacgcggtcnnnnnnnnnnnnnnnnnnnnnnnnnnnnnnncatcttaatttttacagcatatactcttcttaccagtatccttagaatccaaatgtctagataagttgaggacacatacctgcattgttgagcttctctactggggacgccccggcattattttattcccaagccagcagaccggcccagacagccaggctgtgggctggttccagaccaactgctatggtggaaaatgcagcttccaggtcccactaccctgacatttccgtggaaggaagaacctggtggctcgtggaggaaaccagctttctatgagaaaggactgaaggattgcgcaccctgcacaagtacagattgaccaggaaaagacaagtgtcttctgtgtgtcacagggaaagccaggagtggccttctctgcaggccagcaagcctgcagcagcaggtgcccccacgtcaggtgctgactgtccgctgtccgctcctgtagaaggtagggagcacaatacctagggactaagggatgttcgccggttgtggtttgnnnnnnnnnnnnnnnccttggttaagaaatcaaatttgcagaatttaatctacaagttgtattatgctttgaaaactccatccctcctaagaatcttaaaaaacttgaaatgctcgccaaatgtccccatgggatttttgaccaaaagtaaggtgataactgaagaaatttttagttctttgatcacttcagtgacaatacccattaatgaatcttctccatgatttgggnnnnnnnnnnnnnnnnnnnnnnnacacttcttaacctgttgatctatttgaggtcttttgtgtttatcaaacttattcttaagtttaaaaaagaaattaaaagggtggtttttttaagattttaaagtttgctaacatattaaaaatcttcaaatgcttattaaatagagcagttcttgccacccagtcttgtattctgtctttagctagccaaattgtccttgaatttgggttttccacaacctcaaagggttatttgaaatcttttgttgtattttaaaatattttttggaagagctgctaattttattttaaaaaacaaagttgtgaaaacatgcctcctttttaaaaaataacccctccatccaggatatggaatccagcaccacagtgcacaggtcagggctcggagggagcctctgtgcagatgtgctttctttacagtggctgtaaaaagtttgtatttattatgtataaaatgttgaataataaaaaaaatggaattataaa

SEQ ID NO: 82505 - DNA, 1110 bp, Homo Sapiens
agctatgtgactatagaccagtgtgttcaaacaaagcaggctggtacaggtccggatatcccgggatatcgtcgacccacgcgtccgaaaaaatccccagtacccgtagaaacccttaaagatgttaaaaaagagttaacgtatcagaacacagatttaagtgaaattaaggaagaagagcaggtaaagtctactgacagaaagtcagcagtggaagcccaaaacgaggtgactgaaaatccaaaacagaaaattgcagcagaaagcagtgaaaatgttgattgtccggagaatcctaaaattaagttggatggaaaacttgaccaagaaggtgatgatgtacaaacagcagctgaggaggtactagctgatggagacacattagattttcgaggatgacaccgttcaatcatcaggcccgagggctggtggtgaagaattagatgaaggtgttgcaaaagataatgctaaaatagatggtgccactcaaagcagtcctgcagaaccaaagagcgaagacgcagatcgctgcaccctgcccgaacatgaaagtccctcacaggacattagtgatgcctgtgaagcagaaagtacagagaggtgtgagatgtcagaacatccaagtcagaccgtcaggaaagctttagacagcaatagcctagagaacgatgacttgtcggcaccaggaacgagagccagggcacttcaatccagaaagcacgagaagataacagaaggagggaatgacgaagggcaaaagcaaagaagactgtaccaatgtcctaaggctgaggcaggcggaaggcgcggagcaacaggaagtctcagggtgaagggggacataactcatcaactggccactgtaagttacaaggttcaaaatcatacagaaggcccgaacgtgacaacttacccaggaggaaccacacggattcaaggtaagaacagggaacgggtagacatcacagtgaacaaggaagggaataacacaaactcagaaagaaccataggaaacaggaaagacaaaagagaacaaccacgacaacacagaaagaacaggagaagacgccaataacaaagaagcactaaacagccacggacacaacgagc

SEQ ID NO: 82506 - DNA, 460 bp, Homo Sapiens
  misc_feature (302)..(311): n is a, c, g, or t
gacatattataatagggggtgtgtgtgtttgtagaggcatagaactgactttattgttttgactaggaaagagcaaagggtttggaatcaaaagtcccaacttccccaccttcttaatagtgtgtgaatctgagtgccttattaaccttccctggtcccagtttcgtatccgtaaagttaaaataccaatcctgtttaatttgcttctctcaccagggatcagaaggccaaatgagatgatgtatgtaaaattgtaaagtcctccacagatggcacttgccacattacagagaacttgagannnnnnnnnnaccaataacgttccaaatcttccacatgcagatctggagtccaggtgtcctggctcctggccctgaactttttggctgggccaaggggcttttcggtaaagtgctttggtgctttggaataaaacaggatgaacatgaatcataaaaaa

SEQ ID NO: 82507 - DNA, 1171 bp, Homo Sapiens
gaatctcctttagccccgcccgcctccgtagctgcctgaagtagtgcagggtcagcccgcaagttgcaggtcatggcgctggctgctcgactgtggcgccttctgcctttccgacgtggagccgccccggggtctcgtctccctgcggggacttcgggcagccgcgggcattgcggcccctgtcgattccgcggcttcgaggtaatgggaaacccaggaactttcaaaagaggccttttactctcagctttgtcgtatttgggttttgaaacttaccaggttatctctcaggctgctgtggttcatgccacagccaaagttgaagaaatacttgaacaagcagactacctgtatgaaagcggagaaacagaaaaactttatcagttgctaacccaatacaaggaaagtgaagatgcagagttactgtggcgtttggcacgggcatcacgtgatgtagctcagcttagcagaacctcagaagaggagaaaaagctattggtgtatgaagccctagagtatgcaaaaagagcactagaaaaaaatgaatcaagttttgcatctcataagtggtatgcaatctgtcttagtgatgttggagattatgaaggcatcaaggctaaaattgcaaatgcatatatcatcaaggagcattttgagaaagcaattgaactgaaccctaaagatgctacttcaattcaccttatgggtatttggtgctatacatttgccgaaatgccttggtatcaaagaagaattgctaaaatgctgtttgcaactcctcctagttccacctatgagaaggccttaggctactttcacagggcagaacaagtggatccaaacttctacagcaaaaacttacttcttttaggaaagacatacttgaaactacacaacaaaaagcttgctgctttctggctaatgaaagccaaggactatccagcacacacagaggaggataaacagatacagacagaagctgctcagttgcttacaagtttcagtgagaagaattgagaacttttcagagaagatttatgaaatagctaataaacattgccttttcttttaattctaaacttaatatatgaactataactgttctacggctttttaaatgttgtgaccatttaaccgtgtaaatataaaatattctaggcttcttcacaaa

SEQ ID NO: 82508 - DNA, 854 bp, Homo Sapiens
  misc_feature (505)..(505): n is a, c, g, or t
  misc_feature (523)..(523): n is a, c, g, or t
  misc_feature (532)..(532): n is a, c, g, or t
  misc_feature (538)..(538): n is a, c, g, or t
  misc_feature (567)..(567): n is a, c, g, or t
tttagaattaattgaaaaggcaatgtttattagctatttcataaatcttctctgaaaagttctcaattcttctcactgaaacttgtaagcaactgagcagcttctgtctgtatctgtttatcctcctctgtgtgtgctggatagtccttggctttcattagccagaaagcagcaagctttttgttgtgtagtttcaagtatgtctttcctaaaagaagtaagtttttgctgtagaagtttggatccacttgttctgccctgtgaaagtagcctaaggcctgtcaaaaacacaaagagcccaaacataataaaaaagattaaagaagacaatattaaaaaagcattgtctcaaagatctactgctatattatatttaagtcaggaagtaaatcatcttaaaataatggtcacttcttcaacagtgagagttaacacccaaagtgaacgtaacacttcaatcatcaagattacaataatatggactaccttcttggtaataacttgngttgctgtttagaacttnggtaccaanactaancatcatgtgcagaaaggaaagaacattantcacgtgtaactcagctattttgacagttctcttaaatcataactagtgatttttagtaaaaacaaaatataatcaaaagctgaatttattcgttgtactagtgaatttttaagagtccattattattgaaattcctacatacaatgttaagtctgaaactctttttgtcctacttaagctactgtttttgtaatgcattctctaatgacatttgatttctagaaacataactaatttgataaagtagagctgactatattttttgtccttaaaatgacctgtctta

SEQ ID NO: 82509 - DNA, 2962 bp, Homo Sapiens
  misc_feature (2069)..(2078): n is a, c, g, or t
  misc_feature (2236)..(2270): n is a, c, g, or t
  misc_feature (2418)..(2418): n is a, c, g, or t
  misc_feature (2489)..(2489): n is a, c, g, or t
  misc_feature (2506)..(2506): n is a, c, g, or t
  misc_feature (2573)..(2573): n is a, c, g, or t
  misc_feature (2595)..(2595): n is a, c, g, or t
  misc_feature (2773)..(2773): n is a, c, g, or t
  misc_feature (2802)..(2802): n is a, c, g, or t
  misc_feature (2811)..(2850): n is a, c, g, or t
  misc_feature (2872)..(2872): n is a, c, g, or t
  misc_feature (2883)..(2883): n is a, c, g, or t
  misc_feature (2895)..(2895): n is a, c, g, or t
  misc_feature (2907)..(2907): n is a, c, g, or t
  misc_feature (2916)..(2916): n is a, c, g, or t
atagctagtacgaggcctggtgtgtgaattcggcacgaggcaacggccaccgcagctgcttcggcgccgccagccccgccatggctgcgccctgcgcggaggacccctcgctggaaaggcattttaagggccaccgagatgcagttacctgtgtggacttcagtatcaacacaaagcagctggccagtggctccatggactcatgcctcatggtctggcacatgaagccgcagtcacgcgcctaccgcttcactggccacaaggatgccgtcacctgtgtgaacttctctccttcgggacacctgcttgcttccggctcccgagacaagactgtccgcatctgggtacccaatgtcaaaggtgagtccactgtgtttcgtgcacacacagccacagtgaggagtgtccacttctgcagtgatggccagtccttcgtgacagcctctgacgacaagacagtcaaagtgtgggcaactcatcgccagaaattcctgttctccctgagccagcatatcaactgggtccgctgtgccaagttctcccccgacgggcggctcatcgtgtctgccagtgatgacaagactgttaagctgtgggacaagagcagccgggaatgtgtccactcgtattgtgagcatggcggctttgtcacctatgtggacttccaccccagtgggacgtgcattgccgctgccggcatggacaacacagtgaaggtgtgggacgtgcggactcaccggctgctgcagcattatcagttgcacagtgcagcagtgaacgggctctctttccacccgtcgggaaactacctgatcacagcctccagtgactcaaccctgaagatcctggacctgatggagggccggctgctctacacactccacgggcatcagggaccagccaccactgttgccttttcaagaacgggggagtatttcgcttctggaggctctgatgaacaagtgatggtctggaagagtaactttgatattgttgatcatggagaagtcacgaaagtgccgaggcccccagccacactggccagctccatggggaatctgccagaagtggacttccctggtccccccaggcagaggcaggagtgtggaagtctgtgcagagccagccccaggagcccgtgagtgtgccccagacactgactagcacgctggagcacattgtgggccagctggatgtcctcactcagacagtctccattctggagcagcggttgacactgacagaagacaagctgaagcagtgtctggagaaccagcagctaatcatgcagagagcaacaccatgatcaggggagcaggaatcaagagctcggtgggatttgcaaggtggcaggccagggatttgtaccatgggacttgggtaaataaaggggactgaactctgtgggaatcacatccatactggagccctggatttttgcagttctgccctccaccttgctatctgcaccaggaggctctccacctggcagccagaggtccccagtgggccgggctcacacacaaatgatgcttcagacccgaatgagaggaccacattttgcttaatgtaaaggagccacttgaaaatgtctgctccttcggggtcctgagattgtggctccccctctggaggaggtggctccacgatgccttgattttcactcatcatttggacatgtgactggcttttcctacctctgccatggtgtagaaattgattgcacattgattggatgagccgggggttttctctaaatctgactaaaggcccaaagtgggcccatctgagtcaggtttgttgagaacaagccctctcaagtgggtggtggcttttcagtggccctgatttctgttccacacgtgttcactggagccaggtgacttcctccttgcgtgagtgagggcacaggaatctcaaaattaaacctgacttcattgcacaaaaacccaaaacggacagacgcccaccacccacccccagtcgcacaccaaatcggccccccgccacaagacaacaagggcgcactcccccaaacccacagcgcaaccccaccatctcgccggcgnnnnnnnnnnaccctccaaaaattttatataaccccctcctttggggcgcgcggccggcccagctggcgcaaccccccggcgtccgtacaacactgttttccccagggggaacctccgggtaaacaccgcctcagtggttttggaaatccttgcgctgagctgaaaannnnnnnnnnnnnnnnnnnnnnnnnnnnnnnnnnngtctctcaaaaacaaacactcccgatgggtggggtattttttccacagcgccccctccctcacgcgcggaaatatttaaaacaaaagacgaggaagacgttggtcgcaaggcaggaggagccccctcgcacacctggttaggacaganccaaaaaagggcgcaacccccgcgtagcgcctactctatactatcttcgttttttattactacgagcgcanacaaaaggtgggggggngtgggcgacacacctctctgttgtgtttgtgctcggccccacactctgtcccccgcccaggcgcggntgcaggtgggaccgagaggcgnggagctatggcacgccaaatgggtggtgcgggttcaggtcaactaacataaaccccctcgccccaacaactctgagccccgcgcgcgctcggccgctcaccgagcagccagcactcccccctcctctccttcgtcacctctccctctgtcaccaacacatcctacctgtcctgtgtgngccgcgcgctcgccagggccgtggcggangacaaaacnnnnnnnnnnnnnnnnnnnnnnnnnnnnnnnnnnnnnnnntttagccgatgatacgtaatangaaatacacanacggccgcctcntatgattcgccntgggtatgnggggccggcgggggggcccgacacctctcgccaacgcacgtgcggg

SEQ ID NO: 82510 - DNA, 582 bp, Homo Sapiens
tcctgaaattcaaaagttttggcagtgcccagcaggccctcaacattctcacaggcaaggactggaagctgaaaggcaggcatgccctaacccccaggcacctccatgcctggctcagaggcttaccacctgaatcaacaaggctcccagggcttcgtgttgtacctcccccctttgaacaggaggccttgcagactctgaaactggaccacccgaagatagcagcctggcgctggagccggaagattggaaagctctacaacagcttgtgcccgggcactctctgcctcatcctgctgccaggaaccaagagcactcatggttcactctctggtctaggactgatgggaataaaagaggaagaagaaagcgctggcccaggcctgtgttcgtgagtcggcctgccatgtttccatgtgccatttcttaccccttgtaggcaatggcaaagaatgtggtcaggctgtagcctccccaaccagcagacagttttatggaaacttggtatagcagctaaaagagtttagtttgtttatatggcatgtataagttttcaataaatgcctaaagttcaatcatagt

SEQ ID NO: 82511 - DNA, 1013 bp, Homo Sapiens
  misc_feature (508)..(548): n is a, c, g, or t
agcgtgtatccccgcaccagcaccgtcaccacccacatccgcaccacacaggcgaaaagcccttcgcctgcgacatctgtggaagaaagtttgccaggagcgatgaacgcaagaggcataccaagatccacttgcggcagaaggacaagaaagcagacaaaagtgttgtggcctcttcggccacctcctctctctcttcctacccgtccccggttgctacctcttacccgtccccggttactacctcttatccatccccggccaccacctcatacccatcccctgtgcccacctccttctcctctcccggctcctcgacctacccatcccctgtgcacagtggcttcccctccccgtcggtggccaccacgtactcctctgttccccctgctttcccggcccaggtcagcagcttcccttcctcagctgtcaccaactccttcagcgcctccacagggctttcggacatgacagcaaccttttctcccaggacaattgaaatttgctnnnnnnnnnnnnnnnnnnnnnnnnnnnnnnnnnnnnnnnnncacaagagacttaaaggacaggaggaggagatggccataggagaggagggttcctcttaggtcagatggaggttctcagagccaagtcctccctctctactggagtggaaggtctattggccaacaatcctttctgcccacttccccttccccaattactattccctttgacttcagctgcctgaaacagccatgtccaagttcttcacctctatccaaagaacttgatttgcatggattttggataaatcatttcagtatcatctccatcatatgcctgaccccttgctcccttcaatgctagaaaatcgagttggcaaaatggggtttgggcccctcagagccctgccctgcacccttgtacagtgtctgtgccatggatttcgtttttcttggggtactcttgatgtgaagataatttgcatattctattgtattatttggagttaggtcctcacttggggg

SEQ ID NO: 82512 - DNA, 697 bp, Homo Sapiens
gatagtgatggatggacgccgctgcactgcgctgcctcttgtaacagcgttcacctctgcaaacagctggtggagagtggtgccgccatttttgcctcaaccataagcgacattgaaactgctgcagacaagtgtgaggagatggaggaaggctacatccagtgctcccagtttctatatggggtgcaggaaaagctgggtgtgatgaacaaaggtgtggcgtatgctctgtgggactacgaggcccagaacagtgacgagctgtccttccacgaaggggacgccctcaccatcctgaggcgcaaggacgaaaagcgagactgaggtggtggtgggctcgccttggagaccgggagggctatgtgcccaaaaacctgctggggctgtatccacggattcaaacccccgacagcgaacactcgcctgaacttccttttggagcaccgcatggtcttgccagctaccaggagccacttaagagattattgtgctgttttccaggaaagctgcagctagaaaatggtcttaatggtgctcactttagcagacagcgtccacaatgtgaatcctacagtttccaggtgaggccctttctccagtttgcccattaactgggagaggtactttcgcctccaaggactgaattttgccaattactataaatccaaataaatacccactttcaaaacacccaaaa

SEQ ID NO: 82513 - DNA, 353 bp, Homo Sapiens
gctgttagaataatttcagacccaataaggaatttcgattattaaagttgagaaatttcacaaaactgcctggcacacaagcacacacatacatagacacattttaagtgataatctcttgatattagaagttgcatttgttaaatacatgctgtattttttatgagttgacttaatagtttatgtatattgactttgctttgtaggaagtaaatcaccagatatcttattgtttcatttaggaaagtagtgatatagatgaagagccaacttgatgaatgtgctattcataagctagaaactacagtttttccaaactaataaactgatgaattctaaataagttcaaaaaa

SEQ ID NO: 82514 - DNA, 728 bp, Homo Sapiens
ttccgtgaggcacagttgtacaaacccaggttaaaagacggcagtactataacggtctaaggtagcgaggcctgggtggcgaattcggcacgagggtcctttcagcctatgtcagccgcctgcccgcggctttgcgccgctgccccgggtccggatgctggccgtggcccggcctctcagcaccgctctctgctccgcggggacccagacgaggctcgggcactttgcagccggccttagtgctcgcgcaggttcctggtagagttacacagttgtgccgccagtatagcgacatgcctcctttgacgcttagagggcatccaggaccgctgcttctttacgtattgaaacctctatgacaagacttgacccagagaagctttcagctaaacttctcattttactgaaagacctgggcttagacagttcggaccaagtggagattatcatggccatggaagacgaatttgggtttgaaattcctgatatagatgctgaaaagttaatgtgtccacaagaaattgtagattacattgcagataagaaggatgtatatgaataaagtatcagaccctttggctttgctgagagaggactcagatgatagtgacgaatgtctggcagtgaggacacatttggcattcttgctgactctgacagagtgattctgatggacttgtatttaaattgtatgtgttttactctttgaaaataaatctataaaaacg

SEQ ID NO: 82515 - DNA, 925 bp, Homo Sapiens
  misc_feature (739)..(739): n is a, c, g, or t
  misc_feature (741)..(744): n is a, c, g, or t
  misc_feature (746)..(746): n is a, c, g, or t
  misc_feature (748)..(748): n is a, c, g, or t
  misc_feature (750)..(750): n is a, c, g, or t
  misc_feature (752)..(752): n is a, c, g, or t
  misc_feature (754)..(754): n is a, c, g, or t
  misc_feature (757)..(758): n is a, c, g, or t
  misc_feature (761)..(762): n is a, c, g, or t
  misc_feature (764)..(768): n is a, c, g, or t
gagctagtgtcaaacagcgggtataaaagaggcagtactataacggtttctaaggtagcgaggcctgggtggcgaattcggcacctgggttggcgtagccatggcgtctcgtgtcctttcagcctatgtcagccgcctgcccgcggcctttgcgccgctgccccgggtccggatgctggccgtggcccggcctctcagcaccgctctctgctccgcggggacccagacgaggctcgggactttgcagccggccttagtgctcgcgcaggttcctggtagagttacacagttgtgccgccagtatagcgacatgcctcctttgacgttagagggcatccaggaccgtgttctttacgtattgaaactctatgacaagattgacccagagaagctttcagtaaattctcattttatgaaagacctgggcttagacagtttggaccaagtggagattatcatggccatggaagacgaatttgggtttgaaattcctgatatagatgctgaaaagttaatgtgtccacaagaaattgtagattacattgcagataagaaggatgtatatgaataaagtatcagaccctttggctttgctgagagaggactcagatgatagtgacgaatgtctggcagtgaggacacattttggcattcttgctgactctgacagagtgattctgatggacttgtatttaaattgtatgtgttttactctttgaaaataaatctataaaacccnannnnanananananaannaannannnnncaaaatggtcgggccgccctcgggcccttcaagaaacctttcctaaaaccattctcttttggcgccgcggggcccccacttaggggaaaggggaaccctgggggccataagccgcggctttccccctagggaaaaaatcccgggggcacacggaaac

SEQ ID NO: 82516 - DNA, 1448 bp, Homo Sapiens
aacaacgcaatagtgacctatagaaccgtggttacacaaaagcaggctggtaccgcgtcggattttcccgggatatcgtcgacccacgcgtccgggggcccgggaggtgctcacactgcagttgggacattttgccggtttcgtgggcgcgcactggtggaaccagcaggatgctgcgctgggccgagcgaccgattccaaggagcccccgggagagctgtgccccgacgtcctgtatcgtacgggccggacgctgcacggccaggagacctacacgccgcgactcatcctcatggatctgaagggtagtttgagctccctaaaagaggaaggtggactctacagggacaaacagttggatgctgcaatagcatggcaggggaagctcaccacacacaaagaggaactctatcccaagaacccttatctccaagactttctgagtgcagagggagtgctgagtagtgatggtgtctggagggtcaaatccattcccaatggcaaaggttcctcaccactccccaccgctacaactccaaaaccacttatccctacagaggccagcatcagggtctggtcagacttcctcagagtccatctccatccccggagcatctgtatgattcagaagtacaaccacgatggggaagcaggtcggctggaggcttttggccaaggggaaagtgtcctaaaggaacccaagtaccaggaagagctggaggacaggctgcatttctacgtggaggaatgtgactacttgcagggcttccagatcctgtgtgacctgcacgatggcttctctggggtaggcgcgaaggcggcagagctgctacaagatgaatattcagggcggggaataataacctggggcctgctacctggtccctaccatcgtggggaggcccagagaaacatctatcgtctattaaacacagcttttggtctcgtgcacctgactgctcacagctctcttgtctgccccttgtccttgggtgggagcctgggcctgcgacccgagccacctgtcagcttcccttacctgcattatgatgccactctgcccttccactgcagtgccatcctggctacagccctggacacagtcactgttccttatcgcctgtgttcctctccagtttccatggttcatctggctgacatgctgagcttctgtgggaaaaaggtggtgacagcaggagcaatcatccctttccccttggctccaggccagtcccttcctgattccctgatgcagattggaagagccaccccatggaaccccactgtctgcatgtggggagcccttctggaacacgtttgctttgcccagtcagtggtgctgaggggtatagacagagcatgccacacaagccagctcaccccagggacaactccacccctctgcccttcatgcatgtaaccactgggggaagaaaatctttggctca

SEQ ID NO: 82517 - DNA, 1510 bp, Homo Sapiens
  misc_feature (33)..(33): n is a, c, g, or t
acacacggagcacggagagagagcgcctcaggnccccatacgtcctaagtagcgaggcctgggtggcgaattcggcacgaggcacaggcccccttaagatggcctgggcagacagaggtggctagaagggcagcctctttcttgccccatggggctgaggcacagaggccgagggctgccgagggctggcctggtggtcgacggacacaagcacctgcagatcaaactgccagactttacacactccagcttttgtctctggactggaacggggctggggctctcccagcatctgccaactgggggctgctccctgcccatggggcacctgggtggcccctgggcctcttgacttgagattctaccttctcggcccttccctctccccccatcattgtgccgtctctgttgcattctgaccctcccgcctggggggtgggggcgttgcctcaacacctcccccatccctgttccctgtcctgggagggatagagtccaccccagagcccggaggctgggcctggccctggccctgcactgatttctcatgtgtccttcgggaaaagggggagtgagagtgggaaaaagggagagttcaggacacctggtccccagctccccattgcctggggcagcagccctcaatttctccttgtgcctcccctcttccaggtgccaaatagccataacctcgtcttggaactgttatgtggcctctctggggtccaggtttcctggtcaagcctgggaatgccagggaggaaagggggtctggctacagcgaccctggtcttaggcaaggggaacatttctccctggagagtcaggtcctatcctgtgctgccctgtctgcccagcccagggcgatgcctggaagcctactgacattgcagggagtcagcctcgccccccaccccctactggttttccaatgttttgactggagggcaaaattttactactactcatctttttggagaccagggctgccctgctggcagcctgccttctaagtgaaatcgactctgtttccccactttaaccccaaattggggcttggaccaagggaggtgagaccccctcccccaggtcccctcccctttcaaaatccatctcattttgccacttcatgcccctgccctaactgggtttttgttcattttttaaaaacagaccacccatcccatccgttttggcttcttgtcccctgtaaatagaccatgacttcgatcagtatttcttgtccccaccccttcctatccccagatgtgcccccatcccctgaaggagctggctgtctcagtcctgggctcgcgcacttcaccccggcagatggagggggcggaaccgggtgggcggggccgcttcgggctgcttgggccagcggccacccctgcccagccgtcgggagggccgcatctctgtatataatatatatatgtatgtattgttcccggttttgtacggaccatgccctctgtcaggtcgtccccataaaagcagcccccgg

SEQ ID NO: 82518 - DNA, 790 bp, Homo Sapiens
  misc_feature (374)..(411): n is a, c, g, or t
aggcgggagggtcagaatgcaacagagacggcacaatgatggggggagagggaaggcccgagaaggtagaatctcaagtcaagaggcccaggggccacccaggtgccccatgggcagggagcagcccccagttggcagatgctgggagagccccagccccgttccagtccagagacaaaagctggagtgtgtaaagtctggcagtttgatctgcaggtgcttgtgtccgtcgaccaccaggccagccctcggcagccctcggcctctgtgcctcagccccatggggcaagaaagaggctgcccttctagccacctctgtctgcccaggccatcttaagggggcctgtgatatgagccctctggtccctgaagcnnnnnnnnnnnnnnnnnnnnnnnnnnnnnnnnnnnnnnacctgtccccaggctggaagggggaggggtggggtgttgaggacaggggagggaggacaatgggaggggggttaattattgtccagtcatggaatgattcctgttaagtagaattggaattcctcagtgtttgcaagtttccttccagttctgagatcttgtccaggagcttgtccatctcctcctttctggccagctccgactcctccagaacccgacgctgtgcagtctcctttttcaggaactcgatctccttctgctggtagtccttgatgaggcgcttggccttgctgtacttgcgctccagggcctggtactgcgcctgagtctcccgcaggtgctcgtccacagcctggcacaggctctgggcctcacccca

SEQ ID NO: 82519 - DNA, 567 bp, Homo Sapiens
aggcttttatgcatctcagttaaacacgtgcattggtagtatcaacaaatttgcaatatagaagttgaagatagttttttacctcactttttaggaggttgtattcaaaattaaaatctcagaatcttacaggacatttaaagactcatgttgatagcatggaggagaaggaaagaagtcacagccttctactcagttgtaggtcttcttgtcatccagctgtcacactgacaaaaagaaaagatgatacatgttttttgctcagataagaagcctgacattaaaagatgtcatatttttttctccacatttcaaaaagttgtccttctcatcactgcacagatctgtctgaaagcctcagtttctgagtgacccaggaacagatcagaaatggagcatggccttgtcctttaatggggatgcaaataaagtttgtggggttaaaagttataagacagcagtgataccccactctctccattattgtccagcggggtgacataatgacaggttaaatatttgtgattcattgattaaatattatttaaagaaatgtaaattcacaat

SEQ ID NO: 82520 - DNA, 1559 bp, Homo Sapiens
  misc_feature (27)..(27): n is a, c, g, or t
aactagtgacactataggaaccaagtnggtacaaaaaagcaggctggtacggtcggaatcccgggatatcgtcgacccacgcgtccgggcgccagcggtcaagagcgaggtcagcggggctgcgagcactatgacagaggatgtctcctaaaggcaccttgctgtgacaagctttatacttgccgcttgtgtcatgataacaatgaagatcatcaactagatcgctttaaagtgaaggaagtccagtgcataaactgtgaaaaaaattcaacatgcccaacagacttgtgaagaatgtagcacatgttggagaatattattgcgatatatgccattgtttgacaaagataagaagcagtatcactgtgaaaactgtggaattgtaggattggtccaaaggaagattttttccattgtttgaaatgtaacttatgcctagctatgaatcttcaaggaagacacaagtgtattgaaaatgtgtcccgacagaattgtccaatatgtttggaggacattcacacatcccgtgttgttgctcatgtcttgccatgtggacatcttttacatagaacgtgttatgaagaaatgttgaaagagctacagatgtccattatgtatgcactctgctttagatatgaccaggtattggagacagctggatgatgaagtagcacagactcctatgccatcagaatatcagaacatgactgtggatattctctgcaatgactgtaatggacgatccactgttcagtttcatatattaggcatgaaatgtaagatttgtgaatcctataatactgctcaagctggaggacgtagaatttcactggatcagcaatgacgagccctacacagtactggagaacttggcattttcggatatagaaaaaggctttccctggtatcgtgttatcatgtgtcgtcatctatgcattagagttgatgtgttttgtactagtgtcacagcataaaatcatattacaagtacgtaaggattcagggtctcttgatagacttatcatagctctatattgaatgaaagccactgtgcttgtgttttgattggaaattcctttagtgtcagttttttggaagccaatgatgtttgccactgatacattcatagaagtgtattatattttcatgaagctttgctttaagtgacactacgcgtgcagttcatttctagttcttgatagaactgcacttaattttcagtagtagtcttgactttttaagggctgtgttatattaagttctcccttactgttaaaacctaattaaatatgctttagaattttctaagacagtcctctggatcctctaaatgtgaattttgatgtaataactgctaataaaattatattgaaactgttttatagaaagttttttccaaagttttctatgtttggctcaattagggcagtatcatcagttctataatgtaaaagaaattttctttcttttgaggtattccataaaagtagttgggaaaattattatgtaaaataataagactcttccaaagccttaataaaaacatcaacattgaaaac

SEQ ID NO: 82521 - DNA, 394 bp, Homo Sapiens
  misc_feature (172)..(172): n is a, c, g, or t
ttataagccagtgaatgtaaaatgccggagcaggcccggcctggcatgggtgtggacctgcagccaggcaggctcgagcgggcgataccaaagtctgcccccccaccattgtggccatgcagtcctgtcactgtctttttgcttccttccgaggggggtcccccagcctctntccagggtcttcccctggaagtgggcggctgcagggaaggtgggggacaggggtctttgcacgattcagaccccggggccgtggcaggagcggtcacctcacaggtggtgacactgaggcaggggcctcggggtgccccctcccgcccggcaaccagaatggttggaggcaagacagagagaatgaaaggaaaaacagaagaaaaaaatattaaaacgcagc

SEQ ID NO: 82522 - DNA, 568 bp, Homo Sapiens
ggcaagaggaagaaaaccgtcaccactgtgtatcagcccggaggtgggtccctgcctgtgagaactgcacgtggtggactcatactgcatcttcagaggaagcagatgttcattacttatttccagaaaatgacatttattactgtgttgcaaaatcaaaatcataaaacaagcaatttgatgggctcagaaaaagtccaaatgataagaaaaggtaaattgcataatataaataaggtgtttcctccgtgtttgcagaaatacaccaaacgtgtgaccacccttcgtgaccggactacagcaataactaagccagtggggtaggaaggagaatcggatcaaaagttcacattttgatcaacgtcacatatgcttgagataaaacgctgctaacgtcaacactggactcaccccagtcatattaacattgacacgactcaccccagtcatattaacattgacaccaaacacagcctaaaactctgttaccacaaacatgacttaaacgatacaaagttaacctccatatttgctatacattctagtaatgactttgctctccttaatt

SEQ ID NO: 82523 - DNA, 1164 bp, Homo Sapiens
  misc_feature (582)..(689): n is a, c, g, or t
  misc_feature (698)..(711): n is a, c, g, or t
  misc_feature (750)..(877): n is a, c, g, or t
  misc_feature (953)..(962): n is a, c, g, or t
aaccaggcatacttatatttgctagttggaaaatcattctgaacagttttaattccattctattgaatggattattgtatgagctatttggggatcagatataaatgacaatcacacagaaccacttttattcaacatagataaaatgtgatgagtgttaacattttaaataagcaatctgcttaatggacattggtatgaaggggaagtgtcattctttacctcactcctcaaacacttttctatccaaaggttggtttgagtcagtattggcatcatacaaccacttactgtaaaataagtttattagtggtaacgtgatagaatttattcccgatatctgatgttacaaactttagggtccttgagatatgcaggatccttgtatgtaactggcataaaccctgtaaagagataattaaagttcttgacaaaacataatgagcaaaatttcagctagctcaattcagttgttgaggtattctttcttacccattatttgagctctcttaattgcttttgtgatttctttctgtttcttcccacaaagacctgtaaaataaaaagctttcttattcatannnnnnnnnnnnnnnnnnnnnnnnnnnnnnnnnnnnnnnnnnnnnnnnnnnnnnnnnnnnnnnnnnnnnnnnnnnnnnnnnnnnnnnnnnnnnnnnnnnnnnnnnnnntttgcccgnnnnnnnnnnnnnnaaaaaatttttataaacctttttttggcgccgcgccccnnnnnnnnnnnnnnnnnnnnnnnnnnnnnnnnnnnnnnnnnnnnnnnnnnnnnnnnnnnnnnnnnnnnnnnnnnnnnnnnnnnnnnnnnnnnnnnnnnnnnnnnnnnnnnnnnnnnnnnnnnnnnnnngggaatttcctgggggcttttttcgggggatcttccccaaaggagcccccagggggcccctaatatccaattttannnnnnnnnntctggcatttttttatgaagtaaggggggtgatattttttcaaaaacctttccccgcccccccgcggaaaccatctctccaccgcgcggctattggtgaaacctctaatatcctcccgcgggggactaccccgccacatttgcgccgcctcttgcgaatatataaatattttcccccctgtgggaaaaaacacggggggcac

SEQ ID NO: 82524 - DNA, 680 bp, Homo Sapiens
ggggagtggaagaaacgcggaaccatggccgctgtggttgctgtttgcggtggtctagggaggaagaagttgacacacttggtaacggctgctgtcagccttacacatcccgggactcacacggtgctttggagaagaggttgttcacaacaggtatccagcaatgaggacctgcccatttcaatggaaaatccttataaagaacctcttaagaaatgtatcttgtgtggaaagcatgtagattataagaatgtacagcttttgtcccagtttgtttctccatttactggatgcatttatggaaggcacattacaggtctttgtgggaagaaacagaaagaaatcacaaaagcaattaagagagctcaaataatggggtttatgccagttacatacaaggatcctgcatatctcaaggaccctaaagtttgtaacatcagatatcgggaataaattctatcacgttaccactaataaacttattttacagtaagtggttgtatgatgccaatactgactcaaaccaacctttggatagaaaagtgtttgaggagtgaggtaaagaatgacacttccccttcataccaatgtccattaagcagattgcttatttaaaatgttaacactcatcacattttatctatgttgaataaaagtggttctgtgtgattgtcaaaaaa

SEQ ID NO: 82525 - DNA, 651 bp, Homo Sapiens
  misc_feature (406)..(503): n is a, c, g, or t
  misc_feature (505)..(510): n is a, c, g, or t
  misc_feature (512)..(516): n is a, c, g, or t
  misc_feature (518)..(520): n is a, c, g, or t
  misc_feature (522)..(522): n is a, c, g, or t
  misc_feature (525)..(525): n is a, c, g, or t
  misc_feature (528)..(529): n is a, c, g, or t
  misc_feature (531)..(532): n is a, c, g, or t
  misc_feature (536)..(538): n is a, c, g, or t
  misc_feature (541)..(543): n is a, c, g, or t
  misc_feature (583)..(584): n is a, c, g, or t
ggggtggaagaaacgcggaaccatggccgctgtggttgctgtttgcggtggtctagggaggaagaagttgacacacttggtaacggctgctgtcagccttacacatcccgggactcacacggtgctttggagaagaggttgttcacaacaggtatccagcaatgaggacctgcttttgtcccagtttgtttctccatttactggatgcatttatggaaggcacattacaggtctttgtgggaagaaacagaaagaaatcacaaaagcaattaagagagctcaaataatggggtttatgccagttacatacaaggatcctgcatatctcaaggaccctaaagtttgtaacatcagatatcgggaataaattctatcacgttaccactaataaacttattttacagtnnnnnnnnnnnnnnnnnnnnnnnnnnnnnnnnnnnnnnnnnnnnnnnnnnnnnnnnnnnnnnnnnnnnnnnnnnnnnnnnnnnnnnnnnnnnnnnnnnannnnnngnnnnncnnncncgnccnncnnaaannnttnnncaaaccattccatatgggggcgcgggccccaaaagggaanntggatatggcgcccccccctgcctcccaaaaaaatatccttgacaccctcttttgtggggggggccg

SEQ ID NO: 82526 - DNA, 1072 bp, Homo Sapiens
gggggacttctctcatgatgacactttggatgttccaacgcaagttgagctgctcatcaaacaagcgacatcccatgaaaacctctgccagtgctatattggctggtgccctttctggtaactggaggcccagatgtgcccatcacgttttttctgaggcttttgtactttagtaaatgcttccactaaactgaaaccatggtgagaaagtttgactttgttaaatattttgaaatgtaaatgaaaagaactactgtatattaaaagttggtttgaaccaactttctagctgctgttgaagaatatattgtcagaaacacaaggcttgatttggttcccaggacagtgaaacatagtaataccacgtaaatcaagccattcattttggggaacagaagatccataactttagaaatacgggttttgacttaactcacaagagaactcatcataagtacttgctgatggaagaatgacctagttgctcctctcaacatgggtacagcaaactcagcacagccaagaagcctcaggtcgtggagaacatggattaggatcctagactgtaaagacacagaagatgctgacctcacccctgccacctatcccaagacctcactggtctgtggacagcagcagaaatgtttgcaagataggccaaaatgagtacaaaaggtctgtcttccatcagacccagtgatgctgcgactcacacgcttcaattcaagacctgaccgctagtagggaggtttattcagatcgctggcagcctcggctgagcagatgcacagaggggatcactgtgcagtgggaccaccctcactggccttctgcagcagggttctgggatgttttcagtggtcaaaatactctgtttagagcaagggctcagaaaacagaaatactgtcatggaggtgctgaacacagggaaggtctggtacatattggaaattatgagcagaacaaatactcaactaaatgcacaaagtataaagtgtagccatgtctagacaccatgttgtatcagaataatttttgtgccaataaatgacatcagaattttaaacataa

SEQ ID NO: 82527 - DNA, 592 bp, Homo Sapiens
ggtctctgacaatgtaaacatcatacatttttattaagagagaaaataaaaagcaaagaatccacttgaagctctctagggagcatcccgtcaccgccatgtgcaagaaatctggtcttcacccgcattttagctgtgttgcccagcatgatgtcccgtccagggccacactgggatgttcgtgggccccaggcatttctgccttcatgaactcctttctcttctccttggggtccttggctcttccttgatgaggggcacgacggtcccagagcttggggccgggctcaaagatggggtcaagcggccgtagcgggtgcggcgcggcgcgctcccggaaaaaggcaggggcaggggcgcggggctgggcagtgccggctcttttctgatggatcatctgcccctcggttcgctgtccccgggctgagaacccagagtcccagatagcacctctgcccggtcacagccgcttccgacagcagggggcgccccggcgctggaggtgagaggccgaggaccggggcgcgggatcacaaaggcagctgggcccagaaagagccccgggaagaagtccagttggaaaaataaatca

SEQ ID NO: 82528 - DNA, 1243 bp, Homo Sapiens
aataacacagctcacacaaaccaccctcctcacctgggcctcctatggttcagagcacagtctcagcaaatcctcccagcaatatcaacagcgctactctaaccagacctgcagggacaactgcaatgagaagtggttgcccagacccagtgccccttctgctgggggcataccagtgcctcgcagcaaacttgcacagcctgttcgcagatccttgccagctcctaaaacctatggtagcatgaaagatgacagttggaaagatggctgttactgaccagcaaagacaagaatgcagaagtccacggcttcatggatacccttcaccaggctaaaaaacaacttttatatgcagactgttcagataagactcttgggatttataaaatcccagccctctctgtcttaattagcacaaaccgacagagatcatcaaacagcactttaatgacatttaacatcagatgtgtttggtaatcatacaatcactctccatagaatcacttttagttttgtttaatagaaactaggttgatttttaaaaaatatttgacagaggccaatatctgggcaaatacctaatggatgccaaagagaaatgcccatttgtaaatgagaaaaatgcccatttgtgcacaagaaaatggtgaattcaggctatccaaaacttcacattcaacctaatttactgtataaatagtatcaataaatatttgtgttaatgagaactaatattctgactaattatctaaagtgtttcactagtacaccaggaaactacagattgagattagggggtgggaggaaagaaacctgggctagagattaaaacattcctaaatttagcagaatttcagaaatgatttttgcagattcattaaaaaggaaaaattgtcatttaatcttaagttttggatgtagctcacatgtcaccaccaccacatagtgttacagcatgtatccatcctgttgcattgacacctcaaacttgggtgtgattgtcttgaatgccaaaaggggttcaatatcacattggaacaatctttcccgaaattttagaaattccctggccttagggaaaaaaaggcccctttgcctattgaaagcccaccttctttcaaatggctggttatcttttacacaaccttcggaagccccttggatcccaactaaacacggtttttcttggataggaaaagaaacccactaacgggggggcgcctttatctcctgaaaacaacca

SEQ ID NO: 82529 - DNA, 1332 bp, Homo Sapiens
  misc_feature (20)..(20): n is a, c, g, or t
  misc_feature (685)..(697): n is a, c, g, or t
  misc_feature (859)..(867): n is a, c, g, or t
gttagaacctaaccctaagncccaggcttttctctccactgactgcctgtcagctagtctctccaccttggccatttccagccagctcccacccatcttttcttgaatctcttcctgtttcccttaggacgactgaggtgtgggctgacggaatgccctagttgaggtagtataggtgctcaggcccctaatccagacctctacctgttgctaccccccttcccctccctccaggactaagaagcaagatttcccaggtgctctgaaagctaattacttactcatcgaaggatctcaaatcaaagctgacccagtcttcatatccttcaagttcctttccattcctcaaggctttgttttgtgtctatattgatcccacagccactgcacttgcccttgccacacttgatctcaagggcatcttggaagtatttgaccatttcttgagatatggggggaaaaagtctttgtattggcatcttggttccagactcccctttccaaacctagaaaaatacagtgacctttgagcatacccaagatccctttctcactgttgcctgtcccctaactcacctccccacagcccctatcctttccccctcaacaaaaacaaaatctaccttacttgaggaattaggtaggtaaggaatgatcacattggagtttgggattaaaaacaccnnnnnnnnnnnnntgcatttggttctctctacactggctaagaatattgctctacactgtaagttttaaacgttacgtttctgtatgaatgtagtgtgggtttgagtagcattgtgtgtgagtggccccacaggtacattcaccctctagtgcagcccctcagtttaatgaaggnnnnnnnnncaaacacaaagccttaagctctttgagtacttcctttaccaaatgagcatggttctaacacctggagctgggcctacattggaaacaagcccctcctgccctctgtccattcttagagcataccttcatccactccatgctcagcacgtctcatcccaagcgacaattagttggctagaaacacttttctgtaattttaaacttagactgttttgttacaaatttttgcaccattctgttaaagatgcagaattgggcttttttaatttttacagatgaaataagcccttacctttcctcttgtctctggggaatgtcagctgatggttcttatttaaggttttgcattttgttcactatccactactgttcgttagccagaaattctctagtgatctgaagcaatgtgactgaagaccagttttaagttatgtgttggcaagttgccttatatttaaaaggaaa

SEQ ID NO: 82530 - DNA, 1809 bp, Homo Sapiens
  misc_feature (1030)..(1038): n is a, c, g, or t
tttttgccaaagacaaactagagcaatgcctatgtaagaacaaggactctcaagatcctgctacacagtattcacaatcaaaagggcccaagattcaggaccacctaaagacaactgacaaaaagtgtcagagccagaggccaacctctgctagatgaagcagcagcacatgactccatttctatctgataaggagacagagaagaggcatctcgaacagatgaaaaaccaaaggctggtgtcctaaaaaaaacagattggcttcaaagaaaacactaaggaagacccacagagctgtattaattttagtaaaaataatcatatgccaacaggggaattgaaccactttctaaatcatagtatgaactcatctcttcagatacttggtaagtggtcaaagcttgtttttataattactttcactgtcttgggcaaaaagtctttcttatctttggtccttaggtgtggtatcagtttcttccatttttttatgtgttacaaaacaatcttttttttacttgacatcaacaaccaaggtgcagtataaacacgaagttgctgatattgttgcttttatacacataaaataccaacatctcccatacattttataggctatacgaaggtctcaaagaattaataaccgttatccaaaaatattataacatttaaggctgagtgaaatacagtaaagcctggtaatatatgttaaggaaaaaaacctagaccaacattttaaatattggtttcttaaatatgttaaattcccattaacagaacataatctaagcatcaaaacaaacagctaagcaaattaatttaaaaataaaacaatttctaagtagatgaatataatcacgatgtttatacagctataaagcataatttggaagctaagcctagtaaaagaatgacctgtaacagaatgacagaatcatttatcaaccgttgagctgtgtgatttaaaaacaattgttttctcctcctcccaccaaaatctccatttgagataagtttcaattattatttnnnnnnnnnttttttttaacttatctggcctactttgtggtgactgacacaatattgataaaactgccttcttgaccttccccttgctctccaaaagaagtggtttaaacaattaacaaattttacaagagcttctgccagggctcaggcaccacaatgcagggtcactaccttaggtaacatctgctccccagagtctttaggcattaagtggctcagtgagggcttcagccctagtggtattttcaggttttctcagctgggactcctgtcgtttttcatacagcatagtgataaagtcaagtaggaacataaaacttgctataaatccaaacacaattgcagcaatctcagctgaagtcctgtcatgtgtggaaacaaaaatgatggatgccaacaaaaacacacatcctgttcccaaagtaatataaaaatccgatgattttacttttgtggtatcaactctctcataaaatggagtgcaatacacaatcagtataaggagactcagaagaaaggcactgcagcttacaaactcaaaaaaataaagtcctccacataaagtacattgtgatacaacttcttcacagatgaaggccagcagagacagcaacagctgcaagcccttgagaacgcgccggagcaatgggagccggcccatgaaaaagtaggcagcgaggccgctccgggggcctctggcggggcccgggtcctcctccgtagtggggctgtacaccgctccgttctccatagcctcgggccggggagcgcggcggccgc

SEQ ID NO: 82531 - DNA, 1515 bp, Homo Sapiens
  misc_feature (311)..(399): n is a, c, g, or t
  misc_feature (633)..(651): n is a, c, g, or t
  misc_feature (892)..(946): n is a, c, g, or t
  misc_feature (1215)..(1224): n is a, c, g, or t
  misc_feature (1439)..(1473): n is a, c, g, or t
gtcgcgcgtgttgttgtctggctagtgtgcggcactgtggtctttctgcttgtcttggtgagttggttgctggtgtgggatcagtccggtgctgttccgttcctggtccttgtggacggttctcgtcgtattcgttgctctgtatgtgagttcgtgcttgtgttagtgcggtatgtctgtggtgtggagcacgtggtaatgtgtgtgagagatgttgagtgagcgggggttattagctacatcggtatcttgtgcgtcatgctttctctcttggatgctttctattgttcgcacgaacagctgtggcgtgnnnnnnnnnnnnnnnnnnnnnnnnnnnnnnnnnnnnnnnnnnnnnnnnnnnnnnnnnnnnnnnnnnnnnnnnnnnnnnnnnnnnnnnnnctcgttcagtctgtgtttgtgttggttggtgcgtcgctacttggtttggttcgtcgcgtcctttagtgtgttggggtgttggttgttcgtcgtcatgtttgtgtgtgtcttgttggttcagttctgacgtgtggggttgttgtgccgcccgtgtttgcgcggtttgtgcttcgccgtcctctttctgtcctctgattgtggttgtgtcgttctgttttatatagctgtgtttgnnnnnnnnnnnnnnnnnnngtggttgtgttgccttcctctttggtggacgacctattgttggtttgtctcccgctcgtggttctcccatatgtggggtgctctcctttctctctcgttggtggttatctgttttttgctccccgccgttgtggggtcgtcctgttttgtggttgctgtttgtttgtctccggtgggtcgtctgttgtgttctgctggcttccctgttatgtgtgttccttccaggtgttctcttgttccnnnnnnnnnnnnnnnnnnnnnnnnnnnnnnnnnnnnnnnnnnnnnnnnnnnnnnncggtgtgagtttccctctttggtggacactttatgtgtgtgttttttagtttgcctccgccactttttggcccctttgtcgtgttgtgtgtcttgagcccccttgggtgttgcgcgcgctcgagcgccactttcttgtgggtttgtgctgcgtgtgtgtctcttttggtatgggtcgctgtatgtgctgttcgttgttcccgccccccggcgttgttgtgtttcgtggccgggtggtgtcccggggtgatcgtgacttctctttgttcnnnnnnnnnngtggtgttgccaaagacgtactagacaatgcctatgtaagaacaaggactgctcaagatgcctgctacacagtattcacaatcaaaagggcccaagattcaggaccacctgaaagacaactgactaaaagtgttcagaagccagaggccaacctctgctagatgcccggccgtaatggccgaattcccgggcatatgtccggtaccgtcgactgnnnnnnnnnnnnnnnnnnnnnnnnnnnnnnnnnnncggccgcttcctcgctctactgactcgctgcgctcgtcgttt

SEQ ID NO: 82532 - DNA, 357 bp, Homo Sapiens
cacttagtatctaactcacatttattaaaaattgaagattacagaaaagcataagattggcatcattaaacaagcttaattaacttacctttgactaataaatgaaaatatttaataacactaaaggaattttgagaataagttctattccaaccttagaaattaaaaataaaagcaaagcagctattctccaaaggagaaagcaaccacagatctccctctagtggcaaaagataaagttgctgctgaaaagctgaattgctcctccatacatagaactgctcagacatttcttctataaaattctaacttaagattctaaatcaatatataaggaaaatagatctattttttgtc

SEQ ID NO: 82533 - DNA, 1478 bp, Homo Sapiens
tggaccaacatattgactcccagcacgccaccgcgatgtccatcttggggaatccgttgctggaagggacccatctcgcccacccttaggggtcgaggtgggcgaagggggaggagagggctggcggggcggggcggggttgctccgcccccggaggctgggctgtgaccagcaggcggctccacagagcagcgggcgcgctcataaagggcacagccgagggtacgtggatcgcggtgcggagactgaggttagaaggcacaggtggcgagatgagccgggtaccagcgttcctgagcgcggccgaggtggaggaacacctccgcagctccagcctcctcatcccgcctctagagacggccctggccaacttctccagcggtcccgaaggaggggtcatgcagcccgtgcgcaccgtggtgccggtgaccaagcacaggggctacctgggggtcatgcccgcctacagtgctgcagaggatgcactgaccaccaagttggtcaccttctacgaggaccgcggcatcacctcggtcgtcccttcccaccaggctactgtgctactctttgagcccagcaatggcaccctgctggcggtcatggatggaaatgtcataactgcaaagagaacagctgcagtttctgccattgccaccaagtttctgaaacctcccagcagtgaagtgctgtgcatccttggggctggggtccaggcctacagccattatgagatcttcacagagcagttctcctttaaggaggtgaggatatggaaccgcaccaaagaaaatgcagagaagtttgcagacacagtgcaaggagaggtacgggtctgttcttcggtccaggaggctgtggcaggtgcagatgtgatcatcacagtcaccctggcaacagagcccattttgtttggggaatgggtgaagccaggggctcacatcaatgctgttggagccagcagacctgactggagagaactggatgatgagctcatgaaagaagctgtgctgtacgtggattcccaggaggctgccctgaaggagtctggagatgtcctgctgtcaggggccgagatctttgctgagctgggagaagtgattaagggagtgaaaccagcccactgtgagaagaccaccgtgttcaagtctttgggaatggcagtggaagacacagttgcagccaaactcatctatgattcctggtcatctggtaaataaaacaaaggaacttgatgttgagatggatgcttgaggaatattgctgctggttctcataatttctagagtaaatgagggagtccagtccccagtgaactctccttttgtgcttatcatgttttaccttaaatgctgagatcctcatttatgtttgtagttggaaagcaaagctaggtagccatttcttctgttctaccaagttataatagcattcatttccctttatatttccctgaaataaagcacattccaattgtgaaa

SEQ ID NO: 82534 - DNA, 646 bp, Homo Sapiens
  misc_feature (41)..(41): n is a, c, g, or t
aaacagaggttctggcattttctctctgaactcctgagggngaccttgggcacctcctggtatgtgcacaccccactttgaacacccttgctttagtgcaaatcagcacgcctaaatagcatcccataccactgtgcgacatttggcctgcagaataagaaagtcctaaggcagaatccccaggaacttcaaatctgggagatgaggaaagaaaactcactcacaaacaacataaatgtaaataattcaaaaccctaaaggagagctgtccctagacagtagtggctacaggtgctaagcaaaagtcaggtacactggacagagccatgcgattgattgttcatcttccctctccgggtctccagaaaaggacactggcaatatccccagctctctcctgattggaattctttgaaccctcgaagtgctccagcagtactaccccccacgtagcagtgggcccatgtcgcttgaatattatttttgacttgaccaccaagatgtaatgatgattctattccattttgaaaagggtctgagaaagtgtacaggtctaattatatatacatatttatacatgtgtatttttgtttattgttacattttgacattggactttctattaaataatttttaagagttgaaa

SEQ ID NO: 82535 - DNA, 1198 bp, Homo Sapiens
cagtcgacggtaccggacatatgcccgggaattcggccattacggccggggaagaaacagatcacagaaactccagtcctggagaagcatcattacttgagaaagagaccactagatttttctttttctctaagaatgatgaacgacttcaaggtcagtccatttttttcatcaaattacatacatagaacaggtaataatacagctacagtaattcacatccaggaattttgaccgttggtaatgtcatgtggtttaaccccatttgttcacactgatgaatgttaacttgtaaagctgtcaaggtctgagagctccccactcaccactttctttgcccgctcattctcatcaacaaagggttgttttgttccaagggcttccttagatgttagacatataaaacccctaagttttagtgccataaattccatgtgaaaactcaggctgttggggagctcatttcttaaagcctagcataaacaaagttacataatagtaaatgatatatataaacagtaaaagcaatattatatttttcatttggaaagaaaaaatactaatttttgaacaataggtagaaacctgagggaaacagcaatgatcttaactggttattcgagaaccttgataatgccaacacttacgaatattaccaattttagtagtcagtttgcttgcctcatctttcttctttttcccctaataggttctgacttattctggagaggagtaggaagtaatatgagcaggaactcttgggaggccagaacaaccaacctgcgtatggattgtcgaaagaaacataaagacgcaaaaaggaaaatgaaaccaaaataataaatgtcagctggttttgatactgaatgtgaacaaggctcacctaaggaaactgacccagaaaacagttttagctgacaaagaagaaatttcagagtgaaggaattttaaaaatctggctgacggaatatcattctggttgccatctttttctgtggaactcctctgcatttcttcctaagtaattacttcaaaaattaaattcaacttcttataaaggaagaacaagatagtccttgaaaatactttttgtatataatctctttgccctctatcctgagtaactaatggacatcttctcatgcaaggtttacatgaagcctttttaaataaatgagtcaaagcacttgtattttcc

SEQ ID NO: 82536 - DNA, 2223 bp, Homo Sapiens
  misc_feature (1124)..(1132): n is a, c, g, or t
  misc_feature (1187)..(1196): n is a, c, g, or t
  misc_feature (1780)..(1788): n is a, c, g, or t
ctggtaccggtccggaattcccgggatatcgtcgacccacgcgtccgcaggaacaatattgatgatgtagtaaggtttttggattcaaagcataaaaaccattacaagatatacaatctttgtgctgaaagacattatgacaccgccaaatttaattgcagagttgcacaatatccttttgaagaccataacccaccacagctagaacttatcaaacccttttgtgaagatcttgaccaatggctaagtgaagatgacaatcatgttgcagcaattcactgtaaagctggaaagggacgaactggtgtaatgatatgtgcatatttattacatcggggcaaatttttaaaggcacaagaggccctagatttctatggggaagtaaggaccagagacaaaaagggagtaactattcccagtcagaggcgctatgtgtattattatagctacctgttaaagaatcatctggattatagaccagtggcactgttgtttcacaagatgatgtttgaaactattccaatgttcagtggcggaacttgcaatcctcagtttgtggtctgccagctaaaggtgaagatatattcctccaattcaggacccacacgacgggaagacaagttcatgtactttgagttccctcagccgttacctgtgtgtggtgatatcaaagtagagttcttccacaaacagaacaagatgctaaaaaaggacaaaatgtttcacttttgggtaaatacattcttcataccaggaccagaggaaacctcagaaaaagtagaaaatggaagtctatgtgatcaagaaatcgatagcatttgcagtatagagcgtgcagataatgacaaggaatatctagtacttactttaacaaaaaatgatcttgacaaagcaaataaagacaaagccaaccgatacttttctccaaattttaaggtgaagctgtacttcacaaaaacagtagaggagccgtcaaatccagaggctagcagttcaacttctgtaacaccagatgttagtgacaatgaacctgatcattatagatattctgacaccactgactctgatccagagaatgaaccttttgatgaagatcagcatacacaaattacaaaagtctgaannnnnnnnnatcaagagggataaaacaccatgaaaataaacttgaataaactgaaaatggaccnnnnnnnnnncaatggcaataggacattgtgtcagattaccagttataggaacaattctcttttcctgaccaatcttgttttaccctatacatccacagggttttgacacttgttgtccagttgaaaaaaggttgtgtagctgtgtcatgtatatacctttttgtgtcaaaaggacatttaaaattcaattaggattaataaagatggcactttcccgttttattccagttttataaaaagtggagacagactgatgtgtatacgtaggaattttttccttttgtgttctgtcaccaactgaagtggctaaagagctttgtgatatactggttcacatcctacccctgtgcacttgtggcaacagataagtttgcagttggctaagagaggtttccgaagggttttgctacattctaatgcatgtattcgggttaggggaatggagggaatgctcagaaaggaaataattttatgctggactctggaccatataccatctccagctattgacacacacctttctttagcatgctacagttattaatctggacattcgaggaattggccgctgtcactgcttgttgtttgcgcannnnnnnnnaaagcatattggtgcctagaaaaggcagcctaaaggaagtgaatctgtattgggggtacagggaatgaacccttcctgcaacatccttaagatcccacaaatgaagggatataaaaataatgtcataggtaagaaacacagcaacaatgacttaacccatataaatgtggaggctatcaacaaagaatgggcttgaaacattataaaaattgacaatgatttattaaatatgttttctcaattgtaacgacttctccatctcctgtgtaatcaaggccagtgctaaaattcagatgctgttagtacctacatcagtcaacaacttacacttattttactagttttcaatcataatacctgctgtggatgcttcatgtgctgcctgcaagcttcttttttctcattaaatataaaatattttgtaatgctgcacac

SEQ ID NO: 82537 - DNA, 554 bp, Homo Sapiens
  misc_feature (410)..(410): n is a, c, g, or t
tcaaagcataaaaaccattacaagatatacaatctttgtgctgaaagacattatgacaccgccaaatttaattgcagagttgcacaatatccttttgaagaccataacccaccacagctagaacttatcaaacccttttgtgaagatcttgaccaatggctaagtgaagatgacaatcatgttgcagcaattcactgtaaagctggaaagggacgaactggtgtaatgatatgtgcatatttattacatcggggcaaatttttaaaggcacaagaggccctagatttctatggggaagtaaggaccagagacaaaaaggtaagttatttcttgatgtttatcctttcctcttcctggatctgagaatttattggaaaacagattttgggtttctttttttccttcagttntattgaggtgtaattgacaagtaaaaattatatataaatacaatgtataatatgatgttttgatgtatgtgtatatacattgtgaaatgattactacagtcaaactacttaacatattcatcacctcacataattattattctc

SEQ ID NO: 82538 - DNA, 1376 bp, Homo Sapiens
  misc_feature (628)..(664): n is a, c, g, or t
gataggggcagactttgacttagcaaggtctttaactgttaacatttttcagcccagagagctgccttgctctctaaaacagttactttgtcctggttcactcttccctgagtagaggacagttacctttgtgtgcaggtggacgttcctttcaccctccttccttcctgtttcctcagagccaggactgtctccagtttggtcctcctgcgggccatcatggagtaggtgcttccagggtccaagggattctcagccatccaggcaagagcactctgggttccacagcacagcagacatggaacgctgaagtctctgaaagtgaagttgtaaaaagaaaaggaatgaaataaccgacccatcatcttctcacccaccctcattgcattccgctgtagtgaaaggacgagccatttctgggcacgtggcagcagtcgctgatctcccagctgaggggctgagcactggaatgctgtggctgcactggccccagtccatagaggggtcaactatgctggctggactggctgccttgttcctggcctaggacttagcttcataactatcacctgcaccgactaggctgaggtgctggtacttgccccaacccctacttttgtatttatannnnnnnnnnnnnnnnnnnnnnnnnnnnnnnnnnnnnatgtttggtctggaccagcttctgccagcccctggcctttactttcttccttgcctatgcagggcaaacaaaatgtgaaattctgccctcagctgagctgagtaagggctcctgggggttggctggagatgggtgtggcatctgtccaggcctggaaccgtctcaagacagtgctggcaaagctgcagtattgagatgctaaggagctgatgccacctctttgtcttcccctaaaggagaacatggggataacatgggtgtgtgcccacaacactctaggtgcagagcccctgtggcaaagtattacagggtgtgggtggggattaccctgaatcggggattttaatgatggaagcaggcagagcctggtgggtgattctgtcaacagaaaattgcaatcatgcaggggctgggagggttaggatgaaaaaactggggccattggaggcccactgtaggtgggagggagctgattttggggtggggggtgggactagagggcaatactgaaggggttaaacaggtttttgctcctcaagaatttgtttgcctgggcccaggattggagggcttcacaccaataccctgtgtatacaagaatcagatttataatacttccccttttttgttacgtatgaacactataaaccaaattattttgaaaactggtgcatcaccttgtccttagcaataaaatgtgttgagcaaaaaa

SEQ ID NO: 82539 - DNA, 1558 bp, Homo Sapiens
ttacaacttcactttcagagacttcagcgttccatgtctgctgtgctgtggaacccagagtgctcttgcctggatggctgagaatcccttggaccctggaagcacctactccatgatggcccggtatagtgcaggctcaatataatcttcccggtatcttgagttgataactcgttgccgtttcttttcttgcttaacctctttctctgtgaaaatctcattgaagcgcatgtctgaggctactgacagtctagatttgactctcttgggaagctcttcatccagtgtgtatacatcatctctcttaaccacaagttgtgagccatcctcaaactccacctggtacatttggatagggtgggaggccacaaacttggctccatagacttggccgtctgtccatctcacttggaccacttccccttcagcaggaggaccaaactggagacagtcctggctcactatgtcctcaggataaagattgtcgctgaaggagccatcatcaaagttgacttcatagaaggtctcggtggtgagcctgaccacttcacactggtagaagcgcccgttcttatgcttgctaatgactttctggcctgcagtgatgctttgcaaggcccccttggcacgctccaaattaggaatcttgtgccgaaagcaggtaatgaagaccacaaaaggccagtcgtcaggctgcatcatcacaccggcagcctgggcgcagctcacatggaaggcagttgggcagcggccgtgagaacactgcacacagcagccagcagttcttttcctccgcttcttacagaagatacatttcagtttgaagcggggcagggggattttgctcacatccaccggacttctttctgcaatgttgacaaaccttgcttccagaattgccacagcacatgaaacgtggacccacctgtcatcatttgctctctgcagggcccctcctcgtaatgagcataaacagcagtcctcctctagggcattggctgaacaccgagaacacatccagtcttcagaagcctttgcaggggggaccccatagcaactggcatggacccggacgctgcacttcttgcaggaaacgagtatgctggtgccatcctcctcaagataaggagtagaaaggttgatgtccgtgctgcagccagtcgaagtgaagcacatttctggaatcaatggcttggtcctctgcttctggggggctaaatctgaagcatttccacagttctgattaaagcctccaaattcaacctgatgataagtctggaagatcatacagacagcgcagtgaggggcctgttgggccatggtctcattgaattccttctcagcctcaaagtttggaggtcggttctgccacagttggctcagaggcttggcccaggcctctgtctcctcagcctcttcctcaggggtcagctgttcagatgtctcatcatcactgacacactcctgcagcacaagtgggtgatggcgggggagcttgcttaaaggctgacggcgtcccttggacttcttattctcttctagggaaaacatgtatcat

SEQ ID NO: 82540 - DNA, 577 bp, Homo Sapiens
ctcgtccagctgcaaagagctatggttatgccagtggaaaactacaggtttttacagtggaaattcctatccagaaccagccttttataatccaattccgtggaaaccaattcatatgccacctcccaaagaagctaaggatctatcaggaaggaagagtaaaagacctgtgataagtcagccacacaagtcatcatctctggtaattcataaagccaggagcaatctttgccttggaactctgtgcagaatacaaagatagcgtatgtggaaaataacatgcttttatctggagctatttaatttaaaaatcagaaattgttttttactgctcagtcaataactcaacacttaatgtgattattgacaaatagcaatttttgcatttgtatatggagtccttagagttgaggaagatattttctggattttggtttttataaacttttcaaggttgatcttggcatgttgttttgcagaataagtggctgaatatgtaagaattgtgtttgtatttagcttgtattaaaagtacactgtaataccaataaaactaacaatttttcttgaaaaaaaa

SEQ ID NO: 82541 - DNA, 1315 bp, Homo Sapiens
  misc_feature (734)..(734): n is a, c, g, or t
ggggcaatcagcgagattccgtgggcgtaggaccctctgagccagatctttctctggaatcaaaggactccagctgaaagttaacctccaacccaatgataactactttttctatgtgagggccatcaatgcatttgggacaagtgaacagagtgaagctgctctcatctccaccagaggaaccagatttctcttgttgagagaaacagctcatcctgctctacacatttcctcaagtgggacagtgatcagctttggtgagaggagacagctgacggaaatcccgtcagtgctgggtgaggagctgccttcctgtggccagcattactgggaaaccacagtcacagactgcccagcatatcgactcggcatctgctccagctcggctgtgcaggcaggtgccctaggacaaggggagacctcatggtacatgcactgctctgagccacagagatacacatttttctacagtggtattgtgagtgatgttcatgcgactgagcgaccacccaaagtgggcatccggctggactacaacaaccacagacttatcttcatcaacgcagagagcgagcagttgctcttcatcatcaggcacaggtttaatgagggtgtccaccctgcctttgccctggagaaacctggaaaatgtactttgcacctggggatagagcccccggattctgtaaggcacaagtgatccttggctttcagaatttgcaagaacagcgatntgaattttgggggggtctgctgttcattcctttaggtgctatacattattcaaaaagtctcccgcgcatttgcactaatgatggctgcatgcatagcaatcagcatgtgagcaaaatcgacaagaaaaccttgactttacagagcagtgtgtgagtaaacagaatgaaaacaacaacctccactctttagtttatataagtttgagttctttcctaaattaaaagatctacacttgagttgggaaccgaaagagaaaaatggacttccatctgttttactggtaaaggaaatcctctgatggacaggtcagagtgaaggaaggttgtgctggtaagacatctctgacgaagagccatggatgctttccacaaaatgtcacctcgctgcactaaaggatgatgaatcctaatcattaaaggaattgtttcagctgatttaaatttataatgaactcttttgtaataatgtatactgtagaacatgagtctctcctccctaaaattttaaatgtagaaaagtgctatatattagaaatttccattttgttaaataaatggttagagtctataaagccaaaaaa

SEQ ID NO: 82542 - DNA, 1915 bp, Homo Sapiens
gtgctatgaacagtggtgaaaaagcaggctggtactggtccggaattcccgggatatcgtcgacccacgcgtccgggctttccacggctgcccgcctcgcgcgtcttccctgcccgggtctcctcgctgtcgccgccgctgccacaccatggccttcgtcaccaggcagttcatgcgttccgtgtcctcctcgtccaccgcctcggcctcggccaagaagataatcgtcaagcacgtgacggtcatcggcggcgggctgatgggcgccggcattgcccaggttgctgcagcaactggtcacacagtagtgttggtagaccagacagaggacatcctggcaaaatccaaaaagggaattgaggaaagccttaggaaagtggcaaagaagaagtttgcagaaaaccctaaggccggcgatgaatttgtggagaagaccctgagcaccatagcgaccagcacggatgcagcctccgttgtccacagcacagacttggtggtggaagccatcgtggagaatctgaaggtgaaaaacgagctcttcaaaaggctggacaagtttgctgctgaacatacaatctttgccagcaacacttcctccttgcagattacaagcatagctaatgccaccaccagacaagaccgattcgctggcctccatttcttcaacccagtgcctgtcatgaaacttgtggaggtcattaaaacaccaatgaccagccagaagacatttgaatctttggtagactttagcaaagccctaggaaagcatcctgtttcttgcaaggacactcctgggtttattgtgaaccgcctcctggttccatacctcatggaagcaatcaggctgtatgaacgaggtgacgcatccaaagaagacattgacactgctatgaaattaggagccggttaccccatgggcccatttgagcttctagattatgtcggactggatactacgaagttcatcgtggatgggtggcatgaaatggatgcagagaacccattacatcagcccagcccatccttaaataagctggtagcagagaacaagttcggcaagaagactggagaaggattttacaaatacaagtgatgtgcagcttctccggctctgagaagaacacctgagagcgctttccagccagtgccccgagtgcctgtgggaatgctctttggtcagacattccctcacacagtacagtttaataaatgtgcattttgattgtaatctatcgaagtgattattacaccagctacagcagtaatagattctccattaagaaataattccctttttttagtctgttcatttctgcgtattttctaaacagctttacacccttggtgccttggaagcaaacatgttttttgaaccttgtcatttttgtgaagaattgcctagattccttctctcatcaacgggaaagtacttcctctgagagtgcgagtgcaccatgctcactgttgctgcgtgggagagtcacaagccactggcaagcaagtggtatagtctgtgaagcactgcagcgagcagcacctggatcttgcctttataagaacattttactacctgcagctttgagtcttgccctacattttgggcatgacataagatgtgtctttattcagctcgtcgtgaagatgctgctgctgaatgggtcagcatatctctgtttgcatggtttgcaggaggtcggttttcatggtcattcagttccacagatctgaatgattactgtctgtctgtgtcttttttccatgagaaatcactgttgcaaattgcctataaattgactctactaaaataacaatgtttcagtctgaaaatttgaattgaaaaaaatgtataatataaaattgtaatacactcaaatgattataaaagtaaaagttggtaatttaggcagaaaaaaaa

SEQ ID NO: 82543 - DNA, 687 bp, Homo Sapiens
ccctcgagccagaattcggcacgagggtaaaaatgtttgggtacatttatactctcagaagctatgtgtttagagaaaagggcccccaaccacaaaagttagtggttcttattctgtctgcttcgtactaggtatatggtaactgagaaagtcacttaacctctctgaaccttaacttcgtcatctataaagtgaatctaacattttccccccggcctacctcacagggttgttgtgaggatcaaatgaaataatgtacatgaaaagacatatataaaatgtataatacagacaaagggtcctgttacacagttggaagtcattccctcagattttgggcctaggaaggtaggtgatttaaactcactgaaagcatgtaccatgtccaggttggatacatggcaacaaggctatgttaaattttttttctctgagttgagtccctaaaatactatcatgggctaattctaagaaggagcacgaatatatattcccctaaaattatagcttagcattgtcaatgctttagagcagttatgggagttatagattataacatattagtgatttgtgaaacttttttactaaaatgtgaccctcatttttctttacatgaaagaacatagaatatttcacaatgcatcccacgtggtaagaataaaaaattgttttagttatatgtacaaa

SEQ ID NO: 82544 - DNA, 389 bp, Homo Sapiens
  misc_feature (220)..(268): n is a, c, g, or t
tccaaatacagtacatggtacacagggtccccaagatggccctgcctaaacccctcgtgaagacttgagccaagcaccggctgtttataaaaatattgtgttgctacaaaagtataaattaatgctaccggtattaagaaatattaaacacataaaacttataaggattaagaaaaatattcattaatacctgtagaaaactctggcctaaaaaagatannnnnnnnnnnnnnnnnnnnnnnnnnnnnnnnnnnnnnnnnnnnnnnnnaagatgacttgagtttcttgcacccccgcatcctttctcagtagttaagacgttctaggcaataccatagacacatctgactgtgtctctctctttgagtgcaagaaactcaagtcatctt

SEQ ID NO: 82545 - DNA, 690 bp, Homo Sapiens
  misc_feature (17)..(17): n is a, c, g, or t
  misc_feature (27)..(27): n is a, c, g, or t
  misc_feature (35)..(35): n is a, c, g, or t
  misc_feature (423)..(474): n is a, c, g, or t
ctaaccggttaaaccgncttcatgganttgacccnggggctgggccttcgccagccaggagagagccgagggccgcacggcagggctggcccaggcagcttgtcccagggccattcagatcccaagcatcaggaaatcattttgtacaaccacccgaagcagagatattttttaagaagcgtaaattattttcagttgttttctgatcctgcctttttcttttccccacaacttcacgccagtgattcgttcacatcaggtaaatcttgagaaagccttggtgccctcctccccaccccccactcagtaaccacgtgcgtgcacccccgcatcctttctcagtagttaagacgttctaggcaataccatagacacatctgactgtgtctctctctttgagtgcaagaaactcaagtcatcttnnnnnnnnnnnnnnnnnnnnnnnnnnnnnnnnnnnnnnnnnnnnnnnnnnnntatcttttttaggccagagttttctacaggtattaatgaatatttttcttaatccttataagttttatgtgtttaatatttcttaataccggtagcattaatttatacttttgtagcaacacaatatttttataaacagccggtgcttgtgctcaagtcttcacgaggggtttaggcagggacatcttggggaccctgtgtaccaaaaactgtatt

SEQ ID NO: 82546 - DNA, 759 bp, Homo Sapiens
gcacggcagggctggcccaggcagctcgtccagggccattcagatcccaagcatcaggaaatcattttgtacaaccacccgaagcagagatattttttaagaagcgtaaattattttcagttgttttctgatcctgcctttttcttttccccacaacttcacacttgctgtgttaattaacaaaagatgttgtgtgcggtctcctgtatcggtgtggatccaacagctctccagggagtcacattgcatgggggttgagttgacggttcttgtgatatgtaaacccccgagaccaaacttgagggtttatttagggttttctgtttgtcctttgggtttttgtttcactttgttttggtgccgtttctccatttacagccaaatcagtttcatgatgttcaaaacatttactgatgtcaaatggaggaaaggaacagaaaaaaagatttttacaaagtaataaaatttaaaactgagctgtttaatgttgctgtttttacctgtctgttcttgtccaaaagtggaacattcccagggagaagaggaaggttccactcggttctttaagtcgccaaaagccccagcccgggattcagtacctcccctgccccccgaattcttgcagcactatttcccagttggttgatgccaaggcaaaaagataacttttaacagttagagaggatcagttgcttaaatgatttcatgtcagtgttgtatttatggttttacaataaaacaacctttaggaagataaaa

SEQ ID NO: 82547 - DNA, 1305 bp, Homo Sapiens
  misc_feature (192)..(192): n is a, c, g, or t
gcgccgggcgccctcggccggcgcgcccggctcccgctttgtcgccgagggaagcacgcgcgacgcccctcccgtcgccgccgtggcttctttcggtgttcgtgatttgctgagaggctggaaagcagcacggcggagaggagccttgcactcgccaggcgggaagcctgcgcggatacgcgtgcgcacccnacggggcggcgggcgggcgtggggggtccgggccacgcgggcgacgcgcctctagggaagcgatcttgttgcaccttcccgttattctgaaagcaaatcgtagccagacccgagcgcagcggcttagcaaataataaggggagcgtcagtcgtgctcgaaatgcttccttcgcgatggcgtcagtgttccgtgagggaatgaagccgcagtaggaaataaagaggctgtgcgcgtagtctgaaaagcagaagtcaacatttttacagatgaagaaagaatacggaggcaagaggtctttctctgcagtttggtggatttccaacatttagacttgtttggaagaatttcctcagctgcaccaatgaagtccttgatctatagaagtcggcagtccctaaatctacgtctgcattttgttgcaaatcctttataacattccattaaaataatgcagagttatttaatatccagttggccatcgtgagagtaattcgcggctgagattttgttaatcattctgtcttctgacttaacagtgaacgtaggtgattttttttgtaaaatgttgcttcacatgaattgtgagaatcacctctaagtttgaattgtactgaaggcactataagaatttcaaatgaacgctgagtagccagtagccttctggccttttcgtttaacaagcacagagttcgtttttaaaattaagttactttgacagaggaacatgtaatagccttggtagacaacattaaaaatgtaactgtcagatgttttaaagtctccaacagccgtatctgttttagagccatagaatatttacttactgaattgcctgtttaaagatgaactttctaaatgcagggaatagtaacttgcaaaaaagctatggtctctaagtaatgaaggctgtttcaagtacctagaaacatcaacatcaaggtttgatgctgctagttgtaacaagatgcattccccttcttaatggcctgcttatttattaagctcctaaggcactatgctgatgccctacatgaatatctcgtttaatcatcagtacaacttgggcctaaggttagaatggtatccccattttacacactaaggggaaacca

SEQ ID NO: 82548 - DNA, 724 bp, Homo Sapiens
ctcactccgggaaaaagaaaatgagtgagactcaaaattcaacaagccagaaagcaatggatgaggataacaaagccgcaagccaaacaatgccgaatacacaagacaagaactacgaggatgaattgactcaagtagctctagctctgggtgaggatgtcatcaattatcctgttaagattgtggaagaggagcgaaaccctttgaaaaacatcaagtggatgactcacggtgaattcactgtggaaaagggtcttaaacaaattgacgaatatttttcgaagtgtgtttctaaaaaatgctgggcacatggcgtagagtttgtagagaggaaagacttaattcacagcttcctctacatctactatgtacactggagtatctcaactgctgacctacccgtagcacgaatctctgctggtacctacttcaccatgaaggtctccaaaaccaaaccaccggatgcacccattgttgtttcttatgtaggtgaccaccaagcattagttcacagaccaggaatggttcgctttcgagaaaactggcagaagaatcttactgatgccaaatatagtttcatggagtcattccccttcttattcaatcgtgtctgatacttacaggatgtcttaggattgtttttctcatcaggatacattaaaaatacaatacagcacgtcaaaccacagaatatttattgagtaataaacttgtggcacacaaa

SEQ ID NO: 82549 - DNA, 567 bp, Homo Sapiens
agaattcggcacgaggagaagatctgctcactccggaaaaagaaaatgagtgagactcaaaattcaacaagccagaaagcaatggatgaggataacaaagccgcaagccaaacaatgccgaatacacaagacaagaactacgaggatgaattgactcaagtagctctagctctggttgaggatgtcatcaattatgctgttaagattgtggaagaggagcgaaaccctttgaaaaacatcaagtggatgactcacggtgaattcactgtggaaaagggtcttaaacaaattgacgaatatttttcggatgcacccattgttgtttcttatgtaggtgaccaccaagcattagttcacagaccaggaatggttcgctttcgagaaaactggcagaagaatcttactgatgccaaatatagtttcatggagtcattccccttcttattcaatcgtgtctgatacttacaggatgtcttaggattgtttttctcatcaggatacattaaaaatacaatacagcacgtcaaaccacagaatatttattgagtaataaacttgtggcacaca

SEQ ID NO: 82550 - DNA, 993 bp, Homo Sapiens
  misc_feature (598)..(598): n is a, c, g, or t
  misc_feature (818)..(830): n is a, c, g, or t
gggtgagacataagcttgtaggaataataaacgttctacaataaacgttttggctatcttaagccattgtatgggggggattaggaagtaggagggattgtcctacaacaggcccttatacttcaacagcccaaatattttggtttattcctttttatccataaagtctttattcttcaagtttgggtattatagattaccattgttagcctcccttaatgggaccatatgagccaggcttttaagacggactcattttgaattgagtttcaaactttgaaagtgcaaggatttaatttttaagttgaatcccatgaaaggtgtcatcatcactaggaataacaccctttgtaactacatatagaactgttacaatggtagcagaaaatcctattgatttcatctcacccatttcagataccttcagtgaaattaagggtagtgtgatgtcccatgtaataaaacaggcttagaacatcaattcctctgctgccatttatgtgcttttattcccccttcaaaaattttttattggatatatatatttttcagtattcagactctgaaatctgtcattacaatcaagtgcttgtcacangctgaaagatttctggtggcttaaagtttactagcagtaaatttatgatatggtacagttctttgtacagaaaggcaccattatgttagaataaatttccagaacttagtgggaagaatcaggttttaaccttgtgtgtctgttacttctgagtgcatttctataatataaatgttgatttgcgtcaacattataaaagagcacttctgtggctcatttnnnnnnnnnnnnnggttaagtcttttaaattttggccttgtttccaaatcctgtcttccatgttgtttttctgcacttcctgaccactcttataaaaagctcacaaacctttgaagaaactggagtaggctgttatttcattaaggtttacaaattaaatgcttgatttttaatgt

SEQ ID NO: 82551 - DNA, 966 bp, Homo Sapiens
agattttgtgtatttcttatagccctttacttcactgcgccactgcctggtgtagacatcacatatcggagctaatacacgacactggcaacaaggctgaatccttgaactgttgtcgcctgttgagaaaggattccttttcccggaacagaagtgcagaggaggagagagcggagagttaaaagctggcacccaggcatgtgcctgtcctgagaaatcagaagccgtgctcctgagcctcggtggggtgagaacgacagggccgacctcccagctgcaaacacaaggacactgagatgcacagaaaggagagtccacgttgaagaaacccacgttgaggggcctcttctccctccgttcccagctcggtgatggtgaagggtaaggaaatggatcctcccattgcaacattaaaccaggccaaacctgtatttttctcttccttcctttttcttgttatgtaattgatgtctcctcgggactactgataatgtcctagaaagaataaaataaagtttcccaaggctttgtgactcagagctctttggaggtgttcaccgaatgcacgggccgcccggaggccttggccctccagggaaacaccaccagaagtccccagaagcggaacatgtagcaaggaggctccccgagatctcccagagggagcacagccctgccaagttattggttttggacttccggcttccagagctacgagaaaataaatatttgttatttaagtcaccaggtttgtggcgattgttacggcagcctcaggaaactcctacaaggaagtgagttacgctcacggcagaaagtgctacagcaaaccaaggcagaacaaaaacagacgaaacctaatacagaccggactaagtagaagactgtgtgtttgggtggtgaatatacaaaaaacataaatataaattaaaccttagagaaactttgtcattttcttgtcatgtt

SEQ ID NO: 82552 - DNA, 472 bp, Homo Sapiens
  misc_feature (41)..(41): n is a, c, g, or t
aaattgaaagccagttgaagggcaggctggcatgtgtgtanaacattatcctatatatgatattttcatgtttctctttgttgcagactgaacaacattattccatagataatggggaaagacagtttcaattttccccggtgcaaggatgtaatctctcttggagctgtaaaatctgggaggttggagggaactccagctcctcagcatggcctttgggctgctgctgcaagcaaggcattgaggcaaatatttttgctgtccttaccttggacagaagtagaggggagaaataaagtccatcatcacatgaaaagtcagtcacttgaaatcctgtacctagaatacctttggctttggtaatttcgttgtgtttggggtacaaaaaaaaggatctatttgatagcacaacggggtgactatagtcaataataattgtacatttaaaaataaaagaatgtaattggattgt

SEQ ID NO: 82553 - DNA, 591 bp, Homo Sapiens
ggcacgaggccgagagaggacaggtttctgttaagatcaccaagtagctgtgctttaattagagccagacaagctttcaaggtcctttaagtatttgatgatcaactgaacacgtttctattcaaggagaaaacaccattcagtaagaagatggagtagatatcagataaaacaattcacgtttaatatgtaaatgtaccaattatgtgattcagtttcaactttcaagtacttcctgagaggttagtacattattattgagctctcacagaaagcttaatcatagatataattaacctgatccaaatgagtaaagtggaccttagaaaggctaagtgatctttctctggctatccagctagtagtaatgaagtcaggtcttgaaccccggttctgctgactgaattggatgcactatagtacaggcttttagcaccgaagtgtggtcctcagaccagtgcctgccaaccagatgttactggtctgtgaggaaataagtacagatactgacaggaagcttttataaacaatttattggagtgtttttgtttctgttgggtctaattaaaaaaattggagcttgtaaaaaaa

SEQ ID NO: 82554 - DNA, 729 bp, Homo Sapiens
  misc_feature (184)..(192): n is a, c, g, or t
ggacgcgtgggcgcccggcgtccagatttggcaattcttcgctgaagtcatcatgagctttttccaactcctgatgaaaaggaaggaactcattcccttggtggtgttcatgactgtggcggcgggtggagcctcatctttcgctgtgtattctctttggaaaaccgatgtgatccttgatcgnnnnnnnnntccagaaccttgggaaactgtggaccctactgtacctcaaaagcttataacaatcaaccaacaatggaaacccattgaagagttgcaaaatgtccaaagggtgaccaaatgacgagccctcgcctctttcttctgaagagtactctataaatctagtggaaacatttctgcacaaactagattctggacaccagtgtgcggaaatgcttctgctacatttttagggtttgtctacattttttgggctctggataaggaattaaaggagtgcagcaataactgcactgtctaaaagtttgtgcttattttcttgtaaatttgaatattgcatattgaaatttttgtttatgatctatgaatgtttttcttaaaatttacaaagctttgtaaattagattttctttaataaaatgccatttgtgcaagatttctcaaagattaggtatatatttaaatggaagagaaaatatttttatgggagaaaaatacatttgaaccatgaaatttcatcttttaaataacatccagtcaagaaaa

SEQ ID NO: 82555 - DNA, 2141 bp, Homo Sapiens
  misc_feature (1443)..(1451): n is a, c, g, or t
cagcagagcgctatcctccactggttacccgggttccccggcttgctaccgggctgctccgtgcatctttccccccaggcgtcaggaactgcgccctcatggcggaggtgaaggtgaaggtgcagccgcctgacgcggatccggtcgaaatagaaaacaggattatagaattatgtcaccagttccctcatggaatcacagaccaagtaattcagaatgaaatgcctcatatagaagcccagcagcgggcagtagccatcaataggttgttgtctatgggtcagttggatctcttaaggagcaatacgggccttttatatagaataaaggactctcagaatgctggtaaaatgaagggatccgataaccaagaaaaactagtatatcaaatcatagaggatgcaggaaataaaggaatatggagcagagatatccgctataaaagtaatttgccattaacagaaatcaacaaaattctgaagaatctggaaagtaaaaaagcttatcaaagctgttaagtctgtagcagcctcaaaaaagaaggtgtatatgctctataacctgcagccagaccggtctgtgactggtggagcctggtacagtgaccaggatttggaatctgaattggtagcaggtgcttaaccaacagtgttttaaattcctacagtccaaggcagaaacagcacgagaaagcaaacagaacccaatgatacaaagaaatagttcatttgcctcatcacatgaagtgtggaaatatatctgcgaattggaaatcagtaaggtagagttatccatggaagacattgaaaccatcctgaatacactcatttatgatggaaaagtggagatgacgattattgctgcaaaagaaggcacagttggcagtgtagatggacacatgaaactgtacagggcagtcaatccaatcatccctcccacgggtttggtccgggcaccctgtggactctgcccggtttttgatgactgccacgaaggtggtgagatttcaccatctaactgtatttacatgacagagtggctcgaattttaatagagagctatgaactttattgacattttgcaaatgaagttacttagggagcagataatttaattcatgatggaacacgaaatctccttgaaagcaaacttcacaataatggacgtagacttgctgctatgaaaacatattttttttatttatgaagactaaatttatattggtaaaatagccagtagaatatgaaagaaataaggttagtagtgaaattcattcttcaataaataaaacactttgaaactccggaggaccacatctttcaagacttctgatgggtcaaggaaaaagatgccaacatacccgtatttaccaagtactatgataatggctagagtataaaaatgttctttttaaagttatttattaagttcttcattggaagnnnnnnnnnatatctggttcactaccaccattttctgtttcctactttctcagtggtttcattgaaaagaaattagaagtggttaaaggcaggaatagcaaagagtgcaaacttggggtatgactgggggagagtggaacatgccttttccgcacaatattaattcctttttgtatcagaaatgttcttttaggagattatgctaccatacttacttcaaacacaatgactactgtcaaggacatattttcagtacataaatactatcattttcattctaaagaatattttcactgttccttctttcttaaagtcttatgtttcactctttaactcaaatgtattctttgttagaatttaccctagattcttatttaatgtctgcagtagactgaatgtttgtgtgcaccgagaattctaatgttgaaatctcatttccaatgtgatggtatttggaggtggggcttttggtaagtgataggtcaggagagtaacagcgctcatgaatgggattagtgcccttatataaagagacccagagagctccatcaccccttctgccatgtgaaagggagaagacaaacatccacgaaccaggaagtgggtcctcaccagaaaacaaatctgtaagcaccttgatcttggacttcccagcctccagaattgtgagaaataaatttctgttgttgataaaaaaaa

SEQ ID NO: 82556 - DNA, 765 bp, Homo Sapiens
  misc_feature (108)..(120): n is a, c, g, or t
  misc_feature (316)..(325): n is a, c, g, or t
aaaacatggcctttattaatactgcccactgagctccatttttattttacattgagatacttctgctttgcaaagaaaagacagaaaagtgcattttacaagagtacnnnnnnnnnnnnnaattctctgagaaaatggaatctgaatcacaagttcacaatgtagtaaaatgaaattaagaaacaatgatttcagtaatgctatgccatcactagtgtttagctctgactttttcttgtaaatcagatcctgatatacagtctagagcatctaggttattattctacagcatattaaacacagaaaaggaggtttnnnnnnnnnncccctttcaatgtacaaacatgaatttaaaaactgcttttataaaatcacctttttacataatgtatatgcaaaactgctttaaatacatgattttggaagaattatttacaaaatctatcagtctgtggaacaattcacagacaaagcatacatagttgctttacttagttgttgcatctcaactttgggagatataaattcattcggcagtatagcaaacataaaaactgtgacaaagtatcttaagggcaaccaaaaatttgatcctcaaaacagtttaaatactaggactgccaaagtttctaaacaaggacatactttaatgatccagatgcccatttatagttctatactgtttgatggactgagacagactctctttaacacaggcaaggctgcaggatgcacctcctgtaaaaaggacagcttgagagctat

SEQ ID NO: 82557 - DNA, 699 bp, Homo Sapiens
agctcctgagctgctgctcgatgctctgccctcaccctgtgctaggcggccgccggctccgcagggcgtgttctcctggcccagagccagccgtgcctcaggggcgtccagcatcaagccagaggccagtcagatgcccccgcctgcaggcggcacgtcagatgacccggagcccagcgggcctcatctcccacgggtgatgcttccaggggttctggcgggagtctcagccgaagagagctgggctgggccccagccccttgagactctggacacctgaaccagacctgccagggctgtgcgatctcttggcctggtccttgcagctgtggcagcagcaggctccccagcggcccagggtgggccagaccagcagcccaggaagcagcacacgcggccgtggggaggcaggcaccgggcatgtcggcgcctctggtcaaaccacctacactgcctggggtgggtctcaaggaggcccggggcggaggggggttcccgcgtgcacacgagtgcggctggacgtgccgacacgcggtgatgtacccatgctccgtgtgtctgtgtctgcatgtccacacgtctgatgcacctgtgtacgtgtgtcaagcctagccacctcagctgcagggaggcagaaggcaaggcaggccccacggacacacttgggctgctctgaaataaagctgttgactccacctg

SEQ ID NO: 82558 - DNA, 219 bp, Homo Sapiens
gcaagttggaaaacagtttaatgatcactcaccaaaatccacaggagaatcttaaatgtttacaagcaccaattattctgctattcctgccattaccgcatccttcatggtagagtatcacaagtaaaagtttctggttgtttcatctacttaaaaccagatataagaaacaacctaagtcttagcaacttcaggcttcaatgtgaaaccattaaagcc

SEQ ID NO: 82559 - DNA, 404 bp, Homo Sapiens
gggtttttttccccattggaatcaataggagggaatgtttggctcaatagtgtggatagtaacaactgcctatttaaattaaatagcctttggctgtaactacacagatctcatcaatagttacctacatgaatcaagctaggtttgtctgaaatgctagaagactttttcaaatgcctgcttgctcacttacttttctacagagtaactcaaaagtaaccattgaattacaatccactttgtaaaaatctgaatgtaaaacagtaaataataaattaaataattggatcctaggcataccaataaatgttatttggggaaagaagctagcactatctcatgcagtgagaataacgggttctagtgaattatcctatctacactaccacctgaagaagttgaaa

SEQ ID NO: 82560 - DNA, 530 bp, Homo Sapiens
cccaaaataaaacaaaaatttacttggacgttattcattgggctaatagaacattttagtcccaatccaacaaaattttaggcaaatgtcaagaaccaagttaaccaaaaccgctttaaacagaatcttcattctaggtatataaaaactgtttctttaaattagagatctttttggtcctaaaatctagaactgaatcagctacaactgcaaacaaggtgattagtgcaaagtaatacaactgtccaaagataagctacttcccactttccctactcagtaatacataaaaatccttaatattagcccttcactttccatgcttccacccagtaacacctaaagcaactatttaaggattaagccacacaaggtcagagtaattgagcacctagtatgaaccaattatctaaatagatttctaaaagtccataatgaatcagaactcagatacaaagttaccaccaggcatcttttatatatactttcttgcatatacaagtctcaagaagagtaatgtcatacaagag

SEQ ID NO: 82561 - DNA, 797 bp, Homo Sapiens
  misc_feature (342)..(358): n is a, c, g, or t
ggcaggaagctgtgaaattagaagtaattttaaagcatactttacacctctatataatcaaagtaagggcaagataaaacttgttagtaaaacatgttttattattttttagataggtagcctgcaacataaaatatattttgaaagctgttaaggggtgtataatctgttaaaaaataccatgattagtatttcacatttagtgactcagatccctttgtgtaagtcctttgcgttgtgcaaagaagtttttctatgagatgagaattatgaacacttcatataggtaaattccataggttgagctggggcagaaattaatggctcctggagattgcatcnnnnnnnnnnnnnnnnngagcttagaattcccatttggacagaatttagcttttgtgctgttgattacttctgtactaaactggtagccaattgttcacttctaaatggaagggaaaaagttacccacacaagttagaaaatgatttaccgaattatttttttgagttagtatgtatatactgttttaaatcagtaatgtttgttccttttgctgcccatttgggagtatgtggcaattcctagtgctcttgtatgacattactcttcttgagacttgtatatgcaagaaagtatatataaaagatgcctggggggtaacctttgtatctgagattctgaattcattatgggaccttttagaaatcctatttagaataattggggtccatactagggggctccaattacctctgaaccttgggggggcttaatccccttaaataaattgcttttag

SEQ ID NO: 82562 - DNA, 487 bp, Homo Sapiens
ggcacgaggaggggccatgcttcgtagatagggatgatagagaggagacctgcccaagttgaatttccatggccttcctcccttccttagttccatgataaagtatggacagtaaaccactacttgagctacctaaggtgaattaactctcagggaaccctcttccagttctttaccttgcacagtgaaagaatcaatggcacctagaaagttaaatccctttaggcccatacactagagacatgttttgtttgaacaatgtagtttaagtacttgaatgtcacactatataactgaggttagagaaaatgtttcttctagcccttacagggtgtgattcttaaacacaatgtccaaggtgtatacaaggatatgtattgtaacaactatgggtatgtatattttgcagagcgtagtttctatatcttgaaaaggaaaatattttcataaattgtttttataagtactaataaaataatataaaaga

SEQ ID NO: 82563 - DNA, 511 bp, Homo Sapiens
ggcacgagggcggccgcagattcttgaagaaactgctctcataagctaaggttccttatgattctgcaaggaagagaagactaaagcaaatcactgtctgaaaacataacagctggctaaagtcacagtgtccatgtaactaactcctggttaagaggatatggatagaaggcacatgttcaacttctggcttctgtccttgaaaagtgtgatgattccatcctttgctgtcttccttcccgctgactggaatgtggacttggtagtgagctaccttggactatgtggatgaagacaaagataaaaggaaccaaggactctgatgattctgtagagaagaggaaccgtagctgctcaaacgttcatgtgaaagaagaataaactatcagatttaagccactgctattttgggtctttgtgataaacagtgtttaccatatcctaattcactattccttccatttctaggtcaaccatgttgaattaaatatagtgctctaacttgcaaaaa

SEQ ID NO: 82564 - DNA, 527 bp, Homo Sapiens
  misc_feature (147)..(219): n is a, c, g, or t
cagagtgtttcattagaaaaggaaagtagttaagctgttggaagagcctcagtgatggatgatgggcctaaaacaagagagttgcagaaaattggacaggatgaaatgaactgtttgtatatatctaaattgagtatccattatttnnnnnnnnnnnnnnnnnnnnnnnnnnnnnnnnnnnnnnnnnnnnnnnnnnnnnnnnnnnnnnnnnnnnnnnnnataatgaacagcacaactctagtgataagccataatggtgataaactacactttatcattttatgcctccttcccatcctgtccattatttgggtaccctttaaaaattaaacacatgtgttgtctaattactgaaataaatgaaaatgctacggaaaaaatctgggcacctatcttcctggaaacttcaggcttaattccatttagagaatggaccgtctgtgacttctgaaagaagaacttacaatattattaatggtttcccctattgttaagacaacagaccaataaacttattttttaatgtt

SEQ ID NO: 82565 - DNA, 420 bp, Homo Sapiens
ggcacgagggctaacatttcggaaagtttctaaaagttgtacaacatgccctacagctactctttaaatctccaaatcaaatgagtttcaggtggagcctctgggaggtgatgaggtcatgagagtggagcctcatgaatgggatgagcactcctacaaaaaggattccagagagctcgcttgctccttccacagtgtgaggacacagagggaaggctctgtctatgaatgagaaagtgggtccccaccagacattgaatctgccgcatcttgatactggacttccagtctccagaactgtgggcaataaatgtctgttgtttattacctgtccagtatctttggtattttgctatagcaacccaaatggactaagaaaacaccagaggccatacctaataaaaatattgacatcacaaa

SEQ ID NO: 82566 - DNA, 1292 bp, Homo Sapiens
  misc_feature (111)..(124): n is a, c, g, or t
  misc_feature (135)..(201): n is a, c, g, or t
  misc_feature (216)..(282): n is a, c, g, or t
  misc_feature (399)..(426): n is a, c, g, or t
  misc_feature (718)..(738): n is a, c, g, or t
ggggggaattccaacccttgttctggcccgggttttcttggaaacaactatggccccgttccctttccttttggggcccggggcccaaagaaaggtttaaaaaaatttttnnnnnnnnnnnnnnccgccaaagannnnnnnnnnnnnnnnnnnnnnnnnnnnnnnnnnnnnnnnnnnnnnnnnnnnnnnnnnnnnnnnnnngagcccaggggaccnnnnnnnnnnnnnnnnnnnnnnnnnnnnnnnnnnnnnnnnnnnnnnnnnnnnnnnnnnnnnnnnnnnatggttaagaattttattatcaaaattattacatctcttgtgaaagttcaaatgttacagcaaggtgtaaacactccacttgagaaagaagtgatacttcttcccttccaagagttnnnnnnnnnnnnnnnnnnnnnnnnnnnnaagaggtctggtcttgacagcaccctgcccacacagagtggctggggtctctgcacgtgccaggcagggtgagggccgcctgcccgctggcctctccccttggttaaatagccaaggggagaatgcaaaccccagcccaaatggagagacatttacatacgttttatataatatacaaagaaaccagcatcccaggcaacatgatttccactcccaatgctctcccagactgatgggtttgtgggggaaacaacaaaaagaaaagtactctgctgaggtctcagcatttacnnnnnnnnnnnnnnnnnnnnntctcccctcatttgagcaaacacctgatttcgattttgaaaagtgaaattttgtaacagtcacacacaaagagagaagactgtgcatatgatagttgtaggacagggtagaaaagaaggggatgcaagaggctggggaaaaaaggaaaacaaattagagggaaggaaggagggaaactcacagtattatcttgtccaaaagaaaagaaggtccactgcagcaccagggattacacctgtcatatattcactacccctaccatggttataactgaatacaaaattagataaataaaaacacgccagatattacagtaaacaagtgaaagaaataagctggcaaccatatggaatttaaaaagattgtgtaccccacctgggctggctccagggctcctccaggggtgtacaacaggcacaatgcactgatggggagaagccggtctgctctcatctctcatccagaacagtgttacggggtgtgggtggcttggtaactctttcactgggcccactctcacataatgcatcccccatgagaaatatacccgcaga

SEQ ID NO: 82567 - DNA, 1335 bp, Homo Sapiens
  misc_feature (609)..(609): n is a, c, g, or t
cttcccccgactcaagaatccccggaggcccggaggcctgacaggcaggacgcggcatgaacgaatgctgatggtggtgctgagtctgattgctgcagcctgggcagaggagcagaataagttggtgcagtggcggaccctgcgacaaagacgagtctcacccctacgcaagctgccctctacacctcgggccacttgctctgtggtggggtccttatccatccactgtgggtcctcacagcgtgcccactgcacaaaaaccgaatcttcaggtcttcctggggaagcataaccttcggcaaagggagagttcccaggagcagagttctgttgtccgggctgtgatccatcctgactatgatgccgccagccatgaccaggacatcatgctgttgcgcctggcacgccctagccaaagctctctgaactcatccagccccttcccctggagagggactgctcagccaacaccaccagctgccacatcctgggctggggcaagacagcagatggtgatttccctgacaccatccagtgtgcatacatccacctggtgtcccgtgaggagtgtgagcatgcctaccctggccagatcacccagaacatgtngtgtgctggggatgagaagtacgggaaggattcctgccagggtgattctgggggcccgctggtatgtggagaccacctccgaggccttgtgtcatggggtaacatcccctgtggatcaaaggagaagccaggagtctacaccaacgtctgcagatacacgaactggatccaaaaaaaccattcaggccaagtgaccctgacatgtgacatctacctcccgacctaccaccccactggatggttccagaacgtctctcacctagaccttgcctcccctcctctcctgcccagctctgaccctgatgcttaataaacgcagcgacgtgagggtcctgattctccctggttttaccccagctccatccttgcatcactggggaggacgtgatgagtgaggacttgggtcctcggtcttacccccaccactaagagaatacaggaaaatcccttctaggcatctcctctccccaacccttccacacgtttgatttcttcctgcagaggcccagccacgtgtctggaatcccagctccgctgcttactgtcggtgtccccttgggatgtacctttcttcactgcagatttctcacctgtaagatgaagataaggatgatacagtctccataaggcagtggctgttggaaagatttaaggtttcacacctatgacatacatggaatagcacctgggccaccatgcactcaataaagaatgaattttattatg

SEQ ID NO: 82568 - DNA, 1297 bp, Homo Sapiens
gccggggcatggcgttcaagattttggagatgaactgattccgcccaaatagaatcatgtttattttttcagctctcccttttatcattattcacactcctctgccctcgatttgcataaagttgaaaattgttgcgatttattttttcaagagatcatgtttttaaagtgtcttttgcagagttttaagttgttctgtctgaactctgctgtgatcccatgatgtgaccctgatgggctggacttgcccctccggtagccttccttggccctcccagcgaggggcacccttcctctgtgccccagtgggcatcaccgtcgatctcgctggctgaatgaagaagaccgtgttactgcagaacctgccaagtctgtcatcactgtggggtgtagcctgcctcagagggacctgcaatcacctctctgagctcagtggtattttgagaatttaatgtttaactgtacccctttccctcaggaagatttaacatttgcttgggaatgtgattttgctcccaccctaaggaatttttatcaccaaaatgaatgttaatgaatttaaaacccatggtttatcattggcaagaggcaagttgacttcatcctgtcattccagcctggggtctgccagccagccctcctccccgacccagcgcctaagctcacagagtgtcgtcgcccacctccctggtccttgctcttgttaacccaagatgctgctacacagatgccaaatggaaatcttccacagggctttttcagtaaacacgtgatgtggagtgcaagctcctccccttcccactagaacatactttaacagaaaacgagtcggaccttctagctgcactctgtactgtgtgccgagaaggcatttctagacccgtgtttttaaaggagggaactttggggattgccagcccctgctcctcctcccagggagccaactgtccctcctcccctgtccctgggcccatggggcccggcagtggctgtgtcccctgcctgagggctctgtgcctcctgcctcagatgcggcctgtgccagagaggctgcctgtacagccagggtcagtttggccccaaacagggattcagaaaccaaatgtgtgttgtggccattttatgtgtgtctccgtcttattttaataccaaattcatcatgtagtgaaattatgtcaggaggtatatgagtgactgaattcttaactatagcttatctgtgttttgttagcccgagggatatgtgcagggttgttggcgctattcatgcactgaaatgaaatcatctgacccagtg

SEQ ID NO: 82569 - DNA, 695 bp, Homo Sapiens
  misc_feature (431)..(441): n is a, c, g, or t
ttcctatgggtgagaagatgtagatgactattgttctcactaaagttctaaaataatagcaagtgtagagaagagccgttgctttgaaaatacataccacatttgttataaagcatttgtttgttagtatcaatcacataggtagaaagagtttgagttttactgtggattaaaaagccttccctaaaaagagagcatgccagtcatagagacactaatttggcacttttcctccttcttaggtttaaatgttataccaatgcatgtgtttgaaatatccattaagatgatttaaaatttgtcttgtattttgagtttcttaaatgcgtggattcttgttcatttatctctgaatatgtctcttttatattttggcacaattatacacattggaaagggccaacctattagggctcaagtatgtatatgcnnnnnnnnnnngttatatcaaacaggcacagttattacaactagagagaaattccagaaatatttgtttttttaagagaaagtaaattttcacattagatttctattcaaagtactaatatctacatggtccacacttttctattttaaaaaattgtgttctcttgttaaatagattaacatttccacttctgtttatcacaaaagactgtatttgaaatatgcatacggaaaattgaaattatattagtaataaatgtaacttg

SEQ ID NO: 82570 - DNA, 763 bp, Homo Sapiens
  misc_feature (23)..(23): n is a, c, g, or t
gtgtacgggtatgttctgatttntcatgcaagctcctctgccattccaccgctctgaggagtaattgtagcacttcacatgtgctgtggttgtgatcacatggtgacatacatagcatgtgtgttcccagctgttgtgtgtttatgtgacatttgatgccaatacatatgtcttcaaggtatgcttgttccctcccagctcgtggaatatcaaaaaaattcattgctggaaaaattatttcatagacaaaaatgttaatgttctcttggggacttagagttgaaaatatttgtatagatttggttctcaagtccacagaatcgtatctgctgtggtctccctttggtgctcatctgggagccatgtgtatggaagattctgtcacaggcggctgggatgtgggcagatgctgttagcctccctctccacgtggtggtccatgcctgacgtgtcccctagttcaaggaagcgccatctttagcatgaaaacaattgcgttcccctaggaaatgaagaaaaaatgagctgaaatttccttatacatttgaatttgttcattttttaaagagacatttttgttgtctgctttgtggtacttataaaatttgttttccattgaaattgccatttataaatttgcagatatgtactaatttagatttttttaagtgttcaataaaataaggatatatttactgtgaatttttaaatgggctttttagctttcttgaactaggggacacgtcaggcatggaccaccacg

SEQ ID NO: 82571 - DNA, 686 bp, Homo Sapiens
taatggcatgtcagtctgttgctgagcccattatattttaatataaatgtagaaaaaagagagacatcttagtaaagagtattttttagtattagcttgattattgactcttctatttaaatctgcttctgtaaattatgctgaaagtttgccttgagaactctatttttttattagagttatatttaaagcttttcatgggaaaagttaatgtgaatactgaggaattttggtccctcagtgacctgtgttgttaattcattaatgcattctgagttcacagagcaaattaggagaatcatttccaaccattatttactgcagtatggggagtaaatttataccaattcctctaactgtactgtaacacagcctgtaaagttagccatataaatgcaagggtatatcatatatacaaatcaggaatcaggtccgttcaccgaacttcaaattgatgtttactaatatttttgtgacagagtataaagaccctatagtgggtaaattagatactattagcatattattaatttaatgtctttatcattggatcttttgcatgctttaatctggttaacatatttaaatttgctttttttctctttacctgaaggctctgtgtatagtatttcatgacatcgttgtacagtttaactatatcaataaaaagtttggacagtaaaaaa

SEQ ID NO: 82572 - DNA, 604 bp, Homo Sapiens
  misc_feature (41)..(41): n is a, c, g, or t
  misc_feature (147)..(147): n is a, c, g, or t
  misc_feature (216)..(305): n is a, c, g, or t
cagcatatggctagggaaggacatggtgtatataattgtanaatactgttctaaattattcaggcctatagtttccattactggagtcctccattgtgtggccacacagtgtcgttgatttaaaggagccagtgcttcccctctccncaggtagttggtcagctgtggactctgtgacctttgtctaaacctgtgttgtaagatcttgggacttcnnnnnnnnnnnnnnnnnnnnnnnnnnnnnnnnnnnnnnnnnnnnnnnnnnnnnnnnnnnnnnnnnnnnnnnnnnnnnnnnnnnnnnnnnnctgagtctcattttttaaaatgctcttttagaacgggaaacggctcagatcctgctgtggcacggggcctatgtgtctctgtcgcgtctgctgtgaagcacatgatgctctatttattgtagagagtgactttatttgctttctagaattgtttataacagatggtataagagaggtaataaacagagaaaaatctatgcttgtaaagaatacaaaagttaattttacctactataatatgactgtctgaaacttattttctctctgagaaataaatgttctaatgggcagtaaaaaaa

SEQ ID NO: 82573 - DNA, 726 bp, Homo Sapiens
  misc_feature (164)..(174): n is a, c, g, or t
  misc_feature (666)..(684): n is a, c, g, or t
gaatcggcacgaggagaaatcagagatgacacaaacaagtagaaaaacattatatgctcatggatcggaaaaatcaatattaaaatggccttattgcctaaagcaatttgcagattcaatgctatttctatcaaaattaccaatgaatttttcacaaaattagnnnnnnnnnnnctattccaaaattcatatggaaaaacaacaacaacaacaaatagcctggatagccaatgcaatcctaagcaaagagaacaaagcttgaggcatcacactatctgactttagactatactagaagggtacagtaatcaaaacagcatggtactggtagacgcacagaccaatggaacagttaagagaactcagaaataaagccacacaactacgaccatctgatctttgagaaagttgacaaaaacaagcaatggggaaaggattcattattcaacaagtggtgccaggttaactggatagccatgtaaagaagattgaaactggaccccttcctttcaccacatacaaaaattaactcaagatgcattaaagacttaaatgtaaaacctaaaactataaaattataaccctagaagaaagcctaggaaataccattatgtgatattggccctgatgaagatttcatgacaaaaactccagtagcaattgtgnnnnnnnnnnnnnnnnnnnttgataaatgagacctaatcaaactaagagcttctgcacagc

SEQ ID NO: 82574 - DNA, 1790 bp, Homo Sapiens
actttaaattttattccgtacaaacccacaacacacaacaaggatggtacgggtccggaattcttccaatcaagagcgctggcctttccttaccttgctacttctctggggctccaggtcctgcttgtgctcagctccagctcactggctggccaccgagacttctggacaggaaactgcaccatcctcttctcccagcaagggggctccagagactgcccacccaggaagtctggtggcctggggatttggacagtgccttggtaatgaccagggctccaggaagagatgtccttgtggctgggggcccctgtgcctgacattcctcctgactctgcggtggagctgtggaagccaggcgcacaggatgcaagcagccaggcccagggaggcagcagctgcatcctcagagaggaagccaggatgccccactctgctgggggtactgcaggggtggggctggaggctgcagagcccacagccctgctcaccagggcagagcccccttcagaacccacagagatccgtccacaaaagcggaaaaaggggccagcccccaaaatgctggggaacgagctatgcagtgtgtgtggggacaaggcctcgggcttccactacaatgttctgagctgcgagggctgcaagggattcttccgccgcagcgtcatcaagggagcgcactacatctgccacagtggcggccactgccccatggacacctacatgcgtcgcaagtgccaggagtgtcggcttcgcaaatgccgtcaggctggcatgcgggaggagtgtgtcctgtcagaagaacagatccgcctgaagaaactgaagcggcaagaggaggaacaggctcatgccacattccttgccccccagggcttcctcacccccccaaatcctgccccagctcagcccggaacaactgggcatgatcgagaagctcgtcgctgcccagcaacagtgtaaccggcgctccttttctgaccggcttcgagtcacgccttggcccatggcaccagatccccatagccgggaggcccgtcagcagcgctttgcccacttcactgagctggccatcgtctctgtgcaggagatagttgactttgctaaacagctacccggcttcctgcagctcagccgggaggaccagattgccctgctgaagacctctgcgatcgaggtgatgcttctggagacatctcggaggtacaaccctgggagtgagagtatcaccttcctcaaggatttcagttataaccgggaagactttgccaaagcagggctgcaagtggaattcatcaaccccatcttcgagttctccagggccatgaatgagctgcaactcaatgatgccgagtttgccttgctcattgctatcagcatcttctctgcagaccggcccaacgtgcaggaccagctccaggtagagaggctgcagcacacatatgtggaagccctgcatgcctacgtctccatccaccatccccatgaccgactgatgttcccacggatgctaatgaaactggtgagcctccggaccctgagcagcgtccactcagagcaagtgtttgcactgcgtctgcaggacaaaaagctcccaccgctgctctctgagatctgggatgtgcacgaatgactgttctgtccccatattttctgttttcttggccggatggctgaggcctggtggctgcctcctagaagtggaacagactgagaagggcaaacattcctgggagctgggcaaggagatcctcccgtggcattaaaagagagtcaaagggtaaaaaaaa

SEQ ID NO: 82575 - DNA, 1038 bp, Homo Sapiens
  misc_feature (110)..(120): n is a, c, g, or t
gatcttcaagacactgggctgtggatcaacccaaccaccactcctcttccaagaatcattttgacaggttcttttggaggaactccttctctttttaacccacccttttnnnnnnnnnnntggcaccaaagaaagacgtgaagaaacctgtggctgcggctgcggctgccccagccccggcaccggcacctgcacctgcccctgccccagccaaacccaaagaagaaaaaattgacctctctgccattaagatcgagttctctaaggaacagcaggatgaattcaaagaggcatttctcctgtttgacagaacaggtgattccaagatcaccttaagccaggtcggtgatgtccttcgagctctgggcacaaatcccaccaatgcagaggtcaggaaagttctgggaaaccccagcaatgaagagctgaatgccaagaaaattgagtttgaacaatttctgcctatgatgcaagccatttccaacaacaaggaccaggccacctatgaagactttgttgagggtctgcgtgtctttgacaaggaaggcaatggcacagtcatgggtgctgaactccgccatgttctagccaccctgggtgaaaagatgaaagaggaagaagtggaagccctgatggcaggtcaagaagactccaatggctgcatcaactacgaagcttttgtcaagcacatcatgtctatctgaatggagctctcaagaacaagcattgtttaggaagactggctggaaacttattttaatcacacccatgacaaactctccagatctgtttaccatcattcaggaaaacaaagcaatctggacggttcaagactgagcaactccctgaatttttatacatcttcagtttttctctgaattgaattcataccacacaaacaaagtgtctgctgctctagatgagaagaataaaatattgacaatctcaaatccaagcaccattctttattatctaccatgaatcaacaaacattcttaaaacaataaatcaataaacaattttggtcagtctggaaaa

SEQ ID NO: 82576 - DNA, 1402 bp, Homo Sapiens
gtggaccggtccggaattcccgggatccgcagccctagagccgcccaagggatggcgatggcgtacttggcttggagactggcgcggcgttcgtgtccgaggtcactagtttcccggtagttcagctgcacatgaatagaacagcaatgagagccagtcagaaggactttgaaaattcaatgaatcaagtgaaactcttgaaaaaggatccaggaaacgaagtgaagctaaaactctacgcgctatataagcaggccactgaaggaccttgtaacatgcccaaaccaggtgtatttgacttgatcaacaaggccaaatgggacgcatggaatgcccttggcagcctgcccaaggaagctgccaggcagaactatgtggatttggtgtccagtttgagtccttcattggaatcctctagtcaggtggagcctggaacagacaggaaatcaactgggtttgaaactctggtggtgacctccgaagatggcatcacaaagatcatgttcaaccggcccaaaaagaaaaatgccataaacactgagatgtatcatgaaattatgcgtgcacttaaagctgccagcaaggatgactcaatcatcactgttttaacaggaaatggtgactattacagtagtgggaatgatctgactaacttcactgatattccccctggtggagtagaggagaaagctaaaaataatgccgttttactgagggaatttgtgggctgttttatagattttcctaagcctctgattgcagtggtcaatggtccagctgtgggcatctccgtcaccctccttgggctattcgatgccgtgtatgcatctgacagggcaacatttcatacaccatttagtcacctaggccaaagtccggaaggatgctcctcttacacttttccgaagataatgagcccagccaaggcaacagagatgcttatttttggaaagaagttaacagcgggagaggcatgtgctcaaggacttgttactgaagttttccctgatagcacttttcagaaagaagtctggaccaggctgaaggcatttgcaaagcttcccccaaatgccttgagaatttcaaaagaggtaatcaggaaaagagagagagaaaaactacacgctgttaatgctgaagaatgcaatgtccttcagggaagatggctatcagatgaatgcacaaatgctgtggtgaacttcttatccagaaaatcaaaactgtgatgaccactacagcagagtaaagcatgtccaaggaaggatgtgctgttacctctgatttccagtactggaactaaataagcttcattgtgccttttgtagtgctagaatatcaattacaatgatgatatttcactacagctctgatgaataaaaagttttgtaaaacaagaaaaaaa

SEQ ID NO: 82577 - DNA, 802 bp, Homo Sapiens
ggggagcccccgcagccctagagccgcccaagggatggcgatggcgtacttggcttggagactggcgcggcgttcgtgtccgagttctctgcaggtcactagtttcccggtagttcagctgcacatgaatagaacagcaatgagagccagtcagaaggactttgaaaattcaatgaatcaagtgaaactcttgaaaaaggatccaggaaacgaagtgaagctaaaactctacgcgctatataagcaggccactgaaggaccttgtaacatgcccaaaccaggtgtatttgacttgatcaacaaggccaaatgggacgcatggaatgcccttggcagcctgcccaaggaagctgccaggcagaactatgtggatttggtgtccagtttgagtccttcattggaatcctctagtcaggtggagcctggaacagacaggaaatcaactgggtttgaaactctggtggtgacctccgaagatggcatcacaaagatcatgttcaaccggcccaaaaagaaaaatgccataaacactgagatgtatcatgaaattatgcgtgcacttaaagctgccagcaaggatgactcaatcatcactgttttaacaggaaatggtgactattacagtagtggggaatgatctgactaacttcactgatattccccctggtggagtaaaggaaaaagctaaaaataatgccgtttttactgagggaatttgtgggcttgtttttatagattttccctaaaccctctgaatttgcagtggggtcaatgggtcccagcctggtggggcatccttcct

SEQ ID NO: 82578 - DNA, 439 bp, Homo Sapiens
agcatttatgcagggtgatagcacactcagataagaatcgcatgacaccccacaacctgggaattgtgtttggaccaaccctgtttcggccagagcaggagacatctgacccagcagcccatgctctctacccagggcagctggtccagctgatgctcaccaacttcaccagcctcttcccctgatgcagggaaggaagaagagaaaacatatttccggtcatctctggtggtgagaggctggtgttctgttttgaggatatccctttaaatctcccaaatgactgtctctatcttcatgagtgtgacttgaggtgttgggatgggtgagggagcttctctaaagaggaaagtgagtggattaacccctgcttctcttcttgttccctgttatcattcctccccaacataataatacataaagtggcatggtaaaaaaa

SEQ ID NO: 82579 - DNA, 307 bp, Homo Sapiens
gcaacagcagcggcgacaccagcagggaaaagtgacagtgaaatacgatcgtaaggagcttcggaagcggctggtgctggaggaatggatcgtggagcagctgggtcagctctacggctgcgaggaagaagaaatgccagaggtagaaattgacattgatgatcttcttgatgcagacagtgatgaagagagagcttcaaaattacaggaagctcttgtagactgctacaaaccaacagaggaatttatcaaagagctgctttctcggataagaggcatgaggaaactgagccctccgcagaagaag

SEQ ID NO: 82580 - DNA, 766 bp, Homo Sapiens
cctctgcagagagaatggccagcaggaaggcggggacccggggcaaggtggcagccaccaagcaggcccaacgtggttcttccaacgtcttttccatgtttgaacaagcccagatacaggagttcaaagaagtctctcccccacctcccaccttccctagagctgggggctgctcccacctgaaggcccccatcccacaggccttcagctgtatcgaccagaatcgtgatggcatcatctgcaaggcagacctgagggagacctactcccagctggggaaggtgagtgtcccagaggaggagctggacgccaatgctgcaagagggcaagggcccactcaacttcaccgtcttcctcacgctctttggggagaagctcaatgggacagaccccgaggaagccatcctgagtgccttccgcatgtttgaccccagcggcaaaggggtggtgaacaaggatgagttcaagcagcttctcctgacccaggcagacaagttctctccagctgaggtgaggctgcccagccccttcaatactcatccccagcaccttctctgggccttcacccatgacccagagcccagtaccagtgaggcagttgctggaagggtggagcagatgttcgccctgacacccatggacctggcggggaacatcgactacaagtcactgtgctacatcatcacccatggagacgagaaagaggaatgaggggcagggccaggcccacgggggggcacctcaataaactctgttgcaaaattgg

SEQ ID NO: 82581 - DNA, 607 bp, Homo Sapiens
  misc_feature (13)..(13): n is a, c, g, or t
cctctgcagcagnagtaatggccagcaggaaggcggggacccggggcaaggtggcagccaccaagcaggcccaacgtggttcttccaacgtcttttccatgtttgaacaagcccagatacaggagttcaaagaagccttcagctgtatcgaccagaatcgtgatggcatcatctgcaaggcagacctgagggagacctactcccagctggggaaggtgagtgtcccagaggaggagctggacgccatgctgcaagagggcaagggccccatcaacttcaccgtcttcctcacgctctttggggagaagctcaatgggacagaccccgaggaagccatcctgagtgccttccgcatgtttgaccccagcggcaaaggggtggtgaacaaggatgagttcaagcagcttctcctgacccaggcagacaagttctctccagctgaggtggagcagatgttcgccctgacacccatggacctggcggggaacatcgactacaagtcactgtgctacatcatcacccatggagacgagaaagaggaatgaggggcagggccaggcccacgggggggcacctcaataaactctgttgcaaaattggaaaaaaa

SEQ ID NO: 82582 - DNA, 417 bp, Homo Sapiens
  misc_feature (330)..(330): n is a, c, g, or t
accccgacggcctcggctcggaaggcgcgggggctgcgcacggagccgctggacgaggtgctggcacgagggggcccggcggcctccacgctgtggtgccgctgcaggctgtggccgaaggcgtccttgtacccgggcgccaggaagccgtgcttggcggccagcggctcggacagcagcaccagcggcggctccgcgacggacacgggccccgacttgacgccctggaaggaggtggactcggacttgagcgcgtcgatgcagttgttgatgatctggttgaccttgtccacctccttggcgatggtggagatctcggccaccgaactnctgcctgtcggggcccggccggcccagctcacagtccctgcgttccggagggtccccggttcgaacctccatgtagctgcccttgct

SEQ ID NO: 82583 - DNA, 476 bp, Homo Sapiens
tttctctctaaaaataccttttattgactgtaatattccactgtatggtccacagtgtatataaccaacaactcaccgttgcgcatgtaggctgccggtggctttctataatcaaatcaatattgttctggggcatcacaaagaggaagggggtcccccggggttatgcaatgtggctgctttgactgtactggacataaaaataagtaaaatgttcttcattttacttaaaatgtgtctttaaataaaatttttttctctaggtttctaaaatcaaattactgggtgaaagaatagagctgttttaaagcacgtgtgccatatggccaaattattttcccaagggttcagatcaattgacacgatatcggcacttaccccctccagcattgggtaatgccatttttttctttctctgctaatttgaaagacaaaataacatttcctttaaaacacacattcgaccgggcaggcca

SEQ ID NO: 82584 - DNA, 339 bp, Homo Sapiens
gaagcccaaactagtgagagtaatatctaattatctcattttttgtaggtctgtgataaagaacttagtcatcccttccacctcctactgtgaagaacagaccctgggtcccacactgaaatcccctctagtcacccattcccaccccccagggagctgcctcccaggcagggggtgcagaaaatgattgatgggctggggaaccctggagagcctcgactccggaagtctcaaggtgcctcctcctctccttagctggcccgttggttttctgagcagggggctgaactgtgaacaagtcagacaaataaagcaagggtctgcaccatctgcaatgtc

SEQ ID NO: 82585 - DNA, 339 bp, Homo Sapiens
  misc_feature (33)..(33): n is a, c, g, or t
gtgaaatctgagaaggaaatcatgggaacctcntgctgtgtagccacgtccagatagaagattctcttctaggtctagacttgaagcatatggaagggtccttgggctagagccaacccaagcccaggctgactcccttttaatacttctaattttccctgaagatctggtcttctccctaccaccactaccctattacataagaggaaaggattggagaatgttcttgaaaagaatgtgatgctttcccatacaaggaatatactcaaggaaaaatttcatggcacaaaatgctgattctgtccaatttatcccatgaataaattgtgtacacataaa

SEQ ID NO: 82586 - DNA, 703 bp, Homo Sapiens
ctcgtgcgttctggatgtgctccctagaggctgcgcctgacacagggagctgtgtatacatgatttattaaaaggaaatcctcttaggagaaacatattagcaggataaacacaagaaagaatgcagttacaagtggagtctcaatcaatcccagaggaaattctgggacttcagcctcagcttgacctatgggggggctctggaatgtcagatttctcctgatcccaactgtgctctggggcttccattgcagccaagagagagcattccccagaaaactccaggtgaggagtctccagtggcccaagggtgatcctccagaggaggttacactgccgaactgggacattggcaccctggatttgaatatctagagagggcacccaatggtcatactaatgtttgccataacagtctcttctaggtctagacttgaagcatatggaagggtccttgggctagagccaacccaagcccaggctgactcccttttaatacttctaattttccctgaagatctggtcttctccctaccaccactaccctattacataagaggaaaggattggagaatgttcttgaaaagaatgtgatgctttcccatacaaggaatatactcaaggaaaaatttcatggcacaaaatgctgattctgtccaatttatcccatgaataaattgtgtacacatatatatatgaaaaa

SEQ ID NO: 82587 - DNA, 505 bp, Homo Sapiens
  misc_feature (205)..(220): n is a, c, g, or t
aaaaacagataaaacatggacaatggcagaggacttttttggtcttttagtattgaacatgaaatttgtatttaacactgtatcatttatcaggattcattgatcaaatatttcaacctttcatatttttaagaaaacacccatatatattgaaatgcaaacttaaacatattctgttcacttgagtgtaatacttgatgcatgnnnnnnnnnnnnnnnntaccttctttatagctacaaagtcagggcgttcataggcaaaatctgacaagactgaaacaatggggagattatctttcaattctgaaaaattctgtgggtggcctgtctttaagcaatgcttttctcttgtgagggaagactgtaacacagctgaactatttcagtgtcaactattcagaattgaaaatgtaaattaaaatttccacaagcattgcttcagaatgaatttgtacctataaagcataaggcattaaatgacaataaaaattccaaatggaaaaaa

SEQ ID NO: 82588 - DNA, 536 bp, Homo Sapiens
tacccccccggcgtggtgcttagcccaggactttcagacgcggccgctggccgggaggctttggtgggagagacgcgatcgccgatttcggtctggcgccccttctgcggccgggacccaggcctttcacatcagctctccctccatcttcattcataggtctgcgctggggccgggacgaagcacttggtaacaggcacatcttcctcccgagtgactgcctcctaggaggacatttaggggagggcagaggcctgcagtttggcttcacggctggctatgtggacagcaagagtcgttttcgcggaagccgactggcagccaggcctgtcgggccccccgacgccgccccatttcccttccagcaaactcaactcggcaatccaagcacctagataccagcacaagtcggttaatccctgtctggactgagcctccgttggcttctgaactggaattctgcagctaacccttccacgactagaaccttaggcattggggagttttagatggactaatatatataaaggattagt

SEQ ID NO: 82589 - DNA, 789 bp, Homo Sapiens
tgtataacaaggctgggattacaggcatgtgctatcattctttttgagcacaggaggaaactatggctgatctgctcattttactgtcaaaaatataggcagcttttgtattgtaacattatccccttaacagctgtccaactggtctatacatttcacctaacatatggtaaatgttcctactgttggcctttcctgagcctctgtccattcaactaaggccactgcaatgggattgtatgcagttcagccaagaaataaatgtgaggtgcaactcacattttttaaatgtttcaaaattaagcatttaggtgcttttattcataaacatgactttgcaaatattggtaaacagtttcatcataagaccttgtcagtgactcacaatgtcaatggtgaacgcaaaggagaatctgtcttttctggaacaccaggttcaggtatcagtttcaactatgcttataatttgtgctctaaagtccacaaagctaaattatctttcccctaaaaattgagtactcatatccttaaaatagcttggaaattagattaccttatgaatacagcatagcatgtcacataaacgtttttctactgttatacctttttggtgggaaagactattttgcaaaacatttttcttgtgttcagtaattaatgggaaaaacaaactctaaaagaaagagacagttatgtcccaaaaatacaggaaaatggaagaatggaaacagggaagaccaataaagaaaaaaatagaggaaattacaagtaataaactgaagtcatact

SEQ ID NO: 82590 - DNA, 560 bp, Homo Sapiens
  misc_feature (485)..(497): n is a, c, g, or t
ggggcactctgccggcaacgccgaggcgcttctgcatctgtgggccgagcattcttcaggtcatctgaaccttctgagaaaacatggtcaacgtcttgaaaggagtgcttatagaatgtgatcctgccatgaagcagtttctgctgtacttggatgagtccaatgccctggggaagaagttcatcattcaagacattgatgacactcacgtctttgtaatagcagaattggttaatgtcctccaggagcgagtgggtgaattaatggaccaaaatgctttttcccttacccagaaatgaaaatactcaatatggaccatttaggaattataagcagcaactgtgaaagacttgccactcaatatcttaggtgactgattagacatagagggttgttttaggagcatgccacgggaaagactgagggatcatgatcatttgttcagaaaaaaagcccctgaactgattttgttaccatagaatttnnnnnnnnnnnnngctttaacagttggctgtaatttggcttttattatcctttattaaaatacaaatgtcaatgct

SEQ ID NO: 82591 - DNA, 459 bp, Homo Sapiens
tgaaagagcggaaaaacgcgagaagcggtgttccttctacacagaggctagagtgcggatcggctgagtcggctgcaggcgcccctgcctccgtcagcgtccaggccgaaagaatgagggtcgtgatcaactcagtatgccactggaggctatatgagtaaacagcaaaccgtttctcatgaaagcaggatgttggcaaactgacaaactgcgtctgccacccagaaggaatgctgaaggcagtcacgacccaggcacaagtgtttcttgtgattaggcataattgaagcctgttaacaataatgtgaacttgtgatcaattaagcagctgaccagtcgttacctcctcctccctttcatcctacccaataaatgtggagggctgtggaagctcaggggctgcctttgctcactagaagcagggagctctcttcttccccagttcgccttctttaaaac

SEQ ID NO: 82592 - DNA, 862 bp, Homo Sapiens
aaggttcaattcagtacatccataaatcgacagaatgaagaaaacataacaaaaagccacctattccttcctcttgctcccttattagctaaagtaaaatttacatctgtaagacttactgagttgctgccaaaatggaactgaattcttaaaagcaggaacgtgcctatgtgaaacattagaaaaccaaaataaatgggaaaattcagacttgaagagctgaatcatgtgacaacaaagtactgatcttaattcagaaaggctacttggagaaggtgtatcttaaggggtaaaaaacctgtgggttaccacatattaacagggaataatatcaacagaggcacccataagcaagcaagacacaactgagacagatgtaccaggtgaaaaaaatcttcagtatggatacacatgggtattctgaaggctacaatgaatggtttagtctttgacataaggaggatgaacatattatttatactgtgtaatctaatctggcttctatggggaaagcaacatgtacataagtgaattttctacatgaagtgggctacttctgattttaatcaaagctataaaatagattgtatatttcactagcttcttaaagtaactcttccattttcatttatctctaaaaacagttaacttcctgtgctctaggaaatgcaccaataccaaaggtcaatgtggaaatatgggcatgtttgcccctatgctgtgtggtctctagatttctatatttgctttgcttttgtctgctctagtaatctccctccttttgatctgtggcctgggaaaatgtggggtctttgtatttcaaataaaagtaaaatagttttttgagtggttcactcaagaa

SEQ ID NO: 82593 - DNA, 878 bp, Homo Sapiens
  misc_feature (593)..(626): n is a, c, g, or t
tttgaatagttggactttgactcatcacttgtgaataataggaatatattttgcagaatctaacataatacccttaaaattcatactggacaaccatcagtgtgatgtatagtatctggtgtaaacaaattttattcagcatattaaattattctgtgttttgcttttccttgatatgtaggaggtgcaccagtaccagtttttctcttgtggtggcttaaaacgctgattgccatttgcattgtctactgaaaagctgtggcagcgagtggtattattgaccatgtgttctcatgtctttttgcagatttaaaggttttattgtagtgtccatttaatatctgcatgtgtgtttaatctctgaataccatgtaattaaactgattaacttgtgatggtgatggtgattagcacacactaaaaacccaatgaagcaattgtctccctcttcttaactggaaatcacacttgtgaggtatggtatccattatcaacagtggattcatgattgacttcatattttgtgtatctggttataaattttgtatagcatttaatttggcacttaatataaatccatttgatttgaatannnnnnnnnnnnnnnnnnnnnnnnnnnnnnnnnncactttagtttcgtgagccttgggaaactgattctacaaatatcttatatagagataaatgtatcaggcatttttttgcaaagcgatatatacattcctcttatttattaaatcactggctttggtgttatgtagagatatttgtagatctcagaacagaattaaaatattgtgaaaattacagcttaataaatgtttattgtaattttgttgtatggacttttaaaatatatctcatcacttctaaccaaa

SEQ ID NO: 82594 - DNA, 678 bp, Homo Sapiens
  misc_feature (64)..(94): n is a, c, g, or t
ttaccaatctgagtaagtttcaaagagtggagttttctggctgctgccaccaccagctccattnnnnnnnnnnnnnnnnnnnnnnnnnnnnnnngagggaattccattaattttgtttgctttttagcactttcgggacctgattcatcaaagcgaaatctgacaattctgaaatctttacaataaataattaactctgttggattaaatttcagtttctggttggggcctaggactttctgcttcctcttgtggtcgtttactgtgacaatttgttcaatacatgttaaagggacatcgtgttcaccaagaagaaggtttctgtaatggaatttctgtaatggcattgggtcatctgtaataaaggagattttgaagttactgcatatcagctttccccacaaatcgtactggcttgtgtctgttgcaatgcattttctcacaaaattgacttcatttacgacaatttctcctggcaaaaggactggctccagttttttaatcttcggttccgaattgatcttatcgtcagtctggggcggtggcaggaggtaggacctgaaggtgggtttgggcggcttgagggagaacatggtgccgccgccttttcgccccgttcccgtcgcgggccagtggcagcgccgacgcctccgggcgtaaagctctcagtgcggccgc

SEQ ID NO: 82595 - DNA, 1520 bp, Homo Sapiens
cggtccaaggtagcgaggcctgggtggcgaattcggcacgagggccagtgcagctgccgtgcaaacacaacttctgccggggctgcatcggcgaggcgtgggccaaggacagcggcctcgtacgctgcccagagtgcaaccaggcctacaaccagaagccgggcctggagaagaacctgaagctcaccaacatcgtggagaagttcaatgccctgcacgtggagaagccgccggcggcgctgcactgcgtgttctgccgccgcggccccccgctgcccgcgcagaaggtctgcctgcgctgcgaggcgccctgctgccagtcccacgtgcagacgcacctgcagcagccctccaccgcccgcgggcacctcctggtggaggcggacgacgtgcgggcctggagctgcccgcagcacaacgcctaccgcctctaccactgcgaggccgagcaggtggccgtgtgccagtactgctgctactacagcggcgcgcatcagggacactcggtgtgcgacgtggagatccgaaggaatgaaatccggaagatgctcatgaagcagcaggaccggctggaggagcgagagcaggacattgaggaccagctgtacaaactcgagtcagacaagcgcctggtggaggagaaagtgaaccaactgaaggaggaagttcggctgcagtacgagaagctgcaccagctgctggacgaggacctgcggcagacagtggaggtcctagacaaggcccaggccaagttctgcagcgagaacgcagcgcaggcgctgcacctcggggagcgcatgcaggaggccaagaagctgctgggctccctgcagctgctctttgataagacggaggatgtcagcttcatgaagaacaccaagtctgtgaaaatcctgatggacaggacccagacctgcacgagcagcagcctttcccccactaagatcggccacctgaactccaagctcttcctgaacgaagtggccaagaaggagaagcagctgcggaaaatgctagaaggccccttcagcacgccggtgcccttcctgcagagtgtccccctgtacccttgcggcgtgagcagctctggggcggaaaagcgcaagcactcaacggccttcccagaggccagtttcctagagacgtcgtcgggccctgtgggcggccagtacggggcggcgggcacagccagcggtgagggccagtctgggcagcccctggggccctgcagctccacgcagcacttggtggccctgccgggcggcgcccaaccagtgcactcaagccccgtgttccccccatcgcagtatcccaatggctccgccgcccagcagcccatgctcccccagtatggggggcgcaagattctcgtcttgttcttgtggaccaactgttactgttcttccggtggcaaccatgggcggccacaggcctaaccccggtccgggcatttccctggaacagtgcctcgcaggagtactcaaaaccgggtcccgggcaaaaccttccgggtcccagtc

SEQ ID NO: 82596 - DNA, 1218 bp, Homo Sapiens
  misc_feature (1033)..(1033): n is a, c, g, or t
  misc_feature (1074)..(1074): n is a, c, g, or t
  misc_feature (1129)..(1129): n is a, c, g, or t
  misc_feature (1166)..(1166): n is a, c, g, or t
  misc_feature (1203)..(1203): n is a, c, g, or t
agagagtaatgaagtcgacggcgcgccgaattcggcacgaggcgggcacgcggaaggcgctgctgactgagcgaccgtcggggccggctggggccggagctcggggctcggtgggcctacagcggctccggacggacccccggggctggggagtcggggaggcctgccccggccccctgcccgcggccgccatggcggagaattggaagaactgcttcgaggaggagctcatctgccctatctgcctgcacgttttcgtggagccagtgcagctgccgtgcaaacacaacttctgccggggctgcatcggcgaggcgtgggccaaggacagcggcctcgtacgctgcccagagtgcaaccaggcctacaaccagaagccgggcctggagaagaacctgaagctcaccaacatcgtggagaagttcaatgccctgcacgtggagaagccgccggcggcgctgcactgcgtgttctgccgccgcggccccccgctgcccgcgcagaaggtctgcctgcgctgcgaggcgccctgctgccagtcccacgtgcagacgcacctgcagcagccctccaccgcccgcgggcacctcctggtggaggcggacgacgtgcgggcctggagctgcccgcagcacaacgcctaccgcctctaccactgcgaggccgagcaggtggccgtgtgccagtactgctgctactacagcggcgcgcatcagggacactcggtgtgcgacgtggagatccgaaggaatgaaatccggaagatgctcatgaagcagcaggaccggctggaggagcgagagcaggacattgaggaccagctgtacaaactcgagtcagacaagcgcctggtggaggagaaagtgaaccaactgaaggaggaagttccggctgcagtacgagaagctgcaccagctgctggacgaggacctgcggcaggacaggggagggcctaaacaaaggcccaggcccaagttcttgcaccgaaaaacgcagcgcaagcgctggcaacctcgggggagccgcatggcanggaggccaaagaagctggctgggctccctgcagctgctccnttgataaaaaaacggaaggaggtcagccttcatgaaagaaccaccaagtctgtgnaaatccctgaatgggacagggacccagacctggcacngagcagcagccttttcccccccactaaagatcgggcncacctgaaactccaa

SEQ ID NO: 82597 - DNA, 1496 bp, Homo Sapiens
  misc_feature (84)..(118): n is a, c, g, or t
  misc_feature (1421)..(1438): n is a, c, g, or t
aaaagatgtataatcatatagggcgctagctcgttcgagccgaacgacgagcgcagcagagtcagtgagcgaggaagcggccgnnnnnnnnnnnnnnnnnnnnnnnnnnnnnnnnnnncagtcgacggtaccggacatatgcccgggaattcggccattacggccggggctgctgctgaaagtaattcatttttctttagtacaagatatggagcaattttacgaactatggctcaagagtcaaaaaacatgaaaaaagtgaagacatagccagtcagtcaaacaaggaaaatggaaaacaaattcacatgccaacagattatgctgaagttacagtggactttcactgctggatgtgtgggaaaaactgcaacagtgagaagcagtggcagggccacatctcctccgagaagcacaaagagaaggttttccacaccgaggacgaccagtactgctggcagcaccggttcccaacaggctattttcagtatttgtgataggtatatgaatggcacctgcccagaaggaaacagctgtaaatttgcacatggaaatgccgaacttcatgaatgggaagaaagaagagatgccctaaagatgaagctcaacaaagcacgaaaagatcacttaatgggcccaaatgataatgacttgtggaaaatatagtttttgtttaaagatttaaactaatatgctggcttttatgtatgatacctaatcagagcattgaccagaaaaattgaaagtgtcctgaggcacatagcagaggagctgcagatttcctgcttgtattggcgtatatcgttcctcctgagcagcaacccacagtaggtaggaaaatgggctgtttcacaggcctggccacgctctcacggaaccactggcatcagatggtgaagtgactgctacccggttgccatctgttgaacagacttttggatgaagtgtgttggggaagaggataaggttatatctaggacaactctttgagttggtccttcatataagaatcgtgacggtaagagaataaacacttgtactgggatcagaatacatgatggatgaaattctttacatgttttagcagaatgaatttgtttaatataataaagtttgctacttatctgtatgtaggttgctaaaaaggattttcttaactcagattttaagccaaataaccatttaacactagtatttgttaaatgggttatttttctgtatttgtatgtttcactataataagggaattaaggataatgtgcattgagaatattttgaaaaataattgactcaaattttatttcttggtcttttgctgtttaaatgatgattttgaaagattaaacctgtactgttggtattgtgttagtgtatggaccaatactgcctgtaataaagattttatatatagatgcctttcnnnnnnnnnnnnnnnnnngaccgcgtatgcggccgcaagcttattccctttagtgagggtaattttagcttggcac

SEQ ID NO: 82598 - DNA, 689 bp, Homo Sapiens
  misc_feature (214)..(214): n is a, c, g, or t
  misc_feature (227)..(227): n is a, c, g, or t
  misc_feature (234)..(234): n is a, c, g, or t
ttgggaccggcccttctcaaccctagagcttccaggagaaacgctactacagcaatgtgctctgggcacctcgcaggggtccggagttcacatcccgggcctatcaaatgcctgctcaggggcagggacacagcttctgaatctgaagcttgggctgaggtccagagacagctcagcattgtgttgacagccctggagggtgcgcaagccaccntgaggcttgtggntgacctntgaccccagccttcttttttcagccctccctttactccaaccctctcctgcctgctttcctgaaatgtcctggtcttccttggtgccagaagagggcactaccacaggaccctctcaagcttctcaggcaacagcttgaggtccctgaggggagtggcaagccctaatgcaactcaccctcatcctggtgcttaggtggcagagggtgggcagcaggggacagggatgggatggcaaaaccaccaactgcccttggtggcaggtgggtggagatgggatgcgtgccaacctcagatgccaactcaggtcatcaaggccaaggaccagtggcgaaagtgagtcttggggtaccttaggccttggctagtctgcgttcctctccctgcatgctgtgtatcctaactccctacaacagcccctcaaataaatcacatctagtgactggtaccaacaaa

SEQ ID NO: 82599 - DNA, 1519 bp, Homo Sapiens
cagtcgacggtaccggacatatgcccgggaattcggccattacggccgggggagaaggaggggaacttaaaccttgcttcctgctctgtctttctcagaaaaccaaatatggcatcttccatgaggagcttgttttctgaccacgggaaatatgttgaatctttccggaggtttctcaaccattccacggaacaccagtgcatgcaggaattcatggacaagaagctgccaggcataataggaaggattggagacacaaaatcagaaattaagattctaagcataggcggaggtgcaggtgaaattgatcttcaaattctctccaaagttcaggctcaatacccaggagtttgtatcaacaatgaagttgttgagccaagtgctgaacaaattgccaaatacaaagagcttgtagccaagacatcgaacctcgagaacgtaaagtttgcttggcataaggagacatcatctgaataccaaagtagaatgttggagaaaaaggagcttcaaaagtgggactttattcatatgattcaaatgctgtattatgtaaaagacatcccagctaccctgaaattcttccatagtctcttaggtaccaatgctaagatgctcattattgttgtgtcaggaagcagtggctgggacaagctgtggaaaaagtacggatcacgctttccccaggatgacctctgccagtatatcacatcagatgacctcactcagatgctggacaacctagggcttaagtatgagtgctatgacctttgtccaccatggatatatctgactgctttattgatggtaatgaaaatggagacctgctttgggattttttgactgaaacctgcaactttaatgccacagcaccacctgatctcagagcagagcttgggaaagatctacaagagcctgaatttagtgctaagaaagaggggaaggttctttttaataatactctgagtttcatagtgattgaggcataactatcaatcacaaaagtatattcaaaaattatattttgaacaactcgaatcactcatttatttccatattaaaatcacaaactcatccattaatgtagataaagcactgtttggatatgagatgtagcaaattccaatacattattggacttccatttggaatcatatgggatactgctggtcttatcctgtccctcctccaggtagagagaccacaagcaggctcaacataacataagctagaaaaattagatgactgaatttctatggcatattgataataaaattcattccatttgctgattgtctgaaattttctagaatactaataaaatacatactatagattctttattagtgaagtatgcactaatcaatactttgaacacaaagcctgtgttactgatttggccgttttgtgaagaaacatttatctttgtacgttcttctattgtgctttctatctaatttttattaatttgtaagagtaagcacctttagaatattaaaaattaattctttatcacatgttg

SEQ ID NO: 82600 - DNA, 667 bp, Homo Sapiens
tctaggcaggctgctgcactgctggtgctgctgctgttaatagacgggggctgtgctgaagggccagaaggccagcaggaagaccagctctccgcggtgagtgtgtgtcccatccccatatcaccattgcctctacttcggttgagacttgtgctctaggttctgatactttctctggctgccaaggttgtcattaggtcctcacatctgaggaaatggttccgcagcctcctaccacttgcccctggaagccagtcccttccccttgtgacttacgtgtccagggtatttgcccatcttccttccctgatacccccttggcacaggaggaagacagcgaacccctcccaccacaggatgcccagacctctgggtcactgttgcactacctgctccaggcaatggagagacctggccggagccaagccttcctgtttcagccccagaggtttggcagaaatacccagggatcctggaggaatgaatggctgagtccccgggctggagaggggctgaattcccagttctggagcctggctgcccctcaacgctttgggaagaagtgacatgtcatcccttgatatgtctgcatgcaaggtccacacccaaaagtgtcaatgtttgccccccaaataaaattgtctggcttctgaaaaaataagaaaaa

SEQ ID NO: 82601 - DNA, 495 bp, Homo Sapiens
ggataaccctatgtctcctcccccagaatccttcagtggctctcatcaccttcaggaaaagcccaaactccttccaccctccaggttcctccctccccacgaggctttgttctcctggggttgcttcctggaccctgaacaagttgtgctctcattggccgggcctggccagcagtgcacagtgcctggcaggttgactcttaccatccccggggctggccccgctctcctccgagacccaggctgagcccagtcccctcacccttccttgacttacctccccacctgaggctgactttggggttcccagacaccctacccacacacatgccttgatcatagcacttgcctgcgcttcttcagagtcattaatttgcttctcggcttccccactggactgtgagctgcctgaggtcagggattgcgctttggatggtttccagcctgagcctggtgcttgaacagacgtgtgcaataaataatcgttaaatgatg

SEQ ID NO: 82602 - DNA, 497 bp, Homo Sapiens
  misc_feature (14)..(14): n is a, c, g, or t
aacatttgacaccncagcaatgtgtgactcccccaacattccactatgccatcctgcagctgaaatgggaacactggctgcctctccaaacccgctcttggacagaggatctgggaggtggaagccaggccagaggacttggggaaaatgagatggaggaaggaaaaagggagaagctgagccacagcttaactcctacagagtgaaatgaaaacgggctgaaaataccaccccaggagaggacctcgccccaagcaagccagtgagcagccctgccagactactgccagactgagaaacccagaagctggtagtcatgtgggcttgccttctctgccaaacgactgggaaaccaaaatgagcccaccttgtgttcttcctagctccaccctccccgtgctgctgtgttctgctcctccccacgcttccctgctatagttcccagctgctgtaacggagccacctccaactctaacaataaaccaagttcattgcaa

SEQ ID NO: 82603 - DNA, 818 bp, Homo Sapiens; identical to SEQ ID NO: 3596

SEQ ID NO: 82604 - DNA, 698 bp, Homo Sapiens
gctggtcctaaacatttcaaggatgtaagtctttgttttaatataactttatttgttttccaagtagatgataatattcaaaagcaataatgtatatgatatctataaaggaagcaaaattaagtcatacactgattccactgtaaacaatctgtccagaattccagacaccttcagcaaactttttctgtaaaggcctgatagcaaatatttttgtggtgggttgaatttggcttatgggttatagtttgctgacacctagtttagagggtgtgtaaaactatcttcataactttgagatttttataaaattttacatgaaaatatactgataaattatatgcacatattttctaccagtagcattatagtggcatcatagaagaatatttaccaatgatggggaaactgtaaaactacagtatcaaggcatacaacttaaattccacttggaagattgtaaagtgtcaaagtattttaatgataatttaatttgggcttttgaaatgttcttctacaaatgaaaaagatgtttaaaaacgttacaagggaagctatgccttctgaagtctatccttagttgaaacagaaaataaacacaaaggtacaagatccttaaattattttgaaccacagaggttgaaattgttttgtgatcttcagcagaaataaaatctgtacatgattttcttttaaaa

SEQ ID NO: 82605 - DNA, 511 bp, Homo Sapiens
agacacaaaacatttttctcaacatttgtacagttctgaaaaaaacctggtcaccaaaaatatcttctctgctaattcagcaattcttgggctccagttaggggagctggggcctcactttctcccagaattgtgggcttcactggaagtgaaggtgcaggaatgactggactgtccaccccagccctgcctgcctgtggttttggccagggagcaagccatgaggtgccctggcacatgcacaaattgatcctttgcgtgacagtcttgtatggaaaacagatgctgacagaattgtagactaccatgccacacaaaaaggctaaatatctactccaatgggtttccagttcagtttgaagtcaatcaaatttttgtattttcggtgtctccttgattggttttgctagtaattctgtaaattgtacatttgcaatatgaggttttttttccttttgtacaatttgaaactgatgcttcacctttcctttaataaactattcaaaatcag

SEQ ID NO: 82606 - DNA, 555 bp, Homo Sapiens
gcggccgcgggctccgcggcggaggcatctttcacagaatccggcggggtcctcgcaggggcgagctccagctccgcggcgtcactacccggggcattatccagctcctccagaagctgcggtccggctccgcggttccaccaccacggccgccatggaggcagcagccgcccggcctcaccgcggctcagcagccgctcgaaggcagctttttcgcccggcgccagccgctcccagagtcccgataggccgccgggcgccgggccggagctgaggcctgcttccccaggctcgtcctcggtctcgcgttgctgacgcagccggcgtagggcgcttgctaggcggctgggaggagcgctgcaaccgcggagctctcccagcacctggtcacggtagaagttttctgcgcaggtgccatgcgtccggtagcagcgcagcgagcagtagggcgcattacagcgagggcaggtgtaacgcgctggctggacctcccccgccgggcagaagccacagggcccggccggctccatggcaactggcaccgcgatctacctg

SEQ ID NO: 82607 - DNA, 608 bp, Homo Sapiens
  misc_feature (47)..(47): n is a, c, g, or t
ccacgctcccgcaccgtgatgccgaggccaaatggctagagtgggcncaggcatcagcatttctgtttggcagccgggcagttgtggtgcacgttttgaggaactactaaagcctgcctgtgatgaaaaaggcaaaagctgacttcaccaaaattactcccagggagacttctgcatttggctggaaggacatttgagtaaaccgctgaggctggtggttgaaacataatcctctaagggagatcggttccgataccctgagttagggacgcttgcctgggcagagctaaggggagaatgatcaaaagccaagctctgtccccgtcagcacgtcaccctccctcactgtaatccctgactgttttctctaaatgaagaattatttagagaatataaattagaagggccgccacgtcagaattgcctgagtgggagcagtctttccagcctcgaaaaatgtttaaacaatatgcagatgacctagcacaaataaagaatgctagcaaccgctgttatgtgtgagcggtggaattgggagggctcttcccccaatcttcatcaaacagagtaaggtttagaataaaaataatgaaatacagtctttcaaa

SEQ ID NO: 82608 - DNA, 1352 bp, Homo Sapiens
  misc_feature (1292)..(1300): n is a, c, g, or t
tcgcatctgtacctatgacagtcgtacaaaaagcaggctggtacggtcggaattcccgggatatcgtcgacccacgcgtcgagcaaaggcctacaagtggtgtgggaatcagggaaaggctgcctctttggtatctacaactggtattgattattgctatcaactatttggggagaaaaaatcaaaatgaagccctgtcaaattttagaagtactatctttggtccttcaaacactttgtgatgacaccttaagaaaaataaagttgaagttcaggtcttgccattgccattacagacaaattaggagacttggtttacctgggaacaaatttacttgaatattcagtacctgaaactatgccaaaccaaagagcagctgcagtacattcgttattttaaatgaacaagtttacaaagtttattttcatctatacgtaaggatgatttttttaaaactttttacatattagtggttatgatccaatgtgtcatgagtgaatttaactgtaaggtggtttaaatcaaatatgcaatgtttacttgaattgtatttctattagcagattttgactatgtttacaggacggtttaaattaaggattatcaggcatgtgagatctttcagttatctttaaagtagatgtatattaagggcttagatttaggatctacatattctgggcattgaataggcagtaacttacaaataagtttgcttacctttgttctagggactagcactgctatcaatggaaagtatttttaactaatctgttattaagaaagtcatatttttgcatttcagccaaaataaagaccgcctgtaataatctgttagaaacagataatacatgtctgaaatccatatgtttcatatgatctaaactgtattttccaatttaaattaaaaatgtaatgtagattcagaaaggttcatatttttctaatgacttcattctatattattttgttaggttgcataaagaagcaaggaattgtacttgtattaaaagatgaagaaagctattaggtatatttgtacatgactgcaaatgagtctatgcccgtttaaaagaaaagatggacactattttaaagtgagctttaatatgcttttatataaacaaatttgaagtacagtttagtttggttgtgtttacctaacaagtaccataagccttgtgtttgttcttatttgtataatcctagcctgtgacttaatgttgatgctttgctttgtcttttggctggcctaacctacattgacatgtacacagaacattttaaaacnnnnnnnnncaaaagtcataatgaattactttattaataaacaaagtcttgtatttgaaaa

SEQ ID NO: 82609 - DNA, 463 bp, Homo Sapiens
  misc_feature (52)..(52): n is a, c, g, or t
tagtcagtcacggtctggaagtactgagaaaccaggctctccacacatggantccagaattcaccctctcccctgcagtctgggttcccagactgagtcctctccccaaatcagggctctagacccgagccctccaaacctggactctgggacttaggcccccttaaatctagacttctctttataggtttcaggtctcctatgggtgcctgggaagtccttgaaagtggactgttctcaggcttgacctgccccaccccatccccgcggttgaggctgtgggggcagcagatcaggagcccactgataaggggccctagggtacagggtgctgcccagcaggtcgccaccgagtgtcttctcattttatttcagctccattttgcccatagatgggcagaggggtgagattggctcatcccccttccagattctgcaataaagcggtgtgaggaagcagggg

SEQ ID NO: 82610 - DNA, 1032 bp, Homo Sapiens
  misc_feature (980)..(980): n is a, c, g, or t
ttttttttcaatgtgtaagaagtactttaatagctcaaactcagagtcatcgtgctcccaattccaaagagattcctaaaagaggcaacttcggccgtttgagaagccagcgctcacccacccggggtctctgtgcattgacctttgggtgctgacttggagaaaagcacaaacacgaccagtcccatcctggctcccgtggggcttcttctatctacgcattgtatcgactgcattagttggactaagatgatgactcagttaaaggaggagacaaatgctgactgtctaagcaagaatggcccaagctggcaagaaaaagcacactgcatacataggatacagaagggcagagcttctgcctgcggatctgcaacattacatttgttttgcctgcaaactatcaagaaggattctgttggccagggagtctccactgaacaaacaaaatggcagtcaaaagtcttgagtgtcctattccagcagcccagagtcctcatccgtcatccacgggagagtctttgagggaaacatgaagtccagctcatgcctctgcctatgggtcaatttcttcgggaatcactgtgatcatgatatcttcattacccctgcggaccaccatgttcagggtgctttcccttttaatgacgtcgctgacatcattggcggagaccacggactgtccattgatgctgattatgacgtcgttttccttgagaccaccagcttctgctggggtatcaggaattacttcaattatatacgctcctgagatcacgtctgggaagtcccggtgccggtccttcagctctttggctttgctggacgtgagtgacatcattcggataccaatatacttcttcttggtgatggcttttcctttggcctgtcggtcatgggactccgtgaggaactttttaatcttatcaggatgggattgcaaaggagattccagctgtcactttcaaagtgttaattcnaatcacttcaccgtccaggtttactaacgggcctcccgagtttccatagttg

SEQ ID NO: 82611 - DNA, 815 bp, Homo Sapiens
  misc_feature (127)..(142): n is a, c, g, or t
tttgttattatatgttttgtttttaattatgaaataattcaagcataaagaaaacacacatcataattcagcctccaacccatccccagctctgtcaatcttaatattctatcatattttcttttcnnnnnnnnnnnnnnnngcattgtagatgctgttgaaactctctgtgtccctcccaaaagaaaggtaattaattatagttcatttcgttttaactaagagttactaaagcatccctggatgctgagaggtactctctaggaggcagaaacaggaccaagcactgcccacttatctccacactatgctaccaattcacctgcagtgggcatgtgctttcaggagttttttgcttggtatagacagttctatgttcgtcttgtttcagcaccctcgtttgaaggacacaaagagctctagggtcatagaaccaactctcactaactgacacagatatcaggatccaacccatgcccacagtattaccccaagtctctaactagctggtgtaaccaataatggaaagaaaaaaagtaatattctgttcttcaacttcaacagagaataatagtgaaagaatggtgatatttttcctaaaatggactaacaagtatcctgagttgggaggtgacttccaatagtaaacaataaaataactgagaaaatggagtgaggagggaggggagagagagaggtggtcaacagaagagagccaaatggaatgttagccaggatttgtaaaaaggggaagcttcattttgttcctaatcaggagttaccaggtaatttcctcccctgtgacaaaatgcaat

SEQ ID NO: 82612 - DNA, 702 bp, Homo Sapiens
ctattgagaggctagtttcttattattactttctgagatttggagatgattatagaccagggttacggagacgaaaacaaggagacaaaaagacctttgatgaatgtgtagcagaaggtggctcagactgtgctccagagaagctctggcttcaaatcccgttcttctgtggccatagctccgaatgctggtaggggagataaagttggctcagattgattatcatccttattatctctataatctgtgtttcatttcacaagggctagatatagggaaatcggtgaaagactagactaaaaataacatgtaattcagtaatatctagttttgcagttacttttaaatgcatttaaaagattcctcatgtagagtgatatcctaatatccttgcattgttttctgagatgccggtttttagtatttcttatttttggtgttatgttttgctgtattccagcagagctcttagagactgggggtgggggtgggtgtcataaatcttattttgtccaaagcttactgttttagctattcatgttaaattaagaaaaggcttagtgggttaaaattcacctggttttactgttaaactgattttgactttaaaagaagccaaggttatggctgtggtttagtttgctagtaaatatcaagtgcaaaataaacacactttaataaaaactatatttcctccaaaaa

SEQ ID NO: 82613 - DNA, 487 bp, Homo Sapiens
ctcaggaggatggagctagttagctgtctgttgtctgtagcccaggtttgtatgtgagctgggtttagtattgaataaggttcttatctgtgtaatattcaaaggattgattttctataattagttgtttgagaggcaatacagccttagaggctaaaggggctaaagcctggactccagttccgtcttctccacatactagctgtgtggccctgtgcaaggttcttaatctcttgatgctccagctttcttatttgtgaaatgggattacagtagaacctcccttatgagggtgttaaaatagtaaatacttggtaaatataaagtatgtataatagtgcctgactcaaatgatcagaaagttttaactcatttttattcatgctaagggtcattttatttaataatatgctttagaaaaatattttttctctgatgataaaagaaaaatgtaatattctggcgtacaatatactggttggaaaat

SEQ ID NO: 82614 - DNA, 807 bp, Homo Sapiens
  misc_feature (145)..(145): n is a, c, g, or t
agagtatgaagtcgacggcgcgccgaattcggcacgaggtggactttggacctggataagaagagagaagctgcactttggtggatctgatttgggattctcagttttgaaaatggagtgctgaatggggatttgatgatctccntggagagcaactgagacaagagaagaaaggtgcatggctgcctcctaatcccatagtccagaggaggcatccctaggactgcgggcaagggagccgggcaagcccagggcagccttgaaccgtcccctggcctgccctccccggtgggggccaggatgctgaagaagcagtctgcagggcttgtgctgtggggcgctatcctctttgtggcctggaatgccctgctgctcctcttcttctggacgcgcccagcacctggcaggccaccctcagtcagcgctctcgatggcgaccccgccagcctcacccgggaagtgattcgcctggcccaagacgccgaggtggagctggagcggcagcgtgggctgctgcagcagatcggggatgccctgtcgagccagcgggggagggtgcccaccgcggcccctcccgcccagccgcgtgtgcctgtgacccccgcgccggcggtgattcccatcctggtcatcgcctgtgaccgcagcactggtcggcgctgcctggacaagctgctgcattatcggacctcgggctgagctccttccccgatacatcgttagccaggactgcgggcacgaggagacgggccatggccatcgcctactacaggatcctggtcaccgcacaatccggcaagcccgacc

SEQ ID NO: 82615 - DNA, 936 bp, Homo Sapiens
agagtatgaagtcgacggcgcgccgaattcggcacgaggggcgcgccgcagaaagggctggcgagtcgaaaggcgaggcggccgcggcagcgcttgggacgcgcctgggcaccgggctcgctccctgcgccccggagcaggccaagttcggggccaggacgtcgggaggacctggtgcatggctgcctcctaatcccatagtccagaggaggcatccctaggactgcgggcaagggagccgggcaagcccagggcagccttgaaccgtcccctggcctgccctccccggtgggggccaggatgctgaagaagcagtctgcagggcttgtgctgtggggcgctatcctctttgtggcctggaatgccctgctgctcctcttcttctggacgcgcccagcacctggcaggccaccctcagtcagcgctctcgatggcgaccccgccagcctcacccgggaagtgattcgcctggcccaagacgccgaggtggagctggagcggcagcgtgggctgctgcagcagatcggggatgccctgtcgagccagcgggggagggtgcccaccgcggcccctcccgcccagccgcgtgtgcctgtgacccccgcgccggcggtgattcccatcctggtcatcgcctgtgaccgcagcactgttcggcgctgcctggacaagctgctgcattatcggccctcggctgagctcttccccatcatcgttagccaggactgcgggcacgaggagacggcccaggccatcgcctcctacggcagcgcggtcacgcacatccggcagcccgacctgagcagcattgcggtgccgccggaccaccgcaagttccaggggtactacaagatcgcgcgccactaccgctgggcgctgggccaggtcttccggcagtttcgcttccccgcggccgtggtggtggaggatgacctg

SEQ ID NO: 82616 - DNA, 596 bp, Homo Sapiens
tcaacttctctatggcaattgatgactgactgtgtaattcagcaggatctcctgtgaagtgcttcttccccagttgaataggagctggtgtttgtctaagcctctgcttatgcatgaggtataatgctttttatatgttatataatgctcttacgcgttagctatctgaatgatagatttaataaaatatacctcataatattatggggaaaggatgacgactgttatagagaggaacttgggagtatcacttctgtaatccttatctaacctgaatctgttagcaggaaactgaaaaggcctgtgtatgacaatgagataaacaattttaatctcttagcaatgtcaagtggaaaatctaactacctgccagtagtttaagaaatggctaagagattttgttgggcacaaataatcctgagacccagattgctgagccaagggtaggaaaattggttttgctatgtgttacagctgggaagtgagaaggtcactgtttgacaaactactaaaaaaaccttatggattaaacattcgccagtgtaggggacattttgaatgtgttataattgatattttagtctatatgcggccgc

SEQ ID NO: 82617 - DNA, 921 bp, Homo Sapiens; identical to SEQ ID NO: 15841

SEQ ID NO: 82618 - DNA, 679 bp, Homo Sapiens
ggggggtgctgcctgcggaagccggcggctgagaggcagcgaactcatctttgccagtacaggagctcgtgccgtggcccacagcccacagcccacagccatgggctgggacctgacggtgaagatgctggcgggcaacgaattccaggtgtccctgagcagctccatgtcggtgtcagagctgaaggcgcagatcacccagaagatcggcgtgcacgccttccagcagcgtctggctgtccacccgagcggtgtggcgctgcaggacagggtcccccttgccagccagggcctgggccccggcagcacggtcctgctggtggtggacaaatgcgacgaacctctgagcatcctggtgaggaataacaagggccgcagcagcacctacgaggtgcggctgacgcagaccgtggcccacctgaagcagcaagtgagcgggctggagggtgtgcaggacgacctgttctggctgaccttcgaggggaagcccctggaggaccagctcccgctgggggagtacggcctcaagcccctgagcaccgtgttcatgaatctgcgcctgcggggaggcggcacagagcctggcgggcggagctaagggcctccaccagcatccgagcaggatcaagggccggaaataaaggctgttgtaaacgagaaaaagacaaaagagcaacac

SEQ ID NO: 82619 - DNA, 525 bp, Homo Sapiens
tcctgccatgtaactgacatggatctccggcaaccctgatgtggcagatggggagcggctggcctgtcctgtcgggtgaagcacagcagttaagagggccaggacatcatcctctactggagaaaccccacctccattggctcaattgttttggcaataatagtgccttccttgctccttttgctatgccttgcattatggtatatgaggcgccggtcatatcagaatatcccatgagccatcatcatgtctcctctcccattcgcaataagtaccaagaagcccaagatatcagcccaaaagtcaatcttatcatatttcaaatgattttcaaatttgatgaaatcagagttttcatgtattttaaaataaattattatttaaacatcagcaaaaaagtacttaaaactgtaaatttattatgagactgtactaacagtgtgattcaccctgattttacacacattaaaatgttagaaaaaatgtgtctcaaaataaatgaaatataatacatatgacttaaaa

SEQ ID NO: 82620 - DNA, 566 bp, Homo Sapiens
gatatctcttgggcgtcctcaatgcaggaaaagcagatctgcaaagacaagtgaagcctgaggcctggctgtccagtggccccagtcctggacctggccgtctgcagcttgtgtgccatgtctcaggattctacccaaagcccgtgtgggtgatgtggatgcggggaaacccaacctccattggctcaattgttttggcaataatagtgccttccttgctccttttgctatgccttgcattatggtatatgaggcgccggtcatatcagaatatcccatgagccatcatcatgtctcctctcccattcgcaataagtaccaagaagcccaagatatcagcccaaaagtcaatcttatcatatttcaaatgattttcaaatttgatgaaatcagagttttcatgtattttaaaataaattattatttaaacatcagcaaaaaagtacttaaaactgtaaatttattatgagactgtactaacagtgtgattcaccctgattttacacacattaaaatgttagaaaaaatgtgtctcaaaataaatgaaatataatacatatgactta

SEQ ID NO: 82621 - DNA, 1102 bp, Homo Sapiens
  misc_feature (852)..(853): n is a, c, g, or t
  misc_feature (942)..(942): n is a, c, g, or t
  misc_feature (946)..(946): n is a, c, g, or t
  misc_feature (952)..(954): n is a, c, g, or t
  misc_feature (979)..(979): n is a, c, g, or t
  misc_feature (1002)..(1003): n is a, c, g, or t
  misc_feature (1013)..(1013): n is a, c, g, or t
  misc_feature (1015)..(1015): n is a, c, g, or t
  misc_feature (1038)..(1038): n is a, c, g, or t
  misc_feature (1049)..(1049): n is a, c, g, or t
gggtccggaattcccgggatagacgagagtgcaagagggtgtggagaggggtactgatatctgaattattagggcaggtgtcctgccaaggaatccctcctttaacagagcttcaatgctgctcctgttcctcctcttcgagggtctctgctgtcctggggaaaatacagcagctccccaggctctacaatcctatcatctagcagcagaggagcagctgtccttccgcatgctccaaacttcctcctttgccaaccacagctgggcacacagtgagggctcaggatggctgggtgacctgcagactcatggctgggacactgtcttgggcaccatccgctttctgaaaccctggtcccatggaaacttcagcaagcaggagctgaaaaacttacagtcactggttccagttatacttccataagttttatccagatagtgcaagcttctgctggtcaatttcagcttgaaataccccttcgagatccagatattagctggctgtagaatgaatgccccacaaatcttcttaaatatggcatatcaagggtcagatttcctgagtttccaaggaatttcctgggagccatctccaggagcagggatccgggcccagaacatctgtaaagtgctcaatcgctacctagatattaaggaaatactgcaaagccttcttggtcacacctgccctcgatttctagcggggctcatggaagcaggggagtcagaactgaaacggaaagtgaagccagaggcctggctgtcctgtggccccagtcctggacctggccgtctgcagcttgtgtgccatgtctcaggattctacccaaagccccgtgtgggtgatgtggnnatgcggggtgagcagggagcagcagggcactcaagccgagggggaacgtcctggcctaatgggctgacgagacatgggtatctccgagncaanccctgnnnatgtggcccggctggggaaaggcancctggccctgttccctgtcgggnntgaaacccangnccagtcctaagggggggccaggnatctaataccncctcccctttggggggtgggaaaatttcccaatccttttccccattccgggaa

SEQ ID NO: 82622 - DNA, 500 bp, Homo Sapiens
caatcaaatttcagtgtccataaataaagttacattggatgacagccatgcccatttgtttctgtgttgtctgtggctgctcgtgtgctacaatggccagagttgagccagtggtgacaaaccatgcgactcacaaaggcctaaaatatttagcgtctggcccttcgagaaaatgttagctgcccctggtctagagtaggtaaaaggctgagattggaagctgcttgttcaaattctgtgattggaaccgaatgatgtggctcattgtacagctcatggtgaattgcttcagtaccatggttttgttttttccttttgaaaagttggtctataaatgtaaaggaaaaatctaagataccaaaatatgttttctggcttagaatgttttatttccttgtatacattttaagagagtggcaaggagaaaagataatgtatcattttatttgggtttagaataaataatacattttatttatgatcatcatgtttaaaatatt

SEQ ID NO: 82623 - DNA, 557 bp, Homo Sapiens
accgcctctcgtgcctatctctcgggcctgaatctcgggcctgcattttatttctcagcaattcctcaccgcaggagcctctgaagctcccaccaggccagctctcctcccacaacagcttcccacagcatgaagatctccgtggctgccattcccttcttcctcctcatcaccatcgccctagggaccaagactgaatcctcctcacggggaccttaccacccctcagagtgctgcttcacctacactacctacaagatcccgcgtcagcggattatggattactatgagaccaacagccagtgctccaagcccggaattgtcttcatcaccaaaaggggccattccgtctgtaccaaccccagtgacaagtgggtccaggactatatcaaggacatgaaggagaactgagtgacccagaaggggtggcgaaggcacagctcagagacataaagagaagatgccaaggccccctcctccacccaccgctaactctcagccccagtcaccctcttggagcttccctgctttgaattaaagaccactcatgctcttaa

SEQ ID NO: 82624 - DNA, 844 bp, Homo Sapiens
gcttgaggctgagctgggtgtgccaagtccatcggtgcatctgctccacaccagcactttggccctggtgacagctttgagaggggctgtgccctcccgcaggggcccatgccatgctctcgcccagcaccgcggcagtgggtcctgaggccgctccccagccctgtcctgtcggcagccatggttgtcacggtgcaggcagtcacacgttgagaatccggggagctgaggcctgaaagatggcggaggggttaggagtgaacttcttcctcacctctgggacctggaagccggccccagggctgctgtcccatcccgaagtgtgggttgtgatgactcgggctggttttgtctttgtggatcttgagggcttcactccagtccaagcctggaattcctgtctgtacgacgtggtcactgctgcagccgcgtccgcgtcgccgatgggcagcacgtagaccccgcgggcgccgggcgcaggtggcgcggaggactgcgcggaggatttgcccctgcggccgcccgcccccggtccgcgccccggcggcggatccttgggcccggcgggcgtggtccacaagccgaagtcccgctggtactgagtgagcggcacgtcccggccggaatcccgggcgcccgcgggaggctggcccctgcgcgaggcggcgccgcccgtgcccggctcctcgctgtcgaggtccgagtagccgtgcagagtgagcggcaccgccacgtcggagcggtccagctggttccagcgccgcgccaggcagcacaggcggctgatacagggccacgccatgccagcccagggcgcccgcgccccctcgcgataagcgggcct

SEQ ID NO: 82625 - DNA, 586 bp, Homo Sapiens
  misc_feature (483)..(483): n is a, c, g, or t
gcggccgcaggggcaaatcctccgcgcagtcctccgcgccacctgcgcccggcgcccgcggggtctacgtgctgcccatcggcgacgcggacgcggctgcagcagtgaccacgtcgtacaggtatgggctgggtagggaccgcaacgagtccccaccctgtggtgggaggacgcggaggcccggagccagagggatggggtgggcggcagagcggaggcgcctggagcccggatcccacgcgacctcggagctgccggcggcctcagaggtcacccccgtttggtcccgtgggcactgcaggcggcgccttcgctgctccatgcccggactcagtgctcgagcacccccgtgccgggagcgcaccgctgccctcgcagccgccctcctgggggcagccgtcagaatggcctgccttcagccgagttggaaccggcctccctttaactcccaccgccgggcctagccgtgcgagagtgcgcgcngccatgtccccagctctctccgtcactgcctagtgtgcgccgtgtgggagaccgagcgcagtcccgggtgtgagccctcgagtccactgtacagggctttagg

SEQ ID NO: 82626 - DNA, 505 bp, Homo Sapiens
aaagccttcagtcagcgttcggtcttcatccagcacaagagaattcacactggggtgaagccctatgactgtgctgcttgtggaaaagccttcagccagcgatcaaagttgatcaaacaccagttgattcacaccagggaataggctgttgggctggcaggagtgaaaccgagcatagtttcctctccaactcctctttggccattgtctcagcctctgccacttcccagaccgaaagcctggactcagctcactgcctacatccagtggccacatagcctgggaccctcctttgaaacatcctttacaggctcccttctcactgccactgctcttgcctcttgtgatgtcttgggtttgggcttgtttttacagcttgtgaacggactgcacgtttgttacaagggagaagattatggaggctgcatattcatgaatagagtttattattataatgaaaagttaccaaaaaagtaaagtgacgtttggtttgagataaaaaaaa

SEQ ID NO: 82627 - DNA, 448 bp, Homo Sapiens
cgaaactttattttggtcacgttgcccatgtgacccgcggagcggatgactcatggttccctgtcccaggatgagccccccggccgaaagcagagaagccccagccccgcccgcccgggtggagcgctgggcagccgagtttcccaccctcctcaatccggagagtccgcgcggggcttttcctaataaatagccaggcacccgctgccctcgcgctgcgtacgggagcacgtgccccccgggaggtgggcgcccgccaggtgccccgggaacgagcctaggaaccgggtccgccgagtgcggctctcggggcggctaggcgtgcgggtggctgggcagcgctcccagggaccggcctctctccggagaaagtaaggaattctgctcctgggcaggtaataccggaaacaaaaggagaggctgcaatcgcaaattgtttaaaaagaag

SEQ ID NO: 82628 - DNA, 869 bp, Homo Sapiens
  misc_feature (618)..(618): n is a, c, g, or t
aataataccacctgtttacatgtgtttaatgctttgaattttccaattcctattaacattcattctctcatcaaaccctcacaacatccctgtgaggtaggtcaggcaataagtggtttgcccacagccacaccagtgatagggacggagtaaacccatactgcaggtttcccagcccccaagctgatgcacctttcatttcatgttacacaggatctttgtgccaaccagacacaggagcatcaagagcactaccagaagcctccctgctctctgagcttgcagaggggacccagaaatgctgggcttgaggcatcaagaccaggggtgccccctgtaggccaagccaggtaaacagaaggaagggcaggagtactggaagttcaggctcaacagccacccctgccaccaccataggtctcagcctagcatacactgtgttccctacatatcttgacctttgtcaggtgcaagtcttattagtttactgagaggactcagtgcccactcccagacgagaagtcactgcaaggcgtggctagcagcaagattcctgacttccttcccacagtgccttcccattcttgttacacttctgcagcccccaggaaggagggnggaaggtgagggctgactgactcagccttgcaagtgcttagagatctgaagctgaaaggccccagcaccattcagctaatgattattattaactctgaacaggctttagcacagcggccagctggcttagggaggatgcctgaatctcccacagtgaggttttcaaaacaagacctggctaggcacgggtgtcacgcctgtaatcacagcactttgggagccgaggcgggcagatcacgaggtcaagagat

SEQ ID NO: 82629 - DNA, 1063 bp, Homo Sapiens
  misc_feature (983)..(997): n is a, c, g, or t
tgtgcgccggagtcgcggtctttatagtataacttggggggtcccaggggtctgccttactgattttcggtggtctcgagtttcgcgtcatgtggtgcggcttgcactggtcctggggccatcatagcggggggcccttgggatgtctttaatggtgacctccggtttgccgggtcttgagctccctgagtgcccggttgcccttgtccgcgagacattaagtcatgaatgtcttcgggtcccaccgtgttgggactggcggcacgcgccgcgggccggggggcgctgagggcgcatcgtttatagtgctgggatgcacgctcgtagcgccgtcaaggcagccgggtgggcgatcgagcacggtcatggtcgtcggagcagcagcagccaccacaggccaccacgcaccaccagccgcacgaaatggacctcaagcccctacgaacagttgatgcactatccccggctacggttccgcccatgcctggcagcttggccatgggcccggtcacgaacctaaacgggcctggacgcctcggcccctgcccgcagatacctcgctacgtaccagggggtgtactcccggcccattatgaactcctcttaagaagacgacggcttcaggcccggctaactctggcaccccggatcgaggataagtgagagagcaagtgggggtcgagactttggggagacggtgttgcagagacgcaagggagaagaaatccataacacccccaccccaacacccccaagacagcagtcttccttcacccgctgcagctgttccgtcccaaacagagggccacacagataccccacgttctatataaggaggaaaacgggaaagaatataaagttaaaaaaaagcctccggtttccactactgtgtagactcctgcttcttcaagcacctgcagattctgatttttttgttgttgttgttctcctccattgctgttgttgcagggaagtcttacttnnnnnnnnnnnnnnncttttgtgagtgactcggtgtaaaaccatgtagttttaacagaaccagagggttgtactattgttt

SEQ ID NO: 82630 - DNA, 549 bp, Homo Sapiens
  misc_feature (329)..(369): n is a, c, g, or t
gcggccgccggagcccaggcctcacaggctcaactcggggaggccgccgggccggcctccgagactccggcgggcaccgagtcgcctcactcgagcgcctccccgtgccaggagcacaagcgagggggcctgggagagctgaaggggacgccggctgcggcgctgagccccccagagccggcgccctctcccgggcagcagcagcaggccgcggcccacctgctgggcccgccccaccacccgggcctgccgcctgaggcccacctgaagccggaacaccactacgccttcaaccacccgttctccatcaacaacctcatgtcctcggnnnnnnnnnnnnnnnnnnnnnnnnnnnnnnnnnnnnnnnnnaaaatggacctcaaggcctacgaacaggtgatgcactaccccggctacggttcccccatgcctggcagcttggccatgggcccggtcacgaacaaaacgggcctggacgcctcgcccctggccgcagatacctcctactaccagggggtgtactcccggcccattatgaactcctcttaa

SEQ ID NO: 82631 - DNA, 508 bp, Homo Sapiens
  misc_feature (72)..(167): n is a, c, g, or t
ctaaaaatgcggtttcactctgttgcccacgctagaagggcactaatacaatcatagcttactgcaccctcnnnnnnnnnnnnnnnnnnnnnnnnnnnnnnnnnnnnnnnnnnnnnnnnnnnnnnnnnnnnnnnnnnnnnnnnnnnnnnnnnnnnnnnnnnnnnnnntttaacctctacctaatattccatgcgtgcctgtaacacagttgattcaaccacgcccctctcactccccctcactcagggtcccagctctagagggcatgggtcaaaaggtgttcatggtaaatggtgcctctgcacaattccaggggatgccatccacacccagaatgcagcagccctgcctgatgaagagataagggggctccagtttttaccatacaaacaattctgcaccgagcatgctcacccatgtctctttgtgcacatgtgtgagtggttctccaggcattgatgattcagggtggagctggagggcagaagtgcatgcttccgacatttca

SEQ ID NO: 82632 - DNA, 874 bp, Homo Sapiens
  misc_feature (563)..(563): n is a, c, g, or t
gggggagtagcaagtccgcggtaagcgctgacgcatgcgcatagctaaccgcacccggttcagctcgcctttcttggccagaggcgccggttggactcacgggcggggcatgatggtggtgggtacgggcacctcgctggcgctctcctccctcctgtccctgctgctctttgctgggatgcagatgtacagccgtcagctggcctccaccgagtggctcaccatccagggcggcctgcttggttcgggtctcttcgtgttctcgctcactgccttcaataatctggagaatcttgtctttggcaaaggattccaagcaaagatcttccctgagattctcctgtgcctcctgttggctctctttgcatctggcctcatccaccgagtctgtgtcaccacctgcttcatcttctccatggttggtctgtactacatcaacaagatctcctccaccctgtaccaggcagcagctccagtcctcacaccagccaaggtcacaggcaagagcaagaagagaaactgaccctgaatgttcaataaagttgattctttcccccccgaanatcctccatccagtaaaccccatgtccggccgcctcgggcccttcaaaaaagcttttccagaacctttcctttggccgcgccgggccccagtaaggtaaagtggaacatgggccaataaccttgtttccccaggaaaatccctgggccctggaattaagcgctttggaatttcccaccacataaaaaaaccgccccgggcgggcaacccgaaagcgtttcttgaaccaaatttccacaatggcgagttctcggaggccattttactggaaatcctatccaaccggggagtccccaagccaaagcctcccta

SEQ ID NO: 82633 - DNA, 1049 bp, Homo Sapiens
aagtgaagcaaggaatagatccgaaaaagataacagaggaatccatgtcagtgaacgcctcacatggaaaaggattttcccgacctgctagaccagcaaatcgtcgtctcccctccagatgggcatccagatctccatctgcaccccctgccttgcggagaactacccacaactataccatttctctgcgatccgaagcattgatggtttaagtctttggcctggattgctatattacagaagttctagtcccacttgtcaaacagagcattctgagtgtttacaggcggacctgttctcttccgacaagcaatttgaatcttaactttccatcagtcttcagtgtttttaatctaaggaataattatcttcctgcattttgatttcttagatcagaattttttaatgccatcctcattagttttccaatacaatataagttgaaacaatgtacaatattgtatattctttgttgcaagtggcagaaagtaaggttatgtgcatggccatgtgtttgtaggtgcatgtgttgaaataggaagtatcctagtatgtatttagatatgaaaaacttatgtgctagtgttgactttgaaattataacatgtatacctatatattctttgtgtttatttaaaagttttgaaaatatgcagtactgtttatattttgtataccttttaataggtatccacttaaggcatttgcagtacaaatattaattgaccacttccttggcccccagctacaatgaaaaagaagaattatgcacacatctaacattggtagatttctaaagacaactcataaataatttcttaacccatataaggataaaataataccattgatattcttgtttattctttttaaataaaaatgtcacaagtttaatagatcagccttgtaaagcaagcataaaatgttcataaatgttttatatattatttggtagtctagtatggctttaactgaatatttgatcctcagagacagtatcatgagactgcaatacaaatgacatgattaaatgatgaatttaatttgtc

SEQ ID NO: 82634 - DNA, 438 bp, Homo Sapiens
  misc_feature (14)..(14): n is a, c, g, or t
aaggactctgaagnacttgccagtaagtgtgataggaagaataatgccccaacacccccatcacccaaagatgcctacatcctaatccaaaagggagtgatgatgtagaagaggaagtcagagatacgatgtgaaaaagactcaatccaatgatgttggcttggaaaatgaagaaagagaaatatgagccaaggggcatgcgtgatttctagaagctagaaaaagcatggaaatggactttcccctagaacctcaagaaaggaacacagtcctactgacaccttaattttaggccagggagacgtctgacaaatttctaacatacagaactgtaagatagtaaatttgtattgttttaagacaccatatttgtgacaagtttgttacagccagtaataagaaactaatataggaagaaaacaaaaaagctaattgaaa

SEQ ID NO: 82635 - DNA, 826 bp, Homo Sapiens
  misc_feature (623)..(700): n is a, c, g, or t
aagtgcacaggctcaggagcacattccgtcgcccacccccgggggacccagctatggaagtgtctcaacccttcctggccccctacgtgcacccggcttcatccttggcccccagggacggcggcccttcacctgcagacctcagcctcaccctgtataaagctctgtcttcctctgctgctacaagaacccactgcagatgcagcatcagccaggatgcttccacatccccccgcgggacctggggacctgggtgaatgatgaacacgcggaagctcacgtagcttgctgtgccgtgagtagtaagccctttgtctccgcctccggggtctcatgtcttcttccagggtccacgaaacaggaacgagttgttagcttgcaagagttaaaatcaaatcccccacactcgtgtattgggaggatgaaaacctagatgtggaattgctcagccaaagcacgggcgtttgtaatttcaatagttgttcccaaacctcccagcattagggttagagtccctcatcagttcctcctccccacgccccagcacatagtgtatttcagatattggtgattttaatttgcattcttgtatcataagtgaggtttaagagcgatttgcattnnnnnnnnnnnnnnnnnnnnnnnnnnnnnnnnnnnnnnnnnnnnnnnnnnnnnnnnnnnnnnnnnnnnnnnnnnnnnnaagaacttggaaactagggaaattaatttttgaatgggtttcaaatactttaccccagttttgattttacatagtagtgttttttgccatgcagaaaaaattaaatttgtatgagttgaaaaaaaa

SEQ ID NO: 82636 - DNA, 908 bp, Homo Sapiens
agctattgggacatatagaaacagtgtgtcaaaaaagcaggctggtaccggtccggatttcccgggatatcgtcgacccacgcgtccgatttagaatagtgataaatagaatacacagaatagtgatgaaattcaatttaaaaaatcacgttagcctccaaaccatttaattcaaatgaacccatcaactggatgccaactctggcgaatgtaggacctctgagtggctgtataattgttaattcaaatgaaattcatttaaacagttgacaaactgtcattcaacaattagctccaggaaataacagttatttcatcataaaacagtcccttcaaacacacaattgttctgctgaagagttgtcatcaacaatccaatgctcacctattcagttgctctgtggtcagtgtggctgcataacagtggattccatgaaaggagtcattttagtgatgagctgccagtccattcccaggccaggctgtcgctggccatccattcagtcgattcagtcataggcgaatctgttctgcccgaggcttgtggtcaagcaaaaattcagccctgaaatcaggcacatctgttcgttggactaaacccacaggttagttcagtcaaagcaggcaacccccttgtgggcactgaccctgccactggggtcatggcggttgtggcagctggggaggtttggccccaacagccctcctgtgcctgcttccctgtgtgtcggggtcctccagggagctgacccagaggtggaggccacggaggcagggtctctggggactgtcggggggtacagagggagaaggctctgcaagagctccctggcaatacccccttgtgtaattgctttgtgtgcgacagggaggaagtttcaataaagcagcaacaagcttcaaaaaaa

SEQ ID NO: 82637 - DNA, 1039 bp, Homo Sapiens
cagtcgacggtaccggacatatgcccgggaattcggccattacggccggggagacggctgggcgccgagtgggacagcgctggtgcggagactgcttccggactccaggtaccgcgcttggcggcagctggccccagacttctgtcttttcagctgcagtgaaggctcggggctgcagaattgcaaccttgccaatggacctgatcggttttggttatgcagccctcgtgacatttggaagcatttttggatataagcggagaggtggtgttccgtctttgattgctggtctttttgttggatgtttggccggctatggagcttaccgtgtctccaatgacaaacgagatgtaaaagtgtcactgtttacagctttcttcctggctaccataatgggtgtgagatttaagaggtccaagaaaataatgcctgctggtttggttgcaggtttaagcctcatgatgatcctgagacttgtcttgttgctgctctgagcatctggaggaacagaaaactaagttcatgtcatcctgctgtaatgggcagagcatattttttttgtatttaaaagataaacttcaatatggaatgctagaaacacaaatagcactgtcacctctaatatgaacattagtttgaggtagtttttttctaaagcaaaaattttaactgttttctaattgtcaagcactattttcattaaaagtgtctaatgaatcatgatatactcttccatttgttgtgtctattttttatatatttggtattttttgaaaattccaaatactcatgtctcaagtaagcttaaactacaacttgtcacataaaggaagtcttaagtggagttcacagaatgataatgtatctatttgtcatttgtgttatatttgaaattattagaaattatgctttttccattttaattgtattgctgccagtgctatttttttctttaaaaaattttattcttagcacactgttatgttcctaactgagatgtattcagtattcaaataaaagacattttggttcaaaaaaa

SEQ ID NO: 82638 - DNA, 839 bp, Homo Sapiens
gggacggctgggcgccgagtgggacagcgctggtgcggagactgcttccggactccaggtaccgcgcttggcggcagctggccccagacttctgtcttttcagctgcagtgaaggctcggggctgcagaattgcaaccttgccaatggacctgatcggttttggttatgcagccctcgtgacatttggaagcatttttggatataagcggagaggtggtgttccgtctttgattgctggtctttttgttggatgtttggccggctatggagcttaccgtgtctccaatgacaaacgagatgtaaaagtgtcactgtttacagctttcttcctggctaccataatgggtgtgagatttaagaggtccaagaaaataatgcctgctggtttggttgcaggtttaagcctcatgatgatcctgagacttgtcttgttgctgctctgagcatctggaggaacagaaaactaagttcatgtcatcctgctgtaatgggcagagcatattttttttgtatttaaaagataaacttcaatatggaatgctagaaacacaaatagcactgtcacctctaatatgaacattaggtttgagggaagtttttttctaaagaaaaaattttaactgttttctaattgtcaagcactattttccattaaaagtgtctaatgaatcatgatatactcctccaatttgttgggggcaatttttcaaaaaattgggggaatttttttggaaaatccccaaatactcatggtcctcaagaaggccttaaccctacaacttgtccacttaaagggaagttcttaaaggggaaggtctcccgaaatgttataatggtt

SEQ ID NO: 82639 - DNA, 1150 bp, Homo Sapiens
  misc_feature (543)..(604): n is a, c, g, or t
gagtgactttacaacttaactaggaaacccatgtgaggctcctcagacaggatcttgaacagcccaaagtatcattctcagataggggcacccaagctaagggtattagccaaagatgccaggatgggtagctagcccatgtttagatccaggtctccaattcatggttatcagggcatgtgttcaacaacccccaaagtccacgcaggtggcttgtagaaacctttgggcagcctcatgtctgctaaaacagccatcttcaagacagcccctgaaaagagaccagttcaggtcctgccctgctgttctttgctggagatgaggaacaggtgctggggctaaagtttggggtagagcacaagggacaagaggaactcttggagttggctgggtgagagggctctccatttgctacctgtagtagcctgcctcttaactggttgcttctccctagttccagccctgccctggtctgatgccccaacactgcccttgctttgttttccctgtcacctccctattattaaatgttttctacagaannnnnnnnnnnnnnnnnnnnnnnnnnnnnnnnnnnnnnnnnnnnnnnnnnnnnnnnnnnnnncaggggcgcgcacaaagctggcccagggagaccttcaatacttctgaaccctcagctttcttgtgtgaagaaggccccctctcacgtcaggctaattatccaaaggacgaaacaagagtactatgtcctcgccccagtctattgaccatgaaagcgaggtggcgtcctcagagtgaccggcacacacttgtggacgagtccaccgcaatgtgcagctgtgctgaaaggaatcactttatacccacgctgggtgtattcttgcagtggcgtaatgttctgaattccactttagtgctgaacgacactactgaaccccattattgttttttcccagtacgatgaatataaatttgatgcaagccacttaactgcattggtctgtcctatatttgagacaagaaatctgaatcttgaagccaccgggcgaggcattttcttgcaaaaacgacgcccaggggacaattactaaagaacacgggcaacacaaaaaggccgtaacagacaggacattgaaagcaaggtgggtatcgcaggaagaccaaatcc

SEQ ID NO: 82640 - DNA, 625 bp, Homo Sapiens
gcacgaggatgactttgagccagaaaaccaaggagaattaggatttaaagaaggggacatcattacattaaccaatcaaatagatgaaaactggtatgaaggaatgatacacggagaatcgggattcttccccattaattacgtggaagtgatcgtgcctttacctcagtaaatgtgtaacacaaactctggacatactttcgtaactgaaatgaattcacaccagtgtgctctcagtgcggtgttctgtgacatcctttgctctctgaccaacttaatgacttttgtatgtgtgctctctttataatgtattttatatcactttaatttgtataaatgattttcttgtccttgctacatgaaaatattttcttttttgcttcctgtcctaaaagtcattggttaaatgtatttgcttcctgtggctaaaaataagtctcacccattgcagttatgtcaacgaatggcctatattcctcagctgcaatgaaatggtaacatttgaaactaagaaatgctaaatattttgtgtctcgacattcctgatgacgtctggtcttttcttttcattgtattttaaagcgtacctgtgaatagcccaataaacatgacacactgtgttggc

SEQ ID NO: 82641 - DNA, 532 bp, Homo Sapiens
gcggccgcctgctgccctatctggccgaggacgagctgcgcgccgcttgcgctcccggcccgctctgctggggggcgctggcggcgcagcttgcgctgctgggccttgggctgctgcacgcgttgctgctggtgctgctgctgtgccgcctgcggaggctgcgggcccgggcccgcgctcgcgccgcagcccggctgtcgctgaccgacccgctggtggccgagcgagccggaaccgacgagtcctgaggagagaaccggtgcgtcctgaggagagaaccggcgctgggcaacacgggcctgcaaactcgacaggaccctgcccgaggggccctcgcgccaacctggaccggtctccgcctcctccgctgcccaatctctcagacccaccccacctgcaggcccagaccacgtgggacagaactcctgcccaccctaccccgagggaggcgaacccgcacttccaggcttgggaggaccatggggcacaatgcggtccagaccctgctgcgtctcccttccaaacctcgtgc

SEQ ID NO: 82642 - DNA, 1488 bp, Homo Sapiens
  misc_feature (1353)..(1353): n is a, c, g, or t
gggggagagagtatgaagtcgacggcgcgccgaattcggcacgaggggtgagaggccgcggcggcaggtccacctgggcttgcgaaggcacagattccccgtccacagctcacgaccagatgcaccagcaggagtccacatcgaggacgtcctccgggcactcccacgaccagtgaccaggagttaaactttgggatgtgcccgtgatgttggaccacaaggacttagaggccgaaatccaccccttgaaaaatgaagaaagaaaatcgcaggaaaatctgggaaatccatcaaaaaatgaggataacgtgaaaagcgcgcctccacagtcccggctctcccggtgccgagcggcggcgttttttctttcattgtttctctgcctttttgtggtgttcgtcgtctcattcgtcatcccgtgtccagaccggccggcgtcacagcgaatgtggaggatagactacagtgccgctgctatctatgactttctggctgtggatgatataaacggggacaggatccaagatgttctttttctttataaaaacaccaacagcagcaacaatttcagccgatcctgtgtggacgaaggcttttcctctccctgcacctttgcagctgctgtgtcgggggccaacggcagcacgctctgggagagacctgtggcccaagacgtggccctcgtggagtgtgctgtgccccagccaagaggcagtgaggcaccttctgcctgcatcctggtgggcagacccagttctttcattgcagtcaacttgttcacaggggaaaccctgtggaaccacagcagcagcttcagcgggaatgcgtccatcctgagccctctgctgcaggtgcctgatgtggacggcgatggggccccagacctgctggttctcacccaggagcgggaggaggttagtggccacctctactccggcagcaccgggcaccagattggcctcagaggcagccttggtgtggacggggaaagtggcttcctccttcacgtcaccaggacaggtgcccactacatcctctttccctgcgcaagctccctctgcggctgctctgtgaagggtctctacgagaaggtgaccgggagcggcggcccgttcaagagtgacccgcactgggagagcatgctcaatgccaccacccgcaggatgctttcccacagctctggagcagtgcgctacctgatgcatgtcccagggaacgccggtgcagatgtgcttcttgtgggctcagaggccttcgtgctgctggacgggcaggagctgacgcctcgctggacacccaaggcagcccatgtcctgagaaaacccatcttcggccgctacaaaccagacaccnttggctgtagccgttgaaaacggaactggcaccgacagacagatcctgtttctggaccttgggcactgggagcccgtcctggtgtagccctagcccctcccgaggccttcccctgggggggtcccactggtccgt

SEQ ID NO: 82643 - DNA, 1214 bp, Homo Sapiens
caagaacaaggaagccaggacataagcaggcggaataacgacggcagtaacaatacggtcctaaggtagcgaggcctgggtggcgaattcggcacgaggtggaatcggggcccggcattccctcctcgtcccgggctggcccttgcccccaccctgcaactcctggttgagatgggctcagccaagagcgtcccagtcacaccagcgcggactccgccgcacaacaagcatctggctcgagtggcggacccccgttcacctagtgctggcatcctgcgcactcccatccaggtggagagctctccacagccaggcctaccagcaggggagcaactggagggtcttaaacatgcccaggactcagatccccgctctcctactcttggtattgcacggacacctatgaagaccagcagtggagaccccccaagcccactggtgaaacagctgagtgaagtatttgaaactgaagactctaaatcaaatcttcccccagagcctgttctgcccccagaggcacctttatcttctgaattggacttgcctctgggtacccagttatctgttgaggaacagatgccaccttggaaccagactgagttcccctccaaacaggtgttttccaaggaggaagcaagacagcccacagaaacccctgtggccagccagagctccgacaagccctcaagggaccctgagactcccagatcttcaggttctatgcgcaatagatggaaaccaaacagcagcaaggtactagggagatcccccctcaccatcctgcaggatgacaactcccctggcaccctgacactacgacagggtaagcggccttcacccctaagtgaaaatgttagtgaactaaaggaaggagccattcttggaactggacgacttctgaaaactggaggacgagcatgggagcaaggccaggaccatgacaaggaaaatcagcactttcccttggtggagagctaggccctgcatggccccagcaatgcagtcacccagggcctggtgatatctgtgtcctctcaccccttctttcccagggatactgaggaatggcttgttttcttagactcctcctcagctaccaaactgggactcacagctttattgggctttctttgtgtcttgtgtgtttcttttatattaaaggaagtaattttaaatgttactttaaaaaggtatatgtaaaccttgaaaaaaaa

SEQ ID NO: 82644 - DNA, 1410 bp, Homo Sapiens
gcggccgctgtgcactctgcccatagggagtacatagcctgtgtcatcttgggggtgatattccttctgtcatccatatgtatagtggtcaaagccatccatgacctctcaactaggctgctcccagaagtggacgatttcctgttcagtgtctccattttaagtgggattctttgcagcatcctggccgtgttgaagttcatgctggggaaggttctgaccagtagagcactcataacagatgggtttaactccctcgtgggtggcgtgatgggcttctccattcttctgagcgcggaagtgttcaagcatgactcggcggtctggtacctggacggcagcataggcgttctgatcggcctcaccatatttgcctatggggtcaaactcctcatcgacatggtgccgagggtgaggcagacacgtcactacgagatgtttgagtgaagggggccagcatccgcatgagaccattgagatgaggagtttccacataggcaaagggtgccaatatttaactgaacatctggtttctttttggaagttttctttcacatggtttgtcattacaagacaaggtctgcccagccaggtggatctaccttgcccccatcacctgccgcccccatcaaacatgttgggacaatgcccataggaatggacctccttccccgtctccagctgggactggcgttttttagtctctggagtatgatggttctcatgggtaggatgagatctttggcagaaaggtcttcggtggtgctctgagcctgcgctgcataggactgagcagacccacctcctccagcttgggtggccctgccactcctggttccaagtctctcctttcctggcaggtcttaagggaagattgtacccctcaccctttacatacccagaatcatcagtatgtcacttcctaatttctatcagtgtatctcattatttcatactgttttactaatcctgagtctaaacagatttgctcaaaaggagaccattctattttttaaagtacttagtgatacacgtataagctttgcatggacgaattaaataagcacattgaccttttcttgtacattcagaacctgaacatccatgtgaaaactgggtccatttttgagagatgtgaaactacagtttatttgtaataaataaatataatctatccgtatatgcatatatctatatgctgtgttaagtggtaatggtacattacagtctgtgagagatggatcgctccctctgtaaggaacaagacgttctcagctgatgtcacggtaggtttagattctgtagagtgttccccaacctgcaccgttctgtacctctcacaccactgcttgcccgggcagtagtggctgaccaataaagacctttacctgttttgtatggcaaaaaaaa

SEQ ID NO: 82645 - DNA, 1268 bp, Homo Sapiens
  misc_feature (108)..(171): n is a, c, g, or t
  misc_feature (375)..(402): n is a, c, g, or t
  misc_feature (603)..(762): n is a, c, g, or t
  misc_feature (1116)..(1178): n is a, c, g, or t
gacccgcgccgaggccctgcaccgccagctaaccgcctgccccgagctgccccacaacgtgcaggagatcctggggctggccccgcccgcagagccccacagcccctnnnnnnnnnnnnnnnnnnnnnnnnnnnnnnnnnnnnnnnnnnnnnnnnnnnnnnnnnnnnnnnnggacacagccccgcagcccgacagcagcctggagatccttgcccgaggaggaggacgtagggcgccgactcctaaccccgccatggcagacctcgattctgcacaggcactttagcccgagccaggcacacctgcgagggggcaggtgtgctcccccgccctgctgataagctggcttcattaaactgacacttctcatgtgcnnnnnnnnnnnnnnnnnnnnnnnnnnnngggggggccacaaaaaaaacccagagaggacccaaagaagagcaggcaaacgccaggaccacacggtgcaacaaggggagcccacacaaggaggagcacccacaaataatatagccagaggagcgaagggaacagagcaaaaacacacacccgaacacacaggacaaaacacggcaacgacagaaagaatcaagtcgaagnnnnnnnnnnnnnnnnnnnnnnnnnnnnnnnnnnnnnnnnnnnnnnnnnnnnnnnnnnnnnnnnnnnnnnnnnnnnnnnnnnnnnnnnnnnnnnnnnnnnnnnnnnnnnnnnnnnnnnnnnnnnnnnnnnnnnnnnnnnnnnnnnnnnnnnnnnnnnnnnccaagcccaactacagagccagcaccaaaaaaacgaccacagcgcggcacacacgaggaagtaacgcacacaaaaaagcaacaagatcgcacaacacacccacggggaaacaccgcagggaaaaacaacaagagcgagcaaaaaagcaagaaaccaacaagccagcaaaagcgcgaacgacaaagaaacgacacccgagaaccgacgagacgaacaagagcccgacgaaccacacgacgagaaaagcgaacgaggacgggagaagcgagaggagaggagacacgaaggcagggagggcgagacaagatgggaagcgaaaggagcacgggaggagagaacgaagaaccagacacnnnnnnnnnnnnnnnnnnnnnnnnnnnnnnnnnnnnnnnnnnnnnnnnnnnnnnnnnnnnnnngaaggacacagcaggcagcagaggaaggccaggggagaagacgcgacgagacagcacagcacgaacgcaggcaaacggaagaaagaaaga

SEQ ID NO: 82646 - DNA, 1029 bp, Homo Sapiens
gtctacggcgaggcacaggccagcccagctccacgaggactgaacaaggtgctgtctcactgccaccatgccggaagtcgagagaaaacccaagatcactgcctcccgcaaactcttgctgaagagcctgatgctggccaaggccaaggaatgctgggagcaggagcacgaggagcgcgaggctgagaaggtgcgctacctggcagagcgcatccccacgctgcagacccgtggcctgtccctcagtgccctgcaggacctgtgccgggagctgcacgccaaggtggaggtggtggatgaggagcgatacgacattgaggccaaatgcctccacaacaccagggagattaaggacctgaagctgaaggtgatggacctccgtgggaagttcaagcgcccgcccctgcgtcgagtccgtgtctcggctgacgccatgctccgggccctgctgggctccaagcacaaggtgtccatggatctgcgggccaacctcaagtctgtgaagaaggaagacacagagaaggagcggcctgtggaggtgggtgactggaggaagaacgtggaggccatgtctggcatggaaggccggaagaagatgtttgatgccgccaagtctccgacctcacaatagaggccagcttgctgtgctgcgctctgagctcctgcttcatgcttcttctccaacccagctcactcacctctctgcctgtgtctggagcatcccttcccacctctcccccacttcttccctccagcctgcatgccctcctctggaactgggattaaacagatacccaagaggcaggaaaaacgcgagtgtctgaagacctcaccctggcagggtgggcttctatccacccatgaggcacctggggcttctcagccaccccgtggtgtaacaagtggaggaggaggagggggtgagaacacctttcctccagccctgtgccacactccttctatgtgtgtacagtgtccacaggcatcacaccttcttcattaaaaacccagtttcctggtcaaaaaaaa

SEQ ID NO: 82647 - DNA, 420 bp, Homo Sapiens
tcagacccagagggtttggagcctggggtattgtcaccgcaagtggccttagcctagctagcacagttagtgctgtgcatcacagcatagcttttagaggcaggatttgtagtcagtatagttgggaggcaccatggagcagggatcaccctccacctcacttgacaaggagatacaaaactatcagttcatagacaccatctgatagggaactggctcagcataggccaactgggacccaggttgccatcttgaagactttccatcacccaaatatcattcagctcttccaggtggtgagggagtaaaccagaggaggagagttgcaccaccagatataccactatggccacatcgaggaggaagaggaggcccggaccatgttcaggcagattctgtcagccctgcagtactgccact

SEQ ID NO: 82648 - DNA, 288 bp, Homo Sapiens
gcggccgctgccacccagaagatccccccttcctcggcacccacggtgctgagtgtcccagcgggtaccaccatcgtgaagaccatggctgtgacacctggcactaccaccctcccagccactgtgaaggtggcctcctcgccagtcatggtgagcaaccctgccactcgcatgctgaagactgcagccgcccaggtggggaacatcggtttcctccgccaccaacacgtctacccgccctatcatcacagtgcacaagtcaggcactgtgacagtggcccagcaagc

SEQ ID NO: 82649 - DNA, 641 bp, Homo Sapiens
ataaaagtattgatggctgtgtcctcatctgcatttttgtttttatgatagggctgatattttcaacaacgaaacacccaatgttcagaccttacctcagtctaagagctggctccacagttggtagcaatggccctgttaggcagactgtccccctctttgggaatggaaagaagccctgcctggatgcatggagcagatggatactgacaccaaggacattcagattttctttcctatacctattttcataaaatttggaaagaaaaactatctgcagtatttttttaaaacgacttctgctattcttacttagagaaatccagtgatagcacctcatgtcttcagaggagcaagaagttcaaggagttaaatgtcacattcatactcaggtaatagagaagaataaaacacatcaggtttgcttcatctatcctaagtggtgcttaggggttcagaaaaaatgtttcaagtacaggaaattaatgagcaatatttacaatgtattttaataaaagggatttttctagttaactctgagttaagcacgaactcctttcttttgttaattgttggaaataccattaagatgtatttgtctgtttttctgcattggcaagtaaagaacataaaacaaaaaa

SEQ ID NO: 82650 - DNA, 241 bp, Homo Sapiens
cgcacatgatccggctgctgcggctgcggcgctgaagtccggatacccgctggtgtaccccacgcacccgctgcacggtgtgcactcctcgctaacggccgccgcggctgctggcgccacaccgccctccctggccggccaccccctctacccctacggctttacactccccttctccccactttcacctccccacccaaactttataaaagttgaaaaaatatcatttgactttttatag

SEQ ID NO: 82651 - DNA, 502 bp, Homo Sapiens
  misc_feature (291)..(293): n is a, c, g, or t
  misc_feature (295)..(296): n is a, c, g, or t
  misc_feature (300)..(300): n is a, c, g, or t
  misc_feature (304)..(306): n is a, c, g, or t
gcggccgccatggcttgcacatgcacatccccacctcgggcgcaccgggcagccctgggacgctggcgctgcgcagcccccaccacgcgctgggactcagcagccgctaccacccctactccaagagcccgcttcccacgcctggcgcccccgtgccggtgcccgccgccaccggaccgtactactccccctacgccctctacggacagagactgaccaccgcctcggcgctggggtatcagtgagggcggccgggagggcgagcgagggagaggagggagagggagggannnannaatncaannnaagcgggatcacggcccaggctgctgacacccgcgcgtggggaggactcgggccacgaaaggaaagaaatgtataccgtatctatctacccgacagcagcgaccgagacccggtgggacactccccttctccccactttcacctccccacccaaactttataaaagttgaaaaaatatcatttgactttttataga

SEQ ID NO: 82652 - DNA, 378 bp, Homo Sapiens
  misc_feature (241)..(307): n is a, c, g, or t
gcgaccgccatgcttgcacatgcacatccccacctcgggcgcaccgggcagccctgggacgctggcgctgcgcacccccaccacgcgctgggactcagcagccgctaccacccctactccaagagcccgcttcccacgcctggcgcccccgtgccggtgcccgccgccaccggaccgtactactccccctacgccctctacggacagagactgaccaccgcctcggcgctggggtatcagnnnnnnnnnnnnnnnnnnnnnnnnnnnnnnnnnnnnnnnnnnnnnnnnnnnnnnnnnnnnnnnnnnncgggatcacggcccaggctgctgacacccgcgcgtggggaggactcgggccacgaaaggaaagaaatgtat

SEQ ID NO: 82653 - DNA, 478 bp, Homo Sapiens
gatcctgagaaataaaagggaggctgaattattcaaatttaaatgaggtttccccttcatggaagtgctgctgacccttcgtgcagaaatggggagcacttgaggacacaggtgggtggaggccctttgtgcgtggctggtcgtattcgggcagccctccgtcgctttttataaaactttgtgtgagaagaatatattgataatgtcagtgaaacaagcagacattgaaatggaggcacagattactccacaaggagttcttctgtatattttttctagatgcaaatacctttttaattatgttaattaatgttaagactttctaggcttatatcgaagctgtgtgtgggtcacggggtgatcactgctaactggataaagtttgtgcagcacattcctgagtgtacgatattgacctgtagcccagcgtgaaaaatttataaataaatttttcattgatctttttatattaaaaaaa

SEQ ID NO: 82654 - DNA, 991 bp, Homo Sapiens
  misc_feature (31)..(31): n is a, c, g, or t
  misc_feature (41)..(83): n is a, c, g, or t
  misc_feature (87)..(121): n is a, c, g, or t
gaaatgtatacgactcactatagggcgctangtcgtctgtnnnnnnnnnnnnnnnnnnnnnnnnnnnnnnnnnnnnnnnnnnnccgnnnnnnnnnnnnnnnnnnnnnnnnnnnnnnnnnnncagtcgacggtaccggacatatgcccgggaattcggccattacggccgggggcggtgcctggcgccgagcctcccaagatggcggtgtgcatcgcggtgattgccaaggagaattaccccctcgtacagtcgcagcacccctacggagaacgagctgaagttccactacatggtgcacacatctctggacgtggtggatgagaagatctccgcaatggggaaggccctggtcgaccagagggagctgtacctgggcctgctctaccccacggaggactacaagttaactttccgggccaggcattgattcatgaagagggtgaggtgttccagacagacagactcggagtctaggtggttcggctcctggagtgtgaactgggtaaggcttggctgcctgctcttcgcttctcctgcaaacaccagacgtcgccctagcaaagtatttaggcttgtacccagcacggccactgcaggaccagcccagcatgggcatttcctgtgattcaaggttgccacatttctccaaagtgagggcccacagagggccctccaccggcagtccctgtgttacgagtgccttccctaaccagctgtgcagatacggctacgtcaccaactccaaggtgaagtttgtcatggtggtagattcctccaacacagcccttcgagacaacgaaattcgcagcatgttccggaagctacacaactcctacacagacgtgatgtgcaaacccttctacaaccgggggaccgcatccagtccagcagggccttgataacatggtgacgtcgaatgatgatacaggtgtgctgagtgagcctgtgctgcaggcatcgcagaaggagccgcgcacaacagtggagggg

SEQ ID NO: 82655 - DNA, 854 bp, Homo Sapiens
gggacgtgacgcggtgcctggcgccgagcctcccaagatggcggtgtgcatcgcggtgattgccaaggagaattaccccctctacattcgcagcacccctacggagaacgagctgaagttccactacatggtgcacacatctctggacgtggtggatgagaagatctccgcaatggggaaggccctggtcgaccagagggagctgtacctgggcctgctctaccccacggaggactacaaggtatacggctacgtcaccaactccaaggtgaagtttgtcatggtggtagattcctccaacacagcccttcgagacaacgaaattcgcagcatgttccggaagctacacaactcctacacagacgtgatgtgcaaccccttctacaacccgggggaccgcatccagtccagggcctttgataacatggtgacgtcgatgatgatacaggtgtgctgagtgagctgtgctgccagccatcgcagaggagcccgcgcacgactgtggtggggccgtcggtctgttctggttgcctcttcctgaatgggacgcctggggctttcagggcaggcagctgtgcatgttctctcaactaaaggtcttgtgagcaggagatttggctttttccttccgtgtcagccaaggatttaattaagaagaattcaactaaggactttttctggggtgtgggcacgaggtctgggatcagatggcgcaggtagcctgtcctcagttgtcccaaaggggcagaggcaggggtgcctggagccaagagttcctgagcctgcaaggacctgtgaccatgtgggtcaaccactggctgaacagctgggctggtctggaagggggtggactc

SEQ ID NO: 82656 - DNA, 778 bp, Homo Sapiens
  misc_feature (120)..(120): n is a, c, g, or t
  misc_feature (170)..(170): n is a, c, g, or t
ctcaactggatgaagaaactgtctccccggaccatccacctgaccatgccccaactggtgctgcaaggatcttatgacctgcaggacctgctcgcccaggctgagctgcccgccattctncacaccgagctgaacctgcaaaaattgagcaatgaccgcatcagggtggnggacgtgctgaacagattttttttgagcttgaagcggatgagagagagcccacagagtctacccaacagcttaacaagcctgaggtcttggaggtgaccctgaaccgcccattcctgtttgctgtgtatgatcaaagcgccactgccctgcacttcctgggccgcgtggccaacccgctgagcacagcatgaggccagggccccagaacacagtgcctggcaaggcctctgcccctggcctttgaggcaaaggccagcagcagataacaaccccggacaaatcagcgatgtgtcacccccagtctcccaccttttcttctaatgagtcgactttgagctggaaagcagccgtttctccttggtctaagtgtgctgcatggagtgagcagtagaagcctgcagcggcacaaatgcacctcccagtttgctgggtttattttagagaatgggggtggggaggcaagaaccagtgtttagcgcgggactactgttccaaaaagaattccaaccgaccagcttgtttgtgaaacaaaaaagtgttcccttttcaagttgagaacaaaaattgggttttaaaattaaagtatacatttttgcattgcaaaaaa

SEQ ID NO: 82657 - DNA, 1153 bp, Homo Sapiens
  misc_feature (860)..(891): n is a, c, g, or t
aagtctagtacgaggccttggtgtgaattcggcacgaggaagaaggaggcctgagagcgacatgtcccggcggctcaggcggagcggcccgtggcgctgtttttctgagtccggggtggcctggcagccggccgaggacgagggtcggcgggggctgcccccgtggtggtggccgccatgctgggagcctgggcggttgagggaaccgctgtggcgctcctgcgactgctgctgctgctgctgtcgccggcgatccggggacccgggctcggcgtggccggcgtggccggcgcggcgggggccgggctgcccgagagcgtcatttgggcggtcaacgcgggtggagaggcgcatgtggacgtgcacgggatccacttccgcaaggaccctttggaaggccgggtgggccgagcctcagactatggcatgaaactgccaatcctgcgttccaaccctgaggaccagatcctgtatcaaactgagcggtacaatgaggagacctttggctacgaagtgcccatcaaagaggagggggactacgtgctggtcttgaaatttgcagaggtctactttgcacagtcccagcaaaaggtatttgatgtacgattgaatggccacgtcgtggtgaaggacttggatatctttgatcgtgttgggcatagcacagctcacgatgaaattatacctatgagcatcagaaaggggaagctgagtgtccagggggaggtgtccaccttcacagggaaactctacattgagtttgtcaaggggtactatgacaatcccaaggtctgtgcactctacatcatggctgggacagtggatgatgtaccaaagcttcagcctcatccgggattggnnnnnnnnnnnnnnnnnnnnnnnnnnnnnnnntatgatgaagggtctaatctcaaaaaacagaccaataagaaccgggtgcagtcaggcccccgcacacccaacccctatgcctcggacaacagcagcctcatgtttcccatcctggtggccttcggagtcttcattccaaccctcttctgcctctgccggttgtgagaacaaatgactatcctgaacagggtggaggggtgtgggaaagaaaccagccatattggttttggtttctgtatttttcacaatgattaatgaacaa

SEQ ID NO: 82658 - DNA, 716 bp, Homo Sapiens
  misc_feature (96)..(96): n is a, c, g, or t
tacggcgtaggcctcaatcccaacggttataacgcctacccgccctatccgggttacgtcggcgcggccagcagccctggatacagctgcactgcngcctaccccgcggggccttccccagcgcagccgcccactgccgccgccaacaacaacttcgtgaacttcggcgtcggggacttgaatgcggttcagagccccgggattccgcagagcaactcgggagtgtccacgctgcatggtatccgagcctggtagggaagggacccgcgtggcgcgaccctgaccgatcccacctcaacagctccctgactctcggggggagaaggggctcccaacatgaccctgagtcccctggattttgcattcactcctgcggagacctaggaactttttctgtcccacgcgcgtttgttcttgcgcacgggagagtttgtggcggcgattatgcagcgtgcaatgagtgatcctgcagcctggtgtcttagctgtccccccaggagtgccctccgagagtccatgggcacccccggttggaactgggactgagctcgggcacgcagggcctgagatctggccgcccattccgcgagccagggccgggcgcccgggcctttgctatctcgccgtcgcccgcccacgcacccacccgtatttatgtttttacctattgctgtaagaaatgacgatccccttcccattaaagagagtgcgttgaa

SEQ ID NO: 82659 - DNA, 338 bp, Homo Sapiens
gcccaggtcccgccgcggctctgcggaagcgaagtgctcccagagcgcccgagcctggaggacacagagccgtcggattccggggacgagatgatggacccggccagcttggaggcggaggcgcgacaaggcatgtaccgccagcatccgccatcagtaccgggcgctcatcaactccgtccaacaaaaccgtgagaacatactgaatgccggtgacaaattaacagaggtccttgaagaggctaacactctgtttaatgaagtgtcccgagcaagagaagcagtcctggatgcacactttcttgttttggcttcagatttgggcaaagagaaagcaa

SEQ ID NO: 82660 - DNA, 844 bp, Homo Sapiens
  misc_feature (649)..(649): n is a, c, g, or t
gggagtttctggcgcgaacttccgccgttccgaagttgcacggtgaattggcgctatgtctggggacagcagcggccgcgggccagagggccggggccggggccgcgacccgcatcgggatcgcacccgctcccgctcccgctcgcggtcccctttgtcgcccaggtcccgccgcggctctgcgcgggagcgcagagaggccccagagcgcccgagcctggaggacacagagccgtcggattccggggacgagatgatggacccggccagcttggaggcggaggccgaccaaggcctgtgccgccagatccgccatcagtaccgggcgctcatcaactccgtccaacaaaaccgtgaggacatactgaatgccggtgacaaattaacagaggtccttgaagaggctaacactctgtttaatgaagtgtcccgagcaagagaagcagtcctggatgcccactttcttgttttggcttcagatttgggcaaagagaaagcaaagcagctgcgctcagacctgagctcctttgacatgttaagatatgttgaaactctactcacacatatgggtgtaaatccgctagaagctgaagaactcatccgtgatgaagatagtcctgattttgaattcatagtctatgactcctgngagaatacaggcagaccagcaggaacctcttttatatacccatacaatggatatctggtgggttcatttactgtgagtcccttgtccggtggcgcgagttgttcgtgcagataatgtactgtgtacgtcagtacaggcaggccttccgtgttagcagattggggatatgattatatgtactggtactgattggaa

SEQ ID NO: 82661 - DNA, 732 bp, Homo Sapiens
  misc_feature (148)..(148): n is a, c, g, or t
agcgcaaccacctgcgggtggtggactcgctgcagacctccctggacgcagagacacgcagccgcaacgaggccctgagggtgaagaagaagatgggaggagttgcgtgccgtggtggagcaggacaccagcgcccacctggagcgcntgaagaagaacatggaacagaccattaaggacctgcagcaccggctggacgaagccgagcagatcgccctcaagggcggcaagaagcagctgcagaagctggaagcgcgggtgcgggagctggagaatgagctggaggccgagcagaagcgcaacgcagagtcggtgaagggcatgaggaagagcgagcggcgcatcaaggagctcacctaccagacggaggaggacaggaaaaacctgctgcggctgcaggacctggtagacaagctgcagctaaaggtcaaggcctacaagcgccaggccgaggaggcggaggagcaagccaacaccaacctgtccaagttccgcaaggtgcagcacgagctggatgaggcagaggagcgggcggacatcgccgagtcccaggtcaacaagctgcgggccaagagccgtgacattggcacgaagggcttgaatgaggagtagctttgccacatcttgatctgctcagccctggaggtgccagcaaagccccatgctggagcctgtgtaacagctccttgggaggaagcagaataaagcaattttccttgaagccgaaaaaaa

SEQ ID NO: 82662 - DNA, 358 bp, Homo Sapiens
  misc_feature (324)..(324): n is a, c, g, or t
ctgcttcttgccgcccttgagggaatcttgctcggcttcgtcaagccggtgctgcaggtccttaatggtctgctccatgttcttcttcaagcgctccaggtgggcgatggtgtcctgctccttcttaagctcctctgcaataatggcggaatccgtgatggccttcttggccttctcctcagcattcctgaactcctgaactgcctcctccaattcagactggagctgggacagatcagaatccatcttcttcttctggttgatgaggctggtgttctgggaatgcagcagctgcacccgctcactagtctcaatcagctcctntccgccagcttccgggaccgctctgtctgctcca

SEQ ID NO: 82663 - DNA, 478 bp, Homo Sapiens
gcagtgcccccacccagtccgccaaacactcaaccccctcccagctccagtttccaagttcctgcactccagaatccacaaagccgtgcctttctctggctccagaatatgcataatcagcgccctggagtcccctgggcctggaccgcttcccagaggccaggaatctgccattactctgcggtggtgccagaggttttaggaaacctggcatggtgctttcaggtctggggcttttagagccccccgtgtggcttacaaattctacagcatacagaggagcgggcggacatcgccgagtcccaggtcaacaagctgcgggccaagagccgtgacattggcacgaagggcttgaatgaggagtagctttgacacatcttgatctgctcagccctggaggtgccagcaaagccccatgctggagcctgtgtaacagctccttgggaggaagcagaataaagcaattttccttgaagcc

SEQ ID NO: 82664 - DNA, 1149 bp, Homo Sapiens
ccttatgcacgggagatatcaaacggagaagaaaagctgcacctttgcctggacctactactgcaggatttgtaggtgaaaatgcccagccaatcctagaaaataatattggaaaccgaatgcttcagaatatgggctggacgcctgggtcaggccttggacgagatggcaaggggatctctgagccaattcaagccatgcagaggccaaagggattaggacttggatttcctctaccaaaaagtacttccgcaactactacccccaatgcaggaaaatccgcctaagaaaagcaaagaagaaatgttttacagactttattcactatgtcccattgttctaaaatgataacatgacttctgtttttgaagcaaaaatctacattgcctcaaacacatcactctagcttccttactgcatacagtcctgccatagtgagagaaatgggatttcatcacaattcatggtgctaaaatgaaaacctctgcactttaatttttttcagtaatttccagctatttctaggtataaagagcagctcgtttctcttatttattttagtctcatgtgtcaatactttccgatgctttgcttaattcatgtatgtgtgcagtgctgcaatgcccagacaaacgtgagcacacccaccggtttctaaaatggaatagacaggaaaagattgtgttttatatcatccctatctattgtaacccaaaagacctaccatcgcatcagtgaagtccgaacacatctttgtttgaaaggcttgtcaatttcatattccttgaattggcttcttggtgaggattttctgacagagtgatacccatcaattttctatccttagacaatgtagtgtgaagttcacagttgacaaacaacaattaatgtttcccttggatgttttgacaaaaataaacctcatcgttgttatcaccagagtgccctctaccttactttaatgcagattttataaattttacctcatttagaacataaaataattattgaaagaaaaatgtattttttaaattcaccgtgattgaactgtaaattctattaatccagatgtacttctacctctgttttcccaaagattgatattatttttaagatcaactcaagtgtagtaaacggatttaaaatttt

SEQ ID NO: 82665 - DNA, 464 bp, Homo Sapiens
  misc_feature (299)..(309): n is a, c, g, or t
tctctattatttatccagaggatgaatttaattcctacgtacatgcgcccacatctcgtcagctggtgcctcagagaaatgcgctgacaaatcttaaaggtggggcttcatgacaaaagtccgcccgttattgctgctcaacagacccatcaagtcacgctgttggacaggcctcgtggcgcaacggtagcgcgtctgactccagatcagaaggttgcgtgttcaaatcacgtcggggtcaaacaaaacattgttttccctaatcaaatagacctacggtgacatttttcaggataggnnnnnnnnnnngcctcctcagtagaaggataggaggggaatgagacaaatatgaacgttattcagaagttgggtgcagactttcaacattatgtgatatatccctgtggcaaaactgcgcatgtatccctaaggtctataaaagtaaaaataaatttaaaaataaa

SEQ ID NO: 82666 - DNA, 539 bp, Homo Sapiens
  misc_feature (184)..(224): n is a, c, g, or t
gcggccgcctccgccaggcgcctgccgccgcctcccttgagactgccgccaagtcggctgtcgagttcccgggcccacagctggcacctgggactcggccttgcccagctagcggggtcgggacggctgggcgccggcgtgctgggcttggcgccggaggagagagcccagacgccgggaacgnnnnnnnnnnnnnnnnnnnnnnnnnnnnnnnnnnnnnnnnnggcctggggagctggaggaggtgccaagcgggcggaccaccgaggaggacctgggaggggaagtgttagggtaaacgttgggatcgggtttgtagttacctataaagtgattttagaaacacctgcgtggtggcagttgttgacgttcttgttcatcttttcagtcaccctccttccgtcccccattttttccttccatttgtttttcgtgttttacagtaaaggcatgacttcctggcaccacaggaaaaatcgggtgcaagcccagaaactatttccccaccaccacttgttgaaaaactgatttgaaggcat

SEQ ID NO: 82667 - DNA, 877 bp, Homo Sapiens
ccccggaagtttggttctgaccttagagtaagtgaggccctcccattcttccacatggcggagataggaaagccacggaccttgtggggggatccagccttcctcaaggtgggatgttggcttcccggccacattttcccaaaagtcctggataccactgactttctctggttggcgcagtactgtgccactgaagagatgcagttaggggccttctgcttctttctcacattctgctcttcaaattctgccttcttcttggtatgagtctttgactgaaggtggtcactaatggcagacttgcgaacatgattcagaaccacattgcaagaagtgcagaagagttttcctccatcttcatgcagctcacctccaaactcagtgactcgatccaggggagtcacatacaaagcagtcttagaacggtttcgagcaggtggtgctgttactacaaatcgctccattctgactctaaataaatatggttcggattagtttccagtttttttcgtcttgatacttagcagggaatggtctccagagcgaaaccagagacgcatcaaatcctggcactttccgtttgttcaaccccggagatgccttcaaatcagtttttcaacaagtggtggtggggaaatagtttctgggcttgcacccgattttccctgtggtgccaggaagtcatgcctttacgtaggatcgaggccgccgttagggaaagtggacgaggcccggccggaaaggaaaagaaaaggaagaaagaggagcaagggaataagggaggaggaggatccgtcgctgccgccgtcgccgccgttgcccgatcgagccccgcggcggccgccgtgtcccccgccgcgccccgtccgcctgcccc

SEQ ID NO: 82668 - DNA, 843 bp, Homo Sapiens
gcggccgcggccaccgcctcccggcccggggccgccctggagcccgcggtggcctgaggcgccgccgccgccggccgacgtgctcggggatgcggccctccaacgcctgcgcgaccggcagtggctggaggcggtgttcgggaccccgcggcgggcaggctgtccggtgccccagcgcacgcatgccgggcccagccttggcgaagtgcgcgcgcgattgctccgggctctgcgcctggtgcggcggctgcgcggcctgagccaggccctgcgcgaggccgaagccgacggcgcggcctgggtcctgctgtactcccagaccgcgccgctgcgcgcggaactggccgagcggctacagccgttgacccaggctgcctatgtgggcgaggcgcggaggaggctggagagggtccggcgccgccggctgcggcttcgcgagagggcccgggaacgcgaggccgagcgggaggcagaggccgcgcgggcagtggaacgcgagcaggagattgaccgctggagggtgaagtgtgtgcaggaggtggaggagaagaagcgggagcaggaactcaaagcagccgctgatggcgtactatctgaagtgaggaaaaaacaagcagataccaaaagaatggtggacattctacgggctttggagaaattgaggaaactgaggaaagaggctgcagcgaggaaaggggtctgtcctccagcctcagcagatgagacttttacgcatcatcttcagcgactgagaaaactcattaaaaagcgctctgaactgtatgaagctgaagagagagccctcagagttatgctagaaggagaacaagatgaagagaggaa

SEQ ID NO: 82669 - DNA, 895 bp, Homo Sapiens
gttttcacaccatcaccctctgggcagctgtcatggaaaagcccagtgacctgaccagcacctgcgagaggtccctgcttacctgacggacgtcctgctggcacctcagacaatccactctcaggaggcgcagcccgaagcccagtttcccttctatgcagtattgccacaatgcctctcccacgatgtcaaggactcctgtctgtcctggaggtgggagacaaggaacctccgaagaggaagcaagaaagccgtactgtctatgttgtgatccttcatcgaacaaactgatgcgaaaacttgaatctgttactgaaatgaggagagaaggacatgtgctattgaactgagccaaacacactgtaaatatccacagactccctcccctgcccccatcccaaatgatcttgagatttctttaaaagaagtaaatttgtccaatggctgtaaactataaactactgtaattaagtgcaatttcccctctgtgtcctctcccctctgccctgtatataatactaaagtgtctattagttttctttgtaaaggtcagagtcatttcaaaagtgatctgtcccctctcccctcatggagaaacatcctaagtgggaagtgaagccccttgtcctctcccgcgggcctggacacttatggggacagcataccttggactgactaccagctaactccagtctcctgacattaagacacacctctggatccctggaggggctgaatgtagtgtgtcagagtaacatgccagcttcctgtgggccaggagctcagccgtgcactccctaagaaaccccagggcagggaaactggctgtttgatagcagaagaaaaagttgcagtctcagaaagccttccattaaaacaatttattttatcacta

SEQ ID NO: 82670 - DNA, 519 bp, Homo Sapiens
cttccacattataaatgaactgcctttccaggtccaacatgctgtcaggttgcttcagctcggtgtgaatgtaagtgtggggatcaaacacacacacctatacacatacatattaatatgcagaggattttaaataattgcaaatgtcttgtggctgttttatttctacaaaattctgtaagatgtataccagaaaacataataaagataagctcagttcttcattgggaaaaaatatttttaaagaaaatttagaagtttttgctgaattaaagtatcttcaattttaattactggatttggaagttgaaatgccatccttcaatatcactggtctcaaattcattgatagaattttttcttaaactaataagtggggtaagtataatctcctaaattggtacccactggctgctcctaaactggtttccagtcatgtcctccagtatgtgatttttataaattaaaggtaatattgtatattaaagttcaaataaagatgttctttaagtgaaaaaa

SEQ ID NO: 82671 - DNA, 1033 bp, Homo Sapiens
cacgaggtgtctgcccaccacctagtgtaaaataaaatcaagtaatacaatcttaactgttgtggccttttttgatcataagagttggtactgtttaaggccaaaagtaacagtttttatagatcttttagtttcaactcagcttttacaataaaaaggatttgtattgcattgagtttataaacttttggtttgtgaacttcatatttgatcttttctcttccaatcaaatgtctaggcttgtttgacttccacccccaatggtttttcactctttttatttacttcattttcctttaataacttaatctcttcatgttcagtttttacttcactctttattcttttctttgattatggtatgcttatttggaaagtcagtgaaactgtcaaaatgttatctcaataagatacttatatgagaactacaatcaccgaatctactgtattcaatattagcagatctaatttgataaacaacatggcttgtgtgaaaactgagcaggtgtttgtttacccatagtgttctgtgtagttattgcttagtctgcagaaaataatgacttagatgagatgtctgacttgctttcacttattaaacatgttcaccatgggatgatgtctgtaacatcagatattgttcaactagactaggatttaataaaaattgtgaaagcttactggcctaacattttattttataatattgggtatgaattatatgtagccagagatgtcattaagctttactgttatagtaggtaatatggttagtttgtagggaaaagagcatatgagcacatgcttgtgtattttggcctttgccccagtagaacagaccaatggcattctagacttgatgatactaagttttagcagacactagtaagtggtttgtatttaaccatactgatgaagcagacagattgaggcacagattttagtggctttgtggcaataaatagggcatggtgtgccttaggaaaagaatgtttataaagggaattataactgaaattaaaggaggataaag

SEQ ID NO: 82672 - DNA, 1743 bp, Homo Sapiens
cgacagggagtttggagcgtacacgcgaacttgatccgtacgaacgtctacagttggcgggtagcaaagcactctagacgaggggggaagatccacagcgagtttcacggtctgctgatgatctgttcgcacgcggacgagaaagagaattgcccgggccccattccgcagggggtgtataatagtggggggtcgcgggctcgcctttcacttatacaaaaaaattcttaccacgcgaagagcgtgggggttcccacaccggggacagcattatagaggagtggcactgggcggggcaagttccgcgccccggactgacggtgagggcacggattaggttggcatggtcgggggtgcggacggggtggcttcgggacaagccccttaacccaacggggggtggttggatgtgggggtaaaaacccggggggaaccgcggctgatgccgacctcctccacgggacccgagatcaccagcgggaggaggttattatgggggcagcctggaagcacaaggttctcaggtcatctctcgtgcacagcagagctcctgaggccatgcccaccagcagagcctgcgccagccggtccagcgagagctcaatctcctggggaggcgttgagggggttcagttcatccgccaacctgttgatctcctctaccagcgggaccatgtggtcgaagaggatcagccccaggcgcccatacagattcttctcggtcaggtgcagctgcagcgtcatgagcacttgcaggacgctgaggtggagttttgagtacaagaggtgggagtctctgtccatccccacgcccgggtcctttgtgaccttgttgctgacatggccattggataaggggggcttctttttccttttataagccaggggtgccttcacgcaccagcggatcaatccaacgagcggggtgagctctaagaatccttattggcagattggccgcaatcggagtatttaaaaaagtgatgagaatcaacccttgggtcctcaaaaatccaggtgacaatcatttcaagcaagtccataggtggaatgaggtcatctgatgacaggtcatagagcgcggtaacggaggtgatgaactggcagcagaatctcgggctggcactgaatatctgcttcagcgtctgaatggatcccggcaccaaacagcagtagtcatctacaagggccttggctaacctcacacagtaaaccacgggcgtccgctgaagccaggaggcagcacactccaacaccgggattcgacacacagccaccgccatggagaccagttttcccaacaagctcatccggctgtcatcggctttgttcccttgagggctgaaaagggatgaaaaaataatctgccgaacagagtccttggtttgctcctggaaataattgcacatgatttcaagaagttgaagctcctgaagggaattcagtctcttgggctgcgcgctgcgctccttgggcacctggaacacgaactcctccagcagctccacggggcccttgtccacgatgggcagcggcgcgctctgcagctggctgctgaagtagatgtccaggtggtacaacacctccttggcggcgctcagcgcatcgcggcgcagcagcgagtggcggatgtcgctcatggtgcggccgccgcggcccccgcgccgagcgcgtctcacttccgcccggggcccgggactgcgcctcgtgccgaattcgccacccaggcctcgctaccttaga

SEQ ID NO: 82673 - DNA, 395 bp, Homo Sapiens
tgctgggattacaagcgtgagccactgcaccgggccacagagaaagtatttctccaccctgctctccgaccagacaccttgacagggcacaccgggcactcagaagacactgatgggcaacccccagcctgcataattccccagattgcaacaggctgggcttcagtgccagctgcttttgtctatgggactcaatgcacctgacattgttgcccaaagccaaaagctagccctgcccagatgcacccagcccttaccagggaaacagctaacgggacactaatgggccggtgagaggggaacagactggaagcacagcttcatttcctgtgtcttttcacacatacattataaatctctcttaaacagcagtccaggtttgagttcataccctg

SEQ ID NO: 82674 - DNA, 963 bp, Homo Sapiens
  misc_feature (218)..(218): n is a, c, g, or t
  misc_feature (228)..(228): n is a, c, g, or t
  misc_feature (230)..(231): n is a, c, g, or t
  misc_feature (237)..(237): n is a, c, g, or t
  misc_feature (241)..(241): n is a, c, g, or t
tttgacaggaggaagaatggcctgatggatcatgaggatttcagagcctgcctgatttccatgggttatgacctgggtgaagccgaatttgcccgcattatgaccctggtagatcccaacgggcaaggcaccgtcaccttcccaatccttcatcgacttcatgactagagagacggctgacaccgacactgccgagcaggtcatcgcctcttccggantctgggtttngnntaagcnatantatctggcggaggagctgcgtcgggagctgcccccggatcaggcccagtactgcatcaagaggattcccgcctactcgggcccaggcagtgtgcctggtgcactggattacgctgcgttctcttccgcactctacggggagagcgatctgtgatgctgagcttctgtaatcactcatcccatcagaatgcaataaaagcggaagtcacagtttgtttcctggaaactttgacaagctttattaagttgagagagagagaggggagcaaaaaaagcctttcgtagttcagtaattgccagcaatataacacggctaaaatgaagtttttacagtatatgacatagtgcgcttcataaataggtttatttctgagtttttagcaaaatgtaatgaaatatcaggttgatttctttgattaaacagaacaaattacttgagtaataggaaattaggaggatctagggacagaaggaaagtgaaaaatgtgaaaatacaaaatacccaagatttaagaccggggggaaaaaaccacaaattggtaaataaaggtttgctatttgtaaaaaatttcatttatctctaatatgcttatgtgattgcccctaggggagtatatttgggattctaatgttttattttcatgcttatccaaagattactattgtatcttcaaatgaacttaatattgtgagatggaactgccggggattaaaaagactacc

SEQ ID NO: 82675 - DNA, 571 bp, Homo Sapiens
gacatgtcggttctctgtcctgtcacagctaagaactaagaactttagagtctttcagccatagagggtcctgtcatccattgaagggatcagtccattgggattttgccagttttagcattgatgctgtgtcctgggaaacccctgaatacttatcatagcagaagttcagccactgtagccctacctcaggaccgcttttatgggaaagaataattcctttaactgcttgagccatttgagttgtggctgcttttggtacttgtaataaattgaaagcatcttgaatgttctgggacagtaaaagaatgtgcctttgtttctgacagcaattataaaatcaattatatgtttatattctaaaaaatgttttgagtaatgctgacatcattggaaaagtgcatcacttagaaaatgtatctgtgtgtcaattttgtttgttcaaaatcagtttcattaatttgtgggaagatacaccttgtacattttacctaattaaaaaaaatattgccagttgagtatacttgtgatatattcaaagataaataaactttttcaattttaaaaaaaa

SEQ ID NO: 82676 - DNA, 1353 bp, Homo Sapiens
  misc_feature (1105)..(1119): n is a, c, g, or t
tgcggccgcgggcagcagagcccagcctcggcggtggccggtccaggtcctctctattctctgctcgctgctcttcgccattcttctcgccttcctcctcgccatcgcctacttgatcgttaaagagttgcatgctgagaatttgaaaaatgaagatgatgtagacactggactattaggattctggactctacttataatatccctaactgctggattctcctgttgcagcttttcttggacagtgacttactttgattcttttgaaccaggaatgtttcctcctactcctctttcacctgccaggttcaagaaactgactggacattctttccacatgggctatagcatggcgattttgaatggcatcgtagctgctcttactgtagcatggtgcctcatgtaaacccacactggagcgatattgttggcaaaacttaatcatgattgttttgtaataacaagaaggagcatcactgtctactcagaagactgagaaacctgctgttcattatgtagttcagatatttatcacaatcatcctcattatggaagaccttttaaagcattgttttagaatgtctgagtattaagatacagattaattgggaatatctgagtattaagtactttcttcagagtataagatgtttacctcatctttttacttttgtgtgtgtagttctttcaagttgtaggaaacattttaatggaatttaaactcaaaaacttgaatacaggacaatgcttgccttttcatgtatgtactacattttttgctaagaaatactgatatttctgtttagttgagctagaaatacttcttatttatacatttaggaaagcaaataatgcctactactccgacttttatagaagctacttttaaatcagaatatttaatttttgatattcatataattaatagaagttgcatttatattttttatggggcatagttccttatgtgtttttttaatgtattttcatactacatactgaatttgtatgtttttaaaattgttacatcgtagacaactgtaaacattatttttttagctagtgcaaacctagtacctgccatttttactaatttttgtctttnnnnnnnnnnnnnnngcacattgacctaagttgaaaattaagtaagtttatttttaacaaaaaatgcctgaaaaaagctaaattatttaagtcattaagatattgagaaaaaatttgaaatttttactatttctgtttccacaattccaaatatttatcttggtgtatatattgttactttaacagaacttgcattattttgtttttaataaatataaacatgaaatttttgtaaatcgaacacccttc

SEQ ID NO: 82677 - DNA, 439 bp, Homo Sapiens
tctgctcgctgctcttcgccattcttctcgccttcctcctcgccatcgccgacttgatcgttaaaggtattgaagccgacgccttgaaagtctgtccagagtaaagttgagccagggtgtggctctcgtctccacccatctccctttccctcgcgctaagccctcaggctggcagctgctttcacccagagtcctcatttgcatcttactttgctctcccgccctttgccttttctaagtggagcgtcctgatccatgatcaggagacgtatttttaaaaaggatcgtttgattaaatgggtactcttgaagaaatatcttcaagtccttgaacactggggatgaaatattgtcaagattaaacaaaatgcgaaacacccaccattaaaaggagacagtgaaaagtgcatataattaaaataggccatgttcaatggcc

SEQ ID NO: 82678 - DNA, 560 bp, Homo Sapiens
  misc_feature (453)..(453): n is a, c, g, or t
accaaaccccaccctcggcggtggccggtccaggtcctctctataatctgctcgctgctcttcgccattcttctcgccttcctcctcgccatcgcctacttgatcgttaaagcgtttagtgggctacagatggcatggcatctaaaaccttacaatgcttgattttcatacagaagacactttggccagttgatgtgggttttacctcttcataaaatgagttgcatgctgagaatttgaaaaatgaagatgatgtagacactggactattaggattctggactctacttataatatccctaactgctggattctcctgttgcagcttttcttggacagtgacttactttgattcttttgaaccaggaatgtttcctcctactcctctttcacctgccaggttcaagaaactgactggacattctttccacatgggctatagcatggcgattntgaatggcatcgtagctgctcttactgtagcatggtgcctcatgtaaacccacactggagcgatattgttggcaaaacttaatcatgattgttttgtaataacaaga

SEQ ID NO: 82679 - DNA, 1192 bp, Homo Sapiens
  misc_feature (613)..(613): n is a, c, g, or t
  misc_feature (621)..(622): n is a, c, g, or t
  misc_feature (624)..(624): n is a, c, g, or t
cgcggcggaaagggctgtgcgacctagcgctggtgcggattctattccggtgagcactcgcggttctggggcgcagacggcttgttccgtcattaaaagcgagccatttagtggggcatcactcgctgttcgtgttgtttctctccttgcggggcctagcagcggtgccgccgttttttgtttcctgataggtgtccccaccgcccgtcggggtcgtaaggcttcggtgcgcgcacgacacgttgtgaggcggtgccgtgttgggatgtgcgccatggcgcggtgcgttttggttgcgaggggagagttagggggtaagatcgggcagcacgtgggtttcggtgtgtggtgtagggacgactccctgggcggctgggtcccaggtcgcggggggtggtcccggagggaaccaagcggggggcgccaggttccgattggcgtacagggagcccccggggcgcggagggggatgggtctcaggagaggtttctccggggggcggaaagcgggccacacagggaagtgttgtttggaaggggacagtgcgagttccccccagtccacacagcctttatttctgtaccaagcagcaggtcagcaggtgggtacaggncccgctcnngntaagacctccccacctccccccaggaaagaagcagagaatctctgcaggcaccagactccctgcctcccccactgcgtttctctcactggccgcccagaacctgtgagagggaggaggggtgaggcgtaggggagggggctacagaacatggagcccattggtctgcaaggcaggctgaggggctttggatgtgggggactaggaaagggatgtgagtcttgatttacatataaaatcatcagtctgcacacgctctaggaggggccaagacatagggacaatccttggtgcaggtttctgctacccctcgctagtttttgccaaagtagcaaaagctgagttaagagaaaaattctgtccatcagaggccatcttcctctcatctgatatgacgtgttcctccagcagggagggagggagagcgggtgcccttggggaatcagccatccttagtgacatcctttcggctcatgggtgtcgtggggagggggcaaggagtgaggccaagagtccaggaagcccaccaggctcagaggcccccagctgtgcagacagcgcggcggccgc

SEQ ID NO: 82680 - DNA, 469 bp, Homo Sapiens
tccctttcctctttaagctcagctcctatacacgtgagcattgcagaacaccaatgtttaacttttagccttgtccccatggtgccagttgaatgtggagctgccagaagggcctgtctacagctgtcctgcctggctactaaaggatccatgccttctgcagccaccaagcagcagggcagagtggcggtgctccagcataacccttttttaacattcgtactcttagaggcggcatggccttggggaagggatcccacctccttcgtcatctcactctgtctattctgtgtgtggttatttaatgtccatccacctggtggtggacaggctgtaagctccttaaaggtacatatctgtgtctgttgcttttacattgtattcccagcactttgcagagtgcctggaaagtagcaagaacataatttatatttgtccaataaatgaataaataaatggatttcccctg

SEQ ID NO: 82681 - DNA, 490 bp, Homo Sapiens
  misc_feature (457)..(457): n is a, c, g, or t
tattggcctgcttggttctgcccccgatgcagcttccaacctttcggtgctacccatccgcatgaaaagatgggctcttgtgtgcccccggaaatgggatctaccacctgactgaagggagcaccagatctcagaactgaaggcccgccctgacatgaagactgagctctttttccagctcatgcccaggtggaatcatgcttgaatgagacaggccagggttaccagcgctttctcctctacaatcgctcaccacatcctcccgaaaagtgtgtggaggaattcaagtccctgacttcctgcctggactccaaagccttcttattgactcctaggaatcaagaggcctgtgagcagtccaataactgacctgtaacttcatctaagtccccagatgggtacaatgggagctgagttgttggagggagaagctggagacttccagctccagctcccnactcaagataataaagataatttttcaatcctc

SEQ ID NO: 82682 - DNA, 807 bp, Homo Sapiens
  misc_feature (744)..(744): n is a, c, g, or t
gggaggggagagagcagttaaggcacacagagcaccagctccctcctgcctgaagatgttccaccaaatttgggcagctctgctctacttctatggtattatccttaactccatctaccagtgccctgagcacagtcaactgacaactctgggcgtggatgggaaggagttcccagaggtccacttgggccagtggtactttatcgcaggggcagctcccaccaaggaggagttggcaacttttgaccctgtggacaacattgtcttcaatatggctgctggctctgccccgatgcagctccaccttcgtgctaccatccgcatgaaagatgggctctgtgtgccccggaaatggatctaccacctgactgaagggagcacagatctcagaactgaaggccgccctgacatgaagactgagctcttttccagctcatgcccaggtggaatcatgctgaatgagacaggccagggttaccagcgctttctcctctacaatcgctcaccacatcctcccgaaaagtgtgtggaggaattcaagtccctgacttcctgcctggactccaaagccttcttattgactcctaggaatcaagaggcctgtgagctgtccaataactgacctgtaacttcatctaagtccccagatgggtacaatgggagctgagttgttggagggagaactggagacttccagctccagctcccactcaagataataaagataatttttcatccctccgnagcacggcaacccccgcaaaaataccctgttcggcgcgccctcgggccctcggaaaagatttc

SEQ ID NO: 82683 - DNA, 395 bp, Homo Sapiens
tgttaagtaaactacacaaaagcagagttgctgtttacatacatcatgatgccgtctggacttgagcaccttggcggctcaggattaaggcacctcagtctagcctagcagagttacaatggagagaagtgaaaactcattagtagctcaaaacaagctaaaggatttcagatgctctttttcttgttcatctaaatcaagtcttcatctgtgtcaagaactaaattgttaaagacctttttaatttgcttagtgcaagaaaaataatagcaaccatatatctagttaacttgagtcttctatgcctctaaaattttgtttagagaaagcctatttctattgaggttgaggaacacaattctaatacttagaaaattattaacattcaaaaaaaa

SEQ ID NO: 82684 - DNA, 564 bp, Homo Sapiens
gcggccgctcaggagcacggaggcttctcaccaactgcgtcaggaaaacaccaggaccacctggggaagataaaactttttttctttaaataaatctataaagtaaaacactgttacaaggggaaaagaaagccccactttatgtatttggttgcccatggttttaggagcatctaatctaatttcaactgaactcctaatgaactagtcatgcacagatgagtctgcttcagcccctgtctcctccattccaggggcttctggaaatgggcctcttctacatacagtttaaagcagagctgggtggactgttagaggtaggttacaggaggaataaagacccatcttcagaggaggtctcagcaccacgacatgggagcacctctcaggacaaacgataacttgagcggcattaacgctgaaacgaagcaccccttgcagcgtctgtcgctggtgcctgcagatggcctgcgctgcacttgggtcatgccgcacccaacaggagtcagaaggtgactcgccactatggccgtctactcacatgcaacagtccatgcagagggc

SEQ ID NO: 82685 - DNA, 1272 bp, Homo Sapiens
ttctaggcataaatgtgtatttaaaatttcatagtaaacaaatacttgtaagtgataatttccccattttccaaataagataatgttgaacagacattatgatgaattttatatttgatctctttttttggtaaatgtggttgtgaaaattgagttatatattcctcttttcaaaattctccgctaaacaagcacttgtttttgatattggtcaagacatttggcatactaagtaagggagcaatgctggggaagatacctgagaagacaagcgtgccctcccctcactatctccctcactttttttgctttgaggttttaacatcaagatataaattattttaaggtctcaaaataatcctttcacaaaaataagacagttttatgttgtaaaaacattagttatttgtcaaaggttatgttcttccatcttcatctgtcactagctgtcggcatctcctttaaagatcagttttttcttcataatgacacctgcatgcggctcgttggctgtccagatatggtttacaacctaaatgtataacactgtcaaacaagagctccactgttgtttcacatgcctgaacatgctgagttagtcctagtgttttctgtacatctcggcagatcttggagaggcaatactggaattcttcatcacagtcattcttgcttttgccacaggtttcatagcacctgtcgtgttggttgcaacactttgtcagggaagggataccaatgttaagatgaacaccaaacagtggagagccacatccattcggtggggagggtttataaccataacgtgggaaaggcttagatccgtcactgcatttatactggcagagaccgtcctcgcctcccaggaggtccaaggcggcgttcaggtacgtgtctatcttatgaacgccgttccggatggtcttcagggtggctctccagtcggtggtctgggcctgctcctggcacctgacaacagcggccatgaggaggagcaggagggtgagcgcggggcgcgagagcagggccatgcgcgcagcgccgggctctacgggtccccgagccgcggcgcggggcgcgtccccacagagtccccaggacgcgctaggcagcggcgcgggccccggacttggcagcagccagctccatatccacgcctccttcccggctggccctcaggatctcgctgtctttacgtgaaccgcctcgggcaggcagcgccgtcgcggggacgcgcccgccggacgcgtggtcgacgatatcccgggaatt

SEQ ID NO: 82686 - DNA, 887 bp, Homo Sapiens
ggcagtaactatacggttctaaggtagcgaggcctgggtggcgaattcggcacgaggtgagggccagccgggaaggaggcgtggatatggagctggctgctgccaagtccggggcccgcgccgctgcctagcgcgtcctggggactctgtggggacgcgccccgcgccgcggctcggggacccgtagagcccggcgctgcgcgcatggccctgctctcgcgccccgcgctcaccctcctgctcctcctcatggccgctgttgtcaggtgccaggagcaggcccagaccaccgactggagagccaccctgaagaccatccggaacggcgttcataagatagacacgtacctgaacgccgccttggacctcctgggaggcgaggacggtctctgccagtataaatgcagtgacgcttaacattggtatcccttccctgacaaagtgttgcaaccaacacgacaggtgctatgaaacctgtggcaaaagcaagaatgactgtgatgaagaattccagtattgcctctccaagatctgccgagatgtacagaaaacactaggactaactcagcatgttcaggcatgtgaaacaacagtggagctcttgtttgacagtgttatacatttaggttgtaaaccatatctggacagccaacgagccgcatgcaggtgtcattatgaaaaaaaaactgatctttaaaggagatgccgacagctagtggacagatgaagatgggaaggaacattaaccctttgaccaaataactaaatgtctttacaaacataaaactgtcttattttttgtgaaagaattattttggagaccttaaaataattttataatcctggagggtaaaacctccaaagccaaaaaaggggaggggagaata

SEQ ID NO: 82687 - DNA, 484 bp, Homo Sapiens
caaaagaactatatcttttatgtctgagaaaaagttttaaaatcagcacctacacagcaataaatggtttaatgatagccttttaagtgcaccatcagagctcttttatagaattttgtgaaagacatactagataatttccatggaagttggtctcatttaaatgatactatcctaaggaacatttcatataaacaactcatattttctttaagtttcttttaaaggttgagctgacagtcacatcaggatttgataagtcagagcagtgctgatgttattacaaggtaatacttttgcaatcatcagcaacaggataggactgcagaactgtaacagactttgcatgaaaaaatacaaaataatatcatgtttgggcagttgtgataataaatgatggcatatcagtgtagaggtagtagtgaaacaaatgaattattaaagaatattatttttaagtatattaaagaatataaagaatata

SEQ ID NO: 82688 - DNA, 932 bp, Homo Sapiens
  misc_feature (22)..(22): n is a, c, g, or t
ggatatcgtcgacccacgcgtncgccggagcagctgtgcagagctgcaggcgcgcgtcatggctgctttgagacagccccaggtcgcggagctgctggccgaggcccggcgagccttccgggagagagttcggggccgagcccgagctggccgtgtcagcgccgggccgcgtcaacctcatcgagggaacacacggactacaaccagggcctggtgctgcctatggctctggagctcatgacggtgctggtgggcagcccccgcaaggatgggctggtgtctctcctcaccacctctgagggtgccgatgagccccagcggctgcagtttccactgcccacagcccagcgctcgctggagcctgggactcctcggtgggccaactatgtcaagggagtgattcagtactacccagctgcccccctccctggcttcagtgcagtggtggtcagctcagtgcccctggggggtggcctgtccagctcagcatccttggaagtggccacgtacaccttcctccagcagctctgtccagactcgggcacaatagctgcccgcgcccaggtgtgtcagcaggccgagcacagcttcgcagggatgccctgtggcatcatggaccagttcatctcacttatgggacagaaaggccacgcgctgctcattgactgcaggtccttggagaccagcctggtgccactctcggaccccaagctggccgtgctcatcaccaactctaatgtccgccactccctggcctccagcgagtaccctgtgcggcggcgccaatgtgaagaagtggcccgggcgctgggcaaggaaagcctccgggaggtacaactggaagagctagaggctgccagggacctggtgagcaaagagggcttccggcgggcccggcacgtggtgggggagatcggcgcacgtgccaggca

SEQ ID NO: 82689 - DNA, 750 bp, Homo Sapiens
agcagtcaggttcagcagctatgtactcttcagggtggatggtcgctgatatcatgttccgacgtcgtgctcgttactgagcgaatgtcatttagtagcaggacaccaagacagtatctctagctcatgtgtaaatgtgtttcatgaaacgaagccgggctctcctccgccggcagcacaggtgaatgagcactccaggggaaccagcagaaccaggacgccagccaccagcaggccaagggtgatggggctacaaagtgggcccttctgggtctctggcctgggtaaccggcacactctcttcttgagggtggacttcttggtgggctgggcagtggtgggaaggaaatcaaccacactcagctgagttcccttcccgaaggtcagctcggggctcccgacgatcatgcagaagtagatgccactgtcttccggcttcacgcttgtgagattgagaatgaaccggcttgcatcccgaaacacagctatcttctcctgttccacctcttcaccgtggatagtcccttttgcggaatcccagagggccaggaactcgtggtgactgtcactgctcggtgcctggcgctgtctcagccagtagatgcgcatgttactgagggagattttagcctcgcaggacagcatcaccatcttgttggtttgcacctttatgtatgcaggggtctgctggaggactgagttgccatggagaactgtcatgcgcggccaggaggacgcacagcccggccc

SEQ ID NO: 82690 - DNA, 581 bp, Homo Sapiens
tgcaacctttttgtgtgatggcatggagcatcttttcgtggtcatcggtgattactaggtagaagggttcattgccccagggcactttcacagagtgtgcgggagaactgagtaagaaatgctgcccatgccaccgcttccggctcctgtgctttccatgaactgggacctttagtggtggccatttagccaccatctctgcaggttgctttgccctggtaggacagtaacattgggtcctgggtctttcatggggtgatgctgggctggctccctcttggtcttcccaggctggggctgaccttcctcgcagagaggccaggtgcaggttgggaatgaggcttgctgagaggggctgtccagttcccagaaggcatatcagtctctgagggcttcctttggggccgggaacttgcgggtttgaggataggagttcacttcatcttctcagctcccatttctactcttaagtttctcagctcccatttctactctcccatggcttcatgcttctttcattttctgtttgttttatacaaatgtcttagttgtacaaataaagtcccaggttaaagataaac

SEQ ID NO: 82691 - DNA, 438 bp, Homo Sapiens
taggctgtgcaagacgggatgaggacccacagcctgggttcctgctgggaagcaacctggactccggcctccctctgtgcatcagtttccacatctccagagtctagggccctcttcctgagtgacttaatccctgaagagagtgtcctgtcaggggtctcagtctggctcccagggtgggcaccggccagggcgtggagcgtcttggtccggccgagcccccacccggggctgacaatccccctccccctcccacagcgcacaactacgggattggcgccgccgcctgcgtgtactttggcatagcggcctccctggtcaagatgggccggctggagggctgggaggtgtttgcaaaacccaaggtgtgagccctgtgcctgccgggacctccagcctgcagaatgcgtccagaaataaattctgtgtctgtgtgtg

SEQ ID NO: 82692 - DNA, 982 bp, Homo Sapiens
ggcctgggtggcgaattcggcacgaggcttgcgcttcccgagctggcggggtccgtggtgcgggatcgagattgcgggctatggcgccgaaggtttttcgtcagtactgggatatccccgatggcaccgattgccaccgcaaagcctacagcaccaccagtattgccagcgtcgctggcctgaccgccgctgcctacagagtcacactcaatcctccgggcaccttccttgaaggagtggctaaggttggacaatacacgttcactgcagctgctgtcggggccgtgtttggcctcaccacctgcatcagcgcccatgtccgcgagaagcccgacgaccccctgaactacttcctcggtggctgcgccggaggcctgactctgggagcacgcacgcacaactacgggattggcgccgccgcctgcgtgtactttggcatagcggcctccctggtcaagatgggccggctggagggctgggaggtgtttgcaaaacccaaggtgtgagccctgtgcctgccgggacctccagcctgcagaatgcgtccagaaataaattctgtgtctgtgtgaacacagaaccaagatgcccaccagagcttcaacccaaagcgcatgaatggaagcttcttcaagcaagacaacatttgagccaagcaacgataggcccgaccgctcgatcacattatatccaacgtggctgcgcctcccattggaatgtgggctccctggcatgtgctcccttagactaccaatgccatggccggatagactaggccgttgcggcccccattagttcgcccactatgtaaccaactgtcccggaagaacctggtccacaacaacacggggccgaccggggtctcgactggagacacccgtggcctacttaagtgaaacttcttgtttccaggaaaacaccccacgtgtatccgttggtgtagtttcccacaatacatttgtctgtggattacccattccag

SEQ ID NO: 82693 - DNA, 920 bp, Homo Sapiens
attatgtgaaaaaccaaatgctttaatgaggctatcaagaacaagtcgattatttcattggatacattaatatcgatccataatatacagtgctatggaccatacagaaattattgctgcatccaacagcaggtgactattattaacattacagtaccaagcatccgcaagagacagtcatttgtcattttttatcaagaaatagggctgttttatactgttattgacatcaactttttcccagtgcatttttcaaaaatattaataagttcattcctttgtgcttttaacttcctatgtattgtatttgttcttattgctttattgtttaaaaacaaccagaaagaattttgtcatcctatgtatgaccaggttgcttgtatgctttttggcaaagtcagaaggtttggtatttccattgccctactcagaggcagatggacaattttggcattttggtccactccatatagaggcccaaccccgagttacaattctgcacccgggaatcgggggagtggtgtggatcattttcttgttacaaacaacaagcccaaaccactgcctcttggcttagctagcccctaaaatgaatccacactctatttggcaaaaaagaaataaataaaaccacccccaagattgcagcattctcctgggcttgctcacctgccacctgcagaaattgtctcttaaggagaaggggagggggaggcaggcaatggcaaggttaggagttgtgacagtcagggcagtggtacaagatgccatactttctttcaacaaagctttctatatggttgcttaaccatggtcctgttcccgtggccgtaggttagtcaaccttgctttatttttaaaaaccctcaaaatcagctaaggaaaactaacatcatagcatcacgatcttcaacttttgc

SEQ ID NO: 82694 - DNA, 558 bp, Homo Sapiens
  misc_feature (48)..(48): n is a, c, g, or t
  misc_feature (494)..(502): n is a, c, g, or t
agctgcaggaccaaggtgaagattgatagtccaaatgcttttcttttntgagttgtatattttttcacaccatcttagatataataaggtagctgctgaaagggaaaagtgaatacagaattgagggtattattggagatttttccctctgcgtagagccatccagatctctgtatcctgttttgactaagtcttaggtgggttgggaagacagataatgaagtaggcaaagagaaaaggacccaagatagaggtttatattcagaaatggtatatatcaatgacagcatatcaaacttcctatgggaaaaagtctggtgggtggtcagctgacagatttcccatttagtagtcatagaatacagaaatagtttagggacatgtattcattttgttattttgagcattgataggtcagtatatctacctaatctgtttggtaagtataggatatataaaccattaccattgatctgtcttatgccataatcttnnnnnnnnnttgaatgctcttgaatttgtatattcaataaagttatccttttatatttttaaaaa

SEQ ID NO: 82695 - DNA, 417 bp, Homo Sapiens
cagttccaactaaggaggcatttgtgggtgctttattcacacccggatgggaggacgtggcagctttgtggctggcaggctgacttcccacgttcttggagcccacgttgaggggctagcattgctctaatgtctgggtaattttgaagaaagctgctgcgggtgcaccgggagccctgttgtgcgtcggtgacccctctgtgctgcgatggccgtgtcctgcctttggtcacacagggtcccaatgctgaggctcactctgcagacgcattaccctcacctgagtctagagatgccaccatgggcttccccggtggatttgctcacaaacgctctggagctccataaacctcatggttttctttcatatgaaaaattcttttttgtggtttacaggaagaaaaattctgatgttcc

SEQ ID NO: 82696 - DNA, 1536 bp, Homo Sapiens
cagtcgacggtaccggacatatgcccgggaattcggccattacggccgggaacgtgtttgatggcttggtacgagttactcaagaattccatatgaaagtcaagcatctgattgactcactcattgattttctgaacttccccagattccagtttccggggaaacctgggatatacactagggaggaactttgcactatgttcataagggaggtagggacggtactgtcccaggtatattcgaaagtccataatggttcagaaatactgttttcctatttccaagacctagtgattacacttcctttcgagttaaggaaacataaactaatagatgtaatctcgatgtatagggaactgttgaaagatttatcaaaagaagcccaagaggtatttaaagccattcagtctctcaagaccacagaggtgctacgtaatcttcaggaccttttacaattcattttccaactaatagaagataacattaaacagctgaaagagatgaaatttacttatcttattaattatatccaagatgagatcaacacaatcttcagtgattatatcccatatgtttttaaattgttgaaagaaaacctatgccttaatcttcataagttcaatgaatttattcaaaacgagcttcaggaagcttctcaagagttacagcagatccatcaatacattatggcccttcgtgaagaatattttgatccaagtatagttggctggacagtgaaatattatgaacttgaagaaaagatagtcagtctgatcaagaacctgttagttgctcttaaggacttccattctgaatatattgtcagtgcctctaactttacttcccaactctcaagtcaagttgagcaatttctgcacagaaatattcaggaatatcttagcatccttaccgatccagatggaaaagggaaagagaagattgcagagctttctgccactgctcaggaaataattaaaagccaggccattgcgacgaagaaaataatttctgattaccaccagcagtttagatataaactgcaagatttttcagaccaactctctgattactatgaaaaatttattgctgaatccaaaagattgattgacctgtccattcaaaactaccacacatttctgatatacatcacggagttactgaaaaagctgcaatcaaccacagtcatgaacccctacatgaagcttgctccaggagaacttactatcatcctctaattttttaaaagaaatcttcatttattcttcttttccaattgaactttcacatagcacagaaaaaattcaaactgcctatattgataaaaccatacagtgagccagccttgcagtaggcagtagactataagcagaagcacatatgaactggacctgcaccaaagctggcaccagggctcggaaggtctctgaactcagaaggatggcattttttgcaagttaaagaaaatcaggatctgagttattttgctaaacttgggggaggaggaacaaataaatggagtctttattgtgtatcata

SEQ ID NO: 82697 - DNA, 491 bp, Homo Sapiens
tttccctaatgaccgagtctttcctgttgaattatcccattctccatgggtgcctttgactttggcctccttactggaaattagcggagctgctgtttgcacacactgagctgtgaggtggctttccttggaagtggatgatagtgtcctcttcccttcttgcctctctctttctcctgagacaggatccccctggggcctaggtttgctcctttgttgtacaggggctgtcccagttagtgctgacctcatcccagaaccccctgggaaatatcccctgtcctcagagctgtgtcccctccccaaggacagtgcagactaactgaggagcctgataaaccttagctgcatggcacacttgcaattttaaaatccttctgaagttgactggtgtttgtacttgcttctcttttttatttaataaaatccaatgatccaaacccagttaatctaaagttctttgaaatgaaccatctttttattaaaaaaaa

SEQ ID NO: 82698 - DNA, 556 bp, Homo Sapiens
gcggccgcagcccgagccggagcccgagcgccgggagcgagacctcatggcagcggtggcgcccgcgggccccggggactccgcctcggccgccctggacgagctgtcactgaatttcacgtacggggcaccaggcgccggcaacggctccctctcgggcgactggtaccgcaggaaccagattcacctttttggagttttgctggctattttaggaaacttggtgatcagtatttctctaaatattcagaaatattctcaccttcagctggcacaacaagagcacccaaggccatacttcaagagtgtgctgtggtggggtggtgtcctgctgatggccgtgggagagacggggaactttgcagcctatggatttgctcccattactctgatcgctccgttaggctgtgtgtctgttacaggtagtgccattatttctgttacatttctgaaagacaatttgagagcctcagacttactcgcaaatgaaagttgtttttcatgatggaacaaatggagatttggggaccatgtggaaacaagctgaactaattta

SEQ ID NO: 82699 - DNA, 397 bp, Homo Sapiens
cctgggggtgagtttctcatcccgctactgctgctgggatcaggttgaatgaatggaactcttcctgtctggcctccaaagcagcctagaagctgaggggctgtgtttgaggggacctctaccctggggaagtccgaggggctggggaagggtttctgacgcccagcctggagcaggggggccctggccaccccctgttgctcacacattgtctggcagcctgtgtccacaatattcgtcagtcctcgacagggagcctgggctccgtcctgctttagggaggctctggcaggaggtcctctcccccatccctccatctggggctcccccaacctctgcacagctctccaggtgctgagatataatgcaccagcacaataaacctttattccggcct

SEQ ID NO: 82700 - DNA, 1616 bp, Homo Sapiens
  misc_feature (621)..(621): n is a, c, g, or t
agggtcgaggccgggtgttaatcggacgagggtctgcggcagatgcataaacagaaccagtcactatggaggtcgaggattcccatgtgggcccttcagcttgggctgcttggccacggaacagcccttggctccctggcccccggcccccatgcagcccctgggctggcccttggtggtctctgtccaagggagagcccctgggtgttcaggaggctgccccgggtgggctgctcagggcagctgccgaaggtggagcccagagcctgtctggaagggctgtctgtggctgtcctgagacctggccttggactcacaaggaagaccaggctgaggcccctccaggccaggtcctggggcaggcatctcagggagcagccagcccaggcctcctgccgtctccaaacagggcatgtcccgggaggaccctgagtgccagattcccctggacgctcctgctgattctgtcggcagttgaaggcccgtctgaggccccgcaatgcgagggtcctgtgtcccacttcactgctccgaagggaactggctggctgtccgtccagtgagcggcccagaccccacctctgcgccattgtcaccagggccctgtcctggctgccctcnacccatgtcaagctactgaggctgtgtcttgtttgttttctctgttacatttttgtttgctgttgtcacagtcagctggtttcggcgtgatgttgaccttttgatagtacatactccgttttaaactcatttccactctaagttgagttctgcaagcatgcagcggtatgacccaacgggggtcaggagagccctgcggcccccacccaccagctcagaacctgtcactaatacagctgcctgtgaccctgggacccgcaaccttccagctgcttccctttgtcaaagtcacgagtgcgtctgccttgacagccctcgtcaacagaacttccagtgggttgtgggttcatttcctttctttttaagaacagggttgggaccttttctgcccctgccccttagctactgaggcatagggagaggaagttaatttcagagccatacaaaaataagccacaaccagcttcagaattaattcccaatcccccattccaccagggctgggagcccattcccagtgcttcccaaggccctcggggacatctaccgccaacccagctgcttctggcaggggctccaagccccagcgtggggaagggccctggagaagccctcatcctcatgggaaccacactgcagtgggtggggaaggttgttgtcagcaccgcccccggctcctccaggtcctgctggctcctcgggggcagggttccctggacctcccagttctgcgccttggggccagccagtactcagagaggaggaccttctcaaccacgtacagaacacgggttttcatggctgcctttggtttggttttctgagaagataggattggattggattttgcagagggtgagaacttctctgtgcctgctcagaggcgccctagggaagggccatgtttgagttttgctttgtatgttgttttgcaagtatctgcctggtactttgatttaaaataaaaacaattttcatagtttgagtgtcaaaaa

SEQ ID NO: 82701 - DNA, 1023 bp, Homo Sapiens
  misc_feature (44)..(75): n is a, c, g, or t
  misc_feature (79)..(113): n is a, c, g, or t
tcagtgtatcgatcatatagggcgcagtcgccgaagcgaaggannnnnnnnnnnnnnnnnnnnnnnnnnnnnnnnccgnnnnnnnnnnnnnnnnnnnnnnnnnnnnnnnnnnncagtcgacggtaccggacatatgcccgggaattcggccattacggccggggagaagactggtgggagagaaggagagcctgcagacagaggcctccagcttggtctgtctccccatctctaccagcatctgctgagcatatgagccaaaccagggcatttacagggaggaaaagctttcggactgctgaaggcccagcaggaagagaggctggatgagatcaacaagcaattcctagacgatcccaaatatagcagtgatgaggatctgccctccaaactggaaggcttcaaagagaaatacatggagtttgaccttaatggaaatggcgatattgatatcatgtccctgaaacgaatgctggagaaacttggagtccccaagactcacctagagctaaagaaattaattggagaggtgtccagtggctccggggagacgttcagctaccctgactttctcaggatgatgctgggcaagagatctgccatcctaaaaatgatcctgatgtatgaggaaaaagcgagagaaaaggaaaagccaacaggccccccagccaagaaagctatctctgagttgccctgatttgaagggaaaagggatgatgggattgaaggggcttctaatgacccagatatggaaacagaagacaaaattgtaagccagagtcaacaaattaaataaattaccccctcctccagatcaaaaaagagacaaaaagaatcacacacaaaggggggccccggccccgaaaaattctccaccaccacctcgtgggcgccgggaccagtagagatacacacagggccacggcctcacacacaccgggtcaacacgcggcggctcccaaaaacaggcgggcaacgcgctggcacccacaggggaggcctggcacaaggcacggaggcgac

SEQ ID NO: 82702 - DNA, 465 bp, Homo Sapiens
ataaatgtccaaaagtcatggatttaaaaaaaaatctttaaactcattaatgtcctttgtttcctgcccaaatgcatgcaaactttcataacactggtttgctgagtggaaggttggttttgagtgaactgtttggctcagattcaaactccaatgaacaaatacttccaagtttacttgctgaatttcccatacagagaagttcttccactgggcttgccagaggatttgaaacagtggtgagccctggaaggaagggaatatttactggcccttggacataaacccagcacagtaagactcacatcaggctgaaggcagtgcagtatgaaccgacctgatttgaggaagtttgctctgggactcctctgagctactaaatgaggaggagaaggactaatgggaacacactgactccatcacattagaagttataataaacatttagagaacaacctcaaaaaa

SEQ ID NO: 82703 - DNA, 847 bp, Homo Sapiens
gacgccacgtctctcggtttcttcttagatcactcctctgccaaagatcccaacaagacaacatggctcccaagaagcctgagcctaagaaggaggcagccaagccagctccagctccagctccagcccctgcaccagcccctgccccagctcctgaggctcccaaggaacctgcctttgaccccaagagtgtaaagatagacttcactgccgaccagattgaagagttcaaagaggccttttcattgtttgaccggaccccgactggagagatgaagatcacctacggccagtgcggggatgtactgcgggccctgggccagaaccctaccaatgccgaggtgctgcgtgtgctgggcaagcccaagcctgaagagatgaatgtcaagatgctggactttgagacgttcttgcccatcctgcagcacatttcccgcaacaaggagcagggcacctatgaggacttcgtggagggcctgcgtgtctttgacaaggagagcaatggcacggtcatgggtgctgagcttcggcacgtccttgccaccctgggagagaagatgactgaggctgaagtggagcagctgttagctgggcaagaggatgccaatggctgcatcaattatgaagcctttgtcaagcacatcatgtcagggtgaagcagagtcttccaggtgcctggcccttggctttagccataccagggtgagttaaagagaggccccggctgggtgagctgagatggagtcctcgacttatcaccacaccactgccccaaggaccttacaggccctccctgttaataaacagctctaacacggccaggctgggctctgggattctgaaaaaa

SEQ ID NO: 82704 - DNA, 434 bp, Homo Sapiens
  misc_feature (162)..(162): n is a, c, g, or t
  misc_feature (422)..(422): n is a, c, g, or t
tcagaatcccagagcccagcctggccgtgttagagctgtttattaacagggagggcctgtaaggtccttggggcagtggtgtggtgataagtcgaggactccatctcagctcacccagccggggcctctctttaactcaccctggtatggctaaagcaaggncaggcacctggaagactctgcttcaccctgacatgatgtgcttgacaaaggcttcataattgatgcagccattggattcctcttgcccagctaacagctgctctccttgtcaaagacacgcaggccctccacgaagtcctcataggtgccctgctccttgttgcgggaaatgtgctgcaggatgggcaagaacgtctcaaagtccagcatcttgacattcatctcttcaggcttgggcttgcaggcacacgcagcacctnggcattggtagg

SEQ ID NO: 82705 - DNA, 1497 bp, Homo Sapiens
  misc_feature (759)..(819): n is a, c, g, or t
ccagatgcacccctgtccagtgctgcctatagcatccgcagcatcggggagaggcctgtcctcaaagctccagtccccaaaaggcaaaaatgtgaccactggactccctgcccatctgacacctatgcctacaggttactcagcggaggtggcagaagcaagtacgccaaaatctgctttgaggataacctacttatgggagaacagctgggaaatgttgccagaggaataaacattgccattgtcaactatgtaactgggaatgtgacagcaacacgatgttttgatatgtatgaaggcgataactctggaccgatgacaaagtttattcagagtgctgctccaaaatccctgctcttcatggtgacctatgacgacggaagcacaagactgaataacgatgccaagaatgccatagaagcacttggaagtaaagaaatcaggaacatgaaattcaggtctagctgggtatttattgcagcaaaaggcttggaactcccttccgaaattcagagagaaaagatcaaccactctgatgctaagaacaacagatattctggctggcctgcagagatccagatagaaggctgcatacccaaagaacgaagctgacactgcagggtcctgagtaaatgtgttctgtataaacaaatgcagctggaatcgctcaagaatcttatttttctaaatccaacagcccatatttgatgagtattttgggtttgttgtaaaccaatgaacatttgctagttgtatcannnnnnnnnnnnnnnnnnnnnnnnnnnnnnnnnnnnnnnnnnnnnnnnnnnnnnnnnnnnntatgtcaggcttgctggccccccgagacgctttaaaaactttttaaactattcgttgggcccgctaggccaattaaaaaagggaaacaggggtttcctagggctctccagacatccagtactggtagaattgctcgcattcaaaccagccaaaaaggcccggaggcaaccgaaccgttttcaaatgagacatatggggtctttgagggaatttactggatctatcaccaaggagaccctcgcgagcatttatactcaacttccgtgcccactcctgccaagtcatggtgagaaattgttgtaatctatttagccattctggcaagacatggaaaaccgtgcatgaatgaccctgaaaacgccctgactcgctcagggaccattgagcaccctgtgcgaaaattgattttgccacatggtgcaccatggggggacaaacgggggttgaacaatatttggccaaatttggcccaccataaaatgtgcgaaactgcgcccaaattcattcggtgtgaataggcctgaaacacgaaaccccattatcacccttttaacgcctattacggcccaaatttgtccaccgattttcacgcccaaaccctccgccaattattggggagaataaagctgtccgaaacctgcccggaaagccattcgggtccaattaccccccaaaacc

SEQ ID NO: 82706 - DNA, 453 bp, Homo Sapiens
cttttcagattgcaggatttccactacctgtcctcttccttggtgtcaagcccaggacaataggtgttgctttctgacagatcctttgctttgtctcaatataggatttttcatgggccgatctgctgaattcagcctaggagctgagaccaacatctgagtctcttcagcacacaagtttgaaagaagtcctagcaacttcaagctcagaactacgggtggcagcagctccctcttgacgtcgaagcctcccattccagagagagtcaaggcctggatcaaacaaagcccacaagcaccgatgactgagctgctgactacccccagcatctccaactcaacctcctctttctgcctctacccaaattttaaaactttcaaacatgggtttaaaaatggtaatgagtaaagttgcatccaagtgtatcaaataaaactaaatatccataaaaa

SEQ ID NO: 82707 - DNA, 1034 bp, Homo Sapiens
gggcagtaactataacggtcctaaggtagcgaggcctgggtggcgaattcggcacgagggtagaggcagaaggagaaggtcgggttgtagaagctggggtggccggcagctcgctcatcggtgttcgtgggctttgtcggtccgtgcctcgtctctccctggaaagggagggaggcttcgacgtcgagagggagccgctgccgcgttagttccgagcttgaagtcactaggacttctctcaaacttgtgtgctgaggagactcagatgttggcctcagctcctaggctgaactcagcagatcggcccatgaaaacttctgtattgagacaaaggaagggatctgtcagaaagcaacacttgttatcttgggcttggcagcaaggaagaggacaggtagtggagatcctgcaatctgaaaagcagactgaaaggtgacaaagaagctgaagatgggtggtggagagaggtataacattccagcccctcaatctagaaatgttagtaagaaccaacaacagcttaacagacagaagaccaaggaacagaattcccagatgaagattgttcataagaaaaaagaaagaggacatggttataactcatcagcagctgcctggcaggccatgcaaaatggggggaagaacaaaaattttccaaataatcaaagttggaattctagcttatcaggtcccaggttactttttaaatctcaagctaatcagaactatgcctggtgccaaatttagtggagccgcaatcaccaagtgttcttcccaaaccaccaagccactgggtccctgtttcctttaatccttcagataaggaaataatgacatttcaacttaaaaccttacttaaagtacaggtataaaataagacaaatgtttaaatttagttatgttcacggatagttgtcaattggtctgaaataaattcgctagggaatctatttgtgtagaactaattaatgtaaaaaaaacagaccatctcgtgttgtgtgcactgtgatataatggtagtatcagtccaactt

SEQ ID NO: 82708 - DNA, 951 bp, Homo Sapiens
cggctctaccttgtctcgcggctctaccttgtctctcggctctaccttgtctataggtttggtcctagcctttctattagctcttagtaagattacacatgcaagcatccccattccagtgagttcaccctctaaatcaccacgatcaaaagggacaagcatcaagcacgcagcaatgcagctcaaaacgcttagcctagccacacccccacgggaaacagcagtgattaacctttagcaataaacgaaagtttaactaagctatactaaccccagggttggtcaatttcgtgccagccaccgcggtcacacgattaacccaagtcaatagaagccggcgtaaagagtgttttagatcaccccctccccaataaagctaaaactcacctgagttgtaaaaaactccagttgacacaaaatagactacgaaagtggctttaacatatctgaacacacaatagctaagacccaaactgggattagataccccactatgcttagccctaaacctcaacagttaaatcaacaaaactgctcgccagaacactacgagccacagcttaaaactcaaaggacctggcggtgcttcatatccctctagaggagcctgttctgtaatcgataaaccccgatcaacctcaccacctcttgctcagcctatataccgccatcttcagcaaaccctgatgaaggctacaaagtaagcgcaagtacccacgtaaagacgttaggtcaaggtgtagcccatgaggtggcaagaaatgggctacattttctaccccagaaaactacgatagcccttatgaaacttaagggtcgaaggtggatttagcagtaaactgagagtagagtgcttagttgaacagggccctgaagcgcgtacacaccgcccgtcaccctcctcaagtatacttcaaaaccacttgactaaaccctgacgcttaatacgtg

SEQ ID NO: 82709 - DNA, 1003 bp, Homo Sapiens
catggcttcccgggaggaggtactcgccttacaagctgaagttgcccaacgtgaggaggaattgaattcgctgaagcagaagctggcgtcggctcttttggctgagcaggaaccgcagccagaacggctggttccggtgtcgccgctgccgccgaaggccgctctgtcccgagatgagattctgcgctatagccggcagctagtgctgcccgagctgggcgtgcacggacagctgcgcctggggaccgcgtgcgtgctaatcgtgggctgcggtgggctcggctgtccactagcgcagtacttggcagcggccggcgtgggccgccttggccttgtggactatgacgtggtagagatgagcaacctggcccgccaagtgctgcatggcgaggcactggctggccaggccaaggccttttcggccgccgcctcgctgcgccgcctcaattcggcagtggaatgcgtgccgtacactcaggcccttacgccagccactgccctagacctggtccgccgatatgatgtggtggctgactgctcggacaacgtgcccactcgctacctggttaatgacgcatgtgtgctggcgggtcggcccctcgtgtctgccagtgccttgcgcttcgagggccaaatcacagtctaccattatgacggtggcccttgctatcgctgcatattcccccaaccacccccagcggagacagtgaccaactgcgcggacggcggggtgctcggtgtcgttaccggggtcctgggctgcctgcagggcttggaagtgctgaaaatccctgccggtctgggcccctcttacaggggcagcttgttgctctttgatggcccggagagggattttccggctctatttcggctggcggacccccagggctccaactggcaacctttgcggggaacacggccccaggggaattgaatctggcgtggactattgcaaaccttcccgtcgggccccccccacctggtgattcccaagttagcggct

SEQ ID NO: 82710 - DNA, 545 bp, Homo Sapiens
ccctccccgggtacagcagtgattacctttagcataaacgaaagttaactaagctatactaaccccagggttggtcttagctattgtgtgttcagatatgttaaaggcaccttcgtagtctattttgtgtcaactggagttttttacaactcaggtgagttttagctttattggggagggggtgatctaaaacactctttacgccggcttctattgacttgggttaatcgtgtgaccgcggtggctgactgctcggacaacgtgcccactcgctacctggttaatgacgcatgtgtgctggcgggtcggcccctcgtgtctgccagtgccttgcgcttcgagggccaaatcacagtctaccattatgacggtggcccttgctatcgctgcatattcccccaaccacccccagcggagacagtgaccaactgcgcggacggcggggtgctcggtgtcgttaccggggtcctgggctgcctgcaggccttggaagtgctgaaaatcgctgcgggtctgggcccctcttacagtggcatcgataaaca

SEQ ID NO: 82711 - DNA, 424 bp, Homo Sapiens
ggtaccccaccttatgcgtgggggtttagttaacgtcttgaagtatacttgaggagggtgacgggcggtgtgtacgcgcttcagggccctgttcaactaagcactctactctcagtttactgctaaatccaccttcgacccttaagtttcataagggctatcgtagttttctggggtagaaaatgtagcccatttcttgccacctcatggactacaccttgacctaacgtctttacgtgggtacttgcgcttactttgtagccttcatcagggtttgctgaagatggcggtatatacgctgagcaagaggtggtgaggttgaccgaggtttatcgattacagaacaggctcctctagagggatatgaagcaccgccaggtcctttgagttttaagctgtggctcgtagtgttctggcgagcagt

SEQ ID NO: 82712 - DNA, 1114 bp, Homo Sapiens
  misc_feature (596)..(596): n is a, c, g, or t
  misc_feature (944)..(944): n is a, c, g, or t
  misc_feature (946)..(946): n is a, c, g, or t
  misc_feature (950)..(970): n is a, c, g, or t
cttggacctaggacacctaggtcctgggtcccccgtgatggggagagaagtgttgcatcgcggatagactgtatgggctgagactctagggttccattttcacttatgaatctcgaggtgcatctggccttgggggacgatgatggaggcatgaagggacagctgctccttcttggatcagtcaataaatggaggtcacactaatggcccttctttctgtttgagctgcatttggaagtgttgtggagacagccccgtagcccaatgcgaccagactcagggaaaacatcaggcccctccagctgagcccttgtgtgagccccgcccctccctaaatgccagacttgggagctgacagacagcactgcctgtgctgggtttaaaagtcctggtcagctgagtggaaatagaaggatttctgctgccatcatcttccatgggctttccaggtcacacgacctacaagtaggggaccagggaaaagaagagtgaagcctgcatgccaattctaagctcttcaggatcaaatgtcgttcgtcctgtccagaatggcagcctgtggaggcacctgcaagaacaaagtgactgtgtccaangcccgtgtgggacttcctgagcaaagagacccccagcccggctggcccggcttcgggaggagcaccgtgtgtccatcctcatagatggcgagacttctgacatctatgttctccagctttccccacagggtcctcccccggcccctccaaatgggctctacctagcccggaaggctctcaaggggctgctaaaagaggcagagaaagagctgaagaaagctcagaggcagggggagctgatgggctgcctggctctggggggtggaggggaagcaccctgagatgcaccgcgcaggcccaccccctctccgagcagccccacttctgcccccaggagctcgggggctncncccnnnnnnnnnnnnnnnnnnnnnacctcttcctcctcgccttcgggaggaggcagaagagcaggagagcacctgccccatctgtctgggggagatccagaatgccaagacattggagaagtgccggcattcattctgcgagggctgcatcacccgggctctgcaggt

SEQ ID NO: 82713 - DNA, 504 bp, Homo Sapiens
tttacacttcacttgtgtagtactgaaaagatatataaagaattttatagaagtgaagtgattaagaatcccttgaatcccacgtggcgaagtctcgattttggaattatgccagaccgtcttgatacatctgtgtcttgtttcgtggtgaagatatggggtggaaaggagaacatctaccagctgttgattgaatggaaagtctgtttggatgggctgaaatacttgggtcagcagattcatgcccgaaaccaaaatgaaataatttttgggctgaatgatggatactatggtgctccatttgaacataagggttattcaaatgctcagaagactattcttctgcaggtggatcagaactgtgttcgcaattcttacgatgtcttctctttgctacggcttcatagagcccagtgtgcaattaaacagactcaggtaactgttcagaaaattggaaaggaaattgaagaaaaactaagactcacatctacaagcaatgaactg

SEQ ID NO: 82714 - DNA, 486 bp, Homo Sapiens
  misc_feature (225)..(233): n is a, c, g, or t
tgagaaagatataaatatccaggtacaggaaggtcttttaacaccgaacagattcaacccccaaataagactacctgaaggcatgtagtaatcagatgctaaaggccaaggacaaagagaaagtccttaaaacaccaagagataagaagcaaatagcatataacagagctccaaatcgtctggcaacagccttctcaacaggccagtaggtattggaacattttnnnnnnnnnctgtcatctaggaatattgtgtccagcaaaattgtcattcaaatatgaaggaaagatatagtctttcccagacacaaaagctgacccatcctgcaagaaaagctaaggggagttcttcagtctgaaagaaaacactaatgtgcagaagaaaacatttcaaggtgtaaaatacactggtagaattaatactatgtatataattttttagaatagagcaattttatagtatagagaatagagcaattaggcaaaa

SEQ ID NO: 82715 - DNA, 608 bp, Homo Sapiens
  misc_feature (67)..(67): n is a, c, g, or t
aggttggtgagagaacatgtgggcacttaactcttcatgttccagttcatcccagaagtagacatcncaggacccattctgtgtcaaggtgaatgcctgtgtcctccacagcttcatgcctctgtcatgggggaaggaatagcttatgttctgctctggtgcagtgccgtagattaaaggtacatttctatcttctttgatttaaaaagcaccagtctcataaaggtgccactcagttttagccatgtcttcactgaaattgcaaaagtacttttagggagcaggagtttatttgacatctagttatctgtctgtctgttcatctatctatctgtctgctgtatgagaggtaggactggattaaatgaccactgaactcactgaatccagatcattcatatcatcaacaaaagctctagggggaggtcacgttgtgaatgcttaaaacatattattttcttcaacaaccatatcgctaaactaatatatccagagattttgcacaattcgtgttgaaccttccaaaacaaaaataaagacctgtccaaaagttttgacaaaaatactgattgctcccaaataaagtgcttctaagctttgtgtagaaa

SEQ ID NO: 82716 - DNA, 470 bp, Homo Sapiens
  misc_feature (213)..(228): n is a, c, g, or t
  misc_feature (332)..(332): n is a, c, g, or t
tgtttgtatgaacaatccattggtcacttagacccctatgtaaaaataaaagaatcctcaaggcatgaaaacaccagtaatctgtaatctgcaggactcttcccctgtctgggaaaatatttgccacaatttgcctcaagcaaattcttcttggtcactcaaggctaagaaaaaaattcagattgtaagagttgtaattttttctctctctcnnnnnnnnnnnnnnnngccagcaaactaccattctggtggcaaatataaaagtgcagaatatatggaccacgaggccgagcatacaccactaacaatggtacatctgcctgcccaggctngcttgggagtctctggaacaggctttttaatatttattctacaatataaatgtaggtataacccattatataaaccatcttaaacttaaatctccatgtacaaaaaagactaagaatatctaataataactagtgcag

SEQ ID NO: 82717 - DNA, 334 bp, Homo Sapiens
gacagagcaagactccatctcaaaacaaaacaaaaggccgtgagccaccgcccccagctgattccaggcgaattcttctctgatgggcgggcgagggtgtgttcgtgtgatgggttggagtgtgtgtgtctgagtacacagatgatgtgttttcccttcagcttcttacgttttctgagcatccgttgtgccttaacattttctgcttgtcctttgggacaaagcagtattttactcattctttgaatgttctcattcttttgtatcatgtgacttattaaaatcagtttctaacccgggactaacaagcccaaaaatatatatccctgtcggc

SEQ ID NO: 82718 - DNA, 974 bp, Homo Sapiens
cagtcgacggtaccggacatatgcccgggaattcggccattacggccgggggggaatttcaagtcaacaacaggtagaatgaataaacttggttaccagcctaataatgtgaattgctacagaattattcttattatgtaagaaaacaaaaactttatgcagatactttagctataaattgatgtaaaatactgatttttttaaaggaaggagagaacagtatcttgttcaattattatgcaatcaatcagtaaatgtttttaaaatgatactacaggagagcttagtaaggagagggcatggatgggccagtttggcatagttgggagaaatcagtctggtttccatcccagtcggggaagagagaggtgagagggaatcagaacgtacctagttgattccttggtgacaagtgcaatggggtatgggtagaatttattttcagagccaagaggacttgatggttataaataaagttgcctttagcaatggaatttacagatcgatcatgttgttccgaaagatgtgaataggatccacaataacaagttgattcagactaatgtagatatttagattagcaagtattgaacatttgatttcttagactgaggttttaaatgaatttcattatttctcccggtaatacacagagcatcgggattaggaaattagccattttggattctgtctgccacaaacagacctattctaaacagtgctattaaattttagactgttgttcaaatattttattttctcctaaactactttttatggtgatgaataattaagaccatttaaaacacgggagtacaagtatttttttgaattaaattaacttgcaaaaaccaaatttgcagtggttgggttgtttctagacagactttggtatcaatttaaaaccaagataatttttatattctttccaatagaatttcatgacaactcctgcagttttcttaacctacaaa

SEQ ID NO: 82719 - DNA, 763 bp, Homo Sapiens
  misc_feature (21)..(21): n is a, c, g, or t
  misc_feature (444)..(539): n is a, c, g, or t
  misc_feature (613)..(614): n is a, c, g, or t
  misc_feature (626)..(641): n is a, c, g, or t
gagcggctctgaggccggaantgagcctagagcgccgcggccccgagatgaagccggcggtggacgagatgttccccgagggcgccgggccctacgtggacctggacgaggcgggaggcagcaccgggctcttgatggacttggcagccaatgaaaaggccgttcatgcagacttttttaacgattttgaagatctttttgatgatgatgacatccagtgagatgccctctggctgcaggcggggccaagcccttggtacagagccgcagtgtgagcctgcgcaggacagtttcaggtggttttaaagaacacgtggaaatcccttgaatttaggacctggttaaccagaaagataagactgttcttaacgacctagatgattctgttcatctctgaacgggatcaggttttgtcctcactccaattaaaagaaagcaatgtcnnnnnnnnnnnnnnnnnnnnnnnnnnnnnnnnnnnnnnnnnnnnnnnnnnnnnnnnnnnnnnnnnnnnnnnnnnnnnnnnnnnnnnnnnnnnnnnnggagaaccccaccaacacgaaaaggcccaaagaagttccgacgagcacacccccgcgcaggaacaaaaaagacnncctttggcgcgnnnnnnnnnnnnnnnnaaaaaacttttttaaaaccctttttgtgggggcgcggggccccccgagaggacaaaaaacaggggccctttaggtctctcttccgaaaaaacccccgggcttacaaacaagggggttttttt

SEQ ID NO: 82720 - DNA, 461 bp, Homo Sapiens
tgatcctgtttagagatgaacagaatcatctaggtcgttaagaacagtcttatctttctggttaaccaggtcctaaattcaagggatttccacgtgttctttaaaaccacctgaaactgtcctgcgcaggctcacactgcggctctgtaccaagggcttggccccgcctgcagccagagggcatctcactggatgtcatcatcatcaaaaagatcttcaaaatctagggaaataagcaaaaccacgtagttacacctacaagggtaagggctgaagaaatcacttcagaatgaattatatagtagtccaaaatacagagataatcgtcaatgatccaatgaaataaaagacttttcccgtaacagactttcagtttcagccaaccagggctcgtacatgtagtccaaggggagagtgttggctagagtgctttctagctttcatttaaaagacaatcctaa

SEQ ID NO: 82721 - DNA, 2136 bp, Homo Sapiens
  misc_feature (1028)..(1116): n is a, c, g, or t
  misc_feature (1469)..(1491): n is a, c, g, or t
cttgcgcggccgcgtacgcggggcgagtgtagtagaagaagaatcgtggaggacctaggtgtggtattctcacgtcggaaacgaaggtgtggcgtataagggcggggaatgagaagagaaagggtatctttgtattgtggtaaaaatgggaggtaagcagatttagggcgcctagcggagcgagtgagatcattgtggtctcgacactaccgtgccgtatggtgcgacgttcgtaacatgcctcactgggctctcgcccatgcgcaatagtctgggcgcgagaagatgaatatattcggtttgtatgtgcgcccccgctcgatacgttgtctctggccccccgcggtcaggcggggggtggtgaatttcttgtttgtataacatttttcatccctaagttagcggtcgtgtctcaccgcaagagagggtggagggaaagagagacgcgggctcggttttgttattaagaggggtgtctgtgtggaaggcgggggtggtgttcgatcttacatgattcgttcgtgcgcgtccattttataggggcggcgggcgtggcgcttttgggcactcggcgtgttttagtgtcgagcgcgagtaagaaactgctggcgtgtgcgtgagcggcggaatttattttctagcgagcacctatgcgatgggtggacgtgaaggtgagaagtaggggtgaagcagggagcggggcgtgggcgcgggaagacaattacgatacaagcgaggaccgagcggctaattgcgcggtccaccccgcgtgggaggagggagtcccccgatcagagagggcgctcgtgcgcgcggctccccattgggaaggacgggtttgagagacgcggagtcggtggtggcgccgccggcgggggttttgtttttctcgcggggaaaatcacaaacccctatgttgtgtacccctggtttttcgtgggaaagcggagggagaggggcaaggtgttccgcgttcttcggggtgggcggaggtgcccaaaggaagtggtggggaagaattttctagnnnnnnnnnnnnnnnnnnnnnnnnnnnnnnnnnnnnnnnnnnnnnnnnnnnnnnnnnnnnnnnnnnnnnnnnnnnnnnnnnnnnnnnnngtctctctgctcctgcttgtattcagcgcgttctttgggtttgttttctaaattttaaaaatttattctttctcttttgttgctgttgatttgttcttgagatggctacaacaccagacagaacagtgccctcatatctgatggctgtgaagggctgcactcctttgaaacattaagatctgctttgggcttccctcttcggcctcaccctccccttaaaatcaagtcatttccacactttttagtaacatactaaatgacacatcatcccttgttagccctgtaaacattttttctccacacaccctccctctttttttctctcatgtctgtgggtgaataattcactaagnnnnnnnnnnnnnnnnnnnnnnncttacacatttatatcctggactccgccacccacccgcccaccccagttttgggtcttctctccaagggagacatcaaactgatgtggattggtagtggactgaaacaatgaacggggtcagggttcagatatccagaaattcggaccctgggaggtcccgatcatcaccactgtgaccacgatagaacgcagatcaagttccttgcttactcctccttgtctaaacagctctaaaggtggaaataaacagctggggaacgtacaaaaaatttctactcatttgcatttagaacgaggggagagagattgataccgaaggctcggagaggaatcataggacacaacagtagaattcctgaacaaatgatcctgaccctcctcttccaagtgcagctagttacctcatgtgaatcccacactacccctagttcatattttgttcacagaaagctgtcttgtgttttctgtgtcactgcgcacgccctaggcagtagttgtgtcatgcagttatttgcacagcgatgttcattcggttcctctgcaaatctggaccgaggcagtcctaaggatcgataatctatattcaactgttcgggaatgtacgtcaatcacacgacgacgggacatgtagcggggcgagatgg

SEQ ID NO: 82722 - DNA, 1076 bp, Homo Sapiens
  misc_feature (724)..(724): n is a, c, g, or t
gcggccgcggccgcctcggttgcctcccggggccaccccgctgcctccccagccttgccgcgcctcagcgactttcggcgccgccggagcttccgccgcatcgcgggcgccgagatccagatggtcatcttactcattgccacctccctggtggtgctcatctgctccatcccgctcgtggtgcgagtattcgtcaaccagttatatcagccaagtttggagcgagaagtcagtaaaaatccagatttgcaggccatccgaattgcttctgtgaaccccatcctagacccctggatatatatcctcctgagaaagacagtgctcagtaaagcaatagagaagatcaaatgcctcttctgccgcattggcgggtcccgcagggagcgctccggacagcactgctcagacagtcaaaggacatcttctgccatgtcaggccactctcgctccttcatctcccgggagctgaaggagatcagcagtacatctcagaccctcctgccagacctctcactgccagacctcagtgaaaatggccttggaggaaggaatttgcttccaggtgtgcctggcatgggcctggcccaggaagacaccacctcactgaggactttgcgaatatcagagacctcagactcttcacagggtcaggactcagagagtgtcttactggtggatgaggctggtgggagcggcagggctgggcctgcccctaaggggaacntccctgcaagtcacatttccccagtgaaacactgaactttatcagaaaaatgtatataataggcaaggaaagaaatacagtactgtttctggacccttataaaatcctgtgcaatagacacatacatgtcacatttagctgtgctcagaagggctatcatcatcctacaactcacattagagaacatcctggcttttgagcacttttcaaacaatcaagttgactcacgtgggtcctgaggcctgcagcacgtcggatgctaccccactatgacagaggattgtggtcacaacttgatggctgcgaagacctaccctccgtttttctactagataggaggatggtagaaaaa

SEQ ID NO: 82723 - DNA, 711 bp, Homo Sapiens
  misc_feature (650)..(658): n is a, c, g, or t
  misc_feature (694)..(694): n is a, c, g, or t
gcggccgcaaggcgctggagaacggcatcaacgtgacggtgtcgcagtccaccacggtggtgaacggcaggacgcgcaggttcgcggacgtggagatgcagttcggcgcgctggcgctgcacgtgcgctacggcatgaccctggacgaggagaaggcgcgcatcctggagcaggcgcggcagcgcgcgctcgcccgggcctgggcgcgcgagcagcagcgcgtgcgcgacggcgaggagggcgcgcgcctctggacggagggcgagaagcggcagctgctgagcgccggcaaggtgcagggctacgacgggtactacgtactctcggtggagcagtaccccgagctggccgacagcgccaacaacatccagttcctgcggcagagcgagatcggcaggaggtaacgcccgggccgcgcccgccgagccgctcacgccctgcccacattgtcctgtggcacaacccgagtgggactctccaacgcccaagagccttcctcccgggggaatgagactgctgttacgacccacacccacaccgcgaaaacaaggaccgcttttttccgaatgaccttaaaggtgatcggctttaacgaatatgtttacatatgcatagcgctgcactcagtcggactgaacgtagccagaggnnnnnnnnntcatcaaggacaaaggcctcgacctgttgcgctggnacgtctgttccttctag

SEQ ID NO: 82724 - DNA, 444 bp, Homo Sapiens
tgaaagtttgaaagatatttatttaaaaacagaacaaaaaagctttggtatttcaaaacctgacaatcatcaatcactagaaagttaaacacctcccctgaagccccaaagtacaaaaccacagatgtccacaggctcctaaaaaagggcgtgcaaacccgaggatgacagcacaacccgcaccctcctacaggcagcagcacagccaccctggggggccccggcccagcctcgggaccgtggggcctccgaacgccgagacggacatcaccgccaacactcaccatctacaggggatgcaaaagccatctagcaaaatctcaacaaaaataaattaaaacttcattaagaaagaacacgttaaattaggaaaaggacacaacttttcctagacaagagtcttttcaaaagatgatctatttcctgggacagaagaaagggggg

SEQ ID NO: 82725 - DNA, 518 bp, Homo Sapiens
agcccctgactgggttttcagaattatgtccatgtgcataactgcttggatttcttcttttaaagtccctaaaacatgaatctgttctttgagatcctggtttccttagcagagttgtaggttgcgggtttcattcacgtggaaattctaagtagaacttttgctgccccattttactgttggtgaagggccgttgttaatggaagtttacgttttaaaactcagatgactcagaaaccagactgtgatcattttttgcagcagcaaaatgacttattctgacagcatctcggtttggggcttctgaagaaaaaggatgaagctgatctgttgaaacaactactttcccaactcggaggcaaaaggggctgatagaagataacattcacctaccatttcatcttgtgacccccagagatcacgtttgcgtgttctggctgagttttttattattgtttgttttaaatgattaaataatacacaattaaatgtcaggatagcatctcttgcaaagtgaa

SEQ ID NO: 82726 - DNA, 488 bp, Homo Sapiens
gcggccgcagctccagctcccggtgtccgggactcgggtctcccgccagggggcgccactccccgcgctttgcagccctgagcgggggaggggcccaggcggcgggagcccccttggccagccccccagatctgccctgcgggaaggggtggaggaggtacccgtgcgggaggaggcgctggccgaagctcaggcaggggcggggaggggtacggtgaccttagagtcgccgccccgctgcgggctgagccgccgctactctcaccctgccgccccgcttaccccgcaggactgccgggacctcgaggggaccccgggccgcgaggagaggcgggacccgcggggcccaccgggcctgccggggagtgctcggtgcctccgcgatccgccttcagcgccaagcgctccgagagccgggtgcctacgccgtctgacgcacccttgcccttcgaccgcgtgctggtgaacgagcagggacattacgacgc

SEQ ID NO: 82727 - DNA, 1295 bp, Homo Sapiens
cggcctgcgagcgctcagcctcaggtgcacggcagtggggtgggtgaccgactgggccgcgccggggtggggagagaggcaggtcccaggattctgggtcccgactccagtcctgcctggtccacagactgcgagaggaccccggcgtccgggctcccggtgccagcgctatgaggccactcctcgtcctgctgctcctgggcctggcggccggctcgcccccactggacgacaacaagatccccagcctctgcccggggcaccccggccttccaggcacgccgggccaccatggcagccagggcttgccgggccgcgatggccgcgacggccgcgacggcgcgcccggggctccgggagagaaaggcgagggcgggaggccgggactgccgggacctcgaggggaccccgggccgcgaggagaggcgggacccgcggggcccaccgggcctgccggggagtgctcggtgcctccgcgatccgccttcagcgccaagcgctccgagagccgggtgcctccgccgtctgacgcacccttgcccttcgaccgcgtgctggtgaacgagcagggacattacgacgccgtcaccggcaagttcacctgccaggtgcctggggtctactacttcgccgtccatgccaccgtctaccgggccagcctgcagtttgatctggtgaagaatggcgaatccattgcctctttcttccagtttttcggggggtggcccaagccagcctcgctctcggggggggccatggtgaggctggagcctgaggaccaagtgtgggtgcaggtgggtgtgggtgactacattggcatctatgccagcatcaagacagacagcaccttctccggatttctggtgtactccgactggcacagctccccagtctttgcttagtgcccactgcaaagtgagctcatgctctcactcctagaaggagggtgtgaggctgacaaccaggtcatccaggagggctggcccccctggaatattgtgaatgactagggaggtggggtagagcactctccgtcctgctgctggcaaggaatgggaacagtggctgtctgcgatcaggtctggcagcatggggcagtggctggatttctgcccaagaccagaggagtgtgctgtgctggcaagtgtaagtcccccagttgctctggtccaggagcccacggtggggtgctctcttcctggtcctctgcttctctggatcctccccaaccccctcctgctcctggggccggcccttttctcagagatcactcaataaacctaagaaccctcaaa

SEQ ID NO: 82728 - DNA, 868 bp, Homo Sapiens
cttggagtctgggaggaggaaagcggagccggcagggagcgaaccaggactggggtgacggcagggcagggggcgcctggccggggagaagcgcgggggctggagcaccaccgaactggagggtccggagtagcgagcgccccgaaggaggccatcggggagcctgggaggggggactgcgtagatggacccctggcgtcctgggctcccgtgtgccagcgctatgaggccgactcctcgtcctgctgctcctggtgcctgtgctggccggctcgcccccgactgtgactgacaacaagtatccccagcctctgcccggggcaccccgtgccttccaggcacgccgggccaccatggcagccatggggcttgccgggccgcgatggccgcgacggccgcgacggacgcgcccggggctccgggagagaaaggcgagggcgggaggccgggactgccgggacctcgaggggaccccgggccgcgaaggagaggcgggacccgcggggcccaccgggcctgccggggagtgctcggtgcctccgcgatccgacttcagcgccaaagcgctcctgagagccgggtgcctccgccgtctgacgcaccctttgcccttcggaccgcgttgcctggtgaacgagcaggggaccattacggacgccggtcaccggccaagttcacctgccaggtgcctggggtctactacgttcgccgtccatgccaccggtctaccggggccaggctgcagttggatctggtgaagaatggcgaatccattggctcttgcgttccaggtattcggggcgggtggcccaaggcaagcctacgtcatcgggggcggcattgtggaggttggagcctgagggaccag

SEQ ID NO: 82729 - DNA, 1020 bp, Homo Sapiens
gccgccgtctcgtcgggccgaccgggggccgcggagctgggcggcggggcaggcgcggctgcagtcacctcggtgctgggcatgtacgcggcggcggggccgtacgcgggcgcgcccaactacagcgccttcctgccctacgccgcggatctcaccatcttcccgcagatgggcgcgcagtatgaactgaaggacaaccccggggtgcaccatccggccacggctgccgcagttccgcacacgcaccccgccttattacccctacggccagtaccagtacggggaccccgcccggcccaagaacgccaccagcgagagcaccagcacgctcaaggcctggctcaacgagcaccgcaagaacccctaccccaccaagggcgagaagatcatgctggccatcatcaccaagatgaccctcacccaggtctccacctggttcgccaacgcgcgccggcgcctcaagaaggagaacaagatgacatgggccccgagaaacaaaagcgaagatgaggacgaggacgagggcgacgctaccagaagcaaggacgagagtcccgacaaggcgcaggagggcacggagacctcggcagaggacgaagggatcagcctgcacgtggactcgctcacggatcactcgtgctcggccgagtcggacggggagaagcttccgtgccgcgccggggacccccctgtgcgaatcgggctcggagtgcaagggacaagtatgacgacctggaggacgacgaggacgacgacgaggaggccgagcggggcctggcgccgcccaagcccgggacctcgtcgccgcttaccgggcttggaggcgccgctgctgagccccccgcccgaggccgcgccccgcggtggccgcaagacgccccagggcagccggacgtctccgggcgcgccgccccccgccagcaagcccaagctgtggtcgctggccgagatcgccacgtcggacctcaagcagccgagcctgggcccgggctgcgggccaccggggctgcccgcggccgc

SEQ ID NO: 82730 - DNA, 541 bp, Homo Sapiens
  misc_feature (23)..(23): n is a, c, g, or t
aatccgagtcgctgaggctgccntccgtctccttgcctgcaggggtgggtggtccctgaagccgttcgcagccagaagccgccttctgctcagctcctcctgcttcggggccctcggggtcgcccttgtcctcgggcttctggggctcgtcctcgtcgttcttctccaggtcaatgttctcctcctcttcctcgtcctcgctgcggttccgcggcgtccacgtcattttattctctttcttgaggcgccggcgcgcgttggcgaaccaggtggacacctgggtgagggtcatcttggtgatgatggccagcatgatcttctcgcccttggtggggtaggggttcttgcggtgctcgttgagccaggccttgagggtagccgtggcgtcccttgtggcgttcttccggtacgctgggtccccgtaagggtacgatcccaggggcgccgcgtaaggatggtaccccaaggagcccgccatgccgggtgtgtggtcgtagggagagcccacgtacgaggagaaggcggcggcggcggcggccgc

SEQ ID NO: 82731 - DNA, 470 bp, Homo Sapiens
gtggctaaccaagagataactgtaaatgtgacattgatttgctcttactacagcttcagtgattgggggaggaaaagtcccaacccaatgggctcaaacttctaaggggtactcctctcatccccttatccttctccctcaacaatttctccctctatcttaccatgaccccaaagccaagggcaacagatcagtaaagaacgtggtcagagtagaacccctaaagtatattttaatcctacctaaaaattaaacagttacctgaaagatttaacattatctagttcattgaatcattgtatgtggtcatggataaattgcacaccatggaattagctttctaaaggaaatcaaatgaatggaggaactttccaaacaccactttacttgtgagtatatagccaataaaactatctctactgaatgtcattgaaaaactaaaaaattaaacttatttacaaataggtaaa

SEQ ID NO: 82732 - DNA, 820 bp, Homo Sapiens
  misc_feature (489)..(497): n is a, c, g, or t
taatggactttcttccagatagttttgtgccagaataatatccataatcaggcccatatgaacagagtggtcacacacgagcttattcatgcatttgatcattgtcgtgcccatgtcgactggttcaccaacatcagacatttggcgtgctcagaggttcgagctgctaaccttagtggagactgctcacttgtcaatgaaatattcaggttacattttggattaaaacaacaccaccagacttgtgtgcgagacagagccactctttctatcctggctgttaggaatatcagcaaagaagtagctaaaaaggctgttgatgaagtttttgaatcttgtttcaatgaccatgaaccttttggaaggatcccacataacaagacttatgcaagatatgctcatagagactttgaaaaccgtgatcggtattattcaaatatatgagcacaatgacatttttatattacagagcttccatcatcatgaagnnnnnnnnntttggttctcaagtgaacaaacatataaaatgtaaacaatccctacaatccagataaaacagagaagactgtgattctagcatattatcagaaaaagtaactatggcaaaaaatgaaactgctttaaactccaaggcagaaattgtatctttatagctaaccatttagtaaataaatacattacatttttgtattttagtcatttgtttttattacatgtgattattttaaaatttgattatgaaacctgtgaagtgtgctcttccatgatgttgataggtgaccactgttggtatttacattaaatgtaaagaaatgtgaaa

SEQ ID NO: 82733 - DNA, 1094 bp, Homo Sapiens
ggggcctctcgccccgcctcccgcgctccccgtcaggttcaaagccccctcccgcctaacgtcttcagcccagccaggctgcccttcttccctgcggagggagggcctgggcggtcgcgttggcgggagggaggttacctttcccagtctcgctctggccgcctgagccaggaggaagcagcggcgaggtctgcgggaggcatggcgggagctccggacgagcgccggcggggccccgcggcaggggagcagctgcagcagcaacacgtctcttgccaggtcttccccgagcgtctggcccaggggaatccccagcaagggttcttctccagcttcttcaccagcaaccagaagtgccagcttaggctcctgaagacgctggagacaaatccatatgtcaaacttctgcttgatgctatgaaacactcaggttgtgctgttaacaaagatagacacttttcttgcgaagactgtaatggaaatgtcagtggaggttttgatgcttcaacatctcagatagttttgtgccagaataatatccataatcaggcccatatgaacagagtggtcacacacgagcttattcatgcatttgatcattgtcgtgcccatgtcgactggttcaccaacatcagacatttggcgtgctcagaggttcgagctgctaaccttagtggagactgctcacttgtcaatgaaatattcaggttacattttggattaaaacaacaccaccagacttgtgtgcgagacagagccactctttctatcctggctgttaggaatatcagcaaagaagtagctaaaaaggctgttgatgaagttttggaatcttgttcacatgaacatgaaaccttttggaaggatcccacataacaagacttatgccagatatgctcacagagactttgaaaaccggtgatcggtattatccaaatatatgagcaccaaggacattttttatattaaagaagcttccatcatcattgaagaaaacaacatttgggtgctcaagtggacaacatattaagtgtaaaaatccttaaaatcgtaaacgagagagggggttttgttttttaagaggtttgggggag

SEQ ID NO: 82734 - DNA, 806 bp, Homo Sapiens
ctaggtgaggccgcgcgtaatcggcgagggagccccagcgttcggcatgaaggtctggggtctggctgctgcctgcttcttgctccagcaccatggaatgcctgcgcagtttaccctgcctcctgccccgcgcgatgagacttccccggcggacgctgtgtgccctggccttggacgtgacctctgtgggtcctcccgttgctgcctgcggccgccgagccaacctgattggaaggagccgagcggcgcagctttgcgggcccgaccggctccgcgtggcaggtgaagtgcaccggtttagaacctctgacgtctctcaagccactttagccagtgtagccccagtatttactgtgacaaaatttgacaaacagggaaacgttacttcttttgaaaggaagaaaactgaattataccaagagttaggtcttcaagccagagatttgagatttcagcatgtaatgagtatcacagtcagaaacaataggattatcatgagaatggagtatttgaaagctgtgataactccagagtgtcttctgatattagattatcgtaatttaaacttagagcaatggctgttccgggaactcccttcacagttgtctggagagggtcaactcgttacataccctttaccttttgagtttagagctatagaagcactcctgcaatattggatcaacacccttcaggggaaacttagcattttgcagccactgatccttgagaccttggatgctttggtggaccccaaacattcttctgtagacaaaagcaactggacatttactacagaatggaaa

SEQ ID NO: 82735 - DNA, 511 bp, Homo Sapiens
tcctgtaggcaccactttaacgtcttacattttctctgatgatgtcacaccaaaattatcatgacaaatattaccagagcaaagtgtaacggccaacactttgttcgctcattttacgctgtctctgacataaggagtgcctgaatagcttggaaaagtaacatctcctggccatcccttcatttaaccaagctattcaagtattcctatgccagagcagtgccaactcttggaggtcccagagtgcagccaatgcctttgtgtggtagttctaaattttaattgcacctgaaaaacctgggcacctaagcaatgagccacagcaaaaagtaaagaacaacaacaaaataaagctgttgttaaattttaaacaatattactaattgcccaaaatgtcaatttgatgtagttcttttcatgcaagtataaattcaattgttagttataattgttggacctccttgagatagtaacaacaaaataaagcaagctatctgcacctcaaaaaaaa

SEQ ID NO: 82736 - DNA, 705 bp, Homo Sapiens
ggccgcaatttcagggaatatgaatgtcagagaagaaagccaaccaatactggttatctcctcgacacatttactgactaagttgtacaacataagaggttaaaaaacaattgtaaaaatggcttaaaaaagaagggctgtattttcagccattttttggtgttgacacattccaggccctcagttgggacctctggggaacgatgcagaaaggcaggggaaccagagtccagtggagcctctgcaagactgcaggtcagccccatgccagctcagacctacacagaggcaagggaaaaaccactcaatgcctctacaaatctttgtacacaatgaaaattgccaggtgatatggtttagatgtttcatcccctccaaatctcatgttaaaatgtgattcccttgttggatgtggggtttggtgggaggtgtttgcatcatagacatggatccctcatgaatggcttagtgctgtgctcatggtaatgagtgagttctcactgttagttcacaagagatctggttgtttaaaagaggctggcacctcctccctctctctcttgctccctctcaccattgacaagctggctcccccttcacctctgccatgattggaagcttcctgaggctctcatcagaagcagatgctggtgccacgcttgtacagccagcagaactgtgaaccaaataaacctcttttcttta

SEQ ID NO: 82737 - DNA, 962 bp, Homo Sapiens
  misc_feature (260)..(260): n is a, c, g, or t
  misc_feature (436)..(436): n is a, c, g, or t
gttcttttgcccagtgagacatgtcatcactgcagcttcctccagttccccattccctcctcactcccgatggtggatacggccccccacacgctggtacctaataatcattctttattttagtggaccaggttcctgtgtaccaagatggtgtgattcctgacctatgatctcctcctcacctccccaagtgttggataccagtttgagccacgctcctggccaaatccagtatttatcttgactgtcctaaccttccntagatggtaacagaagggtcctgcccaaataacactgggtgctatattgatgggtaaatgtgtacatcctattccttcctctttatctcacaattttgtctccactaagcaagaagtaaactaacacttcgtcactctaaagaaataacttatgtaaaactcttagtaaccctgtntgtcttcaaatgagtaaatagaccaaagtggggggacaattttctagttctgtagagggaaaaacatctgagtcaacattttcaaatgcagagggtattggtacatgacgacatggaaaagggcacttttaaacacagcttactcttcctcaagtacagagagtatatagtgaatcaaaactaactacagccattctttttaaagcccaagggatggagcaaaggtgtaaggatgttacctgtttgttttaatcagagagcaaaaagaagtcacaatagtttgggagaaaaagtagtatggtgagtaaggttatgcgtataatttcatactgaatttattactatttgggatgtacgtcaatgttctaacaaacactgccaacacgtcaattttttaaaaagcgtgggccacattgctaagaatttgttaaagcataactgtattttttgttttagggccttattgatgttttgccgttccaatgtatgcatttttttactcaataaacttgtcttaattttaaaa

SEQ ID NO: 82738 - DNA, 1675 bp, Homo Sapiens
  misc_feature (1086)..(1222): n is a, c, g, or t
  misc_feature (1231)..(1369): n is a, c, g, or t
  misc_feature (1473)..(1481): n is a, c, g, or t
  misc_feature (1547)..(1555): n is a, c, g, or t
cagtcgacggtaccggacatatgcccgggaattcggccattacggccggggctgcttaataaagtaagcttgaaatttatcattttatcatgaaaacttctttgccttaccagaccagttaatatgtgcactaaacaagcacgactattaatctatcatgttatgatataataaacttgaatttggcacacattccttagggccatgaattgaaaactgaaatagtgggcaaatcaggaacaaaccatcactgatttactgatttaagctagccaaactgtaagaaacaagccatctattttaaagctatccaggcttaacctatatgaactctatttatcatgtctaatgcatgtgatttaatgtatgttaaatttgatatcatgttttaaaataccctacttctggtacccattaattcctccccctacccccaaataaatcaggcatgcaggaggcctgatatttagtaatgtcattgtgtttgaccttgaaggaaaatgctattagtccgtcgtgcttgatttgtttttgtccttgaataagcatgttatgtatattgtctcgtgtttttatttttacaccatattgtattacacttttagtattcaccagcataatcactgtctgcctaaaatatgcaactctttgcattacaatatgaagtaaagttctatgaagtatgcattttgtgtaactaatgtaaaaacacaaattttataaaattgtacagttttttaaaaactactcacaactagcagatggcttaaatgtagcaatctctgcgttaattaaatgcctttaagagatataattaacgtgcagttttaatatctactaaattaagaatgacttcattatgatcatgatttgccacaatgtccttaactctaatgcctggactggccatgttctagtctgttgcgctgttacaatctgtattggtgctagtcagaaaattcctagctcacatagcccaaaagggtgcgagggagaggtggattaccagtattgttcaataatccatggttcaaagactgtataaatgcattttattttaaataaaagcaaaacttttatttaatnnnnnnnnnnnnnnnnnnnnnnnnnnnnnnnnnnnnnnnnnnnnnnnnnnnnnnnnnnnnnnnnnnnnnnnnnnnnnnnnnnnnnnnnnnnnnnnnnnnnnnnnnnnnnnnnnnnnnnnnnnnnnnnnnnnnnnnnnggttggggnnnnnnnnnnnnnnnnnnnnnnnnnnnnnnnnnnnnnnnnnnnnnnnnnnnnnnnnnnnnnnnnnnnnnnnnnnnnnnnnnnnnnnnnnnnnnnnnnnnnnnnnnnnnnnnnnnnnnnnnnnnnnnnnnnnnnnnnnnnggggggaacccggggtttttaaaaaaacccaaagggggttttggggggtcttttcgggatttctcaccaggggggccccagggggctcttatatataaatcttnnnnnnnnngtggcgaatttttggggagagtggtggataattatttaaaaaactttccgcgccccgcgggagaannnnnnnnnaaacgggggtgttggacaaccctttgataccccccccgggggattcaccaccccccttggcggccccttgtggagaaaataaattttctcccccccggtggagaaaaacgccgggggccc

SEQ ID NO: 82739 - DNA, 1915 bp, Homo Sapiens
gcccctcgtggggctgtgccggccttcttgtagctgtctagtgctctgagtgggcagtctcacttggcgctaaaagatgacaatgaagcaccacgatgcagagcaccacgagagacagagagccgggcacaagtaattccctcctggtcccagacagtctaagaggcacagataaacgcagaaatggagctgaattttccagtgacatcaagaagaaggaaggtggatgataaggactccagccactatgacagtgatggtgacaaaagcgatgacaacttagttgtggatgtgtctaatgaggacccttcttctccgcgagcaagccctgcccactcgccccgggaaaatggaatcgacaaaaatcgcctgctaaagcaaggatgcttctagcagtccagcttccacggcctcctcggcaagttccacttctttgaaatccaaagaaatgagcttgcatgaaaaagccagcacgcctgttctgaaatccagcacaccaacgcctcggagcgacatgccaacgccgggcaccagcgccactccaggcctccgtccaggtctcggcaagcctccagccatagaccccctcgttaaccaagcggcagctggcttgaggacacccctggcagtgcccggcccatatcctgctccttttgggatggtcccccacgctggcatgaacggcgagctgaccagcccaggcgctgcctacgccagtttacacaacatgtcgccccagatgagcgccgcagccgccgcggccgccgtggtggcctacgggcgctcccccatggtggggtttgatcctccccctcacatgagagtacctaccattcctccaaacctggcaggaatccctggggggaaacctgcatactccttccacgttactgcagacggtcagatgcagcctgtcccttttccccccgacgccctcatcggacccggaatcccccggcatgctcgccagatcaacaccctcaaccacggggaggtggtgtgcgctgtgaccatcagcaaccccacgagacacgtgtacacaggcgggaagggctgcgtcaaggtctgggacatcagccaccctggcaataagagccctgtctcccagctcgactgtctgaacagagacaattatatccgttcctgtaaattgctacccgatggctgcactctcatagtgggaggggaagccagtactttgtccatttgggacctggcggctccaaccccgcgcatcaaggcggagctgacgtcctcggcccccgcctgctacgccctggccatcagccccgattccaaggtctgcttctcatgctgcagcgacggcaacatcgctgtgtgggatctgcacaaccagacactagtgaggcaattccagggccacacagacggagccagctgtattgacatttctaatgatggcaccaagctctggacgggtggtttggacaacacagtcaggtcctgggacctgcgcgaggggcggcagctgcagcagcacgacttcacctcccagatcttctccctggggtactgccccaccggggagtggctggcagtgggcatggagagcagcaatgtggaggtgctgcacgtgaacaagcctgacaagtaccagctgcacctgcattgagagctgcgtgctgtccctgaaatttgcttactgtggtaaatggtttgtgagtacttggaaaagataacctcctcaatgcttggcggaccccctatggagccagcatattccagtccaaagagtcctcgtcagtgcttagctgtgacatctctgtggatgataagtacatagtcactggctcggggggacaagaaggctacagtctatgaagtcatctactgaaaacattatgtggtttaacgtttatagttgaattgggccaaaatgttttcgaatttatag

SEQ ID NO: 82740 - DNA, 573 bp, Homo Sapiens
gagaagacgacagaaggggaaatacacacatgtatacacaaacagaatggttgagaaaacgttttaataaaatgtgagggttgtatgtgtgcgtgtatatatttacacttaacctctaaaattctcttctacagtatctctgttatgaatatgatggaaaagcaacattttggtggtgagactattgttaaaataaatttgagaaagacgaaaattttgtgagtcttgataattacaagtcaacagctatcgaaagttagcacagcttgtctgtggtgctgtttttttccccactgcagtggacttatgctgttttcatgtttagaaacaaaaaggtttcatgtgattcatgtgtaagatgcacagtatttgacatcctgattatgtaatccctattccatcaatccagtcttacacttatggttggcctcaaatctattgcatttatgataatgtattatatctagttgagtttaatatttttttattagcctgtaaataaagatggcatcttctacattaaaatgatattgatctcatttttttaaataaacattttgtttccttgacgtt

SEQ ID NO: 82741 - DNA, 1379 bp, Homo Sapiens
  misc_feature (565)..(578): n is a, c, g, or t
  misc_feature (652)..(662): n is a, c, g, or t
aatattccagagtttccaaaaatcccaactgctaattttggcagggtgagaagaaggggatatttaacggatacctcttcattaacctcattttctccttgaatttcactgataaacaaagctcaggtctacttagaaaaacgatcagtcctgctaaaatacagcctcatgacgtcttccaatgcccttgctcggtgcacatgaaatacacaacttctcttataaggagactttccaggatagaccaagtgtgctcgcccaagtgacttgctgaataccaccacaaaatctgaacccaaagatgagttgttttcttcttcagatgagagttgcaagtgtttcctaaaatgtacatggagggatgcccacaaaccactgccctcccaggtgaggggctgagtctttgaggagatgcactccttcaggccatggaacagaaagaaggtggtccgtccaaggtgtggtgaagagcaaagctgcctctcccagccctccaattacggaagatgaggacaagaatgtattttctgcacattcaagtacatctgggtcccctaccctcccnnnnnnnnnnnnnnggtaagcatctaactgtccataaattcatggctacagtagagattcacggcgcaacgactttcatactggttannnnnnnnnnnaattctgtcagtgagcagcatttcccagttttacactcccctaatggcagctccattaggcgagactgcaggctgcatctgtgattaggtccatgcagctcgaagatcagttcggcacgcgggagggtcccgaaagctgggtctgtccagtgtcttgcagcagcggttgcagggggtctaccagctcgccctgacagcttcgatatcgctaaccaaattctgggccaggcatatcccaaatatctgcagcaatgcaatgcctatgaaaataccagcaacgatggttaaattgtcctgcaaccacttctcaaactggggcacacagcctttcgtgtagattacaatctgctggtcaacttctggtttttgcctggcatcatagccacactgagtgttgatgacatcttctgcgggatctttagtgcagcaggagaatggaacgccacatcgctctcgacttgcattggaatctgtgcaattgaagtaaatatttaggttccaatcatcagctccaaaagccccacagcactgccaatattcctgggtgaagtctatgaggttttgcaaatcaatgtcatcccgatatgctctgatgttgttgtttataaagaaatacagctggtctttgatccagtctttgaaaacaaatgctagaactcccgcagtgagctccaggaagaaatgattcccatgacaccgaagaaaactgggaaggaa

SEQ ID NO: 82742 - DNA, 895 bp, Homo Sapiens
taggctaggtacgaggctgggtggtgaattcggcacgagggttgggaagcagccgtccccgtccagagtcctctgtggtccctgctgccaccatggccactcaccgcctcgtgatggtccggcacggcgagagcacatggaaccaggagaaccgtttctgtggctggttcgatgcagagctgagtgaaaaggggaccgaggaggccaagcggggagccaaggccatcaaggatgccaagatggagtttgacatctgctacacgtcagtgctgaagcgggccatccgcaccctctgggccatcctggacggcacggaccagatgtggctgcctgtggtgcgcacttggcgcctcaatgagcggcattacgggggcctcacaggcctcaacaaggcagaaacggccgccaagcacggggaggagcaggtgaagatctggaggcgctccttcgacatcccgccgcccccgatggacgagaagcacccctactacaactccattagcaaggagcgtcggtacgcaggcctgaagcccggggaactccccacctgcgagagcctcaaggacaccattgcccgggccctgcccttctggaacgaggagattgttccccagatcaaggccggcaagcgagtgctcattgcagcccacgggaacagcctgcggggcattgtaagcacctggaagggatgtcagaccaggcgatcatggagctgaacctgcccacggggatccccattgtgtatgagctgaacaaggagctgaagcccaccaagcccatgcagttcctgggtgatgaggaaacggtgcggaaggccatggaggctgtggctgcccagggcaaggccaagtgaggggtgggcttgggcaataaaggcacctcccccaacaaaaaa

SEQ ID NO: 82743 - DNA, 843 bp, Homo Sapiens
tggtgaaaaggtatttagataagcatctaaacaatgtttatctttgtatagtatttccacaatgccttattcctagtaggtacttaataacatagatagatcaaatgaattaatcaaatgaggggctgtggtatgctcctcccttgttatgggatacacctacctggtttctaggaacctgatggttggcaaaagattgagactgttctatctcccattgctgtaactgctgggaaaattaagcttctgggggccagtgcagtataaggaaaggtttctgaatacccaaaagactatcataaatttgaaacactcttacctcagttatctacaaatcaggagtaataattaattattccttcctcatctggtcactttgaagctttaacagcatgtccttagcacagtgtcaggaagacaatgaaagttattttctgtatccaacattgtatctcagtccacgtgaatacctgccctccacaaacagactaaatattaagcatgttttaattctaacaaaataattttgttcttcctataactttattgccaaaaacatgtacaggaagaactaaaaaatataaaaaagacagacaatctatactatatgctggtgttgggaagacaatcatactgggatgaaatttaagcaaaattatgcattagtttgttttgtaatttagatggcaccttaccaagcctgagctacatagttcacggcattttcctttatgagcttttagggcttctcaagaaatacatgaattttgtgacacggtatagaagcaaactgctcaatgtagtatacaagaacactcaattaaattcattaaaaatcaaaaa

SEQ ID NO: 82744 - DNA, 853 bp, Homo Sapiens
aatggccagtagaacaatacctccaaatcgagattgtccctcacattaatcgacccatccgtcctaatcctctgaactgtattgccgcaatcctacgaagtgtctgacaaatgtcaaaatgaaggcagatgcgatgctttccagcagctagtgtcttgccctgcttactcctctaaagatgtaacctgcttatcatggactcctagtccaactgtgcactgcatgcttaacttcaatgctgggtttgacttgggagatcctggccagcccctccacacatctccataagtcagagtggctgctggccctggtagatttgacttgctcttgcctcactcgacctccaaagtgggactgaagacagtggtcaagagacttgagttcgggacagtaagccaggggttaaggttctttcctttttttgaaagccaaagacccagtttgcattgtgctgctgcattcatggttagaagctttccatgcctaggttctagggaatttatttttctatgtgtatatattttcaaactttgtttcctgggtactgggcatgtgcctgtctgagccccaggtctgtctacaccccaccattcattctgtctgtctgttccctggacactgcctaaaagggtctcaagacagtgccctgtgggttcctaggactagggcccatcactgttctcttctgctgggaaatgcagctttaaaatggctaaccacagcagagggcagatgcttgatagattatcttttccttgctttcttgtttctgttttgaaagtgaaatggggttttaaattgttatttaaactctttttccaaataaaggtttaccttttttccccccaaaaaa

SEQ ID NO: 82745 - DNA, 573 bp, Homo Sapiens
ctcatctcccagaatattcctcagtaaggaacttgagcaaaccctaaaaagccttgggtgaatgctgtgatgttgaagactcaactacctgttttaatgctaagggccctctactaaagaaggaactatcttctttcattgacaagggacaagaactatgtgcagattattcagaaaatacatttactgagtacaagaaaaaactggcagagcgactaaaagcaaaattgcctgaggccacacccacggaactggcaaagctggttaacaagcgctcagactttgcctccaactgctgttccataaactcacctcctctttactgtgattcagagattgatgctgaattgaagaatatcctgtagtcctgaagcatgtttattaactttgaccagagttggagccacccaggggaatgatctctgatgacctaacctaagcaaaaccactgagcttctgggaagacaactaggatactttctactttttctagctacaatatcttcatacaatgacaagtatgatgatttgctatcaaaataaattgaaatataatgcaacccataaaaaaaa

SEQ ID NO: 82746 - DNA, 1150 bp, Homo Sapiens
  misc_feature (32)..(32): n is a, c, g, or t
  misc_feature (39)..(39): n is a, c, g, or t
  misc_feature (44)..(44): n is a, c, g, or t
  misc_feature (49)..(49): n is a, c, g, or t
  misc_feature (58)..(58): n is a, c, g, or t
  misc_feature (68)..(68): n is a, c, g, or t
  misc_feature (87)..(87): n is a, c, g, or t
  misc_feature (691)..(699): n is a, c, g, or t
  misc_feature (971)..(985): n is a, c, g, or t
  misc_feature (1103)..(1131): n is a, c, g, or t
gacaggggcttccccttcgccgccgccgtcgncggcggncaagntccgncgcgcccgngtcctgcggncctattgcagtttatgttnctttttagtcgtcagggaaagcttcgactgcaaaaatggtatgtcccactatcagacaaagagaagaaaaagatcacaagagaacttgttcagaccgttttagcacggaaacctaaaatgtgcagcttccttgagtggcgagatctgaagattgtttacaaaagatatgctagtctgtatttttgctgtgctattgaggatcaggacaatgaactaattaccctggaaataattcatcgttatgtggaattacttgacaagtatttcggcagtgtctgtgaactagatatcatctttaattttgagaaggcttattttattttggatgagtttcttttgggaggggaagttcaggaaacatccaagaaaaatgtccttaaagcaattgagcaggctgatctactgcaggaggaagctgaaaccccacgtagtgttcttgaagaaattggactgacataactctcctcccttgttgatgacttcttgtggcatttcacacactgtagatggtcactcccttcatgtccatgttagctcatggtgtaagatgatgtcttgtcagtattactgttttgctaagccgcttcattcatgcctacacaannnnnnnnnaaaagggaactttagttaattaagtgataagggacttaaatatgaattagaatggtgcagaaagagataccttttctggatattttaaagtttaaaggtcagtttctcttaatctgattatgtgcacatatgaaaatggcacatcatatacatgtaaaatcaggcagtatacatttattaattactgtatttgacaaaggaaactcttaaattataatgtgaaacctggttttatgaaaccaaagactagtgcacgcatttcagcatatgtnnnnnnnnnnnnnnngggaattgacatgtcacatatcaaaatgaaatggaaaacttttgttggaaacctttaaaaaagcaaaattttacctcccaaaagaactttggtatttgggaaaaataaccttaacccnnnnnnnnnnnnnnnnnnnnnnnnnnnnnaagggggccctttccccga

SEQ ID NO: 82747 - DNA, 514 bp, Homo Sapiens
agatggagtttcgcttttttgcccagcctggagtgcagggggtgagttctgctggtgatcacagtcactagcctccaatttctcttgatggtgtcttagcaccttcagagtctctttccactccttctgaagactttcccatgtatcaacttccacccatttagaattcttggtagcaagttctgccatgatgacccggtgataggcaggaatgagtcctttcttcttgtaggcatcaccaacaggagagatgatgcctttgacaactgtgtaccttcctgttccattcatgtagtccttggccagctcaaacaacctgaggtgcatgttggtgatgggattgaatgaaccacaagcaaggagaaccacttcagtcttctcggaattttccatggtaagaacttgaagttgttgatctaaatggaaaactgtgacacctcccttgttgtcgcgccctcactgtccgccggcccgagtgctaccggagatcaccagcggcccggacgccagcgag

SEQ ID NO: 82748 - DNA, 984 bp, Homo Sapiens
tgacggcagtaactataacggtcctaaggtagcgaggcctgggtggcgaattcggcacgaggggaagcgcgagcgttcacttagcggcgagtggctccgtctccgcggacagagcgcgcgccccctggcccggcccgcgaggggctcccggcgcggtccccgagcatttcccgccgggtggagcgggccgagcccggcaggatgaccagccccgcggccgctcaaagccgggagatcgactgtttgagcccggaagcgcagaagctggcggaagcccggctcgctgcaaaacgggcggcccgcgcggaggctcgcgagatccgcatgaaggagctggagcggcagcagaaggaggtagaagagagaccagaaaaagattttactgagaaggggtctcgtaacatgccgggcctgtctgcagccacgctggcctctctgggtgggacttcctctcggagaggcagcggagacacctccatctccatcgacaccgaggcatccatcagggaaatcaaggactctctagcagaagttgaagagaaatataagaaggctatggtttccaatgctcagctagacaatgaaaagacaaacttcatgtaccaggttgataccctaaaagatatgttgctggagcttgaagaacagctggctgaatctaggcggcagtacgaagagaaaaacaaagaatttgaaagggaaaaacacgcccacagtatactgcaatttcagtttgctgaagtcaaggaggccctgaagcaaagagaggaaatgctcgagaaacatggaataatcctaaattcagaaatagctaccaatggagagacttccgacaccctcaataatgttggataccaaggtcctaccaagatgacaaaagaagagttaaatgccctcaagtcgacaggggatgggaccctacgaagagccagtgaagtggaggtgataatagaatcgagcgaatgtgtggaaaagagaaacttg

SEQ ID NO: 82749 - DNA, 420 bp, Homo Sapiens
  misc_feature (13)..(13): n is a, c, g, or t
tcaattaaagggnccagggggtcatgctattaatctcatggcctatagacccattaaccaggactgaacttttccacaaagtacttatgtttacaatgctataaccctttgactgctgcggcaacctttaaccacacaaatgtcacaagctagaatcatcagcatggttcttgccatggcaatcaaagagttaagggctgtgcagtgatttgttttgtatttattaatttatatttattttgtttccattcaaggaggggattaggggtggggcagtttttgtctgctgtaagtgtcttaacctagggaagggttaaatggctttttatactattgcatcttctgtatttaccatcaattcattgtgttgtaattaaaagaaactgtcaataaataagagaacagaaaaatggttcatag

SEQ ID NO: 82750 - DNA, 504 bp, Homo Sapiens
aggggcagaggctgggacacaaggggctggcgagggctgcgaggccagggaagccctgagtttctggcggggctgagcagtgggggagcattgtgttgtgggtgtctgtgtgtgaggtcaccctcaaactgcaccgccggccagataccctcctgaccccgaggacttggtctggtctctctggtggctacaaccccagagttttaaggacttggaaaggaaagcacaatcagagaagaaaacagcccccgaaccagcaggagtggcctggcacatggaccggcctgagcgatgtgcactccacccaagccaggctcccagggggcctgatttctctctcactgtctctttttttaaaatggttgcacggctctgccccatggggggccttttttacacactgcgaggcccagctttctaggggacttttgcacatgtcatgcagctcagctgggagctgcttaggtggaaaactccaaataaagtgcggctgtcgcaaaaaaa

SEQ ID NO: 82751 - DNA, 658 bp, Homo Sapiens
  misc_feature (87)..(108): n is a, c, g, or t
gaaaacccagaggaaatgagtgaggatcaatgggaagaagagagccagccaggaagttgaagatttgtccaggagcagatagctgannnnnnnnnnnnnnnnnnnnnnacggcttacagctcaggtcctctctccatgcttaggaaccactacaaatgctactgccttgagtctcattttgtttccctctggaaaccacatgtgtaccttgtttgcaacagtatggttctggagaccagaaggccaaaatcaaaagtatgggcaggcttgatttctttagaagactccagcggagaactgtgtctccttgcttctgattctacatctccatccatgggccactgtttcagcaacctcagccagtgcaacacaacctcagccaagaagagtatgcagagaaaggagtcccctacctgccacaaaactgttgtctgaaaactgtctcatattgtctcaggttgtcattcattgtgaattagacctgtttaacatgtaatctgcaacatgcttcactgtctaattttccagagcccctcatataaggaactgtattattggtataatcatcatggtgaagaagttggtatgtgggggagagatgacagaaacagagagaaagtcagagctggctgcctgacagataaaaaggaaatgacca

SEQ ID NO: 82752 - DNA, 2246 bp, Homo Sapiens
  misc_feature (2175)..(2198): n is a, c, g, or t
caagggagccgtgtactggacagacgtgagcgaggaggccatcaagcagacctacctgaaccagacgggggccgccgtgcagaacgtggtcatctccggcctggtctctcccgacggcctcgcctgcgactgggtgggcaagaagctgtactggacggactcagagaccaaccgcatcgaggtggccaacctcaatggcacatcccggaaggtgctcttctggcaggaccttgaccagccgagggccatcgccttggaccccgctcacgggtacatgtactggacagactggggtgagacgccccggattgagcgggcagggatggatggcagcacccggaagatcattgtggactcggacatttactggcccaatagactgaccatcgacctggaggagaagaagctctactgggctgacaccaagctcagcttcatccaccgtgccaacctggacggctcgttccggcagaaggtggtgaagggcagcctgacgcaccccttcaccctgacactctccggggacactctgcactggatggactggctgacgtgctccatccatgcctgcaacaggaacactgcggggaagaggaacgagatcttgagcgccctctactcagcatggatatccaggtgctgagccaggagcagcagcctttctgagccaaggaggtcctgctgctggcccagtagacggaccaatggagggtctcgctggacacaccggacttcaccgacatcgtgctgcagctggacgacatccagcatgccatcgccatcaactatgacccaatggagggccacgtctactggacggatgacgaggtgtgggccatccgcagggcatacctggatgggtctggggcgcagacgctgatcaacaccaagatcaacgaccccgatgacatcgcagtcaactgggtggcccgaagcctctattggacccacacaggcactgaacacatcgaggtgacgtgcctcaacagcacctcccacaagatcctggtgtcagaggacatggacgagccccgtgccattgcactgcatcccgagatgggcctcacgtactggatagactggggagagaaccctaaaatcgagcgtgccaacttggacaggcaggagcggcgtgtgctggtcaatgcctccctcgggtggcccaacggcctggccctggacctgcaggaggggaagctctactggggagacgccaagacagacaagatcgaggtgatcaatgttgatgggacgaagaggcggaccctcctggaggacaagctcccgcacattttcgggttcacgctgctgggggacttcatctactggactgactggcagcgccgcagcatcgagcgggtgcacaaggtcaaggccagccgggacgtcatcattgaccagctgcccgacctgatggggctcaaagctgtgaatgtggccaaggtcgtcggaaccaacccgtgtgcggacaggaacggggggtgcagccacctgtgcttcttcacaccccacgcaacccggtgtggctgccccatcggcctggagctgctgagtgacatgaagacctgcatcgtgcctgaggccttcttggtcttcaccaacagagccgccatccacaggatctccctcgagaccaataacaacgacgtggccatcccgctcacggggcgtcaaggaggactccccccctgaactctcaatgtcctccacaatcattttttttggcccgaccgttttccttaaattactgccccgccgccgcctttttgatcccgttgccctttgttcaacatcccccgaccctcccccgcaatctcggccccgcccacaataatcactcaattcacccgcccgtgctgtccccattgtttcatacccctcccggcaaacatttcttgcttttcccacacttcgccccccacctgctgcacgctgttttgacatcgtgcgccggtttgcgcaccaacactctcaccgattgtgcactaaggttgttattctaaaaaccttgattcgcccgcaccgcggaccatgtggagacggacagctaacgagtgacgcagcaccctgttgtgggtgtgttgtcttcctcgaacacaatgtggttccaatggttgccggccgcaacattcacaagttgtccccggcgattgcgccacccgacaaagttccgannnnnnnnnnnnnnnnnnnnnnnnttctgctcaccacaatcgaattcgacaggttgactgttcacacctttg

SEQ ID NO: 82753 - DNA, 1861 bp, Homo Sapiens
gtcgctgggtgcgtggggctgcctcgccgcgtctcgccacgggctctgccagcagacagccttggcacacaggcacaagggctggagcccagagatgagagtgcccaagggagatgtgagcctggcgggctgcccgctaacctgtcgctgaagccccagaagcgggccctcaggccaggcctaccctgcctccggcccagcatgcgcctgtcggtgcggagggtgctgctggcagccggctgcgccctggtcctggtgctggcggttcagctgggacagcaggtgctagagtgccgggcggtgctggcgggcctgcggagcccccggggggccatgcggcctgagcaggaggagctggtgatggtgggcaccaaccacgtggaataccgctatggcaaggccatgccgctcatcttcgtgggtggcgtgcctcgcagtggcaccacgttgatgcgcgccatgctggacgcccaccccgaggtgcgctgcggcgaggagacccgcatcatcccgcgcgtgctggccatgcgccaggcctggtccaagtctggccgtgagaagctgcggctggatgaggcgggggtgacggatgaggtgctggacgccgccatgcaggccttcatcctggaggtgattgccaagcacggagagccggcccgcgtgctctgcaacaaggacccatttacgctcaagtcctcggtctacctgtcgcgcctgttccccaactccaagttcctgctgatggtgcgggacggccgggcctccgtgcactccatgatcacgcgcaaagtcaccattgcgggctttgacctcagcagctaccgtgactgcctcaccaagtggaacaaggccatcgaggtgatgtacgcccagtgcatggaggtaggcaaggagaagtgcctgcctgtgtactacgagcagctggtgctgcaccccaggcgctcactcaagctcatcctcgacttcctcggcatcgcctggagcgacgctgtcctccaccatgaagacctcattggcaagcccggtggtgtctccctgtccaagatcgagcggtccacggaccaggtcatcaagcctgttaacctggaagcgctctccaagtggactggccacatccctggggatgtggtgcgggacatggcccagatcgcccccatgctggctcagctcggctatgacccttatgcaaacccccccaactatggcaaccctgaccccttcgtcatcaacaacacacagcgggtcttgaaaggggactataaaacaccagccaatctgaaaggatattttcaggtgaaccagaacagcacctcctcccacttaggaagctcgtgatttccagatctccgcaaatgacttcattgccaagaagagaagaaaatgcatttaagtggaaatcggacctctaatccaagcatattgcttgctattaatcgccaaaacaggactgctgatgaggaatgtatttgcatatgtttgcaaaagctgaatcattgaaaacgtaccttgaaactctctatctctggacactccagggtagagaatgaagggtatggaagtagtccggcttttgaaacttaggtattttatatttttcccctcaagaacttttttttaagagacagatttgccatcctccttaatttgcaggactgccttggtggctttgtttgctgggacaaggcccacaacctgtgcctctcctattgacccttactttgaattcaaagaatctatttaagagtttaatatatgaggctttctttgattcctcctcagttctacctagtttcacagaggaaaaaaatactctttgaataaagtgaacagaggctcatttgtttgtgcctcactttactat

SEQ ID NO: 82754 - DNA, 455 bp, Homo Sapiens
tgggttctggacagaaatatagttgtaattaagcattaatcaggctgcactttggcccacttcttcgtaaccaaaagtcccagagcaccagatgctaaccatttgcctcctcattgttcctacagagaagatttctgatgttagaatcataaggcctttgtttgtttaaaaatggcttaagatgtttttcagatcctgaattccagcaaaagagctattgccaaccagtttgaagaccgcccccccgcctctccccaagaggaactgaatcagcatgaaaatgcagtttcttcatctcaccatcctgtattcttcaaccagtgatcccccacctcggtcactccaactcccttaaaatacctagacctaaacggctcagacaggcagatttgaggtttccccctgtctccttattcggcagccttatgattaaacttccttctctgctgcaaaaa

SEQ ID NO: 82755 - DNA, 870 bp, Homo Sapiens
gcattcttctctccacatccctctctgtacttacagcccccaatggcccccaaaaagccagagcccaagaaggatgatgccaaggcagcccccaaggcagctccagctcccgcacctccccctgagcctgagcgccctaaggaggtcgagtttgatgcttccaagatcaagattgagttcacacctgagcagattgaagagttcaaggaagccttcatgctgttcgaccgcacacccaagtgtgagatgaagatcacctacgggcagtgtggggatgtcctgcgggcgctgggccagaaccccacacaggcagaagtgctccgtgtcctggggaagccaagacaggaagagctcaataccaagatgatggactttgaaactttcctgcctatgctccagcacatttccaagaacaaggacacaggcacctatgaggacttcgtggaggggctgcgggtcttcgacaaggagggcaatggcactgtcatgggtgctgagcttcgccacgtgctggccacgctgggtgagaggctgacagaagacgaagtggagaagttgatggctgggcaagaggactccaatggctgcatcaactatgaagcatttgtgaagcacatcatgtccagctaaacctcgtgcccaggaagcccagggaaggctgtgcagggacgtctcatctcccatgtgtgatgctgacaccagcggcctggagtcgtgggaaggaggggagccttaccaagactcctgcaaaaacccttggacctctccacgtggttgccgtctctggcccctctcaggctgtgcttacctgtgacagcagctctgtccccaccccatgggcctcatgaataaatggcttcttgccggcaa

SEQ ID NO: 82756 - DNA, 461 bp, Homo Sapiens
  misc_feature (138)..(138): n is a, c, g, or t
agaagacgaagtggagaagttgatggctgggcaagaggactccaatggctgcatcaactatgaagcatttgtgaagcacatcatgtccagctaaacctcgtgcccaggtaggcacccactccctcctgaacccgctgntgccacctgcccacactccaccagctgcagtgctcacttgacatcctgctgcctccgtctccctcctcctctgtaatctgcactgcctttgctctcaggaagcccagggaaggctgtgcagggacgtctcatctcccatgtgtgatgctgacaccagcggcctggagtcgtgggaaggaggggagccttaccaagactcctgcaaaaacccttggacctctccacgtggttgccgtctctggcccctctcaggctgtgcttacctgtgacagcagctctgtccccaccccatgggcctcatgaataaatggcttcttgccggc

SEQ ID NO: 82757 - DNA, 940 bp, Homo Sapiens
  misc_feature (836)..(836): n is a, c, g, or t
tttcatagccccagttggccagaactggtctcccagacggaggagaagctcctacagaagccgtgcaaagaactcttttctgcctgtgcacagtctgtccacgagtacctgaggggagaaccatcccacgaatatctggacagcatgttttttgaccgctttctccagtggaagtggttggaaaggcaaccggtgaccaaaaacactttcaggcagtatcgagtgctaggaaaagggggcttcggggaggtctgtgcctgccaggttcgggccacgggtaaaatgtatgcctgcaagcgcttggagaagaagaggatcaaaaagaggaaaggggagtccatggccctcaatgagaagcagatcctcgagaaggtcaacagtcagtttgtggtcaacctggcctatgcctacgagaccaaggatgcactgtgcttggtcctgaccatcatgaatgggggtgacctgaagttccacatctacaacatgggcaaccctggcttcgaggaggagcgggccttgttttatgcggcagagatcctctgcggcttagaagacctccaccgtgagaacaccgtctaccgagatctgaaacctgaaaacatcctgttagatgattatggccacattaggatctcagacctgggcttggctgtgaagatccccgagggagacctgatccgcggccgggtgggcactgttggctacatggctccagaggtcctgaacaaccagaggtacggcctgagccccgactactggggccttggctgcctcatctatgagatgatcgagggccagtcgccgttccgcggccgcaaggagaaagtgaagcgggnaggaagtggacccgccggttcctggagacgggaggagtgtactcccacaagtttctccgaaggaggccagtccatctgcaagatgctgctcacgaaaaaatgcc

SEQ ID NO: 82758 - DNA, 545 bp, Homo Sapiens
gtggggctctcagatcaagaaggtcagcgacattggcaatgggttgatcagacaccatacaatgaaagttccacattctggcatccacgtgagcccagtgatcacaatgagcgctgcgttgtgctaaattttcgtaaatcacccaaaagatggggctggaatgatgttaattgtcttggtcctcaaaggtcagtttgtgagatgatgaagatccacttatgaactgaacattctccatgaacaggtggttggattggtatctgtcattgtagggatagataataagctcttcttattcatgtgtaagggaggtccatagaatttaggtggtctgtcaactattctacttatgagagaattggtctgtacattgactgattcactttttcataaagtgagcatttattgagcattttttcatgtgccagagcctgtactggaggcccccattgtgcacacatggagagaacatgagtctctcttaatttttatctggttgctaaagaattatttaccaataaaattatatgatgtggtgtctcaaa

SEQ ID NO: 82759 - DNA, 483 bp, Homo Sapiens
tttgcatgtagtaacttatagatatatttagaaaactgattatcttttaaaaaatgactactaaacagactaaaacgcagagttcattaaaatacagaggatgcctctggttctctggtattgactctttttgtctactaagataagaagtctgggctagactgaaaaactcaaaatccaggtctggggtttcccagtactatgctcccatttcccagtactgtgctcccatttcacagtactgtgtgctcccatttctcagtactgggctcccatttcccagtactgtgctcccatttctcagtactgtgctcccatttcccagcactatgctcccatttcccaggactgtgagcttccatttcccagtactgtgctcccatttcccaatgctatgctccatttcccagtgctgtgagctcccatttcccagtactgtgctcccatttccgaatactggtgctccatttcccagtactgtga

SEQ ID NO: 82760 - DNA, 499 bp, Homo Sapiens
gcggccgccacccagtggggacgcatcctatcctcatatgtgctcaagacagtgctgctggcagtgctgctgcgcaagggggcccctgggaaaggctgggacgaggagcacctgggaaggtgtttggaggagttggtgcagttccttagggactgcctgctgcgacgccatacgctcttccactgcgtcctgggccctggtggggcggctgccgaggtgggtcccctgcccaaggcactgagggaagccgccccagttgacctcctggccgctttcgacgggcacgcccgggaacttgcagcagcgcggttgctgtccacgtggcaaaggctgccccagcttctccgggcctacgggggtccccgctaccttgccaggtgccccccaccccggagtcagcgcacccagggcttccttgaaggtgaaccgtaaaccctgacagcacccccacctgaccaaatgctcctaaagcctttcccactgggtggggttggaatgg

SEQ ID NO: 82761 - DNA, 650 bp, Homo Sapiens
cccggaggtccctggaagtttgcggcaggacgcgcgcggggaggcggcggaggcagccccgacgtcgcggagaacagggcgcagagccggcatgggcatcgggcgcagcgaggggggccgccgcggggcagccctgggcgtgctgctggcgctgggcgcggcgcttctggccgtgggctcggccagcgagtacgactacgtgagcttccagtcggacatcggcccgtaccagagcgggcgcttctacaccaagccacctcagtgcgtggacatccccgcggacctgcggctgtgccacaacgtgggctacaagaagatggtgctgcccaacctgctggagcacgagaccatggcggaggtgaagcagcaggccagcagctgggtgcccctgctcaacaagaactgccacgccggcacccaggtcttcctctgctcgctcttcgcgcccgtctgcctggaccggcccatctacccgtgtcgctggctctgcgaggccgtgcgcgactcgtgcgagccggtcatgcagttcttcggcttctactggcccgagatgcttaagtgtgacaagttccccgagggggacgtctgcatcgccatgacgccgcccaatgccaccgaagcctccaagccccaaggcacaacggtgtgtc

SEQ ID NO: 82762 - DNA, 550 bp, Homo Sapiens
agccagttttacactaaatgttcctcagtctgattaatttgttattggatgtattctgtatctttcttttgtaatttgtaacttttatccacttagcacgaatgattctattaaagaaaatcattaggaagtggtagaaactttaaatcgccccagagtttgcctgtttccatattttattatcttataatcttcgggagtgcttacacttatggagctaacattttcagagatacagcttcttatagtaacactaaaactttcttcctctttggactgaatacctataattataactatatggtagtttaagtttccttgtgattagtcaaaaataccattttagtatgaagcaatgaagtctattatttgttgtcccataattgagaaagcttaaatacaccttttattaagagtttgtaaattctagcttagtctacacagatttttatatcaatttgtttatatttttattaatgtcatttctggaagtgtgaaaatgttaatgttcaacaagcaacattaaaaatagatttgaaacatttaaaaa

SEQ ID NO: 82763 - DNA, 440 bp, Homo Sapiens
taagcatttccttcctttggcataaggaatcccatccttggaatcaaacatttttccaaagagccagggttcctttcagtgcgaatgttgtaagaaaaaccaagatctgagtcctaggtgctactaagtcttagttacattttggtgcactgcgcttaacacaccattactttataaaatacaaacaagagagatagttcaaataaaatctaaactcataattacttgttggtaagacgactcatacgccttaaactctcctcaaatatattttactgccagttgatagaagagcttggattcccacaccaaattcttagttcttaaatgtgctctcttcccacttatcatgctatttgccatcggacaaagtgtacatttaactataggacaaagtgtacatttaactattgcaggatagtaaataacttttcctattg

SEQ ID NO: 82764 - DNA, 1111 bp, Homo Sapiens
tgcggccggcggactggagctcccagtcgggcctgcccgtcccactcgggacatgagctgctgaagttgtccccccgtcagccctcacccctgccaggactcctctgggcttgcagtcgctcccccgtacctctcctggccccctcagttctcccaggttgttcctcaaagtcattcaagctgtactcgccgaaggagcccccgaacggcaacgcctttccccccttccatcccggcaccatgctggatagggatgtgggcccaactcccatgtatccgcctacatacctggagccagggattgggaggcacacaccatatggcaaccaaactgactacagaatatttgagcttaacaaacggcttcagaactggacagaggagtgtgacaatctctggtgggatgcattcacgactgagttctttgaggatgatgccatgttgaccatcactttctgcctggaggatggaccaaagagatataccattggccggaccctgatcccacgctacttccgcagcatctttgaggggggtgctacggagctgtactatgttcttaagcaccccaaggaggcattccacagcaactttgtgtccctcgactgtgaccagggcagcatggtgacccagcatggcaagcccatgttcacccaggtgtgtgtggagggccggttgtacctggagttcatgtttgacgacatgatgcggataaagacgtggcacttcagcatccggcagcaccgagagctcatcccccgcagcatccttgccatgcatgcccaagacccccagatgttggatcagctctccaaaaacatcactcggtgtgggctgtccaattccactctcaactacctccgactctgtgtgatactcgagcccatgcaagagctcatgtcacgccacaagacctacagcctcagcccccgcgactgcctcaagacctgccttttccagaagtggcagcgcatggtagcaccccctgcggagcccacacgtcagcagccctagcaaacggcggaaacggaagatgtcagggggcagcaccatgagctctggtggtggcaacaccaacaacagcaacagcaagaagaagagtggcgtgaat

SEQ ID NO: 82765 - DNA, 517 bp, Homo Sapiens
tggtgatctagaggtctcggctcccactgggtgcatatggaacaaaactggactacagaatatttggagctataacaaacgggcttcagaactgggacagaggagtgtgacaatctctggtgggatgcattcacggactgagttcttggaggatgatgccatgttgaccatcactttctgcctggaggatggaccaaagagatataccatgggccggaccctgatcccacgctacttccgcagcatctttgaggggggtgctacggagctgtactatgttcttaagcaccccaaggaggcattccacagcaactttgtgtccctcgactgtgaccagcgcagcatggtgacccagcatggcaagcccatgttcacccaggtcagcaacccagctggatgtggaacaccattggcaccggggttggattcccatcctctctcccagtgtatacccacagctgttccccaggaaggcataatgtgaactgtcaaaataagaagggcgggtaggcatgtt

SEQ ID NO: 82766 - DNA, 501 bp, Homo Sapiens
  misc_feature (12)..(12): n is a, c, g, or t
  misc_feature (64)..(64): n is a, c, g, or t
  misc_feature (67)..(67): n is a, c, g, or t
ggactactactnggatgaccggctacccgcagcagctgaaccccgaggcgctgggcttcagccnganggacgcggtcgaggcgctcatcagcaacagccaccagctccagggcggggggcgcctgcacccgcaccacgccgccggcgccctgcacttcgacgaccgcttctccgacgagcagctggtgaccatgtctgtgcgcgagctggaaccggcagctgcgcggcgtcagcaaggaggaggtgatccggctgaagcagaagaggcggaccctgaaaaaccgcggctatgccaagtcctgccgcttcaagagggtgcagcagagacacgtcctggagtcggagaagaaccagctgctgcagcaagtcgaccaccttaagcaggacatctccaggctggtgcgcgagagggacgcgtacacggagaaatactagacgttggtgagcagcggcttccgagaaatcgttcgtgcagtgacaacccgtcctctcccgagtttt

SEQ ID NO: 82767 - DNA, 534 bp, Homo Sapiens
caggagaatggcatcagaactggcaatgagcaactccgacctgcccaccagtcccctggccatggaatatgttaatgacttcgatctgatgaagtttgaagtgaaaaaggaaccggtggagaccgaccgcatcatcagccagtgcggccgtctcatcgccgggggctcgctgtcctccacccccatgagcacgccgtgcagctcggtgcccccttcccccagcttctcggcgcccagcccgggctcgggcagcgagcagaaggcgcacctggaagactactactggatgaccggctacccgcagcagctgaaccccgaggcgctgggcttcagccccgaggacgcggtcgaggcgctcatcagcaacagccaccagctccagggcggcttcgatggctacgcgcgcggggcgcagcagctggccgcggcggccggggccggtgccggcgcctccttgggcggcagcggcgaggagatgggccccgccgccgccgtggtgtccgccgtgatcgccgcggccgctctagagtatcc

SEQ ID NO: 82768 - DNA, 843 bp, Homo Sapiens
  misc_feature (538)..(538): n is a, c, g, or t
aactccattttctctggggcaatagcagaataggagcaagccagcactagtcagctaactaagtgactcaaccaaggccttttttccttgttatctttgcagatacttcattttcttagcgtttctggagattacaacatcctgcggttccgtttctgggaactttactgatttatctcccccctcacacaaataagcattgattcctgcatttctgaagatctcaagatctggactactgttgaaaaaatttccagtgaggctcacttatgtctgtaaagatgggaaaaaaatacaagaacattgttctactaaaaggattagaggtcatcaatgattatcattttagaatggttaagtccttactgagcaacgatttaaaacttaatttaaaaatgagagaagagtatgacaaaattcagattgctgacttgatggaagaaaagttccgaggtgatgctggtttgggcaaactaataaaaattttcgaagatataccaacgcttgaagacctggctgaaactcttaaaaaagaaanagttaaagtaaaaggaccagccctatcaagaaagaggaagaaggaagtggatgctacttcacctgcaccctccacaagcagcactgtcaaaactgaaggagcagaggcaactcctggagctcagaaaagacaaaaatcacccaaagaaaaggctggaccaaaagggagtaaggtgtccgaagaaacagactcagccctccctcttctgcaagagcccggatggtcccagccatgggcccgttccccatctcccaagacctcattgtcagcctccacccaacaggttcttccactgaaaaaccccg

SEQ ID NO: 82769 - DNA, 872 bp, Homo Sapiens
  misc_feature (88)..(122): n is a, c, g, or t
aaaagaatgtatagactcactatagggcgctagctctttgtagccgaacgaccgagcgcagcgatgttgtgagcgaggaagcggccgnnnnnnnnnnnnnnnnnnnnnnnnnnnnnnnnnnncagtcgacggtaccggacatatgcccgggaattcggccattacggccggggagcactagtcaagtgactctaagaagggccattttcccttgttgtctttgaaaatacttcattttcttagcatttcaggagattataacatcctgtatttcagtttctgagagctttactgacgtgatttccctattcaaaacaatcctcatttcctacatttctgaagatctcaagatctggactactgtggagagaaattcccagtaaggctcacttatatctttagagatggcaaataactacaagaaaatagttctactgaaaggattagaggtcatcaatgataatcattttagaaatgtaaaagtccattacatgagtaaaggattaaaaaactataattccaaaaatgaacagaagagtatgacagaaaattcagaatggctgactagatggaggaaaagttaccaggtgatgccggattgggcaaacataatagaattcttcaaagaaataccaacactgggaagaccttgatgaaactacttaaaagagaaaagttaaaagtagcaaataaacattgaatccatacaagatcaaaggaataaacacatactaaaaagacgaaacagaaagaagtgtatccagctacacctgcatgcaccacaaagcaaacatctcacagataaaggagcaaggagaacacatggaatcagacaacgaaaaaacaactgaagaaagactgaaacaaaaaga

SEQ ID NO: 82770 - DNA, 434 bp, Homo Sapiens
ggggtggggtccagcccaaagcaggcattgagtgaatgccccctggctgcgaagttgagccccgccctgccatgaggttttcctccccaggcaggcaggaggccgcggggagcacgtggaaagttggctgctgcctggggaagcttctcctccccaaggcggccatggggcagcctgcagaggacagtggacgtggagctgcggggtgtgaggactgagccggcttccccttcccacgcagctctgggatgcagcagccgctcgcatggaagtgaccgcccagaggcatgcaggctgctgggcaccaccccctcatccagggaacgagtgtgtctcaaggggcatttgtgagctttgctgtaaatggattcccagtgttgcttgtactgtatgtttctctactgtatggaaaataaagtttacaagcacacggt

SEQ ID NO: 82771 - DNA, 467 bp, Homo Sapiens
  misc_feature (223)..(223): n is a, c, g, or t
aagaattcggcacgaggccaagctgtagggccagggctgctgcctgccagcctggggtccctggaggacaggtcacatctgaatccctttgcggtgcggggctggggtccagccaagagcaggcactgagtgaatgcccccatggcttcggagctgagccccgccctgccatgaggttttcctccccaaggcggccatggggcagcctgcagaggacagtcgnacgtggagctgcggggtgtgaggactgagccggcttccccttcccacgcagctctgggatgcatgcagccgctcgcatggaagtgccgcccagaggaatgcaaggctgctgggcaccaccccctcatccagggaacgagtgtgtctcaaggggcatttgtgagctttgctgtaaatggattcccagtgttgcttgtactgtatgtttctctactgtatggaaaataaagtttacaagcacaaaa

SEQ ID NO: 82772 - DNA, 189 bp, Homo Sapiens
gctctgcatagctagaccatcttattaataatactctgaaaaaaatgatttcaaggcatggaagttctctgtgatacaacaatagtatttcttcaaatgcgccttatgctacttatctcagaaacaggttttaaaatgaagtgctttccagagaaccatcatataaataaagattaatagaaaaataaa

SEQ ID NO: 82773 - DNA, 453 bp, Homo Sapiens
cagggtagcatttgtctttcaaactgcagggtttgaaatcagtttttgtgggtgattgcaattttttaatgaaatgcattagaacatctaagcacgtcacctacagttttgtgatggtgcatttttgcattgcagtatagatctgtgcatagatatatgcattaagtgtagcaaatcgtgatgtaaattttttactgctggtcatggtcaaaaagtaagatacactaggaaattgagtcactaggagcatggatgtataaggcaggttttatagaaccatttagattcaacattaatggtagagtggcattttaccaaaaaaatgggtgtatttgatttgggtgctgtaaggcaatttgctaggacatgggataatcagattacacaaaatctaggcagtgaacaagtcttcatcctggcccaggaaatagcctattaaaaaatgctgtccag

SEQ ID NO: 82774 - DNA, 481 bp, Homo Sapiens
tacaacaccagaaaaagtcacattctcagaagaagaaaggatttgttttgggtgcagtggtctccccaccaggctccttttcatacctggtggctgcagttactttccagagcacagcagaaccaacctgaggcaactggagtcctcttgtctacttttcagattcttgaatggctggtcttcagctcatggaaacctggctttaaatggcagcccccaaattcaagagaaaacaccaattgcaagcaattctaaaagtcaggccattgggcccttgggacccagaaggggagtgaaactccagagcaaaaggaaaatgcaatcgctatcccacacaccctgggaatgggctggactcctgaccttccccatcgcccccagagagagaggcagggagagctctacagcaatgagaggctttccttcaggcttcagctttagtgacccccagtgacatcttagcagccagcttctcatgctg

SEQ ID NO: 82775 - DNA, 1241 bp, Homo Sapiens
  misc_feature (43)..(43): n is a, c, g, or t
  misc_feature (115)..(149): n is a, c, g, or t
  misc_feature (756)..(765): n is a, c, g, or t
ccaacctttggttaaatcagaacctccacatcaataagagggncgcctccgcgggcctgttaaatcaagcccgggaacgacgagcgcagcgagtagtgagcgaggaagcggccgnnnnnnnnnnnnnnnnnnnnnnnnnnnnnnnnnnncagtcgacggtaccggacatatgcccgggaattcggccattacggccggggacacagcacgctgccacgccgacgcagacccctctctgcacgccagcccgcccgcacccaccatggccacagttcagcagctggaaggaagatggcgcctggtggacagcaaaggctttgatgaatacatgaaggagctaggagtgggaatagctttgcgaaaaatgggcgcaatggccaagccagattgtatcatcacttgtgatggtaaaaacctcaccataaaaactgagagcactttgaaaacaacacagttttcttgtaccctgggagagaagtttgaagaaaccacagctgatggcagaaaaactcagactgtctgcaactttacagatggtgcattggttcagcatcaggagtgggatgggaaggaaagcacaataacaagaaaattgaaagatgggaaattagtggtggagtgtgtcatgaacaatgtcacctgtactcggatctatgaaaaagtagaataaaaattccatcatcactttggacaggagttaattaagagaatgaccaagctcagttcaatgagcaaatctccatactgtttctttcnnnnnnnnnncattactgtgttcaattatctttatcataaacattttacatgcagctatttcaaagtgtgttggattaattaggatcatccctttggttaataaataaatgtgtttgtgctaatatatcttgtatgcattctttaaaccttacaggaaattagtgatgagttttaataattattaattgagtaaaggttggggcagtcttgaggtactatattgagatgacactctagcaatttatatagatagctactcttacaggaaatactgtaccaattatttaagcttgccctatactatttgaactttgtatgaattcaggaatcttgaatttctggcagagaccattctcaataaaaggtgactacaacataaactttattattcaaattagagcaaaggtttaattaaccagcattgactaaaatactttttgtgtgtatttatatacaaatataagtaatactatgtatggaataaa

SEQ ID NO: 82776 - DNA, 1143 bp, Homo Sapiens
  misc_feature (314)..(314): n is a, c, g, or t
  misc_feature (1104)..(1104): n is a, c, g, or t
agtaggtgaagaagggcctgtggtcgtccatgtcctcgatctggcgcttgacgaagctgtcgatgcgcttgcggtaggtgcggttggtgagccgtcccaccatgcccagcccatacggccgcttctcccgggcgaagagcttgcgcaccggcaccgcgatacgctggccccgtcgcggccccgcggtgctcaccacctcctgtcggagccgcaccttgggctgcggggctgcggcgccctccttctgcttccgccagcctcgctccaagggcagcatcaggtggctgcgctcaagctcgctgcggtccagggcnccgccggtgaggtccgcctgctccggtgccttctcccagtcctttagcgctgcctccgatggggactcgaaaacttcatccgggtatgtggacagctcttcatggaggataccttcccgggcaaagaaggatgtgtccagctcatcggggaaatcagttgtgtcctcctccagaaagctagctggagtgaagcttcgacgctgtgcccggcgaaaggtgccatccctaacggagcggcctttcatcagcgctgcggccgcccggaagctcatcttggccaccgactctcgcttgcgccgccgcgggagccggtggaaacctgagcgggagctggagaaggagcagagggaggcagcacccggcgtgacgggagtgtgtggggcactcaggccttccgcagtgtcatctgccacacggaaggcacggccacgggccagggggtctatgatcttctgcatgcccagctggcatggccccacgtagagtgggggtggcgtctcggtgctggtcagcgacacgttgtcctggctgggcaggtccagctcccggaggacctggggcttcagcttcccgtagcgctggctgcagtgacggatgctcttgcgctgccatttctgggtgctgtcactgtccttgctcactccaaaccagtcggcggtccacctacggatggtctgtgtgatggacgtctggcgttgcagcaccggccgccggagctcatggtggggtgaagagatgtgggctgtctcggctggcatactcacactcctcaggaaagcctgtcgcctcnaggggctgcaggaagctgggctcttctgccgtcaggggc

SEQ ID NO: 82777 - DNA, 495 bp, Homo Sapiens
gaagcaggcccagagcggaaaagtgggaagaggcagactgagcgggaaaagaagaagaagattctggctgagaggaggaaggtgctggccattgaccacctgaatgaagatcagctgagggagaaggccaaggagctgtggcagagcatctataacttggaggcagagaagttcgacctgcaggagaagttcaagcagcagaaatatgagatcaatgttctccgaaacaggatcaacgataaccagaaagtctccaagacccgcgggaaggctaaagtcaccgggcgctggaaatagagcctggcctccttcaccaaagatctgctcctcgctcgcacctgcctccggcctgcactcccccagttcccgggccctcctgggcaccccaggcagctcctgtttggaaatggggagctggcctaggtgggagccaccactcctgcctgcccccacacccactccacaccagtaataaaaagccaccacacactgaaa

SEQ ID NO: 82778 - DNA, 1067 bp, Homo Sapiens
aaattataatattttattatagaaaaagcatcccaaatacaggatttcgtaaacactggtaggtgaacaagtgcaattttaaaagtaaatacaaagtagaggcaaaacctacaagcattttgccttcagaagaaaatgtaatgttctcctgcactagtgatcccacccagaacacaaatgtggctccatctcccatgaaagcatcatatttgctttctgagctcagtattcccatttcaataattgcaaagtgatggcaagaagtggcactgaatttaagctcttaagaatttccttttggacattctgaatgagaccctagttctttccagatgcaatttgggtgcagaggccaccaagaatggcatcttcattaacctctaatgagcatccgattggtgtctgcttttagaagttagagattgtcaccttttcagtttggtccctttgctactaagcaatttgcctggtataaaacaagacaaaaacaaaacccaagaacagagtataaaggataaggactgctttgctaagcacgaggcaacaggagtcttgacttcctttcctgcttttgcagttacacaaagactcaatgaacagcaccagacccaaatttttcaagttaccagggctgctgcaaagatggtagctaattaccagtgagtacttcttcatcccctgccagaggcatggacttactgaaaaggacatatgttaattatggcagaaaggaaaaggttaggggagaagcatgtctcctactcaaggtgagacaaatcacgagggagggctggctgcaggcatcccaggtgagatgggctccaacaaggagtagacccacagctggccctaatcctgaaagtcgttagaagccatctgagaaagtggggcatttagccggtcaagttcatccacttggggtgggtgatgcattaatatctcctggtcctccaagacatcatctccagcagctaccagattcgtgagggatttgcttcgaacacactggaaatccaccccggccgtaatggccgaattcccgggcatatgtccggtaccgtcgactg

SEQ ID NO: 82779 - DNA, 334 bp, Homo Sapiens
atgacagggcaagaccctgtctcaatattttaagtcaagggtttgtagtaatgtattcagtgccacttcttgccatcactttgcaattattgaaatgggaatactgagctcagaaagcaaatatgatgctttcatgggagatggagccacatttgtgttctgggtgggatcactagtgcaggagaacattacattttcttctgaaggcaaaatgcttgtaggttttgcctctactttgtatttacttttaaaattgcacttgttcacctaccagtgtttacgaaatcctgtatttgggatgctttttctataataaaatattataatttgtaaa

SEQ ID NO: 82780 - DNA, 576 bp, Homo Sapiens
tgtttcctactcaaggtgtgtctgtagagtcctgactgcgtgccaggggctctgtctggcacatttctgaactttgcaaaattaattgtgccgaagagaacaccatcaaacgcgtccggcatacagcgtaaacatcttcagaccgtgattctgcgccatcaaacgctctccagctaatttcatttggtgattactctgctagaaaaccgaggccaagtgaaactgcggaaatgggaacaatgtacggaggaaaaatctcaccccattaagagatccgtttcttctccgcacaaataagcccaccccgcctccgaggcaagactagatggctccaggatactctcggcgcgcccgctggccatctcgggcaggggagccccacacccggcaggaggaccaggacgcgagcggcggcgcctcggccctgggctgtttaggtaattcgcaaagtcccaacaatcatccccctctcccagaagctggttttcttgtgtgcagtggttacagaggcggcgaaaacacggttccccgctttcctctcctcaaggcactgtttgcagcggcagcagcggccgc

SEQ ID NO: 82781 - DNA, 439 bp, Homo Sapiens
ccaataatttctatctggcccctgccccagccctcccacccacccacatatcctccttttggggggaccatgatgcatgcatagggatgggagctgaaggaaactgtgttccttgggcagaaaaaagtccttgggtctaggtgttctcctccaagttgatatccctcccagccttgcccaccctccagacacaccaagaaggaggaattctggagcagtgccagaaggactgccctgaagctccttggggaataggcggctgagtcagcaccacccccatggttttcaccagttacagctcatcttcatccagcttggcaagtctggcttggcagggaggggtttttggagttggagagactggaggagagtcatggggagcctgggggatgtcaccaagggcctgtttatccagtggcaagagggctctggccacctc

SEQ ID NO: 82782 - DNA, 1176 bp, Homo Sapiens
  misc_feature (66)..(106): n is a, c, g, or t
  misc_feature (110)..(144): n is a, c, g, or t
  misc_feature (728)..(729): n is a, c, g, or t
  misc_feature (731)..(731): n is a, c, g, or t
  misc_feature (735)..(790): n is a, c, g, or t
  misc_feature (797)..(798): n is a, c, g, or t
  misc_feature (994)..(1002): n is a, c, g, or t
tttttcctccttgcctggcccgctggcccatatgccgatcctatacggcgctagctcgccgttccnnnnnnnnnnnnnnnnnnnnnnnnnnnnnnnnnnnnnnnnnccgnnnnnnnnnnnnnnnnnnnnnnnnnnnnnnnnnnncagtcgacggtaccggacatatgcccgggaattcggccattacggccgggggatctctctcgggtggagtcttctgacagctggtgcgcctgcccgggaacatcctcctggactcaatcatggcttgtggtctggtcgccagcaacctgaatctcaaacctggagagtgccttcgagtgcgaggcgaggtggctcctgacgctaagagcttcgtgctgaacctgggcaaagacagcaacaacctgtgcctgcacttcaaccctcgcttcaacgcccacggcgacgccaacaccatcgtgtgcaacagcaaggacggcggggcctgggggaccgagcagcgggaggctgtctttcccttccagcctggaagtgttgcagaggtgtgcatcaccttcgaccaggccaacctgaccgtcaagctgccagatggatacgaattcaagttccccaaccgcctcaacctggaggccatcaactacatggcagctgacggtgacttcaagatcaaatgtgtggcctttgactgaaatcagccagcccatggcccccaataaaggcagctgcctctgctccctctgaaaaannanaaannnnnnnnnnnnnnnnnnnnnnnnnnnnnnnnnnnnnnnnnnnnnnnnnnnnnnnnggggggnngaaccaaaaaggccccccggggggggaaaaggttacagggacccccaccttgctggcaaaaaggcggcccccttaaaggggcgccttttattcaggttttggccctgggcccccccttttttcagacggcccggcccgggacaaaacctccctccgcttggggcgacctttggttaagggaaccccttttcttctnnnnnnnnnagaactgattttccgaacaaactttcttttaacataaaatttaaaagtttctcggcgcgggaattataaaaacacctctagactggggaatgaaagggggctgcacaagctttgcctggtgtttttgcgtcggtcgggcgctctcgaaaatgttttgggcctcaccgcggaata

SEQ ID NO: 82783 - DNA, 1062 bp, Homo Sapiens
gcgcatcctgacttgtgacctatgacccgtgttaaaaaaagcaggctggtaccggtccggaattcccgggatatcgtcgacccacgcgtcggtcttctgacagctggtgcgcctgcccgggaacatcctcctggactcaatcatggcttgtggtctggtcgccagcaacctgaatctcaaacctggagagtgccttcgagtgcgaggcgaggtggctcctgacgctaagagcttcgtgctgaacctgggcaaagacagcaacaacctgtgcctgcacttcaaccctcgcttcaacgcccacggcgacgccaacaccatcgtgtgcaacagcaaggacggcggggcctgggggaccgagcagcgggaggctgtctttcccttccagcctggaagtgttgcagaggtgtgcatcaccttcgaccaggccaacctgaccgtcaagctgccagatggatacgaattcaagttccccaaccgcctcaacctggaggccatcaactacatggcagctgacggtgacttcaagatcaaatgtgtggcctttgactgaaatcagccagcccatggcccccaataaaggcagctgcctctgctccctctgacaaaacacagacaaaaagaacaaacgcagaaacaaaccgagaaacaagaacacagtcacacgagcgacagacacaaaacaagcgcgccggacaacgagcagcacacacatacgcagagtacagcagaagacaaggagcagacagaaccacacgagagacagacacacctcagagacacgggcggacgccacacaaaaccacggccgcacacagacgagcacgaagcagtcaacacaaacacagcaggaggagccccacggagcaggcccgccaacgcacgaccgacaaggagacacccgccgatcgcgcaagcccaacccaggcgcggacaacaacaagaccgaaaccgagaagcccactacgcgagggcggcaccccgccaaccgccacccgaggacgcgcgagcaaacccagggacgggtcagagcaacacgcggcggcagagcgcagccgagaaaat

SEQ ID NO: 82784 - DNA, 1171 bp, Homo Sapiens
tctcacccctcccaacagcataggtgacctatagacccgtgttaaaaaaagcaggctggtacggtccggaattcccgggatatcgtcgacccacgcgtacgcgttcttgagtcgggaaatggccgctgtagtaggttgcaacggagataaattcccggaaccgcgattcggcgtgtcaggaattcgaatttagagtttaatttctcagagcattctctccaggaagaatttttacagtatctcaaagacttcacttgacttcttgatcctgcataaaaccaaggagaaaagaaatgggtcgctccaattctagatcacattcttcaaggctcaaagtctagatcacagtctagttctcgatcaagatcacagatctcattctagaaagaagcgatacagttctaggtctcgttccagaacatattcaaggtctcgctcagtagagatcgtatgctattctagcagcatctactcgtcgcgcattacagcaacactacactccgcacgcgaatgcaccaccgaccatctatgggctacagacggaagcgcgcgctcacgcagcggtcactccactccacaggagcgcagcgcaggtacgatcatcatcgagcgctggcttattacgcaccctgctctggcacactagcaacggccacttctacggacgttcctacaccgaggctcgcttccaccgttcccaggaactccccaaacacaacgacacgaatccccgctacccattctccaacaagattcccacaacagccctattctcgcccgagcccataatccgcatcctctccttcacgatcctcccaacacaatccatccatcctaccctcgctccccttcccactcacaccccatcaatacagccacactatccttccgccggctcccctacaccaacagaccgcacgggctcccccagggcacacaacatccactacccccaaccactcaccacgcccttgacccacgggtgacaaaccccccctacagcaacacagacgacgctcccccgccattccacacacgctcaccactctacacacgcaagctgcaaccacagccacccccattaccactttctacacccactttacactcccactcctgtgcaacctcactattcgcactcaaacctctatactcacagctccatcaagcc

SEQ ID NO: 82785 - DNA, 1621 bp, Homo Sapiens
  misc_feature (885)..(885): n is a, c, g, or t
  misc_feature (976)..(976): n is a, c, g, or t
  misc_feature (1020)..(1028): n is a, c, g, or t
  misc_feature (1080)..(1090): n is a, c, g, or t
  misc_feature (1103)..(1103): n is a, c, g, or t
  misc_feature (1112)..(1112): n is a, c, g, or t
  misc_feature (1168)..(1168): n is a, c, g, or t
  misc_feature (1198)..(1198): n is a, c, g, or t
  misc_feature (1226)..(1226): n is a, c, g, or t
  misc_feature (1360)..(1360): n is a, c, g, or t
  misc_feature (1374)..(1386): n is a, c, g, or t
ccccccccaccagagaaaaggacaagggcttaaacgtcctaagtagcgaggcctgggtggcgaattcggcacgagggacagctggtgcgcctgcccgggaacatcctcctggactcaatcatggcttgtggtctggtcgccagcaacctgaatctcaaacctggagagtgccttcgagtgcgaggcgaggtggctcctgacgctaagagcttcgtgctgaacctgggcaaagacagcaacaacctgtgcctgcacttcaaccctcgcttcaacgcccacggcgacgccaacaccatcgtgtgcaacagcaaggacggcggggcctgggggaccgagcagcgggaggctgtctttcccttccagcctggaagtgttgcagaggtgtgcatcaccttcgaccaggccaacctgaccgtcaagctgccagatggatacgaattcaagttccccaaccgcctcaacctggaggccatcaactacatggcagctgacggtgacttcaagatcaaatgtgtggcctttgactgaaatcagccagcccatggcccccaataaaggcagctgcctctgctccctctgaaaaaaaagaaagcataccagtcccttctatctcgtcaagcaaggaagaacgcacaatttataaaacctcagaggcttcttttcgtcgtgggggcggaaaaaagaaggaaatgaaaatgggccccatggccaaataactgtttcccggaacccaactcttctcttggagacaaggggcggtaatatcctggccccggctccccccttataagggggaaggcgaaaataaatatttcccagaataagccgccagggttaaacaccccggggattttttacagtggaaatcttccgggccttggccanaaataaaacccgcgcgtgaggataatttttttgagaagcccgcccgcgcccctaatatatatagtgtacaaatcccccggcgaggccactntccattattgaactttataaccggggggggtgagagaagacctnnnnnnnnnaccgttagaggagggggaaagttgttcggttatttcttccttggtgaggggnnnnnnnnnnnttcccccccaccngggattggngaggttcaacaacccccgggcggcgggcgaaacgacgccaaaaaattccctgtgangcccgcgccgggatccttttgttgcttccnaaatttcccaagggaaaatggaaagaancgccttctcattgggggcctattttatacccctacaaaccccaacaaggaagaggggaggcttttttgtggatgtctttggggcgccccgggggcatttttcatccacgagaagaggggcccttacaccgcccnaccccgtgctgcgnnnnnnnnnnnnnccccgccagagagggggggcaaaacaatgggggggttcctttctccaacagacaaaaaagacaccgcgccaattatataatcccacccaaaacaacaccctcgcgctgccgcccctcccgaaaccggggggaatgcccccccgtggaaagtgtggaggcggcgcgccccaccactctatttaagataaaatatttgtgtgaaggaaacgcacccccccgcgccctagattttctc

SEQ ID NO: 82786 - DNA, 496 bp, Homo Sapiens
tcttaagagatcatgtaactatataactctgaatttaaaaattgaggggggagggataatttcaacccactgcctcttaccagaaacatttttttaaatctgtaactgctttagtgttaacagggtgcaaggtggtttttgtcccgtattgttcttaaaaggttctcatttattgtgattgtattgtactgtatgagaacaaatcataaattgccttgtattgtttataatagaccataccacgtactacttcagtttttatgttccaagtttttcagtgatgcatgttaacagttaggtcctaaaattctgtggtgctaattctcccatacccaatggtgcttttgtggatgctaactgcacacatgctgaacaaagcttgaagtttaaaactttcctcccttcctctgtttatatgaagtaaaatgaaataacttgaatttgtctcaaagtatcactgacaatctaataaacttgtttatatgtgtgaaaaaaa

SEQ ID NO: 82787 - DNA, 525 bp, Homo Sapiens
gatgctcacctcctgctctgaatgtcctacactttttgtggatgccgagactctcctttcatgtggacttctggacaagctcaagttcagtgtgttagaactgcaagaatatttggatacctacaacaacaggaaagaggccacactctcttggcttgcaaattgtaaggcaacatttgcagggggatcaagagatggagtaattacctgtcaaccaggggactccgaagaaaaggtaataaaagcctgttagaatgggtctcttgtgtgctctaacattgtgtattagttttggtctacccaagaagcctggaacttgagaaaagaagaggcggaatgagtcaccccaaacatttacatgaaaccaacagagtaagacagaatgccttccagcatgactgtgtgttgatgggatttgtggggaggtttcttcgttttggaaaagtagaggtataaaataaccttttttgctggatactgtctaactatactaataatttcctaataaatttattcttaattcag

SEQ ID NO: 82788 - DNA, 225 bp, Homo Sapiens
gtgtgagacaccgcacccagcccttaactgtcgtaattttcaaagtagtttcatctactttccatctcattccaactctaaaaggtagtaaggactggaattaacaactccagattacagatgaacaatctgagactcagaaagataaaggagcagctttagtgtcaaaaggtcagaagtttgtaaatgaagaagctgaaggtaggcccagatgtgctaactgct

SEQ ID NO: 82789 - DNA, 698 bp, Homo Sapiens
  misc_feature (16)..(16): n is a, c, g, or t
  misc_feature (29)..(29): n is a, c, g, or t
  misc_feature (94)..(94): n is a, c, g, or t
  misc_feature (108)..(108): n is a, c, g, or t
gcatggtccagggccnacggctgggggtnctggtggggcagctacggaggtggttcacgcgtcccaagctagggtttgcccacaggggaaaggngcccggcgcgcccncggaggcatttggcctagcttgggagccgtagagcccttcctcaaccatcatctcagggcggcttcacgtcccctccacccacgcggaccgagctgcgcttcccttccccctgctcgggcccgcgctgggcgtcccagactcgacacttcctgaaggcctgtaatttttaattatagcagatttatgttgagaaaacttcatactgaaatcactgatttattttgggattacccaatttttttcctactattctcagatatctatcaaactactgctctgtggattcttatattaagtttatccttttctccatcttttctttcttgccacctaatgaaggaaatgtctccaaggtctttttgactaatagaaactaaatgtataactcgacatctagaagggtttcaagatagtagatatgtctgctgggatgttttgtcattaccctgcccaatgttgcgacgctaggagtttccttgacactacattataaataaggcccaacctgttagcaaaaatatcacattccctaattttctctcctttaactgtgtgtaatttatccaggcatgtctttagttcagtaaag

SEQ ID NO: 82790 - DNA, 791 bp, Homo Sapiens
aaataaagggcctgtgcacagctcggcgaactgctccgtggacctcccagcggggctgctttctgaggtgatggtctcctcgctccttagccagcctggtggagccagctactgacgttggaaaggagtggaggatggagcaccagatactgctacaccagtctcatcggcatggacctatatgtggcagcaagtccatctcatcgctttggtgaaagtcagtccagtttgtaaagattctcattgtcactgtagacgaggaactgggacaccaaaaggagaaactctggccacgcttgcacccgtgttcccaatcctggtccagtgtcacccacagatggtaaggagctctagagacctcaccagcccctgggattggtcacctcactcttctatggacagagattcctgctgggatcctttgagggcaagcagacccttcttccagctcggactgtgaactccactgcagccgtaaggactgtctgtgacagtgagcccgagatgactgggctctgtgctccctcccggccctccaatccttggcctgccacagagaactgagctcttttattagcaccatgaatgtgactgatacagctagccattcccttgtgcgaatgactcagtttattaatgctctgctaaagatggcttctttgcttgccagcagccttaaacagtatttcattaaaactggcttaattattttgagaagacggcccaattaaaagctatacactccctctatgtgagtgtttatacatagagctgtatatataatacataaa

SEQ ID NO: 82791 - DNA, 551 bp, Homo Sapiens
cctttgacatgtttgatgctgatggtggtggggacatcagcgtcaaggagttgggcacggtgatgaggatgctgggccagacacccaccaaggaggagctggacgccatcatcgaggaggtggatgaggacggcagcggcaccatcgacttcgaggagttcttggtcatgatggtgcgccagatgaaagaggacgcgaaagggaagagcgaggaggagctggccgagtgcttccgcatcttcgacaggaatgcagacggctacatcgacccggaggagctggctgagattttcagggcctccggggagcacgtgacggacgaggagatcgaatctctgatgaaagacggcgacaagaacaacgacggccgcattgacttcgacgagttcctgaagatgatggagggcgtgcagtaaggagtggacagtcgcctctaccaagatcgcgtgtccctagggtgtgggagactccgccctgccgggtccccaccagggaggcgcgaccccttgtgggtctttgtctggaaggaataaaagcaaatgttccaaaaa

SEQ ID NO: 82792 - DNA, 1219 bp, Homo Sapiens
  misc_feature (142)..(170): n is a, c, g, or t
  misc_feature (488)..(496): n is a, c, g, or t
tttggtttagaagggtgtttaattcatgacattactaagaatgggtgttttttgggatagaaaattggtcacatataccaaatacacattttatattccaaaataaaaactgagatttcttttaaaacagtggaatcctgannnnnnnnnnnnnnnnnnnnnnnnnnnnnactttctgtgagcttatgaggccattctgcacattatcaaaatgaaatcattatgcagtaaccttatatatataaatccaattttttcctttgtagaagaaaaccaaaataattttacaaactacatttaacttagaatataaagaactgactagtgtaaaattttgaaaatctaccactttattttgaaggaaagtacacatccttcaaaaccccgctaacaattcctagttcagttttctattatacaaatcaaaaagttaaattccttgtggcactaaccaaaacttaaaaattaacagaagactgaattaattnnnnnnnnngcatactaactaatcaaaacaatccactgtgcaatgaatatttgaacaatgaaaaaaacctaccaagcatcctaatcaattatatagttcttgcttccatattttaattctggactttcaggatggtaaattattaaacaggtcgatttcatggactgtctaaaccttgtagtatttcaaaatattaccctttctaaaccaaatctgtggtcctaatcaactttttttccaagaaaaagaaacgatatgtgtttaatatacattccgtagcagtagaaacatcttagtgtctcaaaatactatttacaaagaaccctgctgatcctgtgcatttcgctgaggtgctacttgcacccagacttcatcatctgaaaaagaacttgaacttcctgactcagagtccagctcactgaatccatctaagtcccattcagtactagactcactccgtgcatcatcttccctcaagtaataaaactctgacccaggttcaaggcaggaaggataaacacgagcacaaaggcaaaataaagcccagagtcaaactgcaaaaggccctaacatggtaccctatattaatccactgatcttccctagtatcatactcatacactgtcactcggttctttttccattgtggggttgtagaagtgatgagaagcaacttttggtcatgattgacaatctggtagttgtgggtctctgaatccaaaggaatattac

SEQ ID NO: 82793 - DNA, 544 bp, Homo Sapiens
aagtcttgtttctggttgagaaaaacaagctgtgatggatataagcgggaaaatcatgtgatttgcaggaacgctccctcctcccccgaccccccgcgtcgcctccaagcccttcccagaggggcccgggcggcgggctgggcccggctgcccatgaggggcgcgggtggggggcgcgccgagcctcggttcacaaagcctcttccccgggcgtgcattcccgcagctcttccttgcggacctcagacgcggggacaggcggcggcgggctctggggcgcggcagtttggtccccacgctgcctcgcggcgggctgccgttcagggggtcctcggtggggccccgcggtcctgtgcctccgagggcgcaggaggcccactcccccgactgggtcggctgctaccctcaggccagggtgtgcggtggagaaactgaggctctcctccagctgctctgggagaaaggaaagccggggaccccacacactggcgtctgtgtcccagaacacccagcaggggggagagcaatttaagaaataatctgg

SEQ ID NO: 82794 - DNA, 946 bp, Homo Sapiens
ggtctaatcaggtgaccttcagatggcagtgctttcatttgaaaaagatgatgatcataatggacacatagatttcatcacagctgcatcaaatcttcgtgccaaaatgtacagcattgaaccagctgaccgtttcaaaacaaagcgcatagctggtaaaattatacctgctatagcaacaaccactgctacagtttctggcttggttgccttggagatgatcaaagtaactggtggctatccatttgaagcttacaaaaattggtttcttaacttagccattccaattgtagtatttacagagacaactgaagtaaggaaaactaaaatcagaaatggaatatcatttacaatttgggatcgatggaccgtacatggaaaagaagatttcaccctcttggatttcataaatgcagtcaaagagaagtatggaattgagccaacaatggtggtacagggagtcaaaatgctttatgttcctgtaatgcctggtcatgcaaaaagattgaagttaacaatgcataaacttgtaaaacctactactgaaaagaaatatgtggatcttactgtgtcatttgctccagacattgatggagatgaagatttgccgggacctccagtaagatactacttcagtcatgacactgattaatacaagttgtcttaacgttactccaggaccacttgattttggaaagagtgcacttaattcagaagctaaagaaaatcagttcataatactatggatttctctttcattaagccttaattttaagggaaacatcagtaagaaactgcactgaagaattataaaacattttggggcatagcatacacttgtctaacggttcacacgtggctatgatcacaagcaactttgaactggaatgctatttacaaaagttttgtgtattaatctgtgtattaatctctctggataaaaaaa

SEQ ID NO: 82795 - DNA, 1126 bp, Homo Sapiens
  misc_feature (678)..(764): n is a, c, g, or t
  misc_feature (769)..(796): n is a, c, g, or t
  misc_feature (805)..(821): n is a, c, g, or t
  misc_feature (948)..(956): n is a, c, g, or t
tatcttaagcttttgtgtcagattatttaatatgatgacttcatgctttattatgccttattatggctgacgtattactgtggtgaaacaaaatatctttaaaagttaaaacatccagatatataagctattttttcctaaggataaagtacctttgagcatgagtgtatcacagctttcattaggaaaacttttcattacatacttgtttaaactctgtcttccagggtaaaaataataaggttgaatcattttattaaaaatactttttaagaaaataactatgaacatctgaatattaaagatataaaaatgcacataattcatatttcaggtggtatttgcattcagtgccttactggtattctcagaacattttaatgatttctaacatttcttaacagtcatagatatatacattttcattttttgtacttgaatattctaaataaaactgacatttactcttgacaaataaaacatatatttactaaaatgtgtttaattttcctttctgaaaactctcattttaaaaacgttcatttaattatgtatttgaattattttggagatgaggtattttatgagtattttcagacaatgaaacttattagtctgtgtcagattctgagcaatcatagagtcatctaagttgtaaataaaaccttgcatagcacnnnnnnnnnnnnnnnnnnnnnnnnnnnnnnnnnnnnnnnnnnnnnnnnnnnnnnnnnnnnnnnnnnnnnnnnnnnnnnnnnnnnnnnccccnnnnnnnnnnnnnnnnnnnnnnnnnnnnctttggcgnnnnnnnnnnnnnnnnnaaaaaatttttaaaaccattccttgtggggcgggggcccccaaaaggaaagaaaaacgggcccaaagtggtttccccaagaaaaaccggggcccaagaaatagggcgttgggaattccccaccaatnnnnnnnnncccgcggggggggaaccccaaagggtttttaaaaacaatttcccgggtgggggttttcctggaggggtttttattggggaatcttcatctcaagagggaggccccaaggggagccctccatatatacaaaatttaccccccccgcccggggccttttttattggaagaaa

SEQ ID NO: 82796 - DNA, 479 bp, Homo Sapiens
cagttaacaaaataaacaaaattcttcgcccccgtggagctgttagcaaccctggtgcctgggaagcctggaagaggctcgggttagtaacaacctccaggatgccctccgaactggtactggcgccgggactctagacaaggtccagattcccgggcccttccccttacgggtgcaaaaagggagggtcaggacctgccagtcctggcttcaggatgttgactggacggacctggactcatgggaactgtgcgccaaagtcctgggagcaaagtgtcataacgctcctcgtttgtctcttgccttcacaggagacagccctgctgcaagcggccagtgggaatccttggcctttgggggtatgatccaagaatgtaaacgctagcttttcagtgttttcgatttcgtgatattcaatgcatacaatacaatgtgactcttgaagcttaataataaaattatcattcttgagcccagca

SEQ ID NO: 82797 - DNA, 491 bp, Homo Sapiens
gccccacccctcacagccccagggagcagaagacagaatgaagagactgagcatctaaaatgggcagcctccatccacccgcttcagggaggaactggactctctgggggcaggtgccaagatttgcccccccagtggccctgggctgggcctggcctctacagagccttttagggggagggggtactcatgtggatgcctacttggaacctgggcctctgagacatgtcctgaccaccccccagggcatttgcctccatcttcaccccagattgtgggtttcccatccccctgactttacccctttcaagcctggggttgtctatacccacagcccttagggacttaaagttacggggcttcgttgaatgctccttcccctaggcagctggtaatagaggggtaaagctctgggcccctcctccctgctgccacttatcccagctccaagtttttttaaaaataatattattaaaaatgtaagttaaaaa

SEQ ID NO: 82798 - DNA, 527 bp, Homo Sapiens
tcagtgagcactccacccttacttacatcaagcaaagcacgtctcccatcaatctctctcaacactctctgtcatcaaatggaattccccaccatatgtctgcagtactcagtctgaaaagctaacaaatactgcatctaaccactcaatggaccttacaaaaagcaaagacccaccaggagagaaaccagcccaaaatgaaggtgcacagaactctgcaacgtttagtgccagtaagctgttacaaaatttagcacaatgtggaatgcagtcatccatgtcagtggaagagcagagacccagcaaacagctgttaactggaaacacagataaaccgataggtatgattgatagattaaatagccctttgctctcaaataaaacaaatgcagttgaagaaaataaagcatttagtagtcaaccaacaggtcctgaaccagggctttctggttctgaaatagaaaatctgcttgaaagacgtactgtcctccagttgctcctggggaaccccaacaaagggaagagtg

SEQ ID NO: 82799 - DNA, 809 bp, Homo Sapiens
tttggttaactgagattgaaatccaagtgctggtttctagttctgaacatcaactaaagagttttggaaatgacagcaatttataacaagttcatattgacttcctctctatggcaggaagacattctgtgctgttttgaacagattaaagatttgtgtagtttgtgggaaattgacgtttttgtttaaattccacccgcgtttgtcttttcctaccacctgtggccaggtgctcgctggccatcacagttgcgattccatgagtagctgctttatgactgctttttgtactatctggatgtgcccagagttacttctgtacaagctctgtatctgtgtccgttgagaacattattttaacaagaagaacaccaacagtagcatgaaatataatactgttttataattctaaagctgctgttaatttatgaagtacataataatctaatgtaaactgcagaagtcagagcaagtgcctacattttgttatttttggcattactacagagccatgtacaatagaaagcaatgcaagacttgtaaactctcaccacttcttgtaatatcaaatgttccccctcaggttattttgcttatggtacccatgagttgcctctctctgtacatagataaattgttccaatattttcctttgatgtttggaactacagatagtcaagggctggaaattttagttttcaatataagcttccagcttagcaattacctctagtcgaagacaatatttgattcctagttctgtttggggcaaattttcatttatctaaataaaatgcaatctaattaaa

SEQ ID NO: 82800 - DNA, 1571 bp, Homo Sapiens
taggctaggtaagcaggcctgggtgtgttaattggcacgaggggggccagtggtggttcaaagtcacccaatgaatggctgtctggtcacagggccgcacccctggccctcacgaggggaatgtgtgtagcagagggggctgctgaccatgctggaactgcggcgactacagagcctgcgggaacctcccctttcgcccaagatctgctctgtccccctcatcctcctcccagggccctggcgtctgggtcaagcagcgccccacacctcgacccctcaccccctcctcccgggctcttcctgcggcctcccctccacagtccgcaggctctgggacaggaccgagtccttggctgcctgtggagctcctgtgccagcagctgcgccccggctgcgctccggatacccccatccccgccaccgcgacctcccgctccaccgactgctgctcacgcccgacgggttcacgccgcccctgccccgtgaaggaccgcgctgcggtgcggaggcaggatgacgcaaaacacggtgattgtgaatggagttgctatggcctctaggccatcccagcccacccacgtcaacgtccacatccaccaggagtcagctttgacacaactgctgaaagctggaggttctctgaagaagtttctttttcaccctggggacactgtgccttccacagccaggattggttatgagcagctggctctaggggtgactcagatattgctgggggttgtgagttgtggtcttggagtgtgtctcagcttggggccctggactgtgctgcgtgcctcaggctgtgccttctgggcggggtctgtggtgatcgcagcaggagctggggccatgtccatgagaagcaaccgggcaaactgctggctatatatccagcctgctcaccctggcaggctttgtacagctatggctgctgttgtcctctgcgtgaatagcttcatctggcaaactgaaccctttttatacatcgacactgtgtgtgatcgctcagaccctgtcttccctaccactgggtacagatggatgcggcgaagtcaagagaaccaatggcagaaggaggagtgtagagcttacatgcagatgctgaggaagttgttcacagcaatccgtgccctgttcctggctgtctgtgtcttgaaggtcattgtgtccttggtttccttgggagtaggtcttcgaaacttgtgtggccagagctcccagcccctgaatgaggaaggatcagagaagaggctactgggggagaattcagtgcccccttcgccctctagggagcagacctccactgccattgtcctgtgagccgccaaagaccccacggggtgcccgcatgtccctgtctagggcagcccagggcccccactcctggctcctcacacttgcctcccctatggccgctctccagaccctcctcctttcttctccccacatccgcacctgctgttcccactctggggttctcaagtccatgaacagatattgttgcattttccacaatgctgattaaacataataaacaatccagaaaagcagttttgcccagaaaaaaa

SEQ ID NO: 82801 - DNA, 1116 bp, Homo Sapiens
ccgaggggaggagagcggcccatggacccgcggggcccggcgccccagactctgcgccgtcgggacggagcccaagatgtcggcctaggccggggcgcgacgacgcggacggggcggcgaggaggcgccgctgctgccggggctcgcagccgccgagcccccgagggcgcgccctgacggactggccgagccggcggtgagaggccggcgcgtcgggagcgggccgcgcggcaccatgtcggccaaggtgcggctcaagaagctggagcagctgctcctggacgggccctggcgcaacgagagcgccctgagcgtggaaacgctgctcgacgtgctcgtctgcctgtacaccgagtgcagccactcggccctgcgccgcgacaagtacgtggccgagttcctcgagtgggctaaaccatttacacagctggtgaaagaaatgcagcttcatcgagaagactttgaaataattaaagtaattggaagaggtgcttttggtgaggttgctgttgtcaaaatgaagaatactgaacgaatttatgcaatgaaaatcctcaacaagtgggagatgctgaaaagagcagagaccgcgtgcttccgagaggagcgcgatgtgctggtgaacggcgactgccaatggatcaccgcgctgcactacgcctttcaggacgagaaccacctgtacttagtcatggattactatgtgggtggtgatttactgaccctgctcagcaaatttgaagacaagcttccggaagatatggcgaggttctacattggtgaaatggtgctggccattgactccatccatcagcttcattacgtgcacagagacattaaacctgacaatgtccttttggacgtgaatggtcatatccgcctggctgactttggatcatgtttgaagatgaatgatgatggcactgtaggtatttttgttggagattttccatttggttttgggtttggcatatagtcagaagggaagttttcaatttgaggtacaattaagaaaccaagtatattaattcagaaaatgaatccattttggagatagttgaaattttctgtttggggagttttgtttcccaaataaaaattaagttggaaagcaaa

SEQ ID NO: 82802 - DNA, 520 bp, Homo Sapiens
agcgactttggaactgggtaacaggcaggttggaacagtttggagggctcagaagaagataggaaaagtttggcacttcctagagacttggagggctcacaagacaggaagatgtgggaaagtttccttcctagagacttgttgattggttttgaccaaatgctgatagtgatatggacaataaggttcacgctgaggtggtctcagatggagatgaagaacttgttgggaactggagtaaaggtgactcttgttatgttttagcaaagagactggtggcactttgccccagccctagagatttgtggaactttgaacttgagggagatgagttagggtatctggcagaagaaatttctaagcagcaaagcattcaagaggtgacttaggtgctgttaaaagcattaagttttaaaagggaaacacagcataaaagtttggaaaatttgcagcctgacagtacaatagaacaaaaaaaattcctaaggagaaaacttgcagcctgacaatgcaatagaaa

SEQ ID NO: 82803 - DNA, 1162 bp, Homo Sapiens
  misc_feature (1067)..(1067): n is a, c, g, or t
  misc_feature (1123)..(1123): n is a, c, g, or t
  misc_feature (1139)..(1139): n is a, c, g, or t
ggctaggtagcgaggcctgggtgttgaatcggcacgagggcggcttttccaggtgcacggtgcaagctgttggtggatctaccattctggggtctggaggacggtggccctcttctcacagctccactaggcagtgccccagtagggactctgtgtgggggctcccacaccacatttcccttctgcactgccctagcagaggttctctcccctgccgctgagagggcctctcccctgcagcaaacttttgcctgggcattgaggcatttccatacatcttctgaaaactaggcggaggtttccaaatctcaattcttgacttctgtgcacctgcaggcttaacagcacatagaagctgccaaggcttggggcttccactctgaagccacagcccgagctgtatgttggcccctttcagccatggctggagtggctgggacacaagacaccaagtccctaggctgcacacacatgtcaggggctgccctgacatggcctggagacattttccccatggtgttggggattaacattaggctccttgctacttatgcaaatttctgcagctggcttgaatttctccccagaaaatgggtttttcttttctattgcatagtcaggctgcaaatttccagaacttttatgctctgcttcccttatttaaaacggaatgcctttaaaagcacccaagtcacctgttgaacactttgctgcttagaaatttcttccgccagataacctaaatcatctctctcaagttcaaagttccacaaatccctagggaaggggcaaaatgctgccagtctctttgctaaaacataacaagagtcacctttactccagttcccaacaagttcctcatcttcatctgaggccacctcagcctggactttgttgtccatattgctatcagcatttggggcaaagccatttcaacaagtctgtaggaagttccaaactttcccacattttcctgtcgtcttctgagccctccaaactgttccaaccgctgcctgctacccagttccaaagtcacctccacattttgggtatttcttcagcagggnccaatctactggtaccaatttactgtattagtccgttttcacgctgctgataaagncattacccgaggactngggaggaaaaagtgggtttaatt

SEQ ID NO: 82804 - DNA, 404 bp, Homo Sapiens
tgcaagaaataatctcatgggcgatgacatattctgttattatttcaaacttttccaggaatatgccaatttacaagtgagtgagccccaaatccgagagggcatgaaaagggtagaaccacagactgaggacgacctcttcccttgtacttgccataggaaaaagaccaaagatgaactctgatatgcaaaataacttctattagaataatggtgctctgaagactcttcttaactaaaaagaagaatttttttaagtattaattccatggacaatataaaatctgtgtgattgtttgcagtatgaagacacatttctacttatgcagtattctcatgactgtactttaaagtacatttttagaattttataataaaaccacctttattttaaaggaaaaaaa

SEQ ID NO: 82805 - DNA, 446 bp, Homo Sapiens
aaaaatattattgctccattggtaaatgtatttacccaaatctgttatttcagacaatagcccaacttagcactggcattaaatggaataattctgttcttttactgatacggtgtctaatttagaaactttgctgtttttggcaatcacactgccttgatttaggtgggacagggatcagggattaaaatggctcttcccaagaggaaagtagacaagtttgacagcactgaaaacccaagacattgctgcatccggaaaatttatggttaagactggagaagtctggaaagttggacagctctgtcatttattaatttattggcctatgtaagatgtttttattttagaagactgatctacgacctctgaaaggatatgttttcaaactctgtattttttttctacgtgtaaaataaagatattctacatacaattttctaaaa

SEQ ID NO: 82806 - DNA, 697 bp, Homo Sapiens
tggcgaagagtatgaagtcgaggcgcgccgaattcggcacgaggggggcagttgcgggttgtcataacggtccccgccggagtgaggcgaggccgcgtcgctcagttctggccgtctagggcccctgtaaggatgagagcgcagaggacgcagggccgctggaggcgcaggtaacgaagctagggtgcggttgggaccgcggctgagctttttccgggacccgtggtgctgaatggagaggacggagacgaagccgagccgcggctcctagcggcggcgccgatgctcgagctgtagctgccaggcgaggatgtgtggagcgcaggcggcgcggggtaaatgagaggtctcgggccccaggacccccggggcccgggatgagttagcgagggcagccgcgggggccagttccgaccgtgacaggccaaggcgacggccgccgcccgcccgccccttccgtgcagaagcagctgctcctttccgcgcccgcccgcctgcgctcccggccctggagaccatgaggttccgcatctacaaacggaaggtgctaatcctgacgctcgtggtggccgcctgcggcttcgtcctctggagcagcaatgggcgacaaaggaagaacgaggccctcgccccaccgttgctggacgccgaacccgcgcggggtgccggcgggcgcggtggggaccacccctctgtg

SEQ ID NO: 82807 - DNA, 803 bp, Homo Sapiens
  misc_feature (706)..(710): n is a, c, g, or t
  misc_feature (712)..(715): n is a, c, g, or t
  misc_feature (717)..(717): n is a, c, g, or t
  misc_feature (719)..(720): n is a, c, g, or t
  misc_feature (723)..(723): n is a, c, g, or t
ggcatgaaggatattctcatcctctctgcactgaggcagatgctgcgggctgcagatgattttttagaagatttgcctcttgaggaaactggtgcaattgagagagcgttacagccctgcatttgagataagttgccttgattctgacatttgccccagcctgtactggtgtgccgcaatgagagtcaatctctattgacagcctgcttcagattttgcttttgttcgttttaccttctgtccttggaacagtcatatctcaagttcaaaggccaaaacctgagaagcggtgggctaagataggtcctactgcaaaccacccctccatatttccgtaccatttacaattcagtttctgtgacatctttttaaaccactggaggaaaaatgagatattctctaatttattcttctataacactctatatagagctatgtgagtactaatcacattgaataatagttataaaattattgtatagacatctgcttcttaaacagattgtgagttctttgagaaacagcgtggattttacttatctgtgtattcacagagcttagcacagtgcctggtaatgagcaagcatacttgccattacttttccttcccactctctccaacatcacattcactttaaatttttctgtatatagaaagggaaaactagccctgggcaacatgatgaaacccccatctccactggcnnnnnannnnanannaanaaattaggaaaggaccaaacccaaccccccaaaaaattacctggggtatgaagggccacgggccctgttaatccccagtt

SEQ ID NO: 82808 - DNA, 356 bp, Homo Sapiens
aaaggggattcaaacacacatacattgagtaaacaatcttgattatctaactgccatcctaggctactgctggcagcctttgtggttgctcaccttaccaattaatgagcgataattaacaaagagcagcagctgactcaggaaagatgtcattgctatgactgtcagaattaatatttccaaggtaatgttttaaggagaaaggagtgattgactaggaagctatcattattgactcaaagaaagaagctgtcaacctaatttacgtggtccatttttttctgagaacatttttatcccaagagggaaaatggcagtatgaaaagtgactatgaaggctgggcgtggtggctcat

SEQ ID NO: 82809 - DNA, 2958 bp, Homo Sapiens
  misc_feature (79)..(80): n is a, c, g, or t
  misc_feature (184)..(184): n is a, c, g, or t
  misc_feature (2848)..(2895): n is a, c, g, or t
  misc_feature (2900)..(2909): n is a, c, g, or t
gcggccgcctttccacggtactccgagcactatgtcgtccccggcgtcgaccccgaggccgccgcggcagccggctagnngaagggccacccccgcccagacgcctcggagtgaggatgccaggtcatctccctctcagagacgtagaggcgaggattcaacctccacgggggagttgcagccngatgcaaacctcgcctggagtgaacctgcagagccctgctgcgcagaacgtgctgttttccagccctccccaaatgcattctcagctatccctcttgactttgatgttagttcaccactgacatacggcactcccagctctcgggtagagggaacccaagaagtggtgttaggggcacacctgtgagacagaggcctgacctgggctctgcacagaagggcctgcaagtggatctgcagtctgacggggcagcagcagaagatatagtggcaagtgagcagtctctaggccaaaaacttgtgatctggggaacagatgtaaatgtggcagcatgcaaagaaaactttcagagatttcttcagcgttttattgaccctctggctaaagaagaagaaaatgttggcatagatattactgaacctctatacatgcaacgacttggggagattaatgttattggtgagccatttttaaatgtgaactgtgaacacatcaaatcatttgacaaaaatttgtacagacaactcatctcttacccacaggaagttattccaacttttgacatggctgtcaatgaaatcttctttgaccgttaccctgactcaatcttagaacatcagattcaagtaagaccattcaacgcattgaagactaagaatatgagaaacctgaatccagaagacattgaccagctcatcaccatcagcggcatggtgatcaggacatcccagctgattcccgagatgcaggaggccttcttccagtgccaagtgtgtgcccacacgacccgggtggagatggaccgcggccgcattgcagagcccagtgtgtgcgggcgctgccacaccacccacagcatggcactcatccacaaccgctccctcttctctgacaagcagatgatcaagcttcaggagtctccggaagacatgcctgcagggcagacaccacacacagttatcctgtttgctcacaatgatctcgttgacaaggtccagcctggggacagagtgaatgttacaggcatctatcgagctgtgcctattcgagtcaatccaagagtgagtaatgtgaagtctgtctacaaaacccacattgatgtcattcattatcggaaaacggatgcaaaacgtctgcatggccttgatgaagaagcagaacagaaacttttttcagagaaacgtgtggaattgcttaaggaactttccaggaaaccagacatttatgagaggcttgcttcagccttggctccaagcatttatgaacatgaagatatacaagaaggggaatcttgcttcagctctttggcgggacaaggaaaggattttagtcacactggaaggggcaaatctcgggctgagatcaacatcttgctgtgtggcgaccctggtacccagcaagtcccagctgtctgcagtacgtgtacaaactcggtcccccaggggccagtacacgtctgggaagggctccagtgcaagttggcctcactgcggtacgtaatgaacagaccctgagacaaggcagctggtcctgcagacaggtgctcttgtcctgagtgacaacggcatctgctgtatcgatgagttcgacaagatgaatgaaagtacaagatcggtattgcatgaagtcatggaacagcagactctgtccattgcaaaggctgggatcatctgtcagctcaatgcgcgcacctctgtcctggcagcagcaaatcccattgagtctcagtggaatcctaaaaaaacaaccattgaaaacatccagctgcctcatactttattatcaaggtttgatttgatcttcctcatgctggaccctcaggacgaagcctatgacaggcgtctggctcaccacctggtcgcactgtactaccagagcgaggagcaggcagaggaggagctcctggacatggcggtgctaaaggactacattgcctacgcgcacagcaccatcatgccgcggctaagtgaggaagccagccaggctctcatcgaggcttatgtagacatgaggaagattggcagtagccggggaatggtttctgcataccctcgacagctagagtcattaatccgcttagcagaagcccatgctaaagtaagattgtctaacaaagttgaagccattgatgtggaagaggccaaacgcctccatcgggaagctctgaagcagtctgcaactgatccccggactggcatcgtggacatatctattcttactacggggatgagtgccacctctcgtaaacggaaagaagaattagctgaagcattgaaaaagcttattttatctaagggcaaaacaccagctctaaaataccagcaactttttgaagatattcggggacaatctgacatagcaattactaaagatatgtttgaagaagcactgcgtgccctggcagatgatgatttcctgacagtgactgggaagaccgtgcgcttgctctgaagccttgtgagcaaggaaggctccctgcatgtcctgcttgctgcacgccacatgggtgtggtctgcatctcagttggccgccatcagtgtaaatagagcttaaagtcatggtttggctgcataaaaattttctaacttgggttcaatatttgtagtgaagtatctgttttcatttttttcacgttataaataaaaaatactatgctgggccgnnnnnnnnnnnnnnnnnnnnnnnnnnnnnnnnnnnnnnnnnnnnnnnncaatnnnnnnnnnnaatccttgaaggccagggaaggttcaagaaccacccctgggcccaaaat

SEQ ID NO: 82810 - DNA, 436 bp, Homo Sapiens
gcggccgcattgcagagcccagtgtgtgcgggcgctgccacaccacccacagcatggcactcatccacaaccgctccctcttctctgacaagcagatggtgcgcagccaccctggccccccaggctatgctttgcctgtctgtatcctcaaaaggccaactataacttgtccctcggaccctgagcctcacttcccgaatggcatccatccctctctggtcttgtgggtttcgttagtggcctatgggctaaatatgcagagcacgcaaagcccctgcttcagggcactgtccctgtgctgttgccagtggcactgtctgttgttagagacactgtattttcatggcctaaaatgcttcaaacgtttgagatgagaatacttggttaaatgtcattctgctttttccattggtaaaggattgaggaatttttctga

SEQ ID NO: 82811 - DNA, 456 bp, Homo Sapiens
  misc_feature (399)..(408): n is a, c, g, or t
aatggctttgagtggcatcagcttctcactgctgtgggcggatgtcttggatagatcaagggctggctgagctggactttggtcagcctaggtgagactcacctgtccttctggggtcttactcctcctcaaggagtctgtagtggaaaggaggccacagaataagctgcttattctgaaacttcagcttcctctagcccggccctctctaagggagccctctgcactcgtgtgcaggctctgaccaggcagaacaggcaagaggggagggaaggagacccctgcaggctccctccacccaccttgagacctgggaggactcagtttctccacagccttctccagcctgtgtgatacaagtttgatcccaggaacttgagttctaagcagtgctcgtgnnnnnnnnnngcagaaagaattagaaataaataaaaactaagcacttctggagacaaa

SEQ ID NO: 82812 - DNA, 733 bp, Homo Sapiens
  misc_feature (55)..(55): n is a, c, g, or t
  misc_feature (60)..(60): n is a, c, g, or t
  misc_feature (117)..(117): n is a, c, g, or t
  misc_feature (150)..(150): n is a, c, g, or t
  misc_feature (196)..(196): n is a, c, g, or t
gtttacacatttacttcaggggcctgtgaagtcaagttcagcctgagacacaagnaaagnactgtctacaaggctgatgaagagtcgtgttcagcatctatgatgtacagaaaggcnaagttccgttatcggcgcgtggctcaaggcacncaggtgcttgtagttgccctcaaaaggtgatgacatcaccatggtncctcatcttgcccaagcctgagaagagcctggccaaggtagagaaggaactcaccccagaggtgctgcaggagtggctgtatgaattggaggagatgatgctggtggtccacatgccccgcttccgcattgaggacggcttcagtttgaaggagcagctgcaagacatgggccttgtcgatctgttcagccctgaaaagtccaaactcccaggtattgttgcagaaggccgagatgacctctatgtctcagatgcattccataaggcatttcttgaggtaaatgaagaaggcagtgaagcagctgcaagtaccgctgttgtgattgctggccgttcgctaaaccccaacagggtgactttcaaggccaacaggcctttcctggtttttataagagaagttcctctgaacactattatcttcatgggcagagtagccaacccttgtgttaagtaaaatgttcttattctttgcacctcttcctatttttggtttgtgaacagaagtaaaaataaatacaaactacttccatctcacat

SEQ ID NO: 82813 - DNA, 592 bp, Homo Sapiens
aggaactggcaatacagctattgcagagctaggatttaaacccaggcaggttggcttcagttatcttcatggtacacataatagctagacgaggtggaagcagggataccagtaagaaagttattgatagtggcttggattagactgatagcagtgagtttccctaacgggttcattttccccaggtcatgggatttttatgaataggatgattaataagaaagtataacaataaaggggagttaacatttgccagttcaacagactgagtaaaggctacacgatttagctttactaaataaacgcccatgcgttttattttgactgcatgcttcaagaagctttcactttcaaattactcattacaaaaaagaagaccttaagttgggttggctttccaacgtgttaaatactcaaatgcaggtgatttggttctattagcactaagaacaaaaaactcagtctttgacccgagagaattctgacaaatgccaacttattaactcactgggaaactttctctttacagctgtgaatttctacaaaggaaaatatgcctccattatgaacaattgcttctagaggcaaatag

SEQ ID NO: 82814 - DNA, 529 bp, Homo Sapiens
gcggccgcttggcgccccggggcgcctggaccccactcgcctccatcttgctgctgctgcttgggccgcgcttttagccctcgcgccccccgccgttggctgcgggagagcccgcgtcccactcccgtgctcgcctcgaccccgcgccgggcacctgtggcttgggacagatagaagggatggttggggatacttcccaaaactttttccaagtcaacttggtgtagccggttccccggccacgactctgggcacttcccctgaagctcctctccggagcttgacttcttggacctcctcccccgccccaattccaagctccagaaactcccaactcgtctgccgtccagaaagctagctgcagtgttcaggacgtccgggaggaagcaagcatgtgggggacagaacagtagtcctggactcgaaagggaaggtgctgaccagtggggccttagcaatttgaagggttgggaaggaggaattatatttgcaaaggggctgtctattagcatatttcctttgagggggc

SEQ ID NO: 82815 - DNA, 1371 bp, Homo Sapiens
aagaagacaattccccgcgcccgcgcccgctgggaatgatgaagaagaacaattccgccaagcggggacctcaggatggaaaccagcagcctgcaccgcccgagaaggtcggctgggtccggaaattctgcgggaaagggattttcagggagatttggaaaaaccgctatgtggtgctgaaaggggaccagctctacatctctgagaaggaggtaaaagatgagaaaaatattcaagaggtatttgacctgagtgactatgagaagtgtgaagagctccggaagtccaagagcaggagcaagaaaaatcatagcaagtttactcttgcccactccaaacagcccggtaacacggcacccaacctgatcttcctggcagtgagtccagaagagaaggaatcgtggatcaatgccctcaactctgccatcacccgagccaagaaccgtatcttggatgagtacatctcttcaggtcaccgttgaggaggacagctatcttgcccatcccactcgagacagggcaaaaatccagcactcccgccgccccccaacaaggggacacctaatggctgtggcttccacctctacctcggatgggatgctgaccttggacttgatccaagaggaagacccttcccctgaggaaccaacctcttgtgctgagagctttcgggttgacctggacaagtctgtggcccagctggcagggagccggcggagagcggactcagaccgcatccagccctccgcagaccgggcaagcagtctctcccgaccttgggaaaaaacagacaaaggggccacctacaccccccaggcacccaagaagttgacgcccacagagaaaggccgctgcgcctccctggaggagatcctatctcagcgggatgctgcctctgcccgcaccctccagctgcgggctgaggaacccccaacccctgccctccccaacccggggcagctgtcccggatccaggacctggtagcaaggaaactggaggagactcaggagcttctggcagaggttcagggactgggagatgggaagcgaaaggccaaggacccccctcggtctccgccggattctgagtcagagcagctgctgctggagacggaacggctgctgggagaggcatcatcgaattggagccaggcaaagagggtgctgcaggaggtcagggagctgagagacctgtacagacagatggacctgcagaccccggactcccacctcagacagaccaccccgcacagtcagtaccggaagagcctgatgtgagggcagggtggggtctggaacttgtcgggttggacagactcttatctccgtgttgctggataaagcttttttatttacctcaatcaaaaaaaa

SEQ ID NO: 82816 - DNA, 867 bp, Homo Sapiens
  misc_feature (403)..(412): n is a, c, g, or t
aatgagcatgttatgatacacataattgcattatgatgcaggatgacataatacataagacgatgttttcaagctggttttataagtacttatctcacatccacagagagttggtttgccatgtgatgcaatgtgtcccacatagacatgaacaaaacaatacagtcactaccccacagggggacagtgatttttcaaaatgaagctttaaacacaacaaatcgtggacagacacgttgataggaaagagccttgaatataggcaccagtgccccagttcaacaatatccatccaatgtaataaagttggaggaacaaaatatacactatattctggatgtaattacaaaattctgccatgggaaaactagaacacaagtagggcaaaagcactttttatgannnnnnnnnngccatatctttggagcatgaaattagcagaaagggaagatgttggtatgtccctaaaatatcataaaaagtgcttttgccctacttgtgttctagttttcccatggcagaattttgtaattacatccagaatatagtgtatattttgttcctcaaactttattacattggatggatattgttgaactggggcactggtgcctatattcaaggctctttcctatcaacgtgtctgtccacgatttgttgtgtttaaagcttcattttgaaaaatcactgtccccctgtggggtagtgactgtattgttttgttcatgtctatgtgggacacattgcatcacatggcaaaccaactctctgtggatgtgagataagtacttataaaaccagcttgaaaacatcgtcttatgtattatgtcatcctgcatcataatgcaattatgtgtatcataaccc

SEQ ID NO: 82817 - DNA, 752 bp, Homo Sapiens
ttagtactgcaggaagaacttatgcctttaggtggttatgatggccaatctattttacaatctgtagagaagtacattcccaaaataagaaaatggcaacctgtggcaccaatgacgacaacaagatgttgttttgctgcagcggtattggatggaatgatatatgccattggtgggtatggtcctgcccacatgaacaggtatttaacttaataattaaattgcatatgtttatggatttttaaaagtctcattagcaatgatttctgagttttaaacaatttgtgtgtatgaatgaacttccggcatttgggaaacttaatctgctccatggatataattgtaattgttttacatgggaatttaatacaaacctaacaatcaaatccctctcattaaattttacattcattcactataaatggactagattttaaaactcagaaacctaaaaataagatgaagttagacaactttagattttgtgtggtgtgtacatctatgtgcacagtatgtaaattatcttttattgtatggcttaatagaataaagaagtagaaatttaattcctgtgtgtctatacaatattatagcacatcataaacttaaaaccttatttaaatattcctttctgaattctttcctgtaatcatacatgtatcatcaggtatttgacttgtgctggagtttgaatttgtgatatctgtattctgtagttttatctgaataaaggagaaatatatatgaaaaaa

SEQ ID NO: 82818 - DNA, 662 bp, Homo Sapiens
gcatcacacgcttccagtgcctgcagggtgagggtgtgtggcacagaggcaagcagctcctctcttctgtaggagctttgggttttcagaggtgcagggaaggcagttttacaggttaccgtaaaacagaggttccgtccagtgttccttatgatgcctccccatttaaaaagaaaagagatctatggaaaactgggaatgtaatgtggattctgtcagagctcctacagagcacagttgcctttagtttcctttaaagatgtaaaaatattgtataatacagttttgtccctacacaattgtatttgccaagcttagtgcattatgatacctttatttatttgttttgggcagtattactatatatatataaacatacagttactgttttatatattcttaggtcattcaaagccatgtatgctgtaaatgtgctagtctttagaatgacacataataaataactgacaagatattaaatgtggtcttgcctgattcatcctattaggaggactagttctatgtgaccagcctgtgactggaccattgttctttgggcattgcattgagtgctcgggtgctgaatacatgtttgtaaacatgggaccatgggagacttccattttataagcttgtttctgcctaatttgaagcagaggggc

SEQ ID NO: 82819 - DNA, 639 bp, Homo Sapiens
agccgctgccttgccccccggagactgaagacatggcacccaagagggccaagagaaggacagtagagggcggaactccagcgtcttctccatgttcgaccagactcagatccaggagttcaaagaggccttcactgtgatcgaccagaaccgtgatggtattatagacaaggaggaccttcgggacaccttcgcagccatgggccgcctcaatgtgaagaatgaggagttggatgccatgatgaaggaagccagcggtcccatcaacttcaccgtcttcctgaccatgttcggggagaagctcaagggtgccgaccctgaggatgtgatcaccggagccttcaaggtcttggaccctgagggaaagggcaccatcaagaagaagttcctggaggagctgctgaccacgcagtgtgaccgcttctcccaggaggagatcaagaacatgtgggcggccttcccccccgacgtgggcggcaacgtcgactacaaaaacatctgctacgtcatcacgcacggcgacgccaaggaccaggagtaggggcacccgcgggcctccgctgcccgacgcttctgttcggcccgacctccaccccggctcccaataaaatttaactgatctttgtttcttaaaaaaaa

SEQ ID NO: 82820 - DNA, 976 bp, Homo Sapiens
  misc_feature (695)..(762): n is a, c, g, or t
ggggctcgcgtcaagtgactgaggcctgtggtggagaaggacgtgccgtgccgctgggttctgagccggagtggtcggtgggtgggatggaggcgaccttggagcagcacttggaagacacaatgaagaatccctccattgttggagtcctgtgcacagattcacaaggacttaatctgggttgccgcgggaccctgtcagatgagcatgctggagtgatatctgttctagcccagcaagcagctaagctaacctctgaccccactgatattcctgtggtgtgtctagaatcagataatgggaacattatgatccagaaacacgatggcatcacggtggcagtgcacaaaatggcctcttgatgctcatatctgttcttcagcagcctgtcataggaactggatcctacctatgttaattaccttatagaactactaaagttccagtagttaggccattcatttaatgtgcattaggcacttttctgtttatttaagagtcaattgctttctaatgctctatggaccgactatcaagatattagtaagaaaggatcatgttttgaagcagcaggtccaggtcactttgtatatagaattttgctgtattcaataaatctgtttggaggaaaatggatctttttctacattcctttaccctcacgaaacaagagaagaacctccagccatgtcctnnnnnnnnnnnnnnnnnnnnnnnnnnnnnnnnnnnnnnnnnnnnnnnnnnnnnnnnnnnnnnnnnnnngatgaaacaatgacgcgggccaatcgccgggccagggctcatcgacccgaccaatgcgccctcgacaaccagcaaactacccccgcccccggcacagcaccgccccgtcagctccaccctcccctccttgtgttacaaatacaccatctccttgttggagcccgccttcggattcccgccacaccgttcccgccccgcttttcgctgtttcctg

SEQ ID NO: 82821 - DNA, 936 bp, Homo Sapiens
tttggcagtctttcacatttaatccacaaatatttaccgagaagttgacgtgccaccaggcgcggggctaggttcacaagatacagtagtgagttaggcacgattcctactaccagaagcttagagcatagggaagactaaaagtaagccaccgtctacaatagtaggataagtggagagtttctaggtccgtggagtttgttgttgaatatctgctccaggccttagaagccggcagcaattcactaaaagatcccggacttgtttctgctctgtatcccagccaaggagctccgtccccaaggtgttttgttagagtcagagacctctcctggggtgattccattcgtcagccccacaagtccccgtctctggcctttttccagggtctccggcagctctctgacagttccccttctgtctcaggtcgacacttattccaaggaccagggattactcacaactatccgccagagtttgctccgccctttctttttcctgtttaaaatccgcgggctcttagtgttctcggttcctagatttcctgttctgattctcgcgacagttgcgaggcctcgcgtgaagttcccttctagtccctatttcgaatttgagaccgggagagagtgtctgcccttgcccacctcctcagaacccctctggccagggatggcgcctacgtggctcgggagcccctgaatgaatgggcttggcccaacttaggggcgcattccgacgggagagtcctggctgtattccgaggctccagtgcgcatgcggagtcgatcccgcgcaggcgggcggggacggcagccgggtcttgtgggcggagcctgactaagtgccgcccccttgccggctgcagattgctatttctgccccccaccctcgcccatccccccgcgagctggactgcgccaaggcttctgtgagccc

SEQ ID NO: 82822 - DNA, 635 bp, Homo Sapiens
gacttgaggatgatagtggtattaatatccagctcacagaattgtgatgagcagtacatgaaatgcatggaaagcagttaacacagcattcccttccccctccaacttctcctggctgcaaattaatcacctcatctgcatcctgggcctcttttgaatgcacatgctgttagagcgcttctcacattgtattaaagttagtcatttatgattccatttttcccactgactgtaggttctcaagagtagggtgtaccatatttcttttacaaccccagcaccaagcaaagcacctgctacttcgtcggtattcattgttccggctatgaaagcttagactaggaaaggatcttggaacagtctggtccactggttcctgaatgctcgaccgtggacctgcaggagcagaatcacccagaagtgtgttgagaaacagattccgtaggcacatccacagagacagaaagtggatccttgggccttggagttggggtgggatggatgggaagtgactgctgatgaggatgaggtttatttaggggttaaggaaaatgttctaaagttagattgtagtgatattgcacaactctgtaaataccaaaaccatcgcattatatgttttaaacaagtgaaaa

SEQ ID NO: 82823 - DNA, 1265 bp, Homo Sapiens
  misc_feature (34)..(34): n is a, c, g, or t
  misc_feature (70)..(70): n is a, c, g, or t
tgccccggccgcttcattgcacattcaaagtggnaaattttcaggagtcagcagaaacattgtgtccaanaaagactgagtcgcagttaccaccaaaccccaggaggagactctccctggaaaacttcccttccctttcggtttattttcttgaaaaggcttccaggcttcggcttggaaaatcccaccgccaaaattgagcccagcagctggagcggcagtgagagccctgccgaaaacatggaaaggatgagtgactctgcagataagccaattgacaatgatgcagaaggggtctggagccccgacatcggagcaaagctttcaggaggccctggctatctatccaccatgtgggaggaggaaaatcatcttatcagacgaaggcaaaatgtatggtaggaatgaattgatagccagatacatcaaactcaggacaggcaagacgaggaccagaaaacaggtgtctagtcacattcaggttcttgccagaaggaaatctcgtgattttcattccaagctaaaggatcagactgcaaaggataaggccctgcagcacatggcggccatgtcctcagcccagatcgtctcggccactgccattcataacaagctggggctgcctgggattccacgcccgaccttcccaggggcgccggggttctggccgggaatgattcaaacagggcagccaggatcctcacaagatgtcaagccttttgtgcagcaggcctaccccatccagccagcggtcacagcccccattccagggtttgagcctgcatcggccccagctccctcagtccctgcctggcaaggtcgctccattggcacaaccaagcttcgcctggtggaattttcagcttttctcgagcagcagcgagacccagactcgtacaacaaacacctcttcgtgcaccattgggcatgccaaccattcttacagtgacccattgcttgaatcagtggacattcgtcagatttatgacaaatttcctgaaaagaaaggtggcttaaagggaactgtttggaaagggcccctcaaaatgccctccttcctcgtaaaattctgggctgatttaaactgcaatattcaagatgatgctggggctttttatggtgtaaccagtcagtacgagagttctgaaaatatgacagtcacctgttccaccaaagtttgctcctttgggaagcaagtagtagaaaaagtagagacggagtatgcaaggtttgagaatggccgatttgtataccgaataaaccgc

SEQ ID NO: 82824 - DNA, 340 bp, Homo Sapiens
ctatgagatccttgctaggggaaggcccaccctgtattgcttgtgctggtaagcgccccttgtgttgatggccaatggtcaaagagaaaggatttctgaaggcagccctggaagtggagttaggagcttctaacccgtcatggtttcaatacacattcttcttttgccagcgcttctgaagagctgctctcacctctctgcatcccaatagatatccccctatgtgcatgcacacctgcacactcacggctgaaatctccctaacccagggggaccttagcatgcctaagtgactaaaccaataaaaatgttctggtctggcctgactctgacttgtaaa

SEQ ID NO: 82825 - DNA, 1548 bp, Homo Sapiens
  misc_feature (443)..(486): n is a, c, g, or t
gaaacatcctgtccaccgtgactttctagccttctacgtggtggacagtcaccggatgtcagcacagacgcatgggctgctggggcaattcttccaaccctttgactttaaagtgtctgacatccggccaggctctgaccccacaaagccagatgccacattggtggtgaagaaccatcagctgattgtcaccaggggctcccagaaagacgacagaagggatgccagcatcggcacgaaggttgtctgctggttcgtccacaacaacggagaagggctgattgatggtgtccacactgactacattgtccccaacctgttttgagtagacacaccagctcctgttgggatggatggcccggattttatggcatctggaacatgggcacagagaggggcctgtgggaggggctgggaaaataaagtccaaggtcgagaccagnnnnnnnnnnnnnnnnnnnnnnnnnnnnnnnnnnnnnnnnnnnnggggggcccccccaaaaatttcccccggggggcgccccaaacgctatcacgcgcgccacccccagtcttttctgttgacacaagggtggcgccccccaataagaggaggagctcgcgtattataataacgactagagagcgcgacggcggccgagcacggttataaacaacgcgtgtcgctagatccgtgtgggacaaccaaacgcggttaaccagcgtaggagagccactttggtgagacagcggagcacccccccactatctcttcgcgcgcggggggggagagcaaccaccaactatgtgggccaccgaaacattacccctctctcaagcgcaggatctttctacacacgcgcctcctcaaagggcggggccacatacatatatatcacaccacctcttttccaccggcgctgtctaacaacgctgggtgcgtgttcacaccacccacaatcaccgccgggcacaattattaattgaccctggcggctgccctgccttttagaaaacaaactagtttgtgcgacgtcaaaccaccggcgagactaatcttcgtctgtatctgcacaccagcccttttttttctaccccccccgggcggagccgctcagatagttagataataaccgccggcatcgacaggtctcacatgcagcctacacgctacacaatctctaagaacgcagtccgtaagccactagcggtcgttacactaccaacgccttaatactacgaagtggtgcgagctggactcgactaggatgccgccccggacgcactgatgtggcgtcggcacgggcgagcgagcgagtgcgcgcgctagcaagccggcaggcgagatggtgtatgcggaggagtgatggtggctgctcagcagacgtgtcgttgggactgctctggcgttggtggttgtgtggctgtgtattactggtgctagcggggttgcgtgtaggcttgtgcttgctgctagagcgtgtgcagattgcatgcgccgaaggagacggacgcagaggagcgcgccctgcgaggagtcacacaggaccgaaacgagacaaaaccgcg

SEQ ID NO: 82826 - DNA, 993 bp, Homo Sapiens
  misc_feature (85)..(119): n is a, c, g, or t
aaaggatgtatagatcactatagggcgctagcggtcgtagtagcgaacgacgagcgcagcgaagtagtgagcgaggaagcggcgnnnnnnnnnnnnnnnnnnnnnnnnnnnnnnnnnnncagtcgacggtaccggacatatgcccgggaattcggccattacggccgggggcggagtgtggaattcttctcgggaggcagtgctgggtcctttccaccatggcacctaagaaagcaaagaagagagccgggggccccaactccaacgtgttctccatgttcgaacagacccaaatccaggaatttaaggaggccttcactatcatggaccagaacagggatggcttcattgacaagaacgatctgagagacacctttgctgcccttggcgcagttgaacgtgaaaaatgaagaaattgatgaaatgatcaaggaggctccgggtccaattaactttactgtgttcctcacaatgtttggggagaaacttaagggagcggaccctgaggaaaccattctcaacgcattcaaagtgtttgaccctgaaggcaaaggggtgctgaaggctgattacgttcgggaaatgctgaccacgcaggcggagaggttttccaaggaggaggttgaccagatgttcgccgccttcccccctgacgtgactggcaacttggactacaagaacctggtgcacatcatcacccacggagaagagaaggactaggagggggctcgctgctgcgccctgggctcgtctttgcagagtggtccctgccctcatctctctcccccgagtaccgcctctgtccctaccttgtctgttaagccatgtggctgccccatttatccacctccatcttctttgcagcctgggtggctatgggtacttcgtggccgcacatcctacagttggaaatccatccagaggccatgttccaataaacaggaggtcgtgtatttggtcacgacatttctctgacggagaaatagaagcaac

SEQ ID NO: 82827 - DNA, 2879 bp, Homo Sapiens
agcctctctccctgggccaggccccaggtctcgcagccagggatggagatgggggaagggggaacctagagttctttgtagtgcctccctcagactctaacacactcagcctggccccctcctcctattgcaaccccctcccccgctcctcccggccaggccagctcagtcttcccagcccccattccacgtggaccagccagggcgggggtagggaaagaggacaggaagagggggagccagttctgggaggcggggggaaggaggttggtggcgactccctcgctcgccctcactgccggcggtcccaactccaggcaccatgttccccgcgggcccccccagccacagcctcctccggctccccctgctgcagttgctgctactggtggtgcaggccgtggggagggggctgggccgcgccagcccggccgggggccccctggaagatgtggtcatcgagaggtaccacatccccagggcctgtccccgggaagtgcagatgggggattttgtgcgctaccactacaacggcacttttgaagatggcaagaagtttgattcaagctatgatcgcaacaccttggtggccatcgtggtgggtgtggggcgcctcatcactggcatggaccgaggcctcatgggcatgtgtgtcaacgagcggcgacgcctcattgtgcctccccacctgggctatgggagcatcggcctggcggggctcattccaccggatgccaccctctacttcgatgtggttctgctggatgtgtggaacaaggaagacaccgtgcaggtgagcacattgctgcgcccgccccactgcccccgcatggtccaggacggcgaatttgtccgctaccactacaatggcaccctgctggaaggcacctccttcgacaccagctacagttaaggggcggcacttatggacacctacgtcggctctggttggctgatcaagggcatggaccaggggctgctgggcatgtgtcctggagagagaaggaagattatcatccctccattcctggcctatggcgagaaaggctatgggacagtgatccccccacaggcctcgctggtctttcacgtcctcctgattgacgtgcacaacccgaaggacgctgtccagctagagacgctggagctcccccccggctgtgtccgcagagccggggccggggacttcatgcgctaccactacaatggctccttgatggacggcaccctcttcgattccagctactcccgcaaccacacctacaatacctatatcgggcagggttacatcatccccgggatggaccaggggctgcagggtgcctgcatgggggaacgccggagaattaccatccccccgcacctcgcctatggggagaatggaactggagacaagatccctggctctgccgtgctaatcttcaacgtccatgtcattgacttccacaaccctgcggatgtggtggaaatcaggacactgtcccggccatctgagacctgcaatgagaccaccaagcttggggactttgttcgataccattacaactgttctttgctggacggcacccagctgttcacctcgcatgactacggggccccccaggaggcgactctcggggccaacaaggtgatcgaaggcctggacacgggcctgcagggcatgtgtgtgggagagaggcggcagctcatcgtgcccccgcacctggcccacggggagagtggagcccggggagtcccaggcagtgctgtgctgctgtttgaggtggagctggtgtcccgggaggatgggctgcccacaggctacctgtttgtgtggcacaaggaccctcctgccaacctgtttgaagacatggacctcaacaaggatggcgaggtccctccggaggagttctccaccttcatcaaggctcaagtgagtgagggcaaaggacgcctcatgcctgggcaggaccctgagaaaaccataggagacatgttccagaaccaggaccgcaaccaggacggcaagatcacagtcgacgagctcaagctgaagtcagatgaggacgaggagcgggtccacgaggagctctgaggggcagggagcctggccaggcctgagacacagaggcccactgcgagggggacagtggcggtgggactgacctgctgacagtcaccctccctctgctgggatgaggtccaggagccaactaaaacaatggcagaggagacatctctggtgttcccaccaccctagatgaaaatccacagcacagacctctaccgtgtttctcttccatccctaaaccacttccttaaaatgtttggatttgcaaagccaatttggggcctgtggagcctggggttggatagggccatggctggtcccccaccatacctcccctccacatcactgacacagctgagcttgttatccatctccccaaactttctctttctttgtacttcttgtcatccccactcccagcccctattcctctatgtgacagctggctaggacccctctgccttcctccccaatcctgactggctcctagggaaggggaaggctcctggagggcagccctacctctcccatgccctttgccctcctccctcgcctccagtggaggctgagctgaccctgggctgctggaggccagactgggctgtagttagcttttcatccctaaagaaggctttccctaaggaaccatagaagagaggaagaaaacaaagggcatgtgtgagggaagctgcttgggtgggtgttagggctatgaaatcttggatttggggctgaggggtgggagggagggcagagctctgcacactcaaaggctaaactggtgtcagtccttttttcctttgttccaaataaaagattaaaccaaaaa

SEQ ID NO: 82828 - DNA, 887 bp, Homo Sapiens
  misc_feature (736)..(790): n is a, c, g, or t
  misc_feature (837)..(837): n is a, c, g, or t
gcggcatgaggcttccgagaaaccagccctgagcaaaggggttctgaggtccataccaagaagacggtgatgatcaagaccatcgagacacgggatggggaggtcgtcagtgaggccacacagcagcagcatgaagtgctctaaagacagagaccctctgccaccagagaccgtcctcacccctgtcctcactgctccctgaagccagccttcttccatcccaggacaccacacccagcctcagtcctcccctcacagcctctgacccctcctcactggccatccctcgtggtccccaacagcgacatagcccatccctgcctggtcacagggcatgcccggccacctctgcggaccccagctgtgagccttggttgttggcagtgagtgagcctggctcttgtgctggatggagcccaggcgggagcggtggccctgtccctcccacctctgtgacctcaggcactagcctttggctctggagacagccccagagcagggtgttgggatactgcagggccaggactgagccccgcagacctccccagcccctagcccaggagagagaaagccaggcaggtagccagggggactagcccctgtggagactggggggcttgaaattgtccccgtggtctcttactttcctttccccagcccagggtggacttagaaagcaggggctacaagagggaatccccgaaggtgctggaggtgggagcaggagattgagaannnnnnnnnnnnnnnnnnnnnnnnnnnnnnnnnnnnnnnnnnnnnnnnnnnnnnnggtctcaggctggtgggaggggcgcccacctccccacgccctccccntcccctgctgcaggggctctggagagaaacaataaagagattcacacaca

SEQ ID NO: 82829 - DNA, 712 bp, Homo Sapiens
cgtgtcgtttttgtctcctgatcccccactggcctgcaggctgggaaattcttgctgaaactgactattcactttggattccatctccttgcccaccttgcttgttactggcccatgatttgggagcaggtgctacttctgggggagctgcaaccccaggttttggctgtgctggtggcacttctggtgttttttcttcttcatgttgctcttgttttgatgcccaccctgtgccatctttaggtacaatgtttacattaggatcattgcctttgttttctgctttaagacttgggaggttagcaggtggaggcatacgccgtgaaataccgacttttccaagactctgtaatccatgtcgagctgttggttttctgtgtttctaatgatttccccttgtaagtattaaataaactgagtgttgcatactttttcccatcctttgcttttgtgctctggcctgacttctccgacatttcggtggaaactcatcgagtccaaaacctcctgccacaccccttaaaaccccagtccggtcagggtgagtgtcaagtttgcgcacttcgagggtctccgccgatctctgatcgaaagaagggggagggaaagctggggttaaaggggtggccggaagggccaccagactggaaaagccgaagctgcggatggacaaaccgccaaagcactttcgcagctttccgagggggagcga

SEQ ID NO: 82830 - DNA, 450 bp, Homo Sapiens
ggccaaatttaggttagccaaaaagtgaaaatacagtaagagaaaatagttttataaaggctttaaaaagtgttcataaagagcagttcatagatttttcacgtaacgttcatcaatagatgctaaaactattggatgaaaagctattgtggaataggatcttctacaaggatttaaatataatcctacagaagaggtatcaattatacaggggaaaatgtacctttacaatggtcaccacaataaccaagtgattcaatttagcatcacccaaggtggaacaccctaacattatgcccctcctgatgtgacttaagaattttacctatttagttttcttgcacaaagtgttaaactggaatttaatcatgaggaaattattagacaaatcctgaatgtagtcattctataagatgattgacttgggcttctcaaaaagtcagtgtcatg

SEQ ID NO: 82831 - DNA, 566 bp, Homo Sapiens
  misc_feature (467)..(467): n is a, c, g, or t
  misc_feature (517)..(517): n is a, c, g, or t
gtctttcagacctttactggggcttccggatgcagatgacgatgcgtttgaagagtacagtgctgacgtggaagaagaggagccagaggcggaccacccccagatgggggtcagccagcagtaaatctgggggctcccctgagaaggagagtgagccccacagtaacctaggtggggtcactgcccctcctgggttagcattttgcattagcacttcgaaataggacatctggctcccagcatccaaattaaaatgaaatacctttttaacgaccacaaaatatctgtgaatgagcttttgctcagaaagtggacctgaatttcactcccgctttcagtggggttttctatggagttgtcttggtagcctttgccattttgaatttagagtccattttgtggctgactattctcttaagtttatgttggagaattaacattcgctgactcgaatgtagagaactctnaatgtattaaggataggttttgaagtcctcacaggtgaccttactgaggngaaaagcatggcagagaagaaatgcagtctgcactttttatgtactttt

SEQ ID NO: 82832 - DNA, 440 bp, Homo Sapiens
aaattccagcacacctcctcgaacctcattgtcagcagagagggcccatctgttgtctgtaacatgcctttcacatgtccaccttcttgccatgttccagctgctctcccaacctggaaggccgtctccccttagccaagtcctcctcaggcttggagaacttcctcagcgtcacctccttcattgagccttctctgatcactccatccctctcctacccctccctcccccaaccctcaatgtataaattgcttcttgatgcttagcattcacaatttttgattgatcgttatttgtgtgtgtgtgtccgatctcacaagtatattgtaaacccttcggtgggtgggggccatatcctagacctctctgtatcccccagactatctgtaacagtgccaggcacacagtaggtgatcaataaacacttgttgattaaaaaa

SEQ ID NO: 82833 - DNA, 1027 bp, Homo Sapiens
ggtaccgcgtccggatttcccgggatatcgtcgaccacgcgtcggggagcgagagtgggctgcggaggccaggccttcgggctccatggacgggcgccgcgtccctgcacagcccagccgcagagcagaggaagaaccgatgctggaacgtcgttgcaggggccccctggccatgggcctggcccagccccgactcctttctgggccctcccaggagtcaccccagaccctggggaaggagtcccgcgggctgaggcaacaaggcacgtcagtggcccagtctggtgcccaagccccaggcagggcccatcgctgtgcccactgtcgaaggcacttccctggctgggtggctctgtggcttcacacccgccggtgccaggcccggctgcccttgccctgccctgagtgtggccgtcgctttcgccatgcccccttcttagcactgcaccgccaggtccatgctgctgccaccccagacctgggctttgcctgccacctctgtgggcagagcttccgaggctgggtggccctggttctgcatctgcgggcccattcagctgcaaagcggcccatcgcttgtcccaaatgcgagagacgcttctggcgacgaaagcagcttcgagctcatctgcggcggtgccaccctcccgccccggaggcccggcccttcatatgcggcaactgtggccggagctttgcccagtgggaccagctagttgcccacaagcgggtgcacgtagccgaggccctggaggaggccgcagccaaggctctggggccccggcccaggggccgccccgcggtgaccgccccccggcccggtggagatgccgtcgaccgccccttccagtgtgcctgttgtggcaagcgcttccggcacaagcccaacttgatcgctcaccgccgcgtgcacacgggcgagcggccccaccagtgccccgagtgcgggaagcgctttaccaataagccctatctgacttcgcaccggcgcatccacaccggcgagaagccctacccgtgcacaaga

SEQ ID NO: 82834 - DNA, 1163 bp, Homo Sapiens
  misc_feature (918)..(926): n is a, c, g, or t
ggaattcccgggatgacgggcctggcagttgtgaactcgaacctgccgctgtcgccgcggcggggcggggagcgagagtgggccgcggaggccggccttcgggctccatggacgggcgccgcgcccctgcacagcccgccgcagaggtaaggctggcctctctgcagtcagaggtctgagctctgccatggggataggggtgtctttattactgcagttttctctaacacctgggggctaccggagtgtgggccgaagcaggcgctgcagccgcggaagtatccccaggaacatccccaagaggagctggaaaaagcctcatccccagctctgcagtctccagggtagagtctggcctttgctgtgctcccaaaccacgccacaacaggggtgcacgggcgtccccatcccggcggaaggaaatggccctttctcatatcctggggtcttccctgtgcacagtctgacactgggaatgagtgacctttgtgttccctgagaacgagagagtgcgctctagggaactttagaacggatgtgtctggagcttgtgagcaggcacagaagggcccttaggagcctaactgcttccttcctccttccgcggaggaggctcctgtgcaggaatcttgggctcccctgagctgtggaagagctgaacatggggcagcccctggcgaggttggggcaggaccgggcaggggactgagattgcagtctcatcttccctccccttctatggccccagtaatctccagcaccccgagggacggcagagccggtgatcaggccccgagggcagcaggctgtgggtgttccttggattcagggagagcattccttcctgcaatgtcctaattttgggtgggtgggaaaaagggccaagcgggcaaaatgtggggcacagtctggggccannnnnnnnntcctggcggttagactgccgggaagtagcaacccaaggggtctgctcctggtccccccagaaaagggttggtcttccttttggccttccaccctctctacggggagattggcgcttaattggagtgcttaaaaaagggcctcccccctggggggggcttatgggaatggaaaaagctcataaaacacccctttttctctcgtgggaagatcttttgggaaaaacccccaagggcgca

SEQ ID NO: 82835 - DNA, 941 bp, Homo Sapiens
cggaagcgaggcctggggtggcgaattcccttaggaagcactctggaaggcggtcgcggatctgttgcagccggagcggccgctggaggcccggcacgcggtgctggctctgctgaaggccatcgtgcaggggcagggcgagcgtttgggggtcctcagagccctcttctttaaggtcatcaaggattacccttccaacgaagaccttcacgaaaggctggaggttttcaaggccctcacagacaatgggagacacatcacctacttggaggaagagctggctgactttgtcctgcagtggatggatgttggcttgtcctcggaattccttctggtgctggtgaacttggtcaaattcaatagctgttacctcgacgagtacatcgcaaggatggttcagatgatctgtctgctgtgcgtccggaccgcgtcctctgtggacatagaggtctccctgcaggtgctggacgccgtggtctgctacaactgcctgccggctgagagcctcccgctgttcatcgttaccctctgtcgcaccatcaacgtcaaggagctctgcgagccttgctggaagctgatgcggaacctccttggcacccacctgggccacagcgccatctacaacatgtgccacctcatggaggacagagcctacatggaggacgcgcccctgctgagaggagccgtgttttttgtgggcatggctctctggggagcccaccggactctattctctcaggaactcgccgacatctgtgttgccatcattttaccaggccatggcatgtccgaaccgaggtggtgtcctatgagatcgtcctggccatcaccaagctcatcaaaaagtataggaaaggagctccaagtggtggccctgggaacattctggctgaacatcattcgaacggcttccttcagcaggctccagaccttggacagcc

SEQ ID NO: 82836 - DNA, 658 bp, Homo Sapiens
tgattacaaatataatcctgagctgaaaaactgggatttgggggagagccatctttgcatacaaaatatctaaaggatgcttctctgtttacttttctctagtgatattcgactgccagagacagttctgaatgtgtgactttggagacatttatagtttagtgtggcgcccgggtctggagcctgctgcagtgcttgccacggaagcggatcggcaacacctcctgcttcctccagttcatcctggagttcttggctgacactagactgcagggctgcgggcgtgacacctccttcgggaggcaactctgtagaaagggtatacaggagctgaagtaggcaagtcgattgatccagcgaggaatctctttcccacaaagaatctctgataaagctgaagaaaaatgattgcagtttttatgcattaaatgataagcattgcctttgtattcttttcccagttcttctacaattttttctatatcatcttctaggaagtccgtgctccctaaaacaacagcttctctctgccatagacttcaattcctgaatgaaaaactccaattccaatggatgaggtatattcgttcatccaatacatgtcgtacacgttgagcaccactaactggttagcccccatcctcctccccgcggccgc

SEQ ID NO: 82837 - DNA, 875 bp, Homo Sapiens
  misc_feature (761)..(761): n is a, c, g, or t
gcggccgcggggaggaggatgggggctaaccagttagtggtgctcaacgtgtacgacatgtattggatgaacgaatatacctcatccattggaattggagtttttcattcaggaattgaagtctatggcagagaatttgcttatggtggccatccttaccccttttctggaatatttgaaatttccccaggaaatgcttctgaactaggagaaacatttaaatttaaagaagctgttgttttagggagcacggacttcctagaagatgatatagaaaaaattgtagaagaactgggaaaagaatacaaaggcaatgcttatcatttaatgcataaaaactgcaatcatttttcttcagctttatcagagattctttgtgggaaagagattcctcgctggatcaatcgacttgcctacttcagctcctgtataccctttctacagagttgcctcccgaagaagtggctcacgcccgcagccctgcagtctagtgtcagccaagaactccaggatgaactggaggaagcagaggatgctgccgcatcgcttttcgtggcaagcactgcagcaggcttcagacccgggcgcacactaactataaatgttttcaagtacccatcagactggctttgcagtcgatatactaggaaaaagtacagagagctcctaataacttttgtggcaagagggtctcccaaatccagttttcagtagattttatttggatacacctggccgattctggctcaggccatcttatnagggggtaaaaatgaaattgttacttgtcctgggagatttttccctcaatcccaaaaatacccgggaaaagagaccggggctaaagggggtattatattttggtggtctttcct

SEQ ID NO: 82838 - DNA, 706 bp, Homo Sapiens; identical to SEQ ID NO: 2964
  misc_feature (497)..(498): n is a, c, g, or t
  misc_feature (501)..(502): n is a, c, g, or t
  misc_feature (504)..(511): n is a, c, g, or t
  misc_feature (514)..(515): n is a, c, g, or t
  misc_feature (523)..(523): n is a, c, g, or t
  misc_feature (531)..(532): n is a, c, g, or t
  misc_feature (546)..(546): n is a, c, g, or t

SEQ ID NO: 82839 - DNA, 524 bp, Homo Sapiens
gttgctatcgcttcgcagaacctactcaggcagccagctgagaagagttgagggaaagtgctgctgctgggtctgcagacgcgatggataacgtgcagccgaaaataaaacatcgccccttctgcttcagtgtgaaaggccacgcgaagatgctgcggctggcactaactgtgacatctatgaccttttttatcatcgcacaagcccccgaaccatatattgttatcactggatttgaagccaccgttatcttatttttcatacttttatatgtactcagacttgatcgattaatgaagtggttattttggcctttgcttggatattatcaactcactggtaacaacagtattcatgcttcatcgtatctgtgttggcactgataccagaaaccacaacattgacagttggtggaggggtgtttgcacttgtgacagcagtatgctgtcttgccgacggggcccttatttaccggaagcttctgttcaatcccagcggtccttaccagaaaaagcctgtgcatg

SEQ ID NO: 82840 - DNA, 800 bp, Homo Sapiens
ggggagcgcgggcggctggggaatggctgctgccatggtgccggggcgcagcgagagctgggagcgcggggagcctggccgcccggccctgtacttctgcgggagcattcgcggcggacgcgaggacaggacgctgtacgagcggatcgtgtctcggctgcggcgattcgggacagtgctcaccgagcacgtggcggccgccgagctgggcgcgcgcggggaagaggctgctgggggtgacaggctcatccatgagcaggacctggagtggctgcagcaggcggacgtggtcgtggcagaagtgacacagccatccttgggtgtaggctatgagctgggccgggccgtggcctttaacaagcggatcctgtgcctgttccgcccgcagtctggccgcggtgagcaccccaagcctccctcctggctttctatggacccagccctcagctccttccctggtgggctctgagcaccgcgcctctcccaaggggtaagggagctgtgagggtgtggatgggaggcagcttcacctttccctgccctttccagtgctttcggccatgatccggggagcagcagatggctctcggttccaggtgtgggactatgaggagggagaggtggaggccctgctggatcgatacttcgaggctgatcctccagggcaggtggctgcctccactgacccaaccacttgacttaatctcactgtcttaaatgcttctattctcagacactgatctagtaccattacttcctcttagcccaaggagcaaattaaaaggtacagttaaaatcct

SEQ ID NO: 82841 - DNA, 777 bp, Homo Sapiens
  misc_feature (662)..(664): n is a, c, g, or t
  misc_feature (675)..(699): n is a, c, g, or t
cgggggccggagagcgcgggcggctggggaatggctgctgccatggtgccggggcgcagcgagagctgggagcgcggggagcctggccgcccggccctgtacttctgcgggagcattcgcggcggacgcgaggacaggacgctgtacgagcggatcgtgtctcggctgcggcgattcgggacagtgctcaccgagcacgtggcggccgccgagctgggcgcgcgcggggaagaggctgctgggggtgacaggctcatccatgagcaggacctggagtggctgcagcaggcggacgtggtcgtggcagaagtgacacagccatccttgggtgtaggctatgagctgggccgggccgtggcctttaacaagcggatcctgtgcctgttccgcccgcagtctggccgcgtgctttcggccatgatccggggagcagcagatggctctcggttccaggtgtgggactatgaggagggagaggtggaggccctgctggatcgatacttcgaggctgatcctccagggcaggtggctgcctcccctgacccaaccacttgacttaatctcactttcttaaattcttctattctcagacactgctctagtaccattccttcctcttagccccaggagcaaattaaaaggtacagttaaaatcctacccnnnggcgagcctannnnnnnnnnnnnnnnnnnnnnnnnttccccgctgcccacaccccctttcaaccaagccacccagcccacggtggtgctgcaggagtgctagatagaagttag

SEQ ID NO: 82842 - DNA, 800 bp, Homo Sapiens
  misc_feature (694)..(694): n is a, c, g, or t
  misc_feature (742)..(743): n is a, c, g, or t
gcggccgccgggccccggggttgaggcgaggagcccgcgggcggccggtcgggcggggcggcggcgctgacagcatcctgaggttagcattacacttctcccagtggagcccatgacttctgatcaggacgctaaggttgtggctgaaccgcagacgcagagagtccaggagggcaaggacagcgctcatctgatgaatggtcctatatctcaaaccacttctcagacaagttccatcccacctttgagtcaggtaccagcaactaaggtttcagagctgaaccctaatgcagaagtgtggggggctcctgtgttacatctggaagcaagcagtgctgctgacggtgtgagtgctgcatgggaggaggtggctggccaccacgcagaccgtggcccgcagggatcggatgccaatggtgatggtgaccagggccatgagaatgccgcattgccagacccgcaggagtcggacccagcagacatgaacgctctcgctctgggtccctcagaatatgactctctgcctgaaaatagcgagacaggaggaaatgagtctcaaccagacagccaggaagacccccgagaagtacttaaaaaaacattggaattctgcttatctagggagaaccttgctagtgacatgtatcttatatcacagatggatagtgaccagtatgtgccaatcacaaccgtnggctaacctcgaccacatcaagaagctcagcactgatgttgacttganntgtgagttgctaagatctttaaccttaggtcaagtggatgataaggaagacaagtta

SEQ ID NO: 82843 - DNA, 629 bp, Homo Sapiens
gggtgagactcaattcctccctgtctcgctatttcaggcagagagtcatattctgagggacccagagcgagagcgttcatgtctgctgggtccgactcctccgggtctggcaatgcggcattctcatggccctggtcaccatcaccattggcatccgatccctgcgggccacggtctgcgtggtggccagccacctcctcccatgcagcactcacaccgtcagcagcactgcttgcttccagatgtaacacaggagccccccacacttctgcattagggttcagctctgaaaccttagttgctggtacgaactgtccgtctctatcatgccatccccaaacaacaccgtcctctgacaccggtagctgaggagtgttttctgactcaaaggtgggatggaacttgtctgagaagtggtttgagatataggaccattcatcagatgagcgctgtccttgccctcctggactctctgcgtctgcggttcagccacaaccttagcgtcctgatcagaagtcatgggctccactgggagaagtgtaatgctaacctcaggatgctgtcagcgccgccgccccgcccgaccgcgtcgccgcggctcctcgcctcaatccccgggcccggcggcc

SEQ ID NO: 82844 - DNA, 441 bp, Homo Sapiens
  misc_feature (57)..(57): n is a, c, g, or t
tactgcactccaacctgggcagcagagcaagactctgtctcaaaaggggaaaaaaanaattgctgatgtgacccatgaagggaactcattttcctcgtaattttggactgccacacattggtacctttagttctctgaaggcccacgtttttatcattaagacctatttgttagctagtagagctttatgttcgctgtccatgaaaccttctgtaaccacagtgactacaagtagttctttctctattgaattattaggtccagaatagaagatgtcattgtacactttatttccctcacactgtgttatgctctgatgtgctatgcttagctatctgtcagagattagtaaattataaaactcatgtgtactacttaagtttatatcttatgctagtttataagaacaattaaaaggacttagaagattaactttggttt

SEQ ID NO: 82845 - DNA, 489 bp, Homo Sapiens
ttgctgatgtgacccatgaagggaactcattttcctcgtaattttggactgccacacattggtacctttagttctctgaagggcccacgtttttatcattaagacctatttgttagctagtagagctttatgttcgctgtccatgaaaccttctgtaaccacagtgactacaagtagttctttctctattgaattattaggtccagaatagaagatggcattgtacactttatttccctcacactgtgtttacgctctgatgtgctatgcttagctatctgtcaaagattagtaaattataaaactcatgtggactaccttaagttttatatcttatggctaagtttaataagaaccatttaaaaaggactttagaagagtaagtcccgccctctccggtggcaggaaaaaacatggtcgggcggccttcggcccctccgaaaaacctttcataaaccattccctttgggccccgggggcccagaaagg

SEQ ID NO: 82846 - DNA, 449 bp, Homo Sapiens
ccatggtgacaaagccaattagtagttatcaggaactagggagggggtgaaaagggagtgactgcgtaatgcgtatggggattccttttaggatgatgaaaattggatgaattacagctggtctgatggtagtgggttatcagaacttattaacattagtgtcattaaagttggtatatagcccctcactgctaaatctggctcaaaaattaaaagattattaaaatttgatgaattagtggtgatggttgcacaacattgtaaatataataaatgtcactgaattgtacactttaaggtggttaaaatggcaaattttacatgtcttactgaaactactgtactatttaatacaaagtacatagtataaaattttaaaagtgataggaaaatgcttagattaatattcacctattccaagtatattttaaataaaaacagtcttggta

SEQ ID NO: 82847 - DNA, 1085 bp, Homo Sapiens
  misc_feature (948)..(948): n is a, c, g, or t
tttaacccaaagttaacaaaaacaggaaaagactgaaatctgggagctattcaggtctcaaactctttctgcctgtcctttttcctggaagcttaccaactgaatagctgatgactggtgcattctgttatgtgatctatatcaggagaaaataacctttatgttaaacctaactcttaacacaccaagataacattgctaagtaaaatcattttccattagctagaaagaacgatcagattactcaaattgagattcaaattcaccaaatctgtttctgcaaaggcagaatacttgtagaaaatcccaatagattcaactagccaatttttaatatcatttgtgatgcttaatgtccaattttcctagtttaaaaaacagtcataatcaaagaattattctccagacatttctgatgcaaccccaaataagtaataaacaaactggaatacatgaaatgtgcatcattctaaaacaaatcaagaccttcaaatcacctacgatgactgaatggataataccccatgaaatgagcaccattgtgaagatatgacagaggccagagtacacaactaattaacagaaaaaaagacatgctatccaaagagttatctatcctgtgtctaccagagggccatctcaagatacaccattagccaccagcaactgctgctcctcaagccagtctgttctcatgtaagctagtttccttctattctcagctccttggaaaccacagggttgtcatggtagctgttatcaaggagaagggagtgagaagatgctgacaacaccctgtttctcttccctaacgaggtgtaaggccagatgcccccttcgtctacacagattctacgctcccttatgctgtaagtaaggttggctgagttagggcttcagtagtccatcgccatcggggtcagtgctctctttctgtgggtgaaaganccttgctttgacccccttctcccagctgcaataggcagatttgggcaaacgctcttattgtttttctgacattcttttttcttctatcttcagtggtaatagagagaccagaatgaattccattttgtacaccaaag

SEQ ID NO: 82848 - DNA, 523 bp, Homo Sapiens
gcggccgccggccagagcctttgagagtggaaccttcctcgtgttcaattagaggacctagacttgggaacagagccgtaaccacacttccagccttggacacaggaacaaacgaaaaataatttttctgtgtcagacacctgaatcctgagggcatgtcaggatctattttcagatatctacattctgtcttcatccaacacctttgctgtgaggtcaacttgaatattccactgtgactcttccccaacccagtctcctccctcccagaggcagagccaaatggcccgagagtgtgacaagttgagacctgtaggacagacagcaggttgcctgcccaacaagcgattctgcccttctttctttccaaaataaccctgattctatctgggcagcaaattcctcagataaaagactttatgattctctatctcttgcagacagaatggtcacagagaggtatgtagaagcccttggatgaagcttccaggaaagatcttaaaggaccaactcagctagaaga

SEQ ID NO: 82849 - DNA, 461 bp, Homo Sapiens
gagcctgctgggatctttgcagtttgcaggtcatagaatcagacatgaaaaggcttctcttccgacgtcattggttcctggctcctttacagatgagaacacaggtccagaggcataaagagaaacaaaagacaatgatggtattctctgtgtcctcagctttggcacttttgttgatgttgctaaggagcagtgaccttgctaaaaagactgaataatccacccactgaatagctaacctggggaggaaatgaaaatttcctttgtggatctccccaaatccattgttgtcaccaggccctcccagaacctcctcagttccttcacagtgcaaccctgtgtacttggcccgcaacccaatagtattgtgcctcacttcaccttccatgggcaactgccctcccttctggacataaaacctcatattttaaataaagttgaaatatgaaaagaaagtaaaa

SEQ ID NO: 82850 - DNA, 707 bp, Homo Sapiens
gaggtctctacacaagcccgtgattcttcatggcaagggataacatcagaaatgtttcattttctgctattagtttccattcctttccccatccaggcataaagagaaacaaaagacaatgatggtattctctgtgtcctcagctttggcacttttgttgatgttgctaaggagcagtgaccttgctaaaaagactgaataatccacccactgaatagctaacctggggaggaaatgaaaatttcctttgtggatctccccaaatccattgttgtcaccaggccctcccagaacctcctcagttccttcacagtgcaaccctgtgtacttggcccgcaacccaatagtattgtgcctcacttcaccttccatgggcaactgccctcccttctggacataaaacctcatattttaaataaagttgaaatatgaaaagaaagtatgtcataagatattcagaagtattgtgtgttttgggctaagggcagcaagagactcagaggcaagattccctccttgactcaatttcttggtcaccttgttttttgtgtgtgtgtgtccagaaaaatttaataagtttgcttaaattattataaagttgaaccactgaaatgttcacaaattcattttgacttgcattaatgctttacttccccacctacatttacattaaaaattcacacacaaatgaaaattgaaaactgaaa

SEQ ID NO: 82851 - DNA, 342 bp, Homo Sapiens
gaggcctacgcactccacacgccggcctccccgcatggatatccttccaataagcaactcatcgtgctcatgtttatttattttaaagtcacacacaattgcacttattaaaaatgaatttatggagacagaaagcattctggtggctgccaagggctggagagggcgaatggggagtgagtccttaacggatacggggcttccctttggggcgatgaaaaagttctggcgctagacagtcctgatggttccacgacactgtcactgtaataagtgtcaccaatggcacctttcatgtttcgcccacttccgcccactcaaaaactatacatttaaagcaaa

SEQ ID NO: 82852 - DNA, 622 bp, Homo Sapiens
atgagttccgctgggagatggaacatagcacgtttctctctggcctggtactggctacccttctctcgcaagtgagccccttcaagatacctatagaggaacttgaggacagagtgtttgtgaattgcaataccagcatcacatgggtagagggaacggtgggaacactgctctcagacattacaagactggacctgggaaaacgcatcctggacccacgaggaatatataggtgtaatgggacagatatatacaaggacaaagaatctaccgtgcaagttcattatcgaatgtgccagagctgtgtggagctggatccagccaccgtggctggcatcattgtcactgatgtcattgccactctgctccttgctttgggagtcttctgctttgctggacatgagactggaaggctgtctggggctgccgacacacaagctctgttgaggaatgaccaggtctatcagcccctccgagatcgagatgatgctcagtacagccaccttggaggaaactgggctcggaacaagtgaacctgagactggtggcttctagaagcagccattaccaactgtaccttcccttcttgctcagccaataaatatatcctctttcactcaaa

SEQ ID NO: 82853 - DNA, 340 bp, Homo Sapiens
gaagacacagcttgtgcagttctaggagccgaagacgttcaaacctgctctcttgtcctgactgcaaccctggtggaatgtagtaagactgcacgtcactgccccctttgaagttaggtttgaccatgtgactcactttgactgatgaaatgtgtgcagaagtgacctaagtcctacctgagtgaaagctttaagagccacaatatgctacattctcctttactgctgccttcgagattgtgtgagcagatgtcaagatgggtcttgtcagcatgcttcccccagtgatgctgacgagcagagcaacagagtgcaagcaaaaataaaagatttgctgggt

SEQ ID NO: 82854 - DNA, 631 bp, Homo Sapiens
ttatgtggaaccccaccctacttggcgcttgaagttcatgtttctgttaggactgctgggtataacagtgctgtggactgctggagtttaggagttattctttttatctgccttagtgggtatccacctttctctgagcataggactcaagtgtcactgaaggatcagatcaccagtggaaaatacaacttcattcctgaagtctgggcagaagtctcagagaaagctctggaccttgtcaagaagttgttggtagtggatccaaaggcacgttttacgacagaagaagccttaagacacccgtggcttcaggatgaagacatgaagagaaagtttcaagatcttctgtctgaggaaaatgaatccacagctctaccccaggttctagcccagccttctactagtcgaaagcggccccgtgaaggggaagccgagggtgccgagaccacaaagcgcccagctgtgtgtgctgctgtgttgtgaactccgtggtttgaacacgaaagaaatgtaccttctttcactctgtcatctttcttttctttgagtctgtttttttatagtttgtattttaattatgggaataattgctttttcacagtcactgatgtacaattaaaaacctgatgga

SEQ ID NO: 82855 - DNA, 1204 bp, Homo Sapiens
  misc_feature (497)..(497): n is a, c, g, or t
aagcttaatttcaacatcactggaagaaatacctattgttaaaccctgatatacattcttaaccacttgcagccagtgttcatgaggcaaaacgtgacccagagactttgttcaagttctcctcctagggcgtctacattcaccggcggtcaatccgtttccgtctccctttggttgggcacctgctggtgtgaggatcagggcttgcagaatgtccgacagggaaataatacccacaatactatctgcttcatttaccaccaccagccgatggacctcagctcttactattctgtccacgatggtctccagtatttccagcttattgcacttcacaacaccttcaaaatactgtgaacggtgctgaagggcctgggtcaccgtgatatctaggttattgggtatgttttctcagcagcaagattaattacatcaaaatttggaataaatatctacaactttttcctgactccatccacaacaggcagagctgatantttcgtctttccacaaatatgttcaaggctttgatgatgggagtgtctggatgtatgaaggcaatgctgtggtacgttcatattccaagctcatccaggttctgcttcatgaaggcaggctatggcatatcagacataaaaagctggaggaacttgaggattcttttgtgggtaagtatataaagtgcattcccactgatagggtcaataacgggcaatctgtggattttatttttgatcaaggagtatacagcatcgaagaggcttgcatctggagatatattcactaaaggcttaaatgtttcttgtaaatgaaagctccctccatgtttcaattttatgttcctctaattcataaatctgtaccataggtgatttatagtatctatgtagtatatttatgaaatctgtaattgttagcattcctacaaaactttgttttttactctcccacagtggcgctgctcggacaccgttggctaccaaagcaaagaaggcctttttaacttgtaatgtagtatcaaagacaacaagctttgaactggttggaacgatgtcataacacttgtgtgacctcatgaatcgcatgtaaacaccactttctgagtcttctactgcttcgtcctcgaactccagcttctccagcatgccggcttccgcgggtcccagggcagccgccagcgccgccttccagcaccggcggccgc

SEQ ID NO: 82856 - DNA, 1390 bp, Homo Sapiens
  misc_feature (676)..(693): n is a, c, g, or t
cagtcgacggtaccggacatatgcccgggaattcggccattacggccgggggtcggagcccttgcacgcctgctctcttgtagcttctctcagcctagcccagcatcactatggtggacgctttcctgggcacctggaagctagtggacagcaagaatttcgatgactacatgaagtcactcggtgtgggttttgctaccaggcaggtggccagcatgaccaagcctaccacaatcatcgaaaagaatggggacattctcaccctaaaaacacacagcaccttcaagaacacagagatcagctttaagttgggggtggagttcgatgagacaacagcagatgacaggaaggtcaagtccattgtgacactggatggagggaaacttgttcacctgcagaaatgggacgggcaagagaccacacttgtgcgggagctaattgatggaaaactcatcctgacactcacccacggcactgcagtttgcactcgcacttatgagaaagaggcatgacctgactgcactgttgctgactactactctgccaatcggctacccctcgactcagcaccacattgcctcatttcttcctctgcattttgtacaaatccacgaattcttctggggtcaggtgccactgaccgggatccagttccagttcccatggtgtatgtggnnnnnnnnnnnnnnnnnnaactgcactcatagggtgctctgaggtcaataaagcagagccaaggccacccagttgcctttttgcctttggtaacataactctgggagtcttggtttatcctgtgtgtcagagagtgggcagaaataacggcctgaaggttactgaggaagaagcactggatgggagactgaaatggacagtctcggagcctgttaatcagctgatcaccttacacatttaataataaaagagctgtacctacacgttgcctttacactgccccccctccatggtcaaatgacctagttcagtcagtgatggggcttccccaggtttggctattgaactgtcacttcaggcccatcctacactgaaagctcttgggtctggctgttctctgtgaaatgctgtagtctctccctttccagaattcaggttcagggcacagaacccaggcttgtaccatggtggtgggagaaaatgaccactggccaagaggactgctgacctgtgcaccaggctagtacttatgactacaaattcttactgcttctctaatcaactctgagggaagagggcatctgatcattacaaaagggagggcttataagtgatctcccaagaaggcagtgatctgctagtgcctttggctctgtacctctgctgggcatctctccaaggtctaaggtaacatattaaatgtttttgtcagcta

SEQ ID NO: 82857 - DNA, 776 bp, Homo Sapiens
gcggccgcgcagccggcacaggctctcggtggacgtcagcacctgcccgctgggcttcagcagggacacggtgaccaggccgctgaccgtcaccgcgatccagccctccatgggcttgccgccgaacagcgtgagcgacggtgagaacttgactcgggagaacttctccccgaagctggaggcgcccgacttctccacgtgcagggccagtttcacaccattgtgcagccaggacagggccacaatggggtccccctccactaggctgcccactgagctctcccagctattagccaggtggtccgccatgctccagcacttgatctgcccgtcggcatctgctgacaggagccgggagcctgactggtcccactccaggcaggtgatggcctcgtggtgctctgaggggatcgagtgcaggtcccaggggtgctccgtgtccaggatgtggatcatgcgggtcaggtcctggtcatcgctgcgcaggtccatggtgaaggcgatgagatttcggcaggaccaggcgcaggccaggggcaccgatgggcagtgggtgctcttggaccatttctcccactcacagacgtaggccaagtccatcatcccacctgccgctggccgccgcaaatcacacatgagggcagtcaccagctcctggtcggcccgtgcgccaagctcagcgggcgtccgcggtgcgatcttccctagcgcctcgggtctggcgccgccatcttcctcggtaacaaccagtcgcctgaggcgtggggccgcctccc

SEQ ID NO: 82858 - DNA, 857 bp, Homo Sapiens
  misc_feature (695)..(695): n is a, c, g, or t
agggggagagggtatgaagtcgacggcgcgccgaattcggcacgaggccgaggaagatggcggcgccagacccgaggcgctagggaagatcgcaccgcggacgcccgctgagcttggcgcacgggccgaccaggagctggtgactgccctcatgtgtgatttgcggcggccagcggcaggtgggatgatggacttggcctacgtctgtgagtgggagaaatggtccaagagcacccactgcccatcggtgcccctggcctgcgcctggtcctgccgaaatctcatcgccttcaccatggacctgcgcagcgatgaccaggacctgacccgcatgatccacatcctggacacggagcacccctgggacctgcactcgatcccctcagagcaccacgaggccatcacctgcctggagtgggaccagtcaggctcccggctcctgtcagcagatgccgacgggcagatcaagtgctggagcatggcggaccacctggctaatagctgggagagctcagtggacagcctagtggagggggaccccattgtggccctgtcctggctgcacaatggtgtgaaactggccctgcacgtggagaagtcaggcgcctccagcttcggggagaagttctcccgagtcaagttctcccgtcgctcacgctgttcggcggcaagccatggaggctggatgcggtgangtcagcgcctgtcacgtgtcctgtgaacccacgggagtgcgactcactaagctggctgctgccggcctgtcctgcaatcctttacgggggaatctgggcacgggaggtccttctcctcatttcagtgtattttactatgctacacgatctttctcgctctca

SEQ ID NO: 82859 - DNA, 1247 bp, Homo Sapiens
cgggcctctactgatcgggaaacgtcggaagacagaaaaatgggcaatcataaaacccacggcaaccatgaagacacgcactctccccctagcaatcccaccccggaattgaggacacagggtccccgcgctcagcccttggtgccagcacttcttggacacctcaaccccctcagctaaacctgagatccaagcgctccggattccaaacgtttcctcgagcaggtcctctctagccggccgcttatctatggtttctgctatagggcgctctagcctgcgccaaggggtagtgagaccgcgcggcaacagcttgcggctgcggggagctcccgtgggcgctccgctggctgtgcaggcggccatggattccttgcggaaaatgctgatctcagtcgcaatgctgggcgcaggggctggcgtgggctacgcgctcctcgttatcgtgaccccgggagagcggcggaagcaggaaatgctaaaggagatgccactgcaggacccaaggagcagggaggaggcggccaggacccagcagctattgctggccactctgcaggaggcagcgaccacgcaggagaacgtggcctggaggaagaactggatggttggcggcgaaggcggcgccagcgggaggtcaccgtgagaccggacttgcctccgtgggcgccggaccttggcttgggcgcaggaatccgaggcagcctttctccttcgtgggcccagcggagagtccggaccgagataccatgccaggactctccggggtcctgtgagctgccgtcgggtgagcacgtttcccccaaaccctggactgactgctttaaggtccgcaaggcgggccagggccgagacgcgagtcggatgtggtgaactgaaagaaccaataaaatcatgttcctccaaaaacaacacagaaatgaaaaaaggcgggccggctctaaagtatccctcgaggggccccaagcttacgcggaccccagcttttcttgtacaaagggggcccctatagtgagtcgaaattataagcctaggcactgggccggtccttttacaaacgtccgtgaactggggaaaaactggctagccttggggatcctttggtgaagggaacccttactttctggggggtggggacataaattgggaaaaaaactaccctaaagaagaattttaaaggctcccaaaggggaaataataaaatattttttaaagggatattagagggggttaaaccctcaactggg

SEQ ID NO: 82860 - DNA, 1188 bp, Homo Sapiens
gggcccgccaagcgcctcggagcgcgcaggatgcgctgggcggccgccaccctccgtggcaaggcgaggccccgggggcgggccggggtcaccacgcctgccccagggaaccgcacaggcacgtgcgctaagctgcggctacccccgcaagcaaccttccaagtccttcgtggcaatggtgcttccgtggggaccgtgctcatgttccgctgcccctccaaccaccagatggtggggtctgggctcctcacctgcacctggaaggggagcatcgctgagtggtcttcagggtccccagtgtgcaaactggtgccaccacacgagacctttggcttcaaggtggccgtgatcgcctccattgtgagctgtgccatcatcctgctcatgtccatggccttcctcacctgctgcctcctcaagtgcgtgaagaagagcaagcggcggcgctccaacaggtcagcccagctgtggtcccagctgaaagatgaggacttggagacggtgcaggccgcataccttggccctcaagcacttcaacaaacccgggagcggggcccagccaggcgcacgacaaccacagcttcaccacagaccatggtgagagcaccagcaagctggccagtgtgacccgcagcgtggacaaggaccctgggatccccagagctctaagcctcagtggctcctccagctcaccccaagcccaggtgatggtgcacatggcaaaccccagacagcccctgcctgcctctgggctggccacaggaatgccacaacagcccgcagcatatgccctagggtgaccacgcagtgaggctggtgcccatgctccacactgggaggccaggctgaccccaccagccagtcagctacaactccacatcaactccacatgcgcccagctcgagactgatgagtggaatcagcttccaggtgtagggacccctttgaggggccgagctgacatccaaggctgaggaccccagtggggagtgttctgttccggcatatcctggccgtaacgatttttatagttatggactacttgaaaccactactgagggtaatttactagctgtggcctcccactaactagcattcctttaaagagactgggaaatgttttaagcaaatctagttttgtataataaaataagaaaatagcaataaacttcttttcagcaactacaa

SEQ ID NO: 82861 - DNA, 491 bp, Homo Sapiens
atgcctgaaggagctgtggccaggccacatggaggtgacgtgtgcggacaggttgaggatggccttcctagtatcccggatggggcctttatgaggacaacccagctggcgccacctgcgcccagagtgacagaaacatttccaggagacccaggcccccgaggtgcctgcctgccacatctcacagggccttggccggccacatggccaggtggccacgggacacgtggcaggcacacagtcccgaccaggggatccagcagcaaggccccactgggcaaatgccctgattcctgcaactccggggaacccaagactgcgagacaggagaggggacagcaggcgcatcccaaccctgacgggaccgtccacacagcaggcaggagacacctggagaagcgcagccactgtcaggcagtcagtcggcagaggagccgcagtgaacctggctcagatgtgacagtggcccgtggtccgggtcactggttttt

SEQ ID NO: 82862 - DNA, 1443 bp, Homo Sapiens
  misc_feature (74)..(108): n is a, c, g, or t
atagactcactataggggctactctccgcagcgaacgacgagcgcagcgaagtagtgagcgaggaagcggccgnnnnnnnnnnnnnnnnnnnnnnnnnnnnnnnnnnncagtcgacggtaccggacatatgcccgggaattcggccattacggccggggagtcctccaacgcgtccgaagcccgtcaccatgtcgtgcgagtcgtctatggttctcgggtactgggatattcgtgggctggcgcacgccatccgcctgctcctggagttcacggatacctcttatgaggagaaacggtacacgtgcggggaagctcctgactatgatcgaagccaatggctggatgtgaaattcaagctagacctggactttcctaatctgccctacctcctggatgggaagaacaagatcacccagagcaatgccatcttgcgctacatcgctcgcaagcacaacatgtgtggtgagactgaagaagaaaagattcgagtggacatcatagagaaccaagtaatggatttccgcacacaactgataaggctctgttacagctctgaccacgaaaaactgaagcctcagtacttggaagagctacctggacaactgaaacaattctccatgtttctggggaaattctcatggtttgccggggaaaagctcacctttgtggattttctcacctatgatatcttggatcagaaccgtatatttgaccccaagtgcctggatgagttcccaaacctgaaggctttcatgtgccgttttgaggctttggagaaaatcgctgcctacttacagtctgatcagttctgcaagatgcccatcaacaacaagatggcccagtggggcaacaagcctgtatgctgagcaggaggcagacttgcagagcttgttttgtttcatcctgtccgtaaggggtcagcgctcttgctttgctcttttcaatgaatagcacttatgttactggtgtccagctgagtttctcttgggtataaaggctaaaagggaaaaaggatatgtggagaatcatcaagatatgaattgaatcgctgcgatactggcatttccctactccccaactgagttcaagggctgtaggttcatgcccaagccctgagagtgggtactagaaaaaacgagattgcacagttggagagagcaggtgtgttaaatgggactggagtccctgtgaagactgggtgaggataacacaagtaaaactgtggtactgatggacttaaccggagttcggaaaccgtcctgtgtacacatgggagtttagtgtgataaaggcagtatttcagactggtgggctagccaatagagttgggacaattgcttactcattaaaaataatagagccccacttgacactattcactaaaattaatctggaatttaaggcccaacattaaacacaaagctgttgaaatattaaaaaaa

SEQ ID NO: 82863 - DNA, 886 bp, Homo Sapiens; identical to SEQ ID NO: 15378

SEQ ID NO: 82864 - DNA, 838 bp, Homo Sapiens
cagatgaatagagaactttctgctagagttctttttaaagatagtgcttgcttttcccccattgccttctaggtctacctgcaagccaaagaggaggaaaaattcttctctgtgtcatgcatttcctatagttaccattgtaaaacacacaaccagcctcaacatggtttagctgttttagctaattcttacagaaacatctattgcctgcaaaaatttgctctgtaattactgttcaagtgcttctctaatatatacctggtacttaaaaggaaccatcctcaacatcatctttggcagctgcattagtgcagaatattttctccgggatttgtgctggggtaggtttttccagcatatctgtacacctctgagaatgagtcaagtggtcatgggttgagactcacccaactagggcaataaagagaaaaattagtctaatgcatggtcttaacaagagggagagtgtgagcatgaataattaatctcactagtctatggcaatcagataaaatgaagtcccatttgctcaaccttattaaaagagagagagtgcgtgggagggagggagaaatggtaaaggtcgttaagggactcggtaacgtggaaagaactgcccttgagatgggtaatgtgttttctaatctctgtggtctttaactaaacgtcatggtaaaggtactcttcagatagttcggattcgtttgaattattaaacattttagaaaatactggactctggactactaacttagatgtctttatgatgaatttgcagagagtctttttggaaagggattacatctcactatatcactaagaaataatttatccactt

SEQ ID NO: 82865 - DNA, 488 bp, Homo Sapiens
ccttgggccactctccttttttgttcccccgggaaccaaaaatttttgaaagttttagaacccgtttgttccctttgcccttgggggcaaccccaaaaagaaaggcccaagcaaagaaggtgttactttctcttgagatgcttataaaacaaatgggcaccctccaagccgctttgtaagttaatgagctgcactgtgacaagctgcatgtggatcctgaaaacttcaaactcctgggtaacgtgaaggtgattattctggctactcactttggcaaggagttcacccctgaagtgcaggctgcctggcagaagctggtgtcatgctgtcgccgattgccctggcccataagtaccactgagttctcttccagtttgcaggtgttcctgtgaccctgacaccctccttctgcacatggggactgggcttggccttgagagaaagccttctgtttaataaagtacattttcttcagtaatcaaaaaaaa

SEQ ID NO: 82866 - DNA, 451 bp, Homo Sapiens
ctggactcaaatgcatctggaatggagaaccacccccagtgctgcagagccacctcattttctatcatctacccacctggttttcggaggaaaaactttgttccttcagccatcttcacaggccagggactggcacttcctccacactctcagcacaccgccctgtgcatcctacagttcctaaagagtggaaattccccagttgtgctcgaatcaaacctgcccttaagtaccatatttgtataaactcgtgtgagatcacactagcttctcagtgggtgcatcatagtgcaagttaatttcagatttaactgatttgacatggattgaaactgttaagatatttgcaacatgctaccactaaataactattactttgtcctatattgggaagtagtttgtgggatttggggtaggtggatgcaaataaaagcatttatacttatgcaaa

SEQ ID NO: 82867 - DNA, 563 bp, Homo Sapiens
  misc_feature (302)..(302): n is a, c, g, or t
tgacctagcatgtcgccagcctcttggtgaaacgcctaaagtgtgctgccccacttctcttgaaagtttacaccgaagggatgaggttttgccctttacagggttggggcacaaagtcggagtcgctgcggctccgaaatagaaacggagttgcccatttcgtatgcttcatcaacatctgcttgcattttgaaatcctagtcttaacttttacacaacttttagagaaatggctgccctcctagagggaaaaacgaactacagtaattccaattccaatgtaatctttgtaagactacaanaatctttccagtttaaagatttttcttttcccacagactaaacaaagtcagagtattttgtgttctactggtgcattgttactaggtaacctcaattttttgaaattccaagtaattgaaggatcacttttgtagatcctaaatgctaccaaaaaagaaaccagtttttatctacttcatatgtatagcgtttaagagatgaggagacctgctttgaaagaataaactcttaaccttacattatactgtagcagcttctta

SEQ ID NO: 82868 - DNA, 908 bp, Homo Sapiens
ggggtgaggacccttgacctctggcccaagatggtggcgcccagagcttcgctcttgctgctcccctgaggtgaactgaagccagcagccccgcatcatgtcaaagctcggccgggccgcccggggcctcaggaagcccgaggtcggcggtgtgatccgggcgatcgtgcgggcaggcctggccatgcccgggcccccactaggcccagtgctgggtcagagaggcgtttccatcaaccagttttgcaaggagttcaatgagaggacaaaggacatcaaggaaggcattcctctgcctaccaagattttagtgaagcctgacaggacatttgaaattaagattggacagcccactgtttcctacttcctgaaggcagcagctgggattgaaaagggggcccggcaaacagggaaagaggtggcaggcctggtgaccttgaagcatgtgtatgagattgcccgcatcaaagctcaggatgaggcatttgccctgcaggatgtacccctgtcgtctgttgtccgctccatcatcgggtctgcccgttctctgggcattcgcgtggtgaaggacctcagttcagaagagcttgcagctttccagaaggaacgagccatcttcctggctgctcagaaggaggcagatttggctgcccaagaagaagctgccaagaagtgacccttgccccaccaactcccagatttcaaaggaggtagttgcaaaagctgtgcccaaggggaggaaggaggtcacaccaatatgatgatggttttcatgactttgaatgatatatttttgtacatctagctgtatcgaggcatcaggcctgaataaacatcctttcttacccactgtcatcttctaactgggacctcaggcaaggaaccaggactggtggtagccaatatgg

SEQ ID NO: 82869 - DNA, 1727 bp, Homo Sapiens
  misc_feature (1305)..(1305): n is a, c, g, or t
  misc_feature (1656)..(1656): n is a, c, g, or t
ggggtggctaatgccgtaggctccttcagggctgagccatcccgcgtgtcttgcgctcggtggaaatgcccagccgagggacgcgaccagaggacagctctgtgctgatccccaccgacaattcgaccccacacaaggaggatctaagcagcaagattaaagaacaaaaaattgtggtggatgaactttctaaccttaagaagaataggaaagtatataggcaacaacagaacagcaatatattctttcttgcagaccgaacagaaatgctgtctgagagcaagaatatattggatgaactgaaaaaagaataccaagaaatagaaaacttagacaagaccaaaatcaagaaatagtcaacctgatttcacataacaatgtgtggcatttgttgttctgtaaacttttctgctgagcatttcagtcaagatttaaaagaggacttactatataatcttaaacagcggggacccaatagtagtaaacaattgttaaagtctgatgttaactaccagtgtttattttctgctcacgtcctacacttgaggggtgttttgactacccagcctgtggaagatgaaagaggcaatgtgtttctatggaatggagaaatttttagtggaataaaggttgaagctgaagagaatgacactcaaattttgtttaattatctttcctcctggaagaatgaatctgagattttgtcactcttctcagaagtacaaggtccctggtcatttatatattatcaagcatctagtcattatttatggttcggtagggatttttttggtcgccgtagcttgctttggcattttagtaatttgggcaagagtttctgcctctcttcagttggcacccaaacatctggattggcaaatcagtggcaagaagttccagcatctggacttttcagaattgatcttaagtctactgtcatttccagatgcattattttacaactgtatccttggaaatatatttctagggagaatattattgaagaaaatgttaatagcctgagtcaaatttcagcagacttaccagcatttgtatcagtggtagcaaatgaagccaaactgtatcttgaaaaacctgttggtcccttaaatatgatgttgccacaagctgcattggagactcattgcagtaatatttccaatgtgccacctacaagagagatacttcaagtctttcttactgatgtacacatgaaggaagtaattcagcagttcattgatgtcctgagtgtagcagtcaagaaacgtgtcttgtgtttacctagggatgaaaacctgacagcanatgaagttttgaaaacgtgtgataggaaagcaaatgttgcaatcctgttttctgggggcattgattccatggttattgcacccttgctggacgtcatattcctttagatgaacaattgatcttcttaatgtagctttcatagctgaagaaaggacatgccaactaccttttacagagaagggaaataacagaaaataatgtgaatacttcagaagaatctctaagatgtgctgctgcgctgtgacatctaataacatgtatgtacagatcgatcaaggagggcggactaaggacacagctgtagccctccgatttggattttgtgaatatgttctaggagactgcaaatanagactcatagtcactatcggcatggtcagttggtgaagatggtggcatctgttgctctaagatggtgtatg

SEQ ID NO: 82870 - DNA, 523 bp, Homo Sapiens
gagtatgaagtcgacggcgcgccgaattcggcacgaggagcggcggctgcgagggcggccgatggcggccgggaggcgccctcggacacttgcgggtcgttagggcgcgacgctgggaggcatgtcggagcacgtggagcccgcagctccgaggaccgggcccaacggcgacggcggcggccaggcccccgcgcgcgggcctcgcacccccaatctcaaccccaaccccctcatcaacgtgcgcgaccggctcttccacgcgctgttcttcaagatggctgtcacctattcgcggctcttcccgcccgccttccgccgtctcttcgagttcttcgtgctgctcaaggccctgtttgtgctcttcgtcctggcctacatccacatcgtcttctcccgctcgcccatcaactgcctggagcacgtgcgtgacaagtggccgcgtgagggcatcctgcgtgtggaagtgcggcacaactcgagccgcgcgcccgtcttcctacagttctgtgacagcggcggccgc

SEQ ID NO: 82871 - DNA, 798 bp, Homo Sapiens
  misc_feature (581)..(581): n is a, c, g, or t
  misc_feature (622)..(622): n is a, c, g, or t
  misc_feature (731)..(731): n is a, c, g, or t
  misc_feature (734)..(734): n is a, c, g, or t
gcggccgctgcctgagagccagccctcgtccagcccgctgctccagaccgccccaggggtcaaaggtcaccagcgggtggtcaccctggcccagcacatcagtgtaactacgcgttctctgctgctgcttgtcacctttgcacctgggggcaccaggcctggagaggggatggggaaccccacagcccttctgtcctggcggggtggctgggggatccagggcatggcgctggggggatccagggcgtgggtgagggtggagatcccaaagccccgagcaccggcaccatcaccgccccctaatccatgggaggagcctgtgatgcgagccgatggcatcttcacgggcaatgaggccttcctggtggcccaggtttctcagtgtcatgggctggtctcatcagccatctgccaactaccagcttgggaccgctgaccacagccccactcccatgcacactgggacacggaggcccagagggttggcgggcaggtccacagtcacccaggaagctggccccacccaggattctgccccgagctccgtctagcccctccccacccccagaaggttctgtcangagagtgctgcctgactctgggcccccccacttgcctgcangaggtcatcacacaggactacacccggcaccacccacagcagctcagcgcaccccctgcccgcccccctctactttcttcctggggccagctgccccgtcctggacctncgncgcccacccagtgacctttaccctccgcccccggaccatggtgcccccggcccgtgggctcccc

SEQ ID NO: 82872 - DNA, 1220 bp, Homo Sapiens
gccctgttctgagtcactcgctgtcggagagtgtctcgtactgcgagcagagcagtggcttgggctcctcgtcccaggcgtggtgggggccagcgaggggcccgctgcccgcggggaggcccggtgggggtggggaagccatgacacccgcctgcagccgcatgatcagggggttgtaggggaatggcgtggaacctgcggacgagggcctgtcctcccacacgcggttggtgagcggcgtccggcggttgcagtctccctccgagtgcactgaggagacagagggtggccggtccccagatgccaggcccggggccggggacttggcttttcggctgctgggtctgccagagaccttggccttcccgccgccacctggcgaggtgagtgtgtggtcactccgtccgtcagcagcggttatgggcatagcagcgggcaggctggcactggcattcagagggttaaaagcattggcgctgagcggcggggactcttcccactggtcatatttacccatgagtgcctttctaattatggcctccagccccatgttggtgctggcatgttcctgcaccgcctggcttctataggtcataaggcctgttccggtgatggcgggcatattgaagatctccgtcccaggctggctgatattgtattcaggctcattccggttgtgggtgttcagcttcttgttgatctcttgcttcttggacttgaccatggcggagttgctctcggtcagcttgctgaagaaggctggcggctggctggtgttgcctggagacttggagcccatcctgctgggctccgtctgttccccatcccggtacagcagcgggtacacagcactccgggagtgccctggctccgtcatgccctccggtggggacacaggttcaataccgtcctcaccaccacccaagaccgacgtcttgtttggctctggagacctcttgcccccttcgctgtggggggagccacgggccggggcaccatggtccgggggcgggaggtagaggtcactgggtgggcggcggaggtccaggacggggcagctggccccagggaaggagtagaggggggcgggcaggggtgcgctgagctgctgtgggtggtgccgggtgtagtcctgtgtgatgacctcactgatgtgctgggccagggtgaccacccgctggtgacctttgacccctggggcggtctggagcagcgggctg

SEQ ID NO: 82873 - DNA, 520 bp, Homo Sapiens
ctacagcataagccttatcctgccagccaaggggatttattctaagagaagtgcatgtgaagaatggttgccactgttattagattgacaagatgttaatttctctgtaggttgtaactttaaaaataaatgaaattatttaagggttatgctgcactagtattccttagaggaaacagttctttaaagttaggaaagggagtaggcaggcatgtgttggcaaaggctgttaatagtagttaagtgttaagactgcttttctttaacgttttcatggtaatgcatatttagagcactgtatttttgtcttgttaagaaaatttagcatttctaaaagaaaaaagcaaccctctttcaaactgttaattctgtcacagcctgtatattttagtcatttgtaaatctcttcatacaatagtgacttcttttttgactgatacagtatcttaattacaaggttattttgtacttgtcttaatacactaagtgtaataaaaacggcttgagaaaagttaaaaaa

SEQ ID NO: 82874 - DNA, 728 bp, Homo Sapiens
ccttggggttccagacacagaggcttacctgactcctcgcttggcccacgttcttaaaacacttattccaataataaattgtgtctcactgagtttttccacccagtaggtgcatgtgcaaaatacggaaaatgttccaagatccagttgtagatatccttcactggcaggcgcttggttggagagtcctcgatggccataaatatgaggcagctgaaggagtaggggggtttgcagttggggttctgcctggcatcgtagggcatgtcagagtgggcaggggatgggggggtgtcatcgtccaggtcctggacggggctgacactcctgaggaccgactccccaaagctcttcagcaagttcttgctctcgtgcagccagttcaggttggtcagctcttcatcttccatggccccctcttctaatcggatgtcaggcagagaaaagtcgaggtcatcgtcttcctgaagggccttggagaaaccgctgcccccgtaacactgactcagtccactggagacactaattcctgagctttctggcttcttactgggaggcatgactggacccatttacgtgaaggctcctggccggagcggggcacgggggtgcgggggcgccgctgcccttcagcaggagccgacaaactttcgcgggcgcccggcgggcatcgctcggtggccccgctaaggacgcgcgggcgcggcgcggcgagcccggggcggcgg

SEQ ID NO: 82875 - DNA, 520 bp, Homo Sapiens
ctcttttaagaataatgaaaagataggattggaagccacagtttgttttgtggtttgttgtttttaaaggcccattttatttattggtataagaggtttttattgaatagattaaggggatcaaagatttcttacatgcatgtattaaatggccattttaaaattagctagtttcatgctcagatgtcataagtggcagctatctttagccagactgttgcagttattgctcgatgccactcatggtgtcctacctcctatttggaaaccatctctatttttttcttactgagattcttactttggggtcaggaacttgaagggatgcttggagtgagtagatttgagggtccagttatggagtgctactaaaacattttcttctctcctggcctctggaagcatctttagctttgactttgggcaagtctctgtacttttctggccagcttttccaggatttataaaattagagcttcggcttgacctctgtgataaataaatattcactctgtgcaaa

SEQ ID NO: 82876 - DNA, 1569 bp, Homo Sapiens
gatccagtgaagaagggctgcatgtgacaagccgcccgcccagccagcccaacattctggactgccaagcggaccgcttcaagggctccaggcaccacaccaccctcatcacctgccaccgtgctgggctcacagagccagattccagcagtccccttgaactgtctgagttcctatgggtggactttgtggtggagaatagcactggttgggggcgtagcggtcactcgccccgtcacgtggcagctggagtacccaggccaggccccctgaagcagagaaggacaaaatggtgtgggaaatcctggtgtctgagcgggacattcagagcccttatcccactggccaaggctgaggagctggtgaatacagcaccactgactggagtgccccagcatgtccccgtgcgccttgtcactgtggacggcgggggggccttggtggaggtgacagagcatgtcggctgcgagtctgccaacacacaggtcctgcaggtgtctgaggcctgtgatgccgtgttcgtggctggcaaggagagccggggcgcccggggggtgcgagtggacttctggtggcgccggctccgcgcctcgctgcggctgaccgtgtgggcccccctgctaccgctgcgtatcgagctcaccgacaccaccctcgagcaggtccgcggctggagggtacctggccctgctgaagggcctgcggaacccgctgcagaggcgtcggatgaggccgagcggcgcgcccgtggctgccacctgcagtaccagcgggccggtgtgcgcttcctcgcccccttcgcggcccacccgctggacggcggccgccgcctcacgcacctgcttggccccgactggctgctagacgtgtcccacctcgtggcgccacacgcccgcgtgctggactcgcgtgtagcctctctggagggtggccgtgtcgtggtgggccgggagcccggtgtcacctccattgaggtgcgttccccactgtctgactccatcctgggggagcaggcgctggctgtgacggacgacaaggtctcagtgctggagctgagggtgcagccagtgatgggcatctcgctgaccttgagccggggcactgcccaccccggggaggtcacagctacgtgctgggcacagtcagcccttcccgccccaaagcaggaggtggccctctccctatggctgtccttctctgatcacactgtggccccagctgagctctacgaccgccgtgacctgggactgtccgtctcagccgaggagcctggtgccatcctgccagctgaggagcagggtgcccagctcggggtggtggtgagtggggcataactttattggataccattaccttgataattattttttgtatttactctatacttggatctttattaatgaacttacaccttgatatttaagtattatctaattttattgtattttaattcatatcatactatattttcctttgttaaaaataaacattaacttcaatattataacatttaagtattatttttattatctacaataaatcatgttatactgtttcctaaaaattctt

SEQ ID NO: 82877 - DNA, 886 bp, Homo Sapiens
tacggggagagagtatgaagtgacggcgcgccgaattcggcacgaggccaccttttgccactcagcaggtggtcccccctcgagtcactgagccccaccaacggccagtcccatgggacgtgcgggccgtttcagtggaagcggctgtgactccagcagagccctacgcccgggttctcttccacctcaaagggcaggattggccaccagggtctggcagcctgccctgtgcccggctccatgccacacaccctgcaggcactgctcaccaagcctgccgcttccagccatccctgggcgcctgcgtggtggagctggagcttccctcgcactggttctcacaggcctccaccacacgggccgagctggcctacacgcttgagcctgcagctgaaggccctgggggctgtggctccggcgaggagaacgaccctggggagcaggccctcccagtggggggtgtggaactgcgcccagcaaaacccccgcagtaccaggaagtacctctggacgaagctgtgactctgcgggtgcctgacatgccagtgcggcccggccagctctttagtgctaccctcctgcttcggcacaacttcacagccagcctcctgaccctgccgatcaaggtgaagaaggggctgcatgtgacaaccgcccgcccagcccaacccaaactttggactgccaactggaacgcttcagggctccagcaccacacacctcataactgccacgtggtgggctacaaaccaaatccatccctgaactgctattctatggtggattttggggaaaaaaatggggggctaacgtacttccctcttggcctgaaaccagcagcctaacaaaaaaatgttgaactttttaacaataaccttactgcgtg

SEQ ID NO: 82878 - DNA, 862 bp, Homo Sapiens
attgcagcctgcggggcgggcggtggcggctggcggcggctggccggtgacccagcgggccaggtggggacggcgcggagcgggtgcgggagatgccgtgcgggactggggccacctgagccgcccgcctcgtccccgccttctgtgggaaggatgtgcgcgcggatggccggtcgcacaacagcggcccctcgggggccctacggcccctggctctgcctcctggtggccctcgccctggacgtcgtgagagtggactgtggccaggctcccctggaccctgtctacctgccggcagccctggagctcctagacgcccctgaacacttccgtgtgcagcaggtgggccactaaccacactgccaactcctctctgagctcccgatctgagacctttctgctcctacagccctggcccagtggcccagacacttctccgggcctcctacccaccttttgccactcagcaggtggtcccaccctcgagtcactgagccccagcaacggccagtcccatgggacgtgcgggccgtttcagtggaagcggctgtgactccagcagagccctacgcccgggttctcttccacctcaaagggcaggattggacaccagggtctggcagcctgacctgtgcccggctccatgcaacaaaccctgcaggcactgctcaccaagcctgccgctttccaggcatccctgggcgccctgcgtggtaggacgctggagcttccctcacactggttctcacaggcctccaacacacgggccgaggactgactacacgcataaacctgaagctgaggtccatgggggctgtggaatccggagaaggaaaaccgacctgggaaagcatggccatca

SEQ ID NO: 82879 - DNA, 445 bp, Homo Sapiens
cgagaagaatgagcggttactggggtcctcaggctcttcaaagagcttggaatgcttgtcacacagggcagctgcccgcatgtcgcagagccgcagggagcccttgctgctgctgtagacgaagaggttgcagtggtgcggatggaactcagatgctgtgatcacctccgtaaggtcctccatgttggccggcttgatgtccacgatgttgaagctcctgtcggtgatggccaggtgccagaggttgatgcgcaggtcatccgccgacatgtaggtctcgcagtcactgttgacggagatggagttgatgtggtaggtgtggccattggcaaagatcctccgagggctcacctccaccatcagatccatgggcttcagcactggcacctgcagtgacgtcaccggggacaggtccttaagtttcccctcttcatccttcaggttg

SEQ ID NO: 82880 - DNA, 595 bp, Homo Sapiens
  misc_feature (30)..(30): n is a, c, g, or t
tctttgggtgactacacatccaccctgggntacagcacccagttgttctgcagtgtctgagcttcacccaagcacaagatcatctggatgaatatcaagatggagattcagggcaaccccaaataccgcgccctatctgagcaaggcgtatgcaccatagagatccggaaacccagcacctttgattctggggtctacacctgcaaggccataaatgtgctgggggaggcatctgtggactgccggctggaggtcaaagcctcagccgcacactgaagagtcacggaagcaggctgtgatgaggagccaggtgatgcaggcctgaggggccaggtccaccaggcctacagtcaaactccagacatgcccaagacccccgcttccatagcgacggctgatggaaccgcccctggtacctgctggcctcccttccccagaggctggtgtccagaactcaggaatgggcctggtaggccccaggccagactaactgggctcaaggggtgctggaaggcgcagagattggagtgccctgcggagttgcacactgggtgggaagcactcaaataaagatgcgtggtgttaacagtgaaaa

SEQ ID NO: 82881 - DNA, 459 bp, Homo Sapiens
ggagttggtggcttggtgttcatggtggagacttggttctttacgcagagcaggctaaaggtgtgttttttctgctctgtttctaattcatgttaagtagttggtcatcactttggtcagagctgctgctgaagctctcttaactgtgagtcactggacgttggcagggagttggctgtgagattgtaggtgctcaagtgtttctgttcgggactgagtgtgaatctgtaaaaggggaaaatcctcgcaagaggtctacgagaaggttgagggcccaagtctagggtctaaacaaagccaggagtggtttggtatattactgagtgcaatcattgcgtgccattcctgcactcaatgtattgtgtaaaatccttaggtaaaatgggataaacccacagctggtcctacttggcctcttgaaaaccattccatcattgtgccaatctagcctgaaaagga

SEQ ID NO: 82882 - DNA, 239 bp, Homo Sapiens
  misc_feature (35)..(35): n is a, c, g, or t
tagggcctttttgaaaggaaaattgacatcatcanaattttaaatatattcagtctatttctcaaaacttcaaagaatactaataaatgtgtactcaggtatatgtacagaaattgctgtaacattataattttaaacaatttaaaacagactgagtttccaaagttagggtacaatgaaagaaaaggtggcttatttatactctggaatattttccaagagttgaaaaggatgaggat

SEQ ID NO: 82883 - DNA, 558 bp, Homo Sapiens
tttaacaagaggccccttgttttcgttttgtgttgggccccacaaattctatagctggtcctgcacacagcactaggctccacatctgtagaggcagaatgtttgaatataataagatcacaaaaccagagcagcatctggattctcttcagtgaattaggccaggcttcattcttgccgctttctaaacctccccatttaaaggacacaaataaattcaaatttagggctcagattttgtatctaaacagttaaacagactcatatgattctaatctacacaaaagggaaaaaaccaaagcatttcaaaagtttctgcagattttcctcaaggtttggattgccaattcatgaccaccatgaccagatgttacaatccatcaagacaaccaccaaaatggctgctgaacttgaagatggcacacagaaaacaaatgtaaagtgttaccctggagaaaactatctctaaccagactctccaaaggcaaaaaatgggcttttgttgtcctctggatcggtttggtttagcagtacaagggtaaaaataacccgcttaac

SEQ ID NO: 82884 - DNA, 454 bp, Homo Sapiens
ttgagcaggataagccaaatatattataaactcgtttatataacccctgttatcttgactcaacaagtaaggtgcaagtaggcacaatttaaacaaccacaagtagaattaatataactgcaagtctagtcaattaatacaaaggcacatgcagtccagggacccctgccccgtgatgctaacaactgaatccacactcacagatctgctgatctatggggtgggctgtgttgctaaaaccaaaaattgacatctcaaagagggagcaaattaacacgcaattgtgaagaaaaatccatcgttggttaatctagcaaaagtgcttcctctagtaaaattagtatctgaatgtcaagtaccaactcagaagttgagacaagcctttctaattctcatggaattacaaacaaattttttttattccacaaagaaataaagaaatacgaagtgcttc

SEQ ID NO: 82885 - DNA, 1073 bp, Homo Sapiens
cgcctgcaaacgcggtgggggctgctcggcggtcaggagcaggttaccctccgtctgcatgcccaccatcaagcaagagacagagcgacatgagagattggaccgcgggctgcactggagaatttactggtaggataattcatccctaaagagattgaagtgagcttcagaatggcaaaagaggagccccagagtatctcaagggacttgcaggaactgcagaagaagctgtctctgctgatagactccttccagaataactcaaaggtggtggcctttatgaagtctccagtgggtcagtacttggacagccatccgtttctggccttcaccttgctggtgttcattgtcatgtcggccgttcctgttggattcttcctgctcatcgtggtgcttaccaccctggctgctctgctgggggtcataatattggacaggattggtcatctctgtgggtggcttctcactgctctgcatcctctgtggtgtaagcttcgtatcactcgccatgtcgggaatgatgatagcatcttatgtagtggtctccagcctcatcagctgctggttttctcccaggccactgacacagcaaaacaccagttgtgactttctgccagccatgaagtctgcagacttcgaggggctttaccaggaatgagtgactgctcagaggccgggcttcttttcaagtactgctggatcatactcaccccttgggattatggcttagaagaagggggctgggtaggcaagcactccttggctgtgtcctctcgctttttcacttacttgtaggatcccgcagcagccaatttagggattgtgttgttcttgtgttggttcccatgtaaagaagcagcagagaaatgcgatggttcaacagctcgccctgccccaagtatgcagacttgaccttggcggggtcctgggcttctagagtctagcccgttgaccccaaagcctcagggcttatgtccaacggtcccattgggagcaacagtgattgtttatagttttttgttttcagaaatgagggcagctgttaattttttcactcatgtgaaacaaaatga

SEQ ID NO: 82886 - DNA, 904 bp, Homo Sapiens
  misc_feature (165)..(240): n is a, c, g, or t
  misc_feature (791)..(791): n is a, c, g, or t
  misc_feature (801)..(801): n is a, c, g, or t
  misc_feature (850)..(850): n is a, c, g, or t
cataatatcaaaggtcagtaacagtgttctttctttcttcaagcttatgtatacctttaaagataacttgcatgaattactttgattactttggtctcaattatttgtcaccccagttaaacatgaaaggttgcagtgcttcctgttcccttactggaagttagnnnnnnnnnnnnnnnnnnnnnnnnnnnnnnnnnnnnnnnnnnnnnnnnnnnnnnnnnnnnnnnnnnnnnnnnnnnnactcactcactcacagatttgctaatgccacagaaagggctcttttaacttaagataagtgaaaagtactaaaaaagattcaggtaattatcattcagcactttattgtaattcagaataaaatttatgatggcatatttgccctgcaaatgtcttaatgaagttgttctcaataaaaagctccttattgatttgagaaaaactcagtttacctgtgagttcaatgagctggatcactcacttggatttttgtgttgacattttattctgagggttgatgttacactatttaaggagtcatcaatgcaaacagtcacattaggtatgtcatcatctttagtcagtaaaaaccttgtaatgaggagtagtaaataaacaagagaacattagactttttggttaaataattggagatttaatttttaaaagatattccttactccatttgcctagggttgtaaatttggatttcaccattaagaaaaggtaaattggatataaatgaacgatctccaactttttgatgaagaggttttactatctctcactgngggaaaattngatgaaatatttgaactgtcacatatattaagaatactttatgatttanaccaatattctacaaatatcaaatgtcagtatcttgaaatcatctgcctctaac

SEQ ID NO: 82887 - DNA, 743 bp, Homo Sapiens
  misc_feature (471)..(546): n is a, c, g, or t
tttaggtctgtcatcttaatatatcatgcagtaaaaggaagaatctttttaaagtgacccacctttcatgctgctccagattgtcctgcttgtgctgatggtgtgattaggtgtagagaatttgcttaaatttaacttcaaagttcatcacacagcttaatgagtcacattgaaatactcagtaattgaactgcaaatcacttttagttacaaaaagagctaaagcatgtcagtggcatgatgcttgccaagccagatctaggcatctaggataattaaggtattttacgtatgcaatttactgccataatatcaaaggtcagtaacagtgttctttctttcttcaagcttatgtatacctttaaagataacttgcatgaattactttgattactttgggcctcaattatttgtcaccccagttaaacatgaaaggttgcagtgcttcctgttcccttactggaagttagnnnnnnnnnnnnnnnnnnnnnnnnnnnnnnnnnnnnnnnnnnnnnnnnnnnnnnnnnnnnnnnnnnnnnnnnnnnnactcactcactcacagatttgctaatgccacagaaagggcttttttaacttaagataagtgaaaagtactaaaaaagattcaggtaattatcattcagccctttattgtaattcagaataaaatttatgatggcatatttgccctgcaaatgttttaatgaagttgttttcaatacaaccctccttattgatttgag

SEQ ID NO: 82888 - DNA, 809 bp, Homo Sapiens
gggacctgccgtcgcccccgttcgaggttgaagccccgggcctaggactcgacccccagcatcccacggggcctctttcctttcccggctcattccgctgtcattttgacctggggttcccctccagcccctcgcctcgttcccttcccagcatcccagggccgaggtgagggaggggcgtgtgagaagtcgggccgaggcccgagggactgtttaggagccggttcccgtcggaatctggggttttaggagccctcgatcgccatggcgtcccagaagttagccaccaggactcagccatttccacctgaaaccagttttgcacctattgttttgattttgaactgtctttcgaggggaggagggagcccggcgtactggggagaatatgtggtgggaggtgggatgtgaggaggagctggctgggcttggtctcggcctcaggatgccccctgttaacccctgtaggataggggaaagaggtgcagcgagttgcaccttccctaaagggccagagattcgtttatagcttgcgaatctctgctttttcagcctcggtaaaggggtatcatttgtggttggtttggttcgtcccttaacaacattcttggtgaggaatccccaggtgaatctgccacggagtgaagcagcccacttgagctgttggctacccccggcccccgcaacgcccgttggcttttgtgacacgttacacgttagtgttggtagagcctagccgtcagaggtacctgtaccataagcatctctacgaaaggtgtgaattcctaaattagcttattctgttctta

SEQ ID NO: 82889 - DNA, 955 bp, Homo Sapiens
tgcggccgctctcccccctccccgacacacactcacaggccgggcattgatggtaatgtatgcgaggaaacagcagagactcagtgatggctgtcacgaccggaggggggactcgcagccttaccaggcacttaagtattcatcgaagagtcaccccagtagcggtgatcacagacatgaaaagatgcgagacgccggagatccttcaccaccaaataaaatgttgcggagatctgatagtcctgaaaacaaatacagtgacagcacaggtcacagtaaggccaaaaatgtgcatactcacagagttagagagagggatggtgggaccagttactctccacaagaaaattcacacaaccacagtgctcttcatagttcaaattcacattcttctaatccaagcaataacccaagcaaaacttcagatgcaccttatgattctgcagatgactggtctgagcatattagctcttctgggaaaaagtactactacaattgtcgaacagaagtttcacaatgggaaaaaccaaaagagtggcttgaaagagaacagagacaaataagaagcaaacaagatggcagtcaacagcttcccaaaagatagggattacagaagagaggtgatgcaagcaacagccactagtgggtttgccagtggaatggaagacaagcattccagtgatgccagtagtttgctcccacagaatattttgtctcaaacaagcagacacaatgacagagactacagactgccaagagcagagactcacagtagttctacgccagtacagcaccccatcaaaccagtggttcatccaactgctaccccaagcactgttccttctagtccatttacgctacagtctgatcaccagccaaagaaatcatttgatgctaatggagcatctactttatcaaaactgcctacacccacatcttctgtccctgcacagaa

SEQ ID NO: 82890 - DNA, 846 bp, Homo Sapiens
tgcgcccgctctcccccctccccgacacacactcacaggccgggcattgatggtaatgtatgcgaggaaacagcagagactcagtgatggctgtcacgaccggaggggggactcgcagccttaccaggggggtgatgttttacaggcacttaagtattcatcgaagagtcaccccagtagcggtgatcacagacatgaaaagatgcgagacgccggagatccttcaccaccaaataaaatgttgcggagatctgatagtcctgaaaacaaatacagtgacagcacacgtcacagtaaggccaaaaatgtgcatactcacagagttagagagagggatggtgggaccagttactctccacaagaaaattcacacaaccacagtgctcttcatagttcaaattcacattcttctaatccaagcaataacccaagcaaaacttcagatgcaccttatgattctgcagatgactggtctgagcatattagctcttctgggaaaaagtactactacaattgtcgaacagaagtttcacaatgggaaaaaccaaaagagtggcttgaaagagaacagagacaaaaagaagcaaacaagatggcagtcaacagcttcccaaaagatagggattacagaagagaggtgatgcaagcaacagccactagtgggtttgccagtggaaaatctacatcaggagacaaacccgtatcacattcttgcacaactccttccacgtcttctgcctctggactgaaccccacatctgcacccccaacatctgcttcagcggtccctgtttctcctgttccacagtcgccaatacctcccatcttcagaatccaaatcagggg

SEQ ID NO: 82891 - DNA, 627 bp, Homo Sapiens
aattatggcatcatctatttctttctcttgtctcataaatctaaaccatcaacctgcttatttttgtatactgtcacactgtgtattccctgcattgaatgcctgtctgttgacattatctgtaaaaattgtgggaagttttctgcaccctgaaatttctgttatgcggattaaatatccactatccatgtttttccaagtcttacagtagaaagggtaaatgcagccctcacagcagcctgttgttcgtcctgcaaatgtgtttccatcacattacacaaagcctctttgtcttcgtggttctaccctactaataagttttttaaaaaattatgtaatgtgtgtatatacaaatacctatatgtatgtgtgtacacatacagctgatatctgctgagattatgtatgcatgaactatagaattaacttgtaattttaagaaaataaattattttgtaaagataaatctcatgtttaagaaggggaattacaattgaatcatttagggatgcctcagcctaagcataatatggaaaaagccataaccaaaagtcattttagagtactgctaggttactcaacctatcatcacatttaattaaaatgtcagttagaaccatgaaaaaa

SEQ ID NO: 82892 - DNA, 555 bp, Homo Sapiens
agtggtacaattctgttttgatcctgtggtagctgtcacaactgtcactggatttcccatgttggtttgcaacattgcaggaagtatggacaattcatcgacaatctgcattgcgctgctatgattatccaactcctcactcttgcgcttcaatccacatcgctgggggccttctaggaaatgcaatctgtttcgccacgccccaatctgaggtgcctgcacgtgagcttgctgtgcctgagctgctatgacctttgtagcacctgcagtgtttttcaaaacaacagcacttgtctgcaatgaaaagttgtgtcctcgaggtctattaaatggtatctttgtctgaaaagcactacccttagtgggaggatgagaatttccaaagtttctaccattcacataggtccgtggatagtttctttcctggaatacacaactgcttggctctactttgagtttcttcacactacaaaaggcacttgactgagtttgataaacatatggtgggtagaccaagacttgtgaggccataccttcctagaggcccgcgctctc

SEQ ID NO: 82893 - DNA, 864 bp, Homo Sapiens
  misc_feature (854)..(854): n is a, c, g, or t
gcggccgcctgcacctctgtgcggagaccaaggatgatgccctagcatggaagacagcactgctggaggcaaactccaccccggtgcgcgtctacagcccgtaccaagactactacgaggtggtgccccccaatgcacacgaggccacgtatgtccgcagctactacggaccgccctacgcaggccctggcgtgacgcacgtgatagtgcgggaggatccctgctacagcgccggcgcccctctggccatgggcatgcttgcgggagccgccactggggcggcgctgggctcgctcatgtggtcgccctgctggttctgagccctgggactcggagcactgacccctgcgcttggattgctagactcctcttcctcctggaccccatcctctaccatccaagccctgtcccactttggccctatcctctccattagctccttccgggtttggaccattccccccactccctacccttaatccccacatgggaagaagctatcatcacaggtacaaacatcgcttgaagtcttcacatctaccactagacacccccaaaatctgttatagacatttatggatacatttcctctaaacacaacagggcacagcaaatacgacttcatttggcttcgagttccccaggcgctgtagacacaacatgaatcgggctctctgctctctccttagggagctcgagtcctggtggggagaacaggagtaaacaaggacttgacaaagctgaagagttatcagtcctttgacaaggacaggtggggcagggagcaagacaggtaggctggaagaacagttattggcaaagtttcagaccgtgaacgtcatggcatgtcccanggattaaatt

SEQ ID NO: 82894 - DNA, 332 bp, Homo Sapiens
  misc_feature (54)..(108): n is a, c, g, or t
  misc_feature (271)..(287): n is a, c, g, or t
ccgcggcgcgaccatccccgacggcgccgcgctccgaacaccgggccggccaannnnnnnnnnnnnnnnnnnnnnnnnnnnnnnnnnnnnnnnnnnnnnnnnnnnnnntgtctgcacctccgcttgccagaggccctcggtcagcgactggatgctcgccatcaaggtccagtggaagttcttcaagaggaaaggcgcccccgccccaggcttccgcgcccagcgctcgccacgctcagtgcccgttttaccaataaactgagcgaccccnnnnnnnnnnnnnnnnnctcgacctcgtgccgaaatcgccacccaggcctcgctacctagac

SEQ ID NO: 82895 - DNA, 464 bp, Homo Sapiens
gaagtgcaagagcacgctgagccccccggaggccagccccggacccccagccgcgcccagggcccgcaggaggctgggcagcggcccggacagggagctccgcaagccggaggagccggagaacggcgagcccacggctgcggccaccgccaggaggagcaagagggagaggcgcgaggaggacagggccccggcagagcaggtcccgcggagcccggtcatcaagatctcctacagcacgccccagggcaagggagaggtggtcaagatcccctcccgcgtgcacggctctctggagcccttccgtccccagcaggccccgcaggacgacggcagccaggaccccgaggtgctggacagagagtcccgggaccggccgtcctgcgcgccctcggcctccatccccaagttgaaactgacacggcctgtgccggccggcgcggacctgccgccccctaagatcc

SEQ ID NO: 82896 - DNA, 690 bp, Homo Sapiens
gaggtagtgacttgcttaattagtgacactcctaatttctactatggataatttcaaagtagaatcactctatgcttagagttttggcaccaatgctgtagggcagcagaatctattctcagtaaaataactgatggtgtattagatattctgtattggattttaccagcttgacttgtactgctcagatgctgtctttccccccccttagacgctgtaagtctcttgggaagagtaactattcttaaggtttttacagatacccaccttagttgtaaattggatagtttatatttctgggactttttaaatgaaaatgtggaatgttaagttacaaaagacttttcatcagaaaatttcaaacaaagtaaacatggcgttttatagtcctctaaaatctaggtgctcccacccaccaaaggcatatcctgcaaagggctgtgaactatcttggtgaactgtcttgggtcccctttccatgtatgttttcttgtcactgaaaacaaacaacgctgagtttatcaagaaaatttaaattgggggatcataataattccaaccaagtgacaactctgacatcaaggttattaggagctgtacatccaattcaagttttatttgctgctattctgggagaataaacttgtatatggagaataaactaataaacttgtatcgaggaaatccata

SEQ ID NO: 82897 - DNA, 1053 bp, Homo Sapiens
acctacggctaggtacgaggctgggtgttgaattccgcacgaggcagcaatgaatcgtgtcttgtgtgccccggcggccgggtgagctcctcaaggtctcggagggccgagggcagacaccggcgggcgggcggagcgcttactgctctctctcttccagggccgtccgggcgctgaggctcataggctgggcttcccgaagccttcatccgttgcccggttcccgggatcgggcccaccctgccgccgaggaagaggacgaccctgaccgccccattgagttttcctccagcaaagccaaccctcaccgctggtcggtgggccataccatgggaaagggacatcagcggccctggtggaaggtgctgcccctcagctgcttcctcgtggcgctgatcatctggtgctacctgagggaggagagcgaggcggaccagtggttgagacaggtgtggggagaggtgccagagcccagtgatcgttctgaggagcctgagactccagctgcctacagagcgagaacttgacggggtgcccgctggggctggcaggaagggagccgacagccgcccttcggatttgatgtcacgtttgcccgtgactgtcctggctatgcgtgcgtcctcagcactgaaggacttggctggtggatggggcacttggctatgctgattcgcgtgaaggcggagcagaatctcagcagatcggaaactgctcctcgcctggctcttgatgtccaaggattccatcggcaagacttctcagatccttggggaaggtttcagttgcactgtatgctgttggatttgccaagtctttgtataacataatcatgtttccaaagcacttctggtgacacttgtcatccagtgttagtttgcaggtaatttgctttctgagatagaatatctggcagaagtgtgaaactgtattgcatgctgcggcctgtgcaaggaacacttccacatgtgagttttacacaacaacaaatgaaaataaattttaattttataccccccccaacacatccctaaaagaacaaagcatggcggc

SEQ ID NO: 82898 - DNA, 477 bp, Homo Sapiens
acatggtagatgatgttgcctcccggccctgctcagaaagaatacaaaaagtgtacattcctttttctataatttaagaagtctggaatacagagtgtaacactgtgtactgctagcacccaaagtggaaaatcttaagcattcagattgtttagtcaaagaagaaaaccagaagggcagttgcctattgaggtgattttaaacctgtttatttgtaaggattaagtaccctaataggcttaaactatgatagaggtttaatacagaaaaaattgacaggtattataaattgtggatccagttacttgcttatttaatttgtaaagaggtaaaattagctctggttgagatatcaagtatggcaggtatttgagaaggctataaatcataattttcatttagttaaaatatggacctgattctgggaaaccctatcattccatctcaatgttttacaataaaataaaaactaaagtg

SEQ ID NO: 82899 - DNA, 444 bp, Homo Sapiens
tttactttaaaagtgcttctcggtatagaacaaagtaaatattacagttttgttcaacagcagccaagatttaattgtctgtgaaatataaggcttacgacctgagtcgagtccactactgttctgctgatacaaactaggctggcctacgaggtgaccgaacgcacccagcagctgatttacacagaagagccatctccaaagaattaaaagtgggccagggacagccacacgcctgcaggagtccatccaaagggctaggtgctttattctttctgcagcagatttaaagtgactttgtacaaaaagtcaaacaagaataaacagctgtggaaaatgtaacaaatcatgctagcagttgaacagcgagggagaagggaaatccagcaaaccgctaacatgcactgaagaaaagcgaaacggaggtagaagagagagggaagg

SEQ ID NO: 82900 - DNA, 1202 bp, Homo Sapiens
gtatcagccaccgtgcctggcctaataattggaacattttcatcatgaaaatgtcatcagctttgccaaaagaaacaaccaattgacttgtttggcgtttgttttccattttcatgtcaattttatgtatacagttagaatacccaaggagaccactaaaatcagttaaacaagtagggtatatacaaagaaagatgaaacccgaaagtacataaaaaggatttaaatccgattttagatgtacctagtgtgtatttcttatctctagacaagttcatgtttattgtttaatttatgcccaagtgaagttgtaaacttatggttcaactctgacacagaatttgtcacttgtctgaggtcagtggcaggtttctctgctgtcaagcactctgtgtcacccaccagattagtataactattaattcagactgtactcctatggtttaagataatttttacaagaagctggcttgaagcagcacattagtaacctgacaagatttctttttcccttttcagggggaaagggtcaccttaaaaataaattattttcagggactttgggaatctaatgataaatattacacataatctatgaatagcttaatcctttatatattccttaaaataggaattcctcgacatcactcctggccacactttccttgcctgtgttgttgctatgtgtatttgaaagtaatatctgcattccttttaagatgttctgtaagtcatatttgtcagttatacagagtagtcttccttttccccacgttcagtgtaatctcactgaacagtaataatagcaatagctaacaacatctgcacagcaccttacagtttgcaaagaacgttcacacattctcatttgagttttgcatagtgaacctgttacgagatgtctcttgacgtcgatgctaaaagtgttagaatctttacatcactagagtcattgaatatgctgtagtattgaatagtgccctgactagggggaggatttggatgtgctgcatttcaagccgtgtataatcatcaaaatggggggcttgagttctttagctacttgaatccgatttacttctgttaagtgatgcttttctaaccgttttctggatggattttgtattcactatattgtagcttgtaatttgtataaatgtaccatctgatgtcattaaaaaaagtgtttgtagtgctaaaac

SEQ ID NO: 82901 - DNA, 458 bp, Homo Sapiens
ctcatcaggttcagtttagatataattgtaactttcttttcataatgatttgagttgaaagtgtatataaatcatgagaactaccttgcatgtctttgaaaaagagttagtaagtcatgatatgccaatctcatcaactaaaacatgtttctaaaatatcatgttcatacagctgtgatgacagtgcttatcaatcctgtccccgccacaccaccaacatacacagaaaaaaagcaggcaatgagttggctccgggatgacctcgtatgaagatgtttcattccttagtcttggcaattgacatcacaaacttgggtacaagctacaaaattaaggtgagtggtaattctgtttcctgacaaaactgaaaaacagtcattagtcagctggcagcaccgtaaccctagttcttcagatgatctcctaacaagagaggcacggatgatgcactagacatg

SEQ ID NO: 82902 - DNA, 579 bp, Homo Sapiens
  misc_feature (17)..(17): n is a, c, g, or t
tgctctttctgcccctntgccgtccgattggtgatgttattcaaacaggaccggatccctgctaagtgcaggagggaccctgccgcttctttcatctcctcatcatcgctctcggggggcttttcggtgcgtctctttttgaggggcagtgtgtcgctggggaccttcctggccttggcgaagtgctggcgcttcttgtgctgggatgcgtacccgctgtcccccagagaatccttgggctccttctggctgtgcttcctgtcgtcctcttccgtgtcgctggggctctcgtggctccggaagctcccctcgctgccctcgctgccctcctggctccccttggtggcaaactcatagtggtcgtcggctgaggaggaggaggaggagatggagtcgctggtgggcgaggtgctccgggcgttggaggacttggcactgctgtagttgtgatcctccttggggtctccgctgaccactggggagccacaagatggctcactctcagtccgcatccggcagctggtgatgccattcctcatggccgctgtcaccccaatgggagtgattggcagcggccgc

SEQ ID NO: 82903 - DNA, 338 bp, Homo Sapiens
  misc_feature (11)..(11): n is a, c, g, or t
agcatctccanagctgatttcagaggacggtgtcaaaagatgggtgctcggctgctacatatcttctcaacactctggtgcctctaagggaaaagacggtcgtaggaagactttctgcctgcaggtacaatcccggcaaggtggctccaggtggctttcacagtcgtacgcgggtctcgctcgtcacttcgctgccctttgccatagctcagcacccgcatcgtagggaatcggaaaggcggctcctgccactgccgccgctgcccgcaggtcgctctgggtgggggaatcgctgcaatcgccccatgaaacccgcggctccgcgcccggggagcggg

SEQ ID NO: 82904 - DNA, 440 bp, Homo Sapiens
cactgggcagtgcggtttgaggctctgtacccctggcacccacagctcagccacagcaccctctagcttgggggactagtccagggccaaaatgggataacccttccccatataagcagtaggatggcgtcccccctggtggagagaggaaggaggcctagagggtgtggggcagcttcgaagcgcggggagccgggggtctccaagcaccttctcctggacatgccagccttgaatgggggatgtgcagggcttcaaacccacctggcaggagccctgtggcagggcagagggaccctgctccaaattctctgttggctgcgcttttgtatccaatgcttttcagagtgtattcactcacccacagaaatagagccctgtgctttaggggtgactgtcatatgccttattcttaataaaatctctgaaaaacaaaataa

SEQ ID NO: 82905 - DNA, 669 bp, Homo Sapiens
  misc_feature (59)..(59): n is a, c, g, or t
atttcacactggtatcttcctgccattcaacttgctttagggttgttggtgttgtgttntgaaagattgtgaagtcgaccttctaaaaatgagttcaaagaaaaatcagtaaagtaaatatcctcctgaaattgtaagtttcttggcaagtagaattttttgtattaacttctgttttaggttatctgcaaactcaagaattgagagaactagacagcataagctcagatttaaggaagataccatttttcatagatatggttttagctgtttttgaattgtgagtgttcagtagcaagcttttcaaagtttttgtaattgtggaaataatgtatgagaaatatttagacagcatctgtttctatttttagactgggctggcttagatgaagatgaagatgcacatgtctgggaggataattgggatgatgacaatgtagaggatgacttctctaatcagttacgagctgaactagagaaacatggttataagatggagacttcatagcatccagaagaagtgttgaagtaacctaaacttgacctgcttaatacattctagggcagagaacccaggatgggacactaaaaaaatgtgtttatttcattatctgcttggatttatttgtgtttttgtaacacaaaaaataaatgttttgatataatctt

SEQ ID NO: 82906 - DNA, 972 bp, Homo Sapiens
  misc_feature (80)..(114): n is a, c, g, or t
  misc_feature (659)..(661): n is a, c, g, or t
  misc_feature (663)..(664): n is a, c, g, or t
  misc_feature (667)..(668): n is a, c, g, or t
  misc_feature (677)..(677): n is a, c, g, or t
  misc_feature (680)..(680): n is a, c, g, or t
  misc_feature (682)..(683): n is a, c, g, or t
  misc_feature (687)..(718): n is a, c, g, or t
  misc_feature (726)..(726): n is a, c, g, or t
  misc_feature (730)..(735): n is a, c, g, or t
  misc_feature (737)..(793): n is a, c, g, or t
  misc_feature (795)..(795): n is a, c, g, or t
  misc_feature (799)..(803): n is a, c, g, or t
  misc_feature (807)..(807): n is a, c, g, or t
  misc_feature (809)..(809): n is a, c, g, or t
  misc_feature (811)..(813): n is a, c, g, or t
  misc_feature (815)..(815): n is a, c, g, or t
  misc_feature (818)..(832): n is a, c, g, or t
  misc_feature (838)..(838): n is a, c, g, or t
  misc_feature (840)..(859): n is a, c, g, or t
agaactaatacctcatatggcgcctcgctgttaagtcgaacgacgagcgcagcgagctattttagcgaggaagcggccgnnnnnnnnnnnnnnnnnnnnnnnnnnnnnnnnnnncagtcgacggtaccggacatatgcccgggaattcggccattacggccggggctctatggtagcgtcagcgtcggaggcggtagtgacggtggcgtttccttgaggaagagtgagggttccaacttttctgcttatctgggaggtgttgggcgcggacagtcgagatgtcagagaaaaagcagccggtagacttaggtctgttagaggaagacgacgagtttgaagagttccctgccgaagactgggctggcttagatgaagatgaagatgcacatgtctgggaggataattgggatgatgacaatgtagaggatgacttctctaatcagttacgagctgaactagagaaacatggttataagatggagacttcatagcatccagaagaagtgttgaagtaacctaaacttgacctgcttaatacattctagggcagagaacccaggatgggacactaaaaaaatgtgtttatttcattatctgcttggatttatttgtgtttttgtaacacaaaaaataaatgttttgatataaccaccaacgcnnnannccnncccccaccnccncnncccnnnnnnnnnnnnnnnnnnnnnnnnnnnnnnnnctcccaanaaannnnnnannnnnnnnnnnnnnnnnnnnnnnnnnnnnnnnnnnnnnnnnnnnnnnnnnnnnnnnnangggnnnnnaaananannnanaannnnnnnnnnnnnnntgttgntnnnnnnnnnnnnnnnnnnnnaaaaaattttttttaaaccaccctttcttttgtggcgcgccgcgcccacccccgaaacacaaagaaaaacaggggcacaatttgtttttctcccacagaagaaaccccgggac

SEQ ID NO: 82907 - DNA, 446 bp, Homo Sapiens
  misc_feature (225)..(251): n is a, c, g, or t
tttaccatgctatacacaattacgagatacagaactaggcttaatcacactataataagaaaactcacttttgaattgtgatgtttctgttaacggaaggacaatacgttactataatacttttagtgtaataacttttgtttgaattatgaaaaaatttgaatcatttccctctagaccatttcatttcaaacttatactttgtttagtctagccagttgaccnnnnnnnnnnnnnnnnnnnnnnnnnnnatactcggccagatgagatagagagagaatgctaacacaaggttcaatgtatgcagttctcggttgctctgttccatatgcccacacagtgtcatgacgtattggtgtacccctaaacagaacgccagatcagtccattcttactaggctgaagaaaattctctatcagagcatcaatgagtttcttcagttctt

SEQ ID NO: 82908 - DNA, 1160 bp, Homo Sapiens
gggtgctatagacgcacaaacgaccgcgagccacaaatcaagcacacatatcaaaaaacaaatgagctcttattttgtaaactcattttgcggtcgctatccaaatggcccggactaccagttgcataattatggagatcatagttccgtgagcgagcaattcagggactcggcgagcatgcactccggcaggtacggctacggctacaatggcatggatctcagcgtcggccgctcgggctccggccactttggctccggagagcgcgcccgcagctacgctgccagcgccagcgcggcgcccgccgagcccaggtacagccagccggccacgtccacgcactctcctcagcccgatccgctgccctgctccgccgtggccccctcgcccggcagcgacagccaccacggcgggaaaaactccctaagcaactccagcggcgcctcggccgacgccggcagcacccacatcagcagcagagagggggttggcacggcgtccggagccgaggaggacgcccctgccagcagcgagcaggcgagtgcgcagagcgagccgagcccggcgccgcccgcccaaccccagatctacccctggatgcgcaagctgcacataagtcatgacaacataggcggcccggaaggcaaaagggcccggacggcctacacgcgctaccagaccctggagctggagaaggagttccacttcaaccgttacctgacccgcagaaggaggattgaaatagcacatgctctttgcctctccgagagacaaattaaaatctggttccaaaaccggagaatgaagtggaaaaaagataataagctgaaaagcatgagcatggccgcggcaggaggggccttccgtccctgagtatctgagcgtttaaagtactgagcagtattagcggatcccgcgtagtgtcagtactaaggtgactttctgaaactcccttgtgttccttctgtgaagaagccctgttctcgttgccctaattcatcttttaatcatgagcctgtttattgccattatagcgcctgtataagtagatctgctttctgttcatctctttgtcctgaatggctttgtcttgaaaaaaaatagatgttttaacttatttatatgaagcaagctgtgttacttgaagtaactataacaa

SEQ ID NO: 82909 - DNA, 712 bp, Homo Sapiens
cccctaccccatccccagccaagaatttcttttcaagatatcgtcatcattcttaaacaacattcttaacccccagctggggtccccattttaatagatgtcattgcttcaagtctaacggcgccgggaggcctgtttgagggaaaacattagtttgaaaaatccccgttcccttcatccactgcccttgttctccacgtgggagtgtgcttgtggcccctcagaaagatagtctgctggctcctaggggttggggtgggggacacacctttttctcaggaagaggtgatggcaatgtaaaacatctaagcaaagttttaaatgaaaaaaaggaaacacatttaaacatcctgataatggagggaaggggggcacatttacacatagcccagaacttgtagaattctgcatagtgaatgtatattgaattagtctcctgccttatacattcaggaggaataaatttccataatgtaaggcaaatgcatggggttctgaggttcactttgcaagtgcccttgctgcctttcctctgtgtctattatggctctttaagttgacggttcctggagcagcttgtatttagtttcgtttggcagtctggccctgttgactttgatttgcagaccaattctcccttgacctgactcacagccgcctgctcttacccccctcctcaggaagtcttcctcattaaaggatgtgatgacgg

SEQ ID NO: 82910 - DNA, 1643 bp, Homo Sapiens
  misc_feature (957)..(967): n is a, c, g, or t
  misc_feature (1007)..(1019): n is a, c, g, or t
  misc_feature (1030)..(1048): n is a, c, g, or t
  misc_feature (1129)..(1140): n is a, c, g, or t
  misc_feature (1184)..(1242): n is a, c, g, or t
  misc_feature (1413)..(1433): n is a, c, g, or t
  misc_feature (1436)..(1444): n is a, c, g, or t
  misc_feature (1519)..(1519): n is a, c, g, or t
gggaagggggttattgttcctttggcttaaagccaaatgctgctcatagaatgatctttctctagtttcatttagaactgatttccgtgagacaatgacagaaaccctacctatctgataagattagcttgtctcagggtgggaagtgggagggcagggcaaagaaaggattagaccagaggatttaggatgcctccttctaagaaccagaagttctcattccccattatgaactgagctataatatggagctttcataaaaatgggatgcattgaggacagaactagtgatgggagtatgcgtacttctgatttggatgattaggtctttaatagtgttgagtggcacaaccttgtaaatgtgaaagtacaactcgtatttatctctgatgtgccgctggctgaactttgggttcatttggggtcaaagccagtttttcttttaaaattgaattcattctgatgcttggcccccatacccccaaccttgtccagtggagcccaacttctaaaggtcaatatatcatcctttggcatcccaactaacaataaagagtaggctataagggaagattgtcaatattttgtggtaagaaaagctacagtcattttttctttgcactttggatgctgaaatttttcccatggaacatagccacatctagatagatgtgagctttttcttctgttaaaattattcttaatgtctgtaaaaacgattttcttctgtagaatgtttgacttcgtattgacccttatctgtaaaacacctatttgggataatatttggaaaaaaagtaaatagctttttcaaaatgaaaaaaggaagggaacgcgaagaaagacacgaggaaggggggcaacggcacggggctggggccagcaaaccaaacaaccacaggaggcggggccatgccggaacgaggaagggggacaaggcaggacacagagacattnnnnnnnnnnntggcccctgggggacggatggcatggcaagacgtgggacnnnnnnnnnnnnnaggggcacccnnnnnnnnnnnnnnnnnnnggggcaggggaacaggaatgatgtcaacgacagagggagcggccacaaaggagagagaacacacgggtttggggctgcttnnnnnnnnnnnngtggaaagggaggggaaaccacacgggggacccaaacaataacnnnnnnnnnnnnnnnnnnnnnnnnnnnnnnnnnnnnnnnnnnnnnnnnnnnnnnnnnnncccaataatgcgggggccgctttcacccacacacccaagggggacacacaccccggggacacccaccggaaaataaatgggcacgggcggggccggggcaccatcacaggaggtgggaacaaaaaggagacaagggggggcacaaaccctgatgaggaggggtgttaactnnnnnnnnnnnnnnnnnnnnncannnnnnnnnaccaccctccgccgtgggtgcccgcgccattgtaaatgtagcgacaaggacggcaacaccacccgcgcgggttangccgggggggccacccaaaaaacatgtgggcaccacacacggaggggaacccaccacacgggcagggaaccccacaaccacagggtgaccccaaccgtgcaacccaagtggtgcgcaaaggcac

SEQ ID NO: 82911 - DNA, 891 bp, Homo Sapiens
tttttcacatttaacaaatatttattaacacaaaaatgaataaggcttggccccctgttcttaaatgctcagggcagaggggcaaacaatcacaaagctacaataaaatcacagtagaataagtactatcaccgaggtatggacaaagtactttggaggcacagtgagaggaataaagaggggaagagaggaacaattttctcatttatacctgcctagagcattcagggaagactccaaagaagtcatctgtgagttgggtcttgaaggaggagtaaaagccaccaggtgaatagtcaaagaaggagccctgcaggctggggctcagagatgtaggtaaggccaggtaagtaaggggttcagggaactaggcatgagtgacaaaaaaaggaaataaagagggaataaagaatgagcagaaggactgcaagcacaaacccattgctctactgtggaaattaaaggtcttgtttctccttggagggggaagagggaaaaaggaaggtgggaaggcctcagatatgggtccctgccacttcctcaatcaggccatggggctcaaataccaaagccagagcttcacagctgtgatctaacttctctaagccaccaaattatcaagagccccttttcagaagctaagaatttgtatgaataatgcagttctaaatgggaaagtccctaatgttttcatttttctcagatgaattgattctgcctaggaagtaatttgacttccttcaggatatgagatggggcatggaatctcaagaggggaaggtgggttagttagtgtttaggccttgcagccatttcacaattggatggtaagataatgattaaaatgtctatttccttttccaacgtatattgatatatcaacataaagct

SEQ ID NO: 82912 - DNA, 448 bp, Homo Sapiens
ttatggtaatataatgctgtctttaataaatctgattactgatagaaatgaaatacaatatttgtggcctggaaaataaacattattttaaagtgttccggtgatgagtttttatcaataaaatgtggctcccaaatccccaaagatatgaaaaattaacatcaaaaaatacattcacattcctagttgttagataagtattttgacatttccaaatataactggcatcaatttttacactctgtatttatggttaaaaattagaatgtactttgtaggttttcactgatttcatgtgattatttttctttttgaacagcaatctaaagtgtaaaggatttcaggatctaagtaatcataccagtgaatccaaagattatttctggctgtttttttaccacagtaaaatattatattcaacgtattttctctttacttacttcatcct

SEQ ID NO: 82913 - DNA, 815 bp, Homo Sapiens
  misc_feature (614)..(615): n is a, c, g, or t
  misc_feature (635)..(636): n is a, c, g, or t
ttggtgagccctaccacacccaccgggccgggggaccccttagacctcgtggcgctcgcagagcaggtgcagaaggctgatgaattcatccgagcaaatgccaccaacaagctgacagtcatagctgagcaaatccaacatttgcaagaacaagccaggaaggtactggaagatgctcacagagatgccaacctgcaccatgtagcttgtaatatagtgaaaaaacctggcaacatttactatctctataaacgggagagtggtcagcagtatttttccatcatttctccaaaggaatgggggacaagttgtccacatgacttccttggtgcctacaaactacagcatgacttgtcctggactccgtatgaggacattgagaagcaagatgctaaaatcagcatgatggacacgttgctaagccagtcagtggccctgcctccgtgcactgaacccaacttccagggactgactcactgagagtgggctttgacaaacagctctcacaggacctggctgtcaacctccttgttgcccccactgttgccttgagaattgaagacatgtaggtgactcacaaacttcttggaaagagaccctgtgtgaatgttccnncccattcccccaccccacanntcaaaacatggtcggccgccctccggcccccgaagaaagtttttctaaaaccatttcgttttggcgcggcggggcccccgtagggtaaaggggaacttgggtcataacgcgtgtttcccccaggaaaaaccctgggtcccttgaccaaggggccttggggaatcccctcccccaaatat

SEQ ID NO: 82914 - DNA, 461 bp, Homo Sapiens
tgaggacattgagaagcaagatgctaaaatcagcatgatggacacgttgctaagccagtcagtggccctgcctccgtgcactgaacccaacttccagggactgactcactgagagtgggctttgacaaacagctctcacaggacctggctgtcaacctccttgttgcccccactgttgccttgagaattgaagacatgtaggtgactcacaaacttcttggaaagagaccctgtgtgaatgtaaatgctgtcattatgacttttaattgggatgggaataatcattgagacagagtcactgtctttcgggatcctctttggaccacagatacccaagtcagtcagtttcagagtattggccagtgtactttccttcttcctctccatcacttcttcccttaagttaaagtgttagagaagaccttcttcccataaaaaggttggtggatagttttccagag

SEQ ID NO: 82915 - DNA, 508 bp, Homo Sapiens
atattcttgaagactggacaacaattaggaaggcaatggctacattggggccacacagagtgaaaacggaaccacctgtgaaactggaaaaacatctgcacagtgctagatctgaagagggaagactatattatgatggtgaatggtatatacgtggacaaacaatatgtattgataaaaaagatgaatgtcctacaagtgctgtaattacaacaattaaccatgatgaagtttggtttaagaggcctgatggaagcaaatctaagctttacatttcacagctacagaaaggaaaatattcaattaaacattcataatcatgatttaagtgttatctaaatttaccttattagtgttaccaaatgtaagtgccatgagagtaaaaaaatgtattcaataacttaatattctcactgaatcatgagagaatgtgtatttgtaggtagtactctaaatagatctcattgatatgttattaaaagaaacagtaataaaaattttatcacga

SEQ ID NO: 82916 - DNA, 710 bp, Homo Sapiens
cagtcgacggtaccggacatatgcccgggaattcggccattacggccggggggtgaggacagcctgccagagtctggtctctggacactatgggcacacgactcctcccagctctgtttcttgtcctcctggtattgggatttgaggtccaggggacccaacagccccagcaagatgagatgcctagcccgaccttcctcacccaggtgaaggaatctctctccagttactgggagtcagcaaagacagccgcccagaacctgtacgagaagacatacctgcccgctgtagatgagaaactcagggacttgtacagcaaaagcacagcagccatgagcacttacacaggcatttttactgaccaagttctttctgtgctgaagggagaggagtaacagccagaccccccatcagtggacaaggggagagtcccctactcccctgatcccccaggttcagactgagctcccccttcccagtagctcttgcatcctcctcccaactctagcctgaattcttttcaataaaaaatacaattcaagttgcttctcatggatggcactgcttttctgaggactcaagggccaagatggaggggctgactcagtccagccaacatttaatgagcacctactttatgtatggagctctaacccatgggtccatgggaataaagcagtgaatagtaacaataaataatcgtaacagca

SEQ ID NO: 82917 - DNA, 822 bp, Homo Sapiens
  misc_feature (764)..(779): n is a, c, g, or t
ttgtgtttcagtatcactttaattgcagtatttaaacacatcactttgtattcagaaaaaatatctacccaatactctcttctctggaaatttctatttccaaccgtcattgaaaccaggatccctgctcaacccctctggaaagaaatcaacagcaaacaaggacctgggtcacccacagaagaggcagctggtgataagggttaggagctgatctgggctatgaccatatgggggtgcagagcaaggaaggggctcagggtgagggaggcagagacagaaaagcatctgttgggggactgaggcaacagctcaacccaggagtcggcaggagggaggaggaagccatggagatcagaggataaggctaggatccagcctcagaggaagaggatttttcggaagagtacaggtgagaggctcagctccaagacctggtcccatggtcctgcctactttgatccagagggagaaaaaggagcccaaaaagagtttctgtgtggccccagagagactagaactgagctgtttgtcctaaaacttgggaggcctgttctaggctccagccagaaaactgtgcaggactctgcaaatggtagagggggcacatggagctcagtggaacttagagaacaaaggaggagctggtgaccaagtccacagtgtcttggaggagagatgagggaagtggttcaaggcaacacgtttttctggctatatcattacaagagagcaggtgcaaaaggttactttggtttcctcgnnnnnnnnnnnnnnnngaccgcgtatgcggccgcaaagcttattccctttagttgaggg

SEQ ID NO: 82918 - DNA, 1182 bp, Homo Sapiens
tacggcatgccgagtagtgtcttccactcgtgtgcgtctctctaggagccgcgcgggaaggatgctggtccgcaggggcgcagcgcgcagggcccaggatgccgcggggctggaccgcgctttgctatgctgagatttgctgccttctgggttcatgagatcttgacaacaacggatactgctaccccagagttacctacccagggaacattttcaaatgtttctacaaatgtatcctaccaagaaactacaacacctagtacccttggaagtaccagcctgcaccctgtgtctcaacatggcaatgaggccacaaacaaacatcacagaaacgacagtcaaattcacatctacctctgtgataacctcagtttatggaaacacaaactcttctgtccagtcacagacctctgtaatcagcacagtgttcaccaccccagaccaacgtttcaactccagagacaaccttgaagcctagcctgtcacctggaaatgtgtcagacctttgcaaacactagcacatagccatgacaacatctcccactaaagccctatacatcatcttctcctatcctaagtgacatcaaggcagaaatcaaatgttcaggcatcacgagaagtgacaattgactcagggcatctgcctggagcaaaataagacctccagctgtgcggagtttaagaaggacaggggagagggcctggccccgagtgctgtgctgggcgagggagcaggctgatgctgatgctggggccccagcgtatgctcccggtggtccttgcccagtctgagcgtgaggcctccagtgtctactgctgggtcttgcgcccactaggaacgggaaatttgcccagcaaacgtcccaagctttatgaaaaagcacccaatctgagcctgaaacaagctgggggaatccatagaatttcgctgagcaagattgttcgacaaggcatagcaagaaacttatttccccaagaagagcccctgattggcacctggagacccctcgggaagccctgctggatgtacttggggacttcacgtgggctatttctcctgagtatatcgtccagccatctgagagcccaccagaagaactgctggcgcacagcaacctcttaactcgggataccgggtgggcgacgtgatatcgactaggaacgtgtcacactccatagtgg

SEQ ID NO: 82919 - DNA, 352 bp, Homo Sapiens
  misc_feature (278)..(294): n is a, c, g, or t
gcagctctctctctcgggagagggaggggacttccgagaggaaaaggcctgcaagagcctttgggttaactgagaaagcacagcccggccaacgcttgggaagaaagacaggcaagcactggaaacaggagctattagggtgaggagagagccttgcctttcacagcacagtgaggatgacattgcaccagggacagagattgtatgtgacaaggctggggctccttctttcctagacaatcaaagtatcagtgatgggttttggttggtgattttgnnnnnnnnnnnnnnnnngtatgttatactagtgtatgctgtactgaattgaaataaaaccaaaatctgcatcttc

SEQ ID NO: 82920 - DNA, 1618 bp, Homo Sapiens
  misc_feature (500)..(512): n is a, c, g, or t
  misc_feature (712)..(858): n is a, c, g, or t
  misc_feature (901)..(955): n is a, c, g, or t
  misc_feature (1351)..(1407): n is a, c, g, or t
agaatatttaatacaatagtacaaatataagtacacaatgtaacaactatttacatagcattcacattgtatgaagtataagaaatctggaaatgatttaaagtatatgggaggatgtgtgtaagttgtatgcagatacagcgccattttataaaagggaattcaacatccttgggttttggtgtccttggcaaatggccagcaagggtgggggagtggtgtccagaaaccaatcccaaagcaagggacaaatatatacttctacagatgagatattaactcagaatccatgtctgcacacacatctttaatgacaagttgctgtatcactcaacagcggcactactatgatcttttacttacacttcagccagcagagacattcagcagtgtgagattttttaagtttttcagctattgtgtatgtttctagtgtataataaagtaacttatcctttaagatagttaagtagcttttcatttctagctttaaaacctgnnnnnnnnnnnnnccccagtagtggcatacctgcattaaaaaataatgccttaccaaaaaaagcactctgaatgattggtttcaaaatgatgccacaacataggtggcaccaacactattcaagatcattccattcccatctctaaaaaaatttttggctgggtatggtggctcacgcctattaactcaacattttgagaggcccaaagcaannnnnnnnnnnnnnnnnnnnnnnnnnnnnnnnnnnnnnnnnnnnnnnnnnnnnnnnnnnnnnnnnnnnnnnnnnnnnnnnnnnnnnnnnnnnnnnnnnnnnnnnnnnnnnnnnnnnnnnnnnnnnnnnnnnnnnnnnnnnnnnnnnntcttgaacccaggagtttcaggctgtagttcactatgatggcnnnnnnnnnnnnnnnnnnnnnnnnnnnnnnnnnnnnnnnnnnnnnnnnnnnnnnngaactaaattattctactgcagaacatgattaggtaaatatctccaaagcagaaagacaggtttcatattttcgttagtttgagtcagtccttccaaatcaaatcttgttttttattagtatacagatggtatagccagtaagtaaatgagaagcagtgtttttaagccgatccattcttaaatgaaaaaatatataaatattttagaataaatttattaaattctaaagttgtagaatttttaaatttgggtattttgggaaaatatttaaaccactattgcaaacaaaacaacaaaatgtacttatgtttatacttaggcacaaagaaaactacagtattttaaagtaaccattacacaatattgaggttgcaaagattactgaaggcataacnnnnnnnnnnnnnnnnnnnnnnnnnnnnnnnnnnnnnnnnnnnnnnnnnnnnnnnnncaagtatgcatacctaaacctacctaatgacaccttagaaaattcaagtatagcaccattcattaacatcaatgaggatgtcatcacacatcatgtagcctctgcacaccgtgagaataaatgaaaaagacaggcatcttgctatcatgacaatagttttgacctcgcagacctctctgtgcttacgcaacggataaagccataagaactg

SEQ ID NO: 82921 - DNA, 383 bp, Homo Sapiens
  misc_feature (216)..(268): n is a, c, g, or t
attagccaggttgctccttgagggcaggacagttcttatggctttatccgttgcgtaagcacagagaggtctgcgaggtcaaaactattgtcatgatagcaagatgcctgtctttttcatttattctcacggtgtgcagaggctacatgatgtgtgatgacatcctcattgatgttaatgaatggtgctatacttgaattttctaaggtgtcattnnnnnnnnnnnnnnnnnnnnnnnnnnnnnnnnnnnnnnnnnnnnnnnnnnnnnttctccacaaaactctcaagaaggacttgttgcaactggaaaagcaattaaatgtgaatcgtgatccaggagaaagtaacaactcacataactcccaaattaaaagttttccaaa

SEQ ID NO: 82922 - DNA, 546 bp, Homo Sapiens
  misc_feature (340)..(486): n is a, c, g, or t
  misc_feature (492)..(492): n is a, c, g, or t
cgggttcccaccgtctgaagggcgagacaagcccgacctgctacaggttgctccttgagggcaggacagttcttatggctttatccgttgcgtaagcacagagaggtctgcgaggtcaaaactattgtcatgatagcaagatgcctgtctttttcatttattctcacggtgtgcagaggctacatgatgtgtgatgacatcctcattgatgttaatgaatggtgctatacttgaattttctaaggtgtcattagataggttagaggtcttgctgtgttgcccaggctattcacagctgccatcatagtgaactacagcctgaaactcctgggttcaagannnnnnnnnnnnnnnnnnnnnnnnnnnnnnnnnnnnnnnnnnnnnnnnnnnnnnnnnnnnnnnnnnnnnnnnnnnnnnnnnnnnnnnnnnnnnnnnnnnnnnnnnnnnnnnnnnnnnnnnnnnnnnnnnnnnnnnnnnnnnnnnnnnttgctntgggcctctcaaaatgttgagttaataggcgtgagccaccatacccagccaaaa

SEQ ID NO: 82923 - DNA, 480 bp, Homo Sapiens
atctttggaaaacttttaatttgggagttatgtgagttgttactttctcctggatcacgattcacatttaattgcttttccagttgcaacaagtccttcttgagagttttgtggaaaatggtgcttcccctggaacaaagagtagttgaggtttttttgtggaactcatcatagtattgtttattttggagcctctggctgcaatcagtatagattttcagtatcctattagtattataatagtactcctcttaatactttctgatgtctccattgagaataaaaggacacaatacttttgaaagaagagttcacattagcagcacagccagcaatcctcatctggtttctctgatctcctaccccacacttcataatgaatgggaaataagatgtttatgaaggttttatatcctagactggcctttttaccactatcagaattcacagctgctttgtttatgggccgaacacaaaact

SEQ ID NO: 82924 - DNA, 1308 bp, Homo Sapiens
cctggagcccctgttaccaccacggagccggtgacagtgcaggagatcctgcaacggccacggcttcagctgcccaggcacctgcgccagaccattcagaagaaggtcggggagcctgtgaaccttctcatccctttccagggcaagccccggcctcaggtgacctggaccaaagaggggcagcccctggcaggcgaggaggtgagcatccgcaacagccccacagacaccatcctgttcatccgggccgctcgccgcgtgcattcaggcacttaccaggtgacggtgcgcattgagaacatggaggacaaggccacgctggtgctgcaggttgttgacaagccaagtcctccccaggatctccgggtgactgacgcctggggtcttaatgtggctctggagtggaagccaccccaggatgtcggcaacacggaactctgggggtacacagtgcagaaagccgacaagaagaccatggagtggttcaccgtcttggagcattaccgccgcacccactgcgtggtgccagagctcatcattggcaatggctactacttccgcgtcttcagccagaatatggttggctttagtgacagagcggcaccaccaaggagcccgtctttatccccagaccaggcatcacctatgagccacccaactataaggccctggacttctccgaaggccccaagcttcacccagcccctggtgaaccgctcggtcatcgcgggctacactgctatgctctgctgtgctgtccggggtagccccaagcccaagatttcctggttcaagaatggcctggacctgggagaagacgcccgcttccgcatgttcagcaagcagggagtgttgactctggagattagaaagccctgcccctttgacgggggcatctatgtctgcagggccaccaacttacagggcgaggcacggtgtgagtgccgcctggaggtgcgagtgcctcagtgaccaggctggctcctggggatggccaggtacaaccggatgccagccccgtgccaggagcctggagggaagttggggaaacccctccctactgttggatgtatgtgtgacaagtgtgtctcctgtgctgcgatgggggatcagcagggcagttgtcgggcagtcctgagtgggtgttgcacagactggtccacagggctcctgaaggaagcccctggatctttggggtaaaaggagggtggcctcaagaaacaatgtctggggacaggcctttctggcctgctatgtcttcccaatgtttattgggcaataaaagataagtgcagtcacagagaactc

SEQ ID NO: 82925 - DNA, 575 bp, Homo Sapiens
  misc_feature (228)..(240): n is a, c, g, or t
tttgctaaatggcactgaaaatccttaccgagtgtcactattcagtcccaagtgtttctgaccaaagaaaattatacaacaatatttataggctaactttaaagagatggttgacgttaatactgtacatattttacatgtcaaatacatagtccaagagtttataaaataaattcatgcatcattaccttattacctctaagaatatcatgtacaagatgggcactnnnnnnnnnnnnnagtacttatgacagcatttcaggtggaagcagtcttatatacaaaaacaatccagtttctctgctatgttaagtatataatttaaggaaatttcagagattactgaccaaaaaaatcttagtccattgaagatagaaagtgtcaatttgtgggatttaaaatgtttcctttataaaagaacacccagaatatgtaacctctgtacaaagaaaaaaatataaaaattctggatgatcatgtttgatcacactacgtacttgaaatgttgctggttaaaagtttttctgctttactcattcctttgacagcattaatttgtgaacatttatattcag

SEQ ID NO: 82926 - DNA, 471 bp, Homo Sapiens
tttttgagaacaaaatattttatttctctcacaaaactatagtttacagtagtatttactaaataaattatataatttctcttttacaagcaataaactagatcacaaatatttcaaagacaatgtatgtacacgacataaggccttttataaatagctttgcttttctcatttcactagtaaacagtgaaaaaatctttatagaagctagttttctataaagtgaaggcagacctagtatattgatctttaaatgaaaccaatttaaactttcaatgacatgaactataattttgcaaaagaatttatacttaatttaccatgtgtgtggatggatttttaaaaatatataagcagattacatatgttgcttatgtataatcactggatgcatgcacaatgaaataatgcaaaagtccataggaaaatagcacttccaactccaaaaaggtgattggcaatggtacagaa

SEQ ID NO: 82927 - DNA, 294 bp, Homo Sapiens
tagtaaccagagtacaacatgtatttgcagctcttttattctttagcctgagacttggagtatgtagtcaaaatactgtgttccaaagttacttaggttagttcctccccaaactccttctctcccaccttcagtgtgattatgttattatttttgaaatacagttaagtttatttgtttctgtttgtattccattttgggtctcccatgtccttgttgattgattgatttcaccatgtgcaaaattaacatgtttctaaaaatcagaactaagggtgaggtatagtgtctaat

SEQ ID NO: 82928 - DNA, 1178 bp, Homo Sapiens
  misc_feature (833)..(998): n is a, c, g, or t
tgtctcaataatataataatagttattatttaattgcaacatgaagttgtaagccattttctgttacttctttaaggagctaaatcttttatatttttgttttctctccccttgcgtttcatattttagcttatgatctaaatatatattttgtatattataatattttaggaatagcttaattaagaactcacagactttgacaaagtggtaactagacttttaattactagattcttcaaattaggcttaatgcctgctagcatgccaatccaatcccatgactgatgttattatacactatggcaaatacaaagttgtagtattatggttcttgatggtgtgatttacttatgtaaattatgtacaaatttaagttcaatgaaacactgatttaatgtactgaaaggtaaatagtaccatagtgaattattttctgtcttgccttaggtttatttttattatcttcaatattagaataaatgctaaattattttcatttaaggatttatgtagttgaatattatcatttagtaatatttaatcatttgaaataaaatttaaagctttaattgatctaatagagatggttttctacttttccactcttcctccctcttatgccttcacttttgttttctgtgcccagaattttcttcacattctttactacctgttttgtctattatatccaacccattttctttttattataattttgatttggggcatttgaagaaaatacagcaaaactacaagaactggtaataagcatgcataatctcacctacttagtgaacctaatataaacctaatataaagaaccaccgtannnnnnnnnnnnnnnnnnnnnnnnnnnnnnnnnnnnnnnnnnnnnnnnnnnnnnnnnnnnnnnnnnnnnnnnnnnnnnnnnnnnnnnnnnnnnnnnnnnnnnnnnnnnnnnnnnnnnnnnnnnnnnnnnnnnnnnnnnnnnnnnnnnnnnnnnnnnnnnnnnnnnncatattaatatttgagaagtaaaaaataaaactacaaggaggtattacatctttaccttatttgcaaaaatgaaatgatctaatgatactaagttttgggggatgatgtcagctcttacattgaaaacaatcactgtggaaaaatttgtccctcagtaaatttaaagataaacatgctca

SEQ ID NO: 82929 - DNA, 691 bp, Homo Sapiens
gggggggcgtgctgggatctttctctctgactatacttagtttgaaatggtgcaggcttagtcttaagcctccaaaggcctggatttgagcagctttagaaatgcaggttctagggcttctcccagccttcagaagccaactaactctgcagatggggctaggactgtgggcttttagcagcccacaggtgatcctaacatatcaggccatggactcaggacctgcccggtgatgctgttgatttctcaaaggtcttccaaaactcaacagagccagaagtagccgcccgctcagcggctcaggtgccagctctgttctgattcaccaggggtccgtcagtagtcattgccacccgcggggcacctccctggccacacgcctgttcccagcaagtgctgaaactcactagaccgtctgcctgtttcgaaatggggaaagccgtgcgtgcgcgttatttatttaagtgcgcctgtgtgcgcgggtgtgggagcacactttgcaaagccacagcgtttctggttttgggtgtacagtcttgtgtgcctggcgagaagaatattttctatttttttaagtcatttcatgtttctgtctggggaaggcaagttagttaagtatcactgatgtgggttgagaccagcactctgtgaaaccttgaaatgagaagtaaaggcagatgaaaagaaagaa

SEQ ID NO: 82930 - DNA, 850 bp, Homo Sapiens
  misc_feature (11)..(11): n is a, c, g, or t
  misc_feature (61)..(62): n is a, c, g, or t
  misc_feature (205)..(205): n is a, c, g, or t
attcggcacgngggcggaaggggtggtgtagggccgggcgaataatggcggcgtcgagganntggagctaaacctggtgcggctgctatcccgctgcgaggcgatggcagcggagaaacgggacccggacgagtggcgcctggagaagtacgtgggagccctagaggacatgttgcaggccctgaaggtccacgcgagcaaaccnggcctctgaggtgatcaatgaatattcctggaaggtgggattttctgaaggggatgctgaaagccgagaagctgacctcctcctcagagaaagcactggccaaccagttcctggcccctggccgtgtgccaaccacagccagagagcgagtgcccgccacaaagacggtgcatctgcagtcacgggcgcggtacaccagcgagatgcggagtgagctactaggcacggactctgcagagcctgagatggacgtaaggaagagaactggagtggcagggtcccagccagtgagtgagaagcagtcggcagctgagctagacctcgtcctgcagcgacatcagaacctccaggaaaagctggcggaagagatgctaggactggcccggagcctcaagaccaataccctggccgcccagagtgtcatcaagaaggacaaccagaccctgtcacactcactgaaaatggcggaccagaacctggagaaactgaagacggagtcagagcgtctggagcagcacacgcagaagtcagtcaactggctgctctgggccatgctcattatcgtctgcttcatcttcattagcatgatcctcttcattcgaatcatgcctaaactcaaataaagacccccgcccacctaaaaaa

SEQ ID NO: 82931 - DNA, 539 bp, Homo Sapiens
tttttttaggtaaaacaggatgtaaagtttatatacaagaatataatgtttatctgaaatatttacagtgttggttaaagcaatatttttacaacttttaaaggtaaactactatgtatattacaggtaagctacaatgggtttaatttgcaaaagttaagtaagaaatgttttaaacaaggcttaaagtactcaagtcaattataaaatttatatcttttgccttttacttgaagaaatcatgctatagaaatggttaatgtgcttctaataaatggaagtattgtagctggaatgtgatacatgtaacagtttaagttcccattgaaggtataaaatgatgaattgttgtaagacttagacactgagtctcagtctggagctgatgaagatgttgagataacagccagctttatctcaacagggtttgtgacccacaagtttgggccacagagaaaattgaagcaatttgcatgttatgacaacctcagtgggaagtgaaaatcagctgactcaaaacaacaaacaacaaccaacca

SEQ ID NO: 82932 - DNA, 610 bp, Homo Sapiens
  misc_feature (15)..(15): n is a, c, g, or t
  misc_feature (98)..(155): n is a, c, g, or t
tgttgctatgtcttntgtgtctagcagttgagagaatgatatgaccatcatatcactggattatgggaatgaatgcccttttcaaaataaacttattnnnnnnnnnnnnnnnnnnnnnnnnnnnnnnnnnnnnnnnnnnnnnnnnnnnnnnnnnnttgctgctttaacagaaaatgagccatttgtccccatgctcccaaattacaatgatttaaattaaaaaacttttgaaggattttcctaaatatattcttttttaaaggactaactttgtgcattcatataacaacaatttggaataatgtgaaaaatggaggcacataatttgggtggaaaatggcgattaaaaatatatataagaaaattattagccagtgtgtaacatatttaaataatgaccagaatatttcatgagtaccaactcttcccatagtaattttcctccaaaatgcaatagctcattccctcaactgcagacgctttgattttttttcaagttatagtgctgtagtgcttgtttatgtttaaaagtgcacattatgcagctcattttagtatgctacttctatgtttattttttgttcttctaataaaatgcataaacttcaaa

SEQ ID NO: 82933 - DNA, 437 bp, Homo Sapiens
ccaccaccatccgagcccctactcgccctacgtgggggcgccactgacgcctgcctggcccgccggacccttcgagaccccggtgctgcacagcctgcagagccgcgccggagccccgctcccggtgccccggggtcccagtgcagacctgctggaggacctgtccgagagccgcgagtgcgtgaactgcggctccatccagacgccgctgtggcggcgggacggcaccggccactacctgtgcaacgcctgcgggctctacagcaagatgaacggcctcagccggcccctcatcaagccgcagaagcgcgtgccttcatcacggcggcttggattgtcctgtgccaactgtcacaccacaactaccaccttatggcgcagaaacgccgagggtgaacccgtgtgcaatgcttgtggactctacatgaaactccatg

SEQ ID NO: 82934 - DNA, 476 bp, Homo Sapiens
gcggccgcggggaaggaagtcggccgaggggttggggacaaaaggccgggcggcgggctgggggtctcagggagggggcgggcgtgtgcggccggggccgggctacgcggaggacaaacagctggcgagtgtcagggtctggccgcctccccgctgcccacacgcacctacccgcgcccgggacgcgcattttccttctctcgccacgagttcacctgggactttgcaaataactgtgcggtgggagctgcgctccagccttgtcatttgctgagggtgggtggcggtgcccaaggaagtgaacttattttgttccttcacaaagactggaccaggcggtgcctttcacgcgaagaggttacgaccacggacacaacctcctttgatgcattgtgcgaggcagcacctcgggccccggacagtagtcatttcacagaaaatgcaccgccccgagtgtcttattgctgtgatgaatg

SEQ ID NO: 82935 - DNA, 486 bp, Homo Sapiens
gggccaaaatgtttcgaatttatagaaatagaaaagttgtaactttaaaagagaaaaaaaattacaaacacctgtttccaaaccttgacagaaaactactttgagtctacaaagaggaggcgacaagtccatcagcagaaagtcacctgtctacatagaccaaatggagcaccaaggccaagcggacagaggggccatgggttgtaggattgaggaacggaatctgccgactcacatgacagcccattctttctttctgggtgatctggggatcacgccttgcccaagtgtgagattacctttctgttccttgcagttcacctcactttccgtcctttgtagagcagtggtgtctccaatgaacttgtttcctggttttgcatcttgtgaaatgtttttttgtatttttgttgaaggttaaacatttgtataaattgtaaatatatttggtttattacagtaaaggctttagtaccaataaaaaaa

SEQ ID NO: 82936 - DNA, 595 bp, Homo Sapiens
ataattcagatgagactgagccatatctgcagtaagagaaatatttcttaatgttttggttacttatgatagagtacttttcttgatactgttaactttgtgctttttaaaaaaagtgattctctaacagacctcttaaattgtgacatgaaggtatgtaattagatttcagaaattggtttattagtgaggaatttttatcaataaatgtcatggggcgtgttcttcagaatatatagttattttcaacaaatgccaggctagattcctcacatgtggctatttcttatgtaagaagcttttaactgaagttggcatgtttcgtaaaacttgcgtgtcttttaaaaataataaaaggaagatgagtatttatgaagaatatgtgctgacaacagggcttatgaggtctatgtaccttaatctcgtttctccttaccacaatcttaaatagatttcagctgaaaataatcagttcttatgaaaacaaatagagaaatatcagtaagtcaaatctgtttgaattataattcctttcaaatagttttgctatttaatttatatgattaatgttttcattaaaatttttgataccaaa

SEQ ID NO: 82937 - DNA, 1027 bp, Homo Sapiens
  misc_feature (81)..(115): n is a, c, g, or t
  misc_feature (856)..(856): n is a, c, g, or t
aaaagaatgtaagatcactataggcgctactctccacaccgaacgacgagcgcaacgagtcagtgagcgaggaagcggcgnnnnnnnnnnnnnnnnnnnnnnnnnnnnnnnnnnncagtcgacggtaccggacatatgcccgggaattcggccattacggccgggcacatccggtgtggtcgacgggtcctccaagagtttggggcgcggaccggagtaccttgcgtgcagttatgtcggcgtcggtagtgtctgtcatttcgcggttcttagaagagtacttgagctccactccgcagcgtctgaagttgctggacgcgtacctgctgtatatactgctgaccggggcgctgcagttcggttactgtctcctcgtggggaccttccccttcaactcttttctctcgggcttcatctcttgtgtggggagtttcatcctagcggtttgcctgagaatacagatcaacccacagaacaaagcggatttccaaggcatctccccagagcgagcctttgctgattttctctttgccagcaccatcctgcaccttgttgtcatgaactttgttggctgaatcattctcatttacttaattgaggagtaggagactaaaagaatgttcactctttgaatttcctggataagagttctggagatggcagcttattggacacatggattttcttcagatttgcacttactgctagctctgctttttatgcaggagaaaagcccagagttcactgtgtgtcagaacaactttctaacaaacatttattaatccagcctctgcctttcattaaatgtaaccttttgccttccaaattaaagaactccatgccactcctcaaaaancaaacaacctgcagccagacaaatactcccccccaggcgcccttttgcgaagcaacagtatagataaggtatatttaaaatgtgttggggcccgcccttgggcccccccgaaaaaagttttctataaacacaatttctttttgggggcccgcggggccccctaataaggat

SEQ ID NO: 82938 - DNA, 451 bp, Homo Sapiens
  misc_feature (23)..(23): n is a, c, g, or t
  misc_feature (31)..(31): n is a, c, g, or t
  misc_feature (42)..(90): n is a, c, g, or t
cgggcactttcctagataattgnctggctgncctcaaaaggnnnnnnnnnnnnnnnnnnnnnnnnnnnnnnnnnnnnnnnnnnnnnnnnngctctccagcatgtctcggaagtgggtggcaacacgacccaggtgggagccgtcccagaagacctttccacagcccgtgcagcagtagaagcaccgcagcccaggtgtcctcagcacacccaccgggacccctgccagctgcagccgggtgccgtcggccagcatgtccggtgtctccgcccgcaggtcagccatctgcagccagcggcaggggcggtcataggtgcagccctcaagggctgcgtctggggctgggcctggctcctgcaccgcctggctctgggtggcctcgtcacctgtcagtcaaggaagagagctggtccgggactgtcctagggatggggcttggcagccagcgggg

SEQ ID NO: 82939 - DNA, 928 bp, Homo Sapiens
gcccatgcagcaggccaaggctgtgctcaagcatttcaacgtgcgtgtcacccacgcagacatcttcagccgctgccaggcctgtaactgtgaccagttacctaaaggtctccagggacatgatgaagcagctcatgtggctcagcatgtcaccaggaggggcccaggagctcagtgtgacgaggccacccagagccaggcggtgcaggagccaggcccagccccagacgcagcccctgagggctgcacctatgaccgcccctgccgctggctgcagatggctgacctgcgggcggagacaccggacattgctggccgacggcaccctggctgcagctggcagggtgtccctggtgggtgtgctgaggacacctgggctgcggtgcttctactgctgcacgtggctgtggaaaggtcttctgggacggctcccacctgggtcgtgttgccacccacattccgagacatgctggagagcgcccccagcgccctgcgagcctgagcccagcccccagacccggccagcagtcccttctgaggacaggcagtacaataaatcagtggaaagtgcccgactgctgggcccatggtccgtgaaagcatacctgataccgaaccaaccatggagcgtgggacttcatatgtgaggccagtacttcatctacggaatcttcctgaacaaccgtgggtggtctgccgcagggagtaccctgttgggggaccaggtcaattgcagaacgactcatcactggttagaacagcagaaggaactgctcttcagtgggactttaattgcattgaaaagtgggctgcacattgatacattcataactaacgctggtgtgagcaactacgcacctgggacaggcacatagagacagacacacaacttggagggggggcagacaaagctgggatacgtccagag

SEQ ID NO: 82940 - DNA, 514 bp, Homo Sapiens
ttggaaaaataccactttacacccagtgctacgtttgataagtcatagagaagcatgcacgcataaagtgaatggaaacagaaacgtttaaagattataagaacaattcaaataggaggaaaaacaaactgcaggaaactggataggaagttataaaaggaatgggagaaggaaaggcccagctcttctgtaaattagaatcctcaactaaaatagcaaatgagattgaagaaatttttattcagtggcccccaatggatcagtgttcatataggtacaggccaagtgttaactatgttataattgccatagaagtgtgtgtcaggagctgaattttactccaggatgacgttgttgaccacatttgtagctgtagtccgggaattggtttgaaaggaaattggcattttcatgttgccaaaaatcagatatggctattttgtttatataccgtaccttaaaatattaactgctttttagaaaccaataaaaagtcttgtgaaatgttaaaaaa

SEQ ID NO: 82941 - DNA, 420 bp, Homo Sapiens
  misc_feature (369)..(369): n is a, c, g, or t
cattcaccagatatatttgaagtctaagctctttgagctatacacgtgcacaaatgattcagttgggggaaatcttccccttccccttcattgttaaagttttcaaacttaaaatagtgctaaagagatttgcataatgtgcgtcatggaaatgctgaggcgattctgactttcacagtgctaggaggttcccttgcaacacttcaaggagtctttccatttcttatcgttctcctaggaaaagcccctcttttcccccctccccaaacccaacctagtgaaagaattacttgatctgagacaggttaacattgacacagagcaataagttttactaagactaactccagaggccatacacttcattgngtttcttttatgactacacagaatggtcatttcaacttttactaagttgtt

SEQ ID NO: 82942 - DNA, 624 bp, Homo Sapiens
ggtatttctatgatatcacagtaaccaattaaatactatctgtaactttacatatcttgcttgaataactaaccctgggcccaggcagtgagcaaccccttgtatcttcacaggtctttgccccgtgttatgattcctcatgggtccttgctgactgtccccctgagagtagctggcacgtgggtaacacagaaatttctgtagtgaagcttgggcctcaaagggttctcttaggccacctagtccaagcctccccaaacctggctgaacttttaagaatacagatgcgtgagccccgctcagaattatggaatccaaaaccaccaggaacggggaggaggtggagcccagaagctgtatttaaactagttctgggaattctgggtataagtcacatctgggaatcacgggcaaggtccagtgtgttggttttataaatgagtgcacagagaccacccatgagggtgagtgagtgagtgaccaggggccacgcagctcgctagactgtcagatgagacgtgatgacttcccgctggggagctgttctccgtatcaggtgaacgctgtttctgaataattccgtctttcctcatgggaaaccttcttgaattctaaaacgttaca

SEQ ID NO: 82943 - DNA, 907 bp, Homo Sapiens
gcggccgccgagcccagctccgccgccgagcgcctgtgccggcacggctacaccatggagcgcccggataaggcggcgctgaacgcactgcagcctcctgagttcagaaatgaaagctcattagcatctacactgaagacgctcctgttcttcacagctttaatgatcactgttcctattgggttatatttcacaactaaatcttacatatttgaaggcgcccttgggatgtccaatagggacagctatttttacgctgctattgttgcagtggtcgccgtccatgtggtgctggccctctttgtgtatgtggcctggaatgaaggctcacgacagtggcgtgaaggcaaacaggattaaagtgaacatcacctttttatagcattaaattcattttttaaaatgataaatgctggagggggccatctgatttgaataaagttgaaagaacatgttacaaaaattcaggaggacttgaaggtgactccttgtcgggccggcctcggccctccaaaaaacttttcaaaaccatttcttttggcgccgcgggcccccaataggtaagggaaacctgggtcataacttgttttcccaggaagaaccccgggtcatgaactaagggctttggaatcccccacccaataaaaaaaccccccggggggcaaaccgaaccgtttctgaaaccaatcccgaatgggaatttttgaagggcccttcccggggaaccttaccaccggggaatcccccagccgaagctccgatattcacaaataaacgccccccgcccctgggccaaatccatccggaagagaacggggggggaaacttctttctaggccattttttggccgcacccggggaaaacctctttcccaaaaacaggggatcgtaagtgaaaccctggaaa

SEQ ID NO: 82944 - DNA, 1481 bp, Homo Sapiens
  misc_feature (817)..(817): n is a, c, g, or t
  misc_feature (819)..(821): n is a, c, g, or t
  misc_feature (823)..(823): n is a, c, g, or t
  misc_feature (826)..(826): n is a, c, g, or t
  misc_feature (828)..(843): n is a, c, g, or t
  misc_feature (1224)..(1244): n is a, c, g, or t
cagtcgacggtaccggacatatgcccgggaattcggccattacggccggggtccttgggtgcgcgcgcagctttctgtgcgccagttcacactccgggtcagagttcctggcccggtgcacctgagaggtcgctctccgactcccgcgctggaccctcttgcgccattgaaccccctgatccgggggcctcggaccccagggctcaggaggactgaaccaagacttacccgaagttgccgcggggccttccgatcccctaggccattgcccaagtctggccaggctgatgggaccagcgaggagtctctgcaccttgacattcagaaactgaaggagaagagggacatgctggacaaggagatctcccagttcgtatctgaaggctacagtgtggatgaactggaggaccacattacccagcttcacgagtacaatgacatcaaggatgtggggcagatgctgatgggcaaactagctgtgatccgaggtgtcaccaccaaagagttgtatccagagtttgggctggacatgaatgactgagcaggctcatcgccccttgtccacagctcccagggacagaagggtgtggacatgataaacactgagagcccaaccagcacacctacagagtttccagcgagacaatgccagaagcacttttctagagagcccaagcccaatcaggaggaggctagagaagaggcgggcagggaggaaggggcgttcccagctccaaggttcctgaaatgtcgcagtgatacttgtgtaggggtacatgtactttatttgtcaataaacgtatctgtacactggaanannnanaangnnnnnnnnnnnnnnnnccttgtcgggcccgcctccggccctccgagaaagcttttctaggacacattcgtttttggcgcggcggggccccagttagggtaaagttgaaccatgggtccataggctggtttttccttaaggaagaatcctggggcccttggacataggtggccttgggaattccctcaccccaattaaaaaaaacacgcccccggggcggggccaaacaccgaaaggcgtttttctgtgaaacaaaaaatctccaaagtagggggaagttttcctttgaaagggctccaatattaaccccggggaagatctttatttccccaaccaggggaatagtttccccaaaggcggggaaagctctccggagaatagatctcaaaatattttannnnnnnnnnnnnnnnnnnnngttggcgccacctttctatttcggcgaaagtaaaactgggggttggggcaaaaattttccaattttataagggcgattttcctcttgcccggaaacaattgtgggaaaagccccctttcttccgcaaaaaaccggggtctattggagatgtgaaaaaccctttgaaaaattccgcccaccaagggggggatatatacaacgccacacaccttggggttcgcagcccttgtggggccg

SEQ ID NO: 82945 - DNA, 729 bp, Homo Sapiens
gactgcgtgcctcaagccgacgcagcggcctactctcgcactgcagacggggaaactgaggcccgaggcggccggggtggggcagacctcccggcgagcccgagcccccgcccccggctagccccgccctggcccgtaagaagcacccggggcgcgaggcgaaggcgcacagcgcggggccaggctgggtccagcagcgcgatggcagctcagcggctgggcaagcgcgtgctgagcaagctgcagtctccatcgcgggcccgcgggccagggggcagtcccggggggctgcagaagcggcacgcgcgcgtcaccgtcaagtatgaccggcgggagctgcagcggcggctggacgtggagaagtggatcgacgggcgcctggaggagctgtaccgcggcatggaggcagacatgcccgatgagatcaacattgatgaattgttggagttagagagtgaagaggagagaagccggaaaatccagggactcctgaagtcatgtgggaaacctgtcgaggacttcatccaggagctgctggcaaagcttcaaggcctccacaggcagcccggcctccgccagccaagcccctcccacgacggcagcctcagccccctccaggaccgggcccggactgctcacccctgaccctcttgcactctccctgccccccggacgccgcccagcttgcttgtgtataagttgtatttaatggttctgtaacaataaaaa

SEQ ID NO: 82946 - DNA, 663 bp, Homo Sapiens
caaacatcattgcaacaaagaagtgcctgtatttagatcaaaggcaagactttctatgtgtttgttttgcataataatatgaatataatttaagtctatcaatagtcaaaacataaacaaaagctaattaactggcactgttgtcacctgagactaagtggatgttgttggctgacatacaggctcagccagcagagaaagaattctgaattccccttgctgaactgaactattctgttacatatggttgacaaatctgtgtgttatttcttttctacctaccatatttaaatttatgagtatcaaccgaggacatagtcaaaccttcgatgatgaacattcctgattttttgcctgattattctctgttgagctctacttgtggtcattcaagattttatgatgttgaaaggaaaagtgaatatgacctttaaaaattgtattttgggtgatgatagtctcaccactataaaactgtcaattattgcctaatgttaaagatatccatcattgtgattaattaaacctataatgagtattcttaatggagaattcttaatggatggattatcccctgatcttttctttaaaatttctctgcacacacaggacttctcattttccaataaaagggtgtactctgccccaatttctagggaaaaa

SEQ ID NO: 82947 - DNA, 541 bp, Homo Sapiens
tgcggccgctgcaggagctgtgccgccagcgcatcgtggccaccgtgggccgcgagaacctggctcgcatccccctcaaccccgtcctccgcgactacctgagctccttccccttccagatttgaccggcagcgcccgccgtgcacgcagcattaactgggatgccgtgttattttgttattacttgcctggaaccatgtgggtaccctccccggcctgggttggagggagcggatgggtgtaggggcgaggcgcctcccgccctcggctggagacgaggccgcagaccccttctcacctcttgagggggtcctccccctcctggtgctccctctgggtccccctggttgttgtagcagcttaactgtatctggagccaggacctgaactcgcacctcctacctcttcatgtttacatatacccagtatctttgcacaaaccaggggttgggggagggtctctggctttatttttctgctgtgcagaatcctattttatattttttaaagtcagtttaggtaataaactttattatgaaag

SEQ ID NO: 82948 - DNA, 1951 bp, Homo Sapiens
  misc_feature (824)..(824): n is a, c, g, or t
  misc_feature (1062)..(1062): n is a, c, g, or t
aaaactcctcaagttgttcaacagcaaacacccgtggccagcatccagcaagttgcctctgcttcccagcaggcttctccacagactgtggcgctcacgcaggcgacggcggccgggcagcaggtgcagatgatccctgcagtgaccgcgactgcccaggtggttcagcagaaactcattcagcagcaggtggtgaccacggcgtcggccccgctccagactccaggcgctcccaacccagcccaggtgcccgccagctccgacagcccaagccagcagcccaagttacagatgagggtccctgctgtcaggctaaagacacctactaagcctccgtgccagtagtcagggcagcagggctgcctctcatctaaagcaaaactaccttcctcacagaaaacgctttattagtgaaccttgggaccatgtcacgcaagagattcagcactgggaaaagatataattgaaacaaaatagtgtaatcattttattaaaatgcatcccacactgcaggacaaatggtccttatggagtgccgcgttctctgtactacgtggctcatggaaaaagtgacaacatggcttcctctaaatcatttcacctttcagtccccacccgcacccgtcccctagagccatagtactgtgttctgaaagccatttagaatttctttgtgagcatgtagtgctttgcacgccacagaagccgtctgccgtgtgtgaggagcatacaatggactttctaaagataaggcgtgggcttccacagtgtctgccagagtttagttctttataccttactgaaaaatgcctcgtggtcttcgncagagggggaaggcctgtctaaagtcaatcatccgagatgggttttccattccaaagaaaggcaatatggttccttccttccctcctaaaatataacttaacttttaagagaaatgttctgacacccacctaaacacacaaggcacgttcctggcctgtgttcaagggaaatgatcagtcattgcattgttattccaaagagcagccaacagtggcctcccccaggccctaccctgcnaatggggattcgctttcatttaatggaaaacttctgggactgatgcccaactcagtgcactcaagacgcatctccagttttcgggggaagctggtatttgacatagtgtgttaaacagctcctgagaacctttgggacactctgccatggctggcgtgaggcccagaggaccacgcagaggcaatggtagtacagatgtcacagctgagggtacgatgaggcctgggctcagtgagccaggacgaatgtgacagacaccccttgctgccacagtcagccctttgacgaaggtgggctggtgattctggaagtattggctatagcggtgggcccagtcaactcttccttgtggacttacgacagcagattttctctaggataagcttgtgtggttctgccagtgaagcagagaaccacctgtgctgttgtggaaggcgtgccgttgagggggaaaacgaagcccagtatttgctactgtttttcctttttttactatgacaggaaaataaatgcaattttagtggaattgattgacagtgtctccttactttgaagttggcaacaaagccaagacggtcatatccaataattatccttggctggggtgaattgggccatgtacattcttggtcccggaaatagtcattagcggtctgggctacaaaaaccgtgtggccccacagatgctggcgtacctggacttaccgggtctcccaatcttcctttgactgtgcagcgtctggtccagctttgtggacgacgaccgtctgcaactagggcgcgtacccgaaaggagcaaaaccgcaaacaaatttgtcacaggcagtcgtaccactgagcaagcaggggatacagatactacagacaattgtatgtcaataatatacgg

SEQ ID NO: 82949 - DNA, 981 bp, Homo Sapiens
  misc_feature (63)..(97): n is a, c, g, or t
acaaatggcgctgcctgcgtagcgaacgacgagcgcagcgagtagtgagcgaggaagcggcgnnnnnnnnnnnnnnnnnnnnnnnnnnnnnnnnnnncagtcgacggtaccggacatatgcccgggaattcggccattacggccggggacagcaccctcctgaaaactgcagcttccttctcaccttgaagaataatcctagaaaactcacaaaatgtgtgatgcttttgtaggtacctggaaacttgtctccagtgaaaactttgatgattatatgaaagaagtaggagtgggctttgccaccaggaaagtggctggcatggccaaacctaacatgatcatcagtgtgaatggggatgtgatcaccattaaatctgaaagtacctttaaaaatactgagatttccttcatactgggccaggaatttgacgaagtcactgcagatgacaggaaagtcaagagcaccataaccttagatgggggtgtcctggtacatgtgcagaaatgggatggaaaatcaaccaccataaagagaaaacgagaggatgataaactggtggtggaatgcgtcatgaaaggcgtcacttccacgagagtttatgagagagcataagccaagggacgttgacctggactgaagttcgcattgaactctacaacattctgtgggatatattgttcaaaaagatattgttgttttccatgatttagcaagcaactaattttctcccaagctgattttattcaatatggttacgttggttaaataaactttttttagatttagaaggtgatgtaatgatgtattcattgtgcttatgatgtattcttagtcataactgagtgaaggaaatgggaaatttgcattatttctttgttctgatatgaataataacatatttcataataattcaaggtaaaaagggatatctatggattccctaggtaggaaataacaagtatgtaccattacttgaatat

SEQ ID NO: 82950 - DNA, 626 bp, Homo Sapiens
ccggctttctaggtgcgcggggctgtcgtgttccagtccgtgttccccgtcgctggagtgcagcttaagtgcgaatcatttcttggaaagtttagagataattttgtcaactacccacaatatgtatgtgtggactagattactttcttatttcaggatctaaaggcaaaatggaaaaacgtcacattttgtggttattaccagggactgaagtgagttgcccggtggcccctggtggctttagctcccctggtcacctgaagggctgcagtgacccctcctggccagcagaggtattggcccagccaggctgggggaggctgaaactgcttcccttctctgcagccacaaagggctggattccttgggcgccaggaggggaggatttttcttttccctccgatagccctactgggcgctaagattgttgtgaatcattaccctcagaatttggactttctagatgcttcttaacccatgatttaggtgagtaaacttggaaaaatgtttttgcaaaacttgatgatcaagctgaacgtagaacgatattcctaatgggtgtgtttgcctttttcccccttttgagacatggtctcactctgtcacccaggctggagtgagtggca

SEQ ID NO: 82951 - DNA, 1145 bp, Homo Sapiens
  misc_feature (590)..(620): n is a, c, g, or t
ggtgcgcggggctgtcgtgttccagtccgtgttccccgtcgctggagtgcagcttaagtgcgaatcatttcttggtctccatgcggtccacaggaatggccttgatgaagatgacaggcatggccggggtcagctctttcagccgcgcttcagcgatgactccagtctgggtgtcccagcgagcccctgcagggacagtatggctgagggtcaggtgtgctgccagtaagtgagggaggggctggcaggaagggtggggtcctcacactccccgccctctgcagagctgggctctaccccaaaaggcttcaggccagctgccacagctggaagcagaggccttcgtaggtgatggcctgcatgttgtaactaccccgtcccgctgggctcaaggaacagctcagctaaagccctcgggttccatccgtttaaatctgtggcattttcagagcctcatctgtcagccttaatgtcagtggcaggaagtcataactccagctaaaaattacagagtaaagttccctgattcttaatgtgtaatgtctgccctatgtgtacatacacaatataattatacatctgtgcatatnnnnnnnnnnnnnnnnnnnnnnnnnnnnnnngggggggcgcggcccaaaaattctcccccgggggggcccaagtttccgccggataccccgagcttcctctggttcccaaaggggcccccatatgaggaggagccgaaattaaataagccaaggacagcgggccgcgcaagcgatactaacaagcgcccgcgaacgtgggcaaaacgcggccgacagcccgggggaaccccggggaaaaggaaccactatactgtcgtggggggggtgggccaccacatatgtgggggacacaaaagttacccccttcaacagaagaatttttaaaagagcgtccctaaggggggcacactttatatacaaacacttttctcacagcggtgtgtatctatccgcggtgttgaaaacaccttcagcccgtggcatatatgtgcccgtaggccagcggccttgagaaagaaagattcgtgagcgcctaccccgggcgttgagtgaactctcctgctgaaaccactcttttcattcacccccgggaagccctcgcgtggaacaacccgg

SEQ ID NO: 82952 - DNA, 795 bp, Homo Sapiens
ggatagtagtagattgagatggaatattttccagcctcatcctggctgccctctagactccagtcctccaagccctcagcctagtgggtgtcatggatggatcctgggcggtagtcagacacggcttaccctgtgccagggagcgggcagaatgggcctgcagcttccctgcagaggaagcaggactgggtaagcagagccgggaaggtgggtggcccattacagcgggggttccccagggtgtcctctggcagggctgtgactgctgcaagctctgccttcaccagtagctggtgccaggacagagctctgggacagcaggcagaggccgagcctgggccacagctcagccactgacttgggtatcagtttccccttctgagaagtacagagtgagacttaaagaacccctagatccccaccagttcaacactccattaactgggaagcccagagtcctgtccggcctgccaagttcatcctggtggacagcgggaggcctccgctaactgttctcttcttttccttattaataaaacacacaatgcctagctggggggtcggaaggcaaatgccctagatggtggggtcacgtctttctccttctccttcctccttctgctggctgaagtgatgactggagctcagcaaccactttgcaccatgaggcagcactgagcacggtagggcagcctggtgagaggggcctagctcgctgccgacagaagtcactgcctacctcagggtccccttacctgggtgggaaataaatttctgctgtgttgaagctaaaaa

SEQ ID NO: 82953 - DNA, 611 bp, Homo Sapiens
gcgacctgtatgaggaggaggaggaggaggatgtgaagatggcggagctgcagatgctgctggaagaggaaatcccggggggccgccgggccctcttcgacagctacacaaatctggaacgggtggccgattactgcgagaacaactacatacagtcagcagataagcagagagccctagaagaaaccaaagcctacaccacccaatccttagcaagtgttgcctatctgataaacaccttggccaacaatgtcctgcagatgctggatatccaggcatcccagctacgaaggatggaatcttcaatcaatcatatttcacaaacagttgatattcataaagagaaagttgcaagaagagaaattggtattttgactaccaataaaaacacttcaaggacacataagattattgctccagccaaccttgaacgaccagttcgttatattagaaaacctattgactatacaattctagatgatattggacatggagtaaaggtgagtacccagaacatgaagatgggtgggctgccgcgtacaacacctcccactcataagcccactagtgcctctatgtcatggaaagggacactaggcatcaatgggagt

SEQ ID NO: 82954 - DNA, 541 bp, Homo Sapiens
  misc_feature (15)..(15): n is a, c, g, or t
cttgagtgcttgacnatgggaagcaacaaacttgaacaacttcctgatactatggaaagaatgcaaaatctacatccgttatggctgcaacgaaatgaaataacatgcttgcctcaaacaatcagcaatatgaaaaatctgggtactcttgttctcagcaacaataaactgcaagatattccagtatgcatggaagaaatggcaaatctgaggtttgtcaacttcagagacaacccactgaaattgaaagtatcacttcctcccagtgaaggcacagatgaagaagaggaacgggaattatttggccttcagtttatgcacacatacatacaagagtcacggagaagagcagatcaccaagtcaacggttcaactactttaccaatctccataaatacggatggataatataattcaagatgcccttctaaagaggattactttggtgaattctctaatgtttggatttctgaagtaaaaagaaaagctattaccaaagtttaatgaggccacagcattttttaaagttcatattatttgc

SEQ ID NO: 82955 - DNA, 555 bp, Homo Sapiens
tggaattgaaaacccaagaagccctaaaataagaacagtgagatcaaaggctggtttctaaaacaatgcagaaaatagaaccatgttggaattcctaaattctagctttcaaatactactgtttccaacagtgaatccttgacagagactgaatgcagatggaattttgaaacattttcagtagctacctcctctcctgaaattcctataagtggcagaggaaaatccaaatcctttaatataacatgtccatctcatgactcctgcttacacacatttgtgttgatttgcttcatttctggaggatgggaatttgcagagctggtgacatttccttcattagacaccagaaattcaccagagagagacagatctgtgccttctctttttaggatctggttattgatactttaataaatgtggtgtaaagaaaatccatggctacagtctgtatagaaaatgtgaattttttaaataagattgtgttcttaatgtaaaaaataaaagtttatttgtattcagtgaaatgcctaataaagtcatggtaccaattaa

SEQ ID NO: 82956 - DNA, 512 bp, Homo Sapiens
  misc_feature (69)..(125): n is a, c, g, or t
aagaccagccgcagctacccagaaatcctgacactcaagacatacctgcatacatatgagagcgagatnnnnnnnnnnnnnnnnnnnnnnnnnnnnnnnnnnnnnnnnnnnnnnnnnnnnnnnnngtttttgtatttattaatttgaaaccaggacattaaaaatgttagtattttaatcctgtaccaaatctgacatattatgcctgaatgactccactgtttttctctaatgcttgatttaggtagccttgtgttctgagtagagcttgtaataaatactgcagcttgagtttttagtggaagcttctaaatggtgctgcagatttgatatttgcattgaggaaatattaattttccaatgcacagttgccacatttagtcctgtactgtatggaaacactgattttgtaaagttgcctttatttgctgttaactgttaactatgacagatatatttaagccttataaaccaatcttaaacataataaatcacacattcagtttaaaaaa

SEQ ID NO: 82957 - DNA, 1308 bp, Homo Sapiens
atattactttagtgcctggaactctaggaagaattcgatccaaatttagcaacaatgctaaatatgaccccaaagccattattgccaatctcacgtgtaaaaaaccagatcagcactttaagccttacttgaaacagcaccttcccaaacgtttgcactatgccaacaacagaagaattgaggatatccatttattggtggaacgcagatggcatgttgcaaggaaacctttggatgtttataagaaaccatcaggaaaatgctttttccagggagaccacggatttgataacaaggtcaacagcatgcagactgtttttgtaggttatggcccaacatttaagtacaagactaaagtgcctccatttgaaaacattgaactttacaatgttatgtgtgatctcctgggattgaagccagctcctaataatgggacccatggaagtttgaatcatctcctgcgcactaataccttcaggccaaccatgccagaggaagttaccagacccaattatccagggattatgtaccttcagtctgattttgacctgggctgcacttgtgatgataaggtagagccaaagaacaagttggatgaactcaacaaacggcttcatacaaaagggtctacagaagagagacacctcctctatgggcgacctgcagtgctttatcggactagatatgatatcttatatcacactgactttgaaagtggttatagtgaaatattcctaatgccactctggacatcatatactgtttccaaacaggctgaggtttccagcgttcctgaccatctgaccagttgcgtccggcctgatgtccgtgtttctccgagtttcagtcagaactgtttggcctacaaaaatgataagcagatgtcctacggattcctctttcctccttatctgagctcttcaccagaggctaaatatgatgcattccttgtaaccaatatggttccaatgtatcctgctttcaaacgggtctggaattatttccaaagggtattggtgaagaaatatgcttcggaaagaaatggagttaacgtgataattggaccaatcttcgactatgactatgatggcttacatgacacagaagacaaaataaaacagtacgtggaaggcagttccattcctgttccaactcactactacagcatcatcaccagctgtctggatttcactcagcctgccgacaagtgtgacggcccctctctctgtgtcctccttcatcctgcctcaccggcctgacaaccgaggagagctgcaatagctcagaggacgaatcaaaatggggtaa

SEQ ID NO: 82958 - DNA, 982 bp, Homo Sapiens
  misc_feature (315)..(315): n is a, c, g, or t
cagtcgacggtaccggacatatgcccgggaattcggccattacggccggggtgaaatattcctaatgccactctggacatcatatactgtttccaaacaggctgaggtttccagcgttcctgaccatctgaccagttgcgtccggcctgatgtccgtgtttctccgagtttcagtcagaactgtttggcctacaaaaatgataagcagatgtcctacggattcctctttcctccttatctgagctcttcaccagaggctaaatatgatgcattccttgtaaccaatatggttccaatgtatcctgctttcaaacngggtctggaattatttccaaagggtattggtgaagaaatatgcttcggaaagaaatggagttaacgtgataagtggaccaatcttcgactatgactatgatggcttacatgacacagaagacaaaataaaacagtacgtggaaggcagttccattcctgttccaactcactactacagcatcatcaccagctgtctggatttcactcagcctgccgacaagtgtgacggccctctctctgtgtcctccttcatcctgcctcaccggcctgacaacgaggagagctgcaatagctcagaggacgaatcaaaatgggtagaagaactcatgaagatgcacacagctagggtgcgtgacattgaacatctcaccagcctggacttcttccgaaagaccagccgcagctacccagaaatcctgacactcaagacatacctgcatacatatgagagcgagatttaactttctgagcatctgcagtacagtcttatcaaggtggttgtatatttttatattggtcttgtatttattaatttgaaaccaggacattaaaaatgttagtattttaatcctgtaccaaatctgacatattatgctgaatgatccactgtttttctctaatgttgatttaggtagcttgtgttctgagtagagttgtataaatactg

SEQ ID NO: 82959 - DNA, 1627 bp, Homo Sapiens
  misc_feature (266)..(327): n is a, c, g, or t
aacataaacagtaaattaacacatattttgcgtgttatatgtattatacactatattcctacaataaagtaagctagagaaaatgttatttagaaaatcataagaaagagaaaatatatttactattcattaaatggaagtgggtcaacataaaagtcttcattctcattgtcttcacattgagtaggcagaggaggagaaagatggggaggaagagaaggcgttggtcttgcagtcttgtcttaggggtgtggggagtgggggannnnnnnnnnnnnnnnnnnnnnnnnnnnnnnnnnnnnnnnnnnnnnnnnnnnnnnnnnnnnntaataggatatagctatttttcttcctctatcaaccaaatggtaagcatctattttgcagtccactctactgagctaaattatagatccagctatgctatttataattattttcttgatgaataaattttcaatttctcctctgaccatttcagaacatcttccaataactcataaaacaactgaagtaaaattgagtgctggaaaatatattcaccaaactttggtaatttaagttgactaaagtttaaaattaagtctaaaatagtttacacctatactgcataatccaacaattttaatttcagttgaagacatgctactaatataactattattaaaagagtagaggatgtgtaattaaccatatcttctaaaacatggttactaaaagaatatgtaacatcaatattgaccttggtttcttacacaagtgttgctaactcaatagtgaaggagacattattaaattttctgaacccatgagagatactagagatggggagtggaaagtgtttggttcagggatatctgaagaacagaagggcagagatttcttaagtgacgcctcatctacaagctggaaattcctaaaaacaagtagaaagcttataaacaacaggtgatacactcacctcactggttttagtaaattaccaatacagaaagtatccctagtcttaaaaacaagtggaaaatttgaactgattagtcatattcctttgattacactgtttgttacaatatttttctcagtaaacagaaataactaatttttttgttcttcattctttgatagaaattaaaatcttattctgtgaggattacagaatactataactcaaattataaagtagaataaactctttaaataattattcttcatcataaagtgtaaagaataagatataagaaaacaatttatttttaaaatttaatatactaaatgctcaaatatgttctactatagaataagttcttatcttaatttacagggcactaaaaacaattttaaaatgcttaatgttgccttttatattttaattggttaagaatatatatttgtttaatgcaaatcagaatcactatattaaaatgaatgttcttgaaaactcagtggggctgctctataatacacttacaattgatactaacgataaaacgctctaattatagttttaattttataggggtttttttggtgactttccccaaataaaacaaaatcaagacgcccaagtccagacacacaagagggcagacgtatataagataacaaattgctactacatagcgattat

SEQ ID NO: 82960 - DNA, 924 bp, Homo Sapiens
tcacgggtgactatagtttaatgaatcagagtctggaatcttaagccccagaaactttcaggaaaggcaagcagattcactgacccccacgtgtatctttatgtgtaatgaaggttttatgggaactgagggaagatggggagagaagggcaaattaaactcctaagataaatagagctgaagactgagagctaatcagaagttctcagatgaaactagattcttgatattgctacaaaaggtttctttctgatctgccatcgcagtaaccgttgtggacgatcagcctgtactgcctggccaggcacagctcctcctgccgctgccttacaatcttctgcgcttctgggggcaggccgttggggtcccgggaaaacacgaaggagtagctgtcagcacaggtgccatcgaggttcaggaggcggcaggagtactgcacggcatacgtgtcgtagtctgtgtcgacgatccagtggtcatcatttcctttctggagaaaggaggctacgccccagtacttcatcttgaacttggcagggtcctcggtgtctgtgaaggtgcccaccatgtctgcgcacacgtcccagttattcaaaagacggactcggcccttggctgtggcgctcatctggccggtctcgtccacggagaactccgcgacgatgttgtcctgcagaaagaggccctcggggtccttcttggccatggcgtaccaggtcccagagaagcgagccttgtcgaagttctccttgactcggaagctgctcactcggcagtcgcgctccgcgcggccgctgcccagcgccgccaacagcaagagcgcccacacccacttcatcttgcccaggaatccgcccaccgggaggggaaccgcgcgcaagcctggccgccgcgtccgggcgcgcgtggagcgagggaggcccc

SEQ ID NO: 82961 - DNA, 1013 bp, Homo Sapiens
gcttcctggagactttgaagacagagcggctgagcccagacctcctgaccctgggacctgcactgccttcatcactccctgtccccaatagtgcttatgggggccctgacttttccagtaccttcttttctcccaccgggagccccctcaattcagcagcctattcctctcccaagcttcgtggaactctccccctgcctccctgtgaggccagggagtgtgtgaactgcggagcaacaagccactccactgtggcggagggacaggacaggccactacctatgcaacgcctgcggcctctatcacaagatgaatgggcagaacaggcccctcatccggcccaagaagcgcctgattgtcagtaaacgggcaggtactcagtgcaccaactgccagacgaccaccacgacactgtggcggagaaatgccagtggggatcccgtgtgcaatgcctgcggcctctactacaagctacaccaggtgaaccggccactgaccatgcggaaggatggtattcagactcgaaaccgcaaggcatctggaaacagggcaacaacagaaacggggctccagtctgggaggcacaggagcagccgaaggaccagctggtggctttatggtggtggctgggggcagcggtagcgggaattgtgggggaggtgggcttcaggcctgacactgggccccccaggtactgcccatctctacgcaaggcctgggccctgtggtgcttgtcaagggcctgttagccacctcatgcctttccctggacccctactgggctcacccacgggctccttccccacaggccccatgccccccaccaccagcactactgtggtggctccgctcagctcatgagggcacagagcatggcctccagaggaggggtggtgtccttctcctcttgtagccagaattctggacaacccaagtctctgggccccaggcacccccttggcttgaaccttcaaagcttttgtaaaataaaaccaccaaagtcctgaaaaaaa

SEQ ID NO: 82962 - DNA, 810 bp, Homo Sapiens
  misc_feature (108)..(108): n is a, c, g, or t
gtagggctgtttgtctattgaagataccatgtatcacatttgagtattattttgcctcttttagtaaaattacccacaacccaagccacttctgaatggggccctcancaccagcagactcgagaggcctactatgcattaacatgggcctgacattaatgtaggcccatggactaacaggtctcattgactcttacccatacagattggatactgcggcaacaagagactgctatcagaatgcaccaggcccttgggttttggacatataaattacccaagatggttgccatatacattccctttgaatggcagctactagcctgctattggactctaatttaaacagaacacttgaccactgaagcactgtatgtgaccttaagacctgagctgcccatctcatgcaggtattattaacgaaaaataaaaatggaagccccagtttagaaataccctaaggctgactacccgcaaccgtgtaaccaaaactaatcattctgattttcctgaaatgctgtctctgatcataaatgaaatgcaaaatgtaagctttacatccttgccagcatgattcactaaaattaaaccaatcagctatagaccaacaagcttaaacagctcaacttgccctaaaaagaatgtataacagccaattataaaaaaggtcaaaatattccccccctttatgcattataaactgtgttgtaactgctgtaagattaatttcttaccacttgatttgagtcttctagattgtggtctgtacttcttgtttgaacaataaacttttaaatttttctttaaaaa

SEQ ID NO: 82963 - DNA, 738 bp, Homo Sapiens
aacccaacgtcagttgtacaaatagcaggctgtttaatgacggacagtaactatacggtcctaaggtagcgaggcctgggtggcgaattctggcacgagggggtgtgagcgcgggtgagccagtgcgaggtggccgcgacgacgggactccattagccgctccggccacaggcagcgcttcgccagccgaggaaccggacgcggacaccgacgccccgcgagcctccagcccctcgcctgttgccgcgcgagtcccgggcccggagcgctaggagcgcgcggaaggagccatggctctggacgggataaggatgccagatggctgctacgcggacgggacgtgggaactgagtgtccatgtgacggacctgaaccgcgatgtcaccctgagagtgaccggcgaggtgcacattggaggcgtgatgcttaagctggtggagaaactcgatgtaaaaaaagattggtctgaccatgctctctggtgggaaaagaagagaacttggcttctgaagacacattggaccttagataagtatggtattcaggcagatgctaagcttcagttcacccctcagcacaaactgctccgcctgcagcttcccaacatgaagtatgtgaaggtgaaagtgaatttctctgatagagtcttcaaagctgtttctgacatctgtaagacttttaatatcagacaccccgaagaactttctctcttaaagaaacccagagatccaacaaaga

SEQ ID NO: 82964 - DNA, 1460 bp, Homo Sapiens
  misc_feature (1346)..(1380): n is a, c, g, or t
gttaaaaacattttatttaaaggcaaaaaagggttaataaaatgaaacccttgggtctaggagcgttggctttttgttttcttccttaaagggacaaattttttgctgtgggggaaggcccttgaaaactgtagtttaaattcaactggaaaggggccgctgacatccagggcctccttttcagtcagcttgtaagctttctggaagtcaaaaacactgtttgacttgggaacaacaaaactgacgatttcttgccctttaagcacaatcctgtcatatgcacagtgggggctcttcttcaccggggggtcctcttggtccccgatcagccaaacaaacctgggctcagtcctcaagcggatgttcttccaggccttcttggggacctagctgcagccggcattgaagtcacccatgaaaatgaattctccgccttccagcggtgtttcacgtccgtgtagacctcaaccaactcagtcgatctccttaacggatgtctctgggttggtgtccagggggataatcacgaagtctttgacagcagctgtggggagattggaaccagaccacaaagggctccctggaaaacacatctgcgtctccatcctgatagtcatggtagtgataactcctcttcacagacaccagcttttccttgtagagaaaggcatattgttctttatatgtgttttcttccaagccgagagctaatcacatagttgtacgttatgcctctccttgaatttctgttcagcttctccatcagtatggggcagatcctgttgttgctgtcctggatttgccatcacgagtatgatgtcacagcgtttgatgaccttcacaatgacatccatggcattcttgtcttcctgcttgctttccccaaaggacctgacgttgaaggagcagatcctcatggccagggcgctgtggatggagaggaggagaagcagcagtggggccagctcccgtgacatcctggcgctgctctggcttcaagactctgtgagaagacagcagtgcttggagtgctggattctggccacttccgcaggctccactgacttataaagcctgcagataacaggaattactggatttctccttgcaactttcagttctctgaggaactgaagatcatgggttttaatccccaaggaaatacagatacattgggctagcctttaaggagcccttatgttcgtcacctggtgcagaaattggcatgcctcatttaggcgccatcctccacaaagtcactcatatcccaaccgggagccagctctgacatctcccccggccgtaatggccgaattcccgggcatatgtccggtaccgtcgactgnnnnnnnnnnnnnnnnnnnnnnnnnnnnnnnnnnncggccgcttccttcgctcactgactcgctgcgctcgtcgttcggctcagggagctagcgccctatagtgatctatacatc

SEQ ID NO: 82965 - DNA, 497 bp, Homo Sapiens
ccctctgtgactctccgccagcccctccgccgccgcctcttccccttcggcttccctggctctggggggggcttctcagtcttggtgcttctgaccgatgccgcccctaagtcatgctcacagcagtaggaccgcccgtccggggtgcagctgaaggctgtcccgtcctggtgctccttacagaacgaattggggcagaggtggcaaaatgaagtcgaaggtttgccacacacgtcacaatgatgccaaggacattcccacttccctgcaacagaacacaagatgtgagcacacagaagtgatggaatcacgacttcaacattatcgtggttgaagatgacttacaactgtcaggtcaaatgaacacaaaatagtgctggctccagcgaacaggacgggcagacaaactgtctaccacagcccgggcgggctccctggcagggcctgttgactccacagtacctgccaggcccctaaggaccacctgttagcgtctc

SEQ ID NO: 82966 - DNA, 948 bp, Homo Sapiens
gggcttcaccaagcgccagtacccagagaccaagatcatcaagacagatggcaaagggtggggcctggtcaccaagagggacatcagaaagggagaatttgttaacgagtacgttggggagctgatcgacgaggaggagtgcatggcgagaatcaagcacgcacacgagaacgacatcacccacttctacatgctcactatagacaaggaccgtataatagacgctggccccaaaggaaactactctcgatttatgaatcacagctgccagcccaactgtgagaccctcaagtggacagtgaatggggacactcgtgtgggcctgtttgccgtctgtgacattcctgcagggacggagctgacttttaactacaacctcgattgtctgggcaatgaaaaaacggtctgccggtgtggagcctccaattgcagtggattcctcggggatagaccaaagacctcgacgaccctttcatcagaggaaaagggcaaaaagaccaagaagaaaacgaggcggcgcagagcaaaaggggaagggaagaggcagtcagaggacgagtgcttccgctgcggtgatggcgggcagctggtgctgtgtgaccgcaagttctgcaccaaggcctaccacctgtcctgcctgggccttggcaagcggcccttcgggaagtgggaatgtccttggcatcattgtgacgtgtgtggcaaaccttcgacttcattttgccacctctgccccaattcgttctgtaaggagcaccaggacgggacagccttcagctgcaccccggacgggcggtcctactgctgtgagcatgacttaggggcggcatcggtcagaagcaccaagactgagaagccccccccagagccagggaagccgaaggggaagaggcggcggcggaggggctggcggagagtcacagagggcaaatagcgccaggcggccgc

SEQ ID NO: 82967 - DNA, 720 bp, Homo Sapiens
ggggctgctgtagccggaccctttgccttcgccactgctcagcgtctgcacatccctacaatggctaaaacagcaatggcctacaaggaaaaaatgaaggagctgtccatgctgtcactgatctgctcttgcttttacccggaacctcgcaacatcaacatctatacttacgatgatatggaagtgaagcaaatcaacaaacgtgcctctggccaggcttttgagctgatcttgaagccaccatctcctatctcagaagccccacgaactttagcttctccaaagaagaaagacctgtccctggaggagatccagaagaaactggaggctgcagaggaaagaagaaagtctcaggaggcccaggtgctgaaacaattggcagagaagagggaacacgagcgagaagtccttcagaaggctttggaggagaacaacaacttcagcaagatggcggaggaaaagctgatcctgaaaatggaacaaattaaggaaaaccgtgaggctaatctagctgctattattgaacgtctgcaggaaaaggagaggcatgctgcggaggtgcgcaggaacaaggaactccaggttgaactgtctggctgaagcaagggagggtctggcacgccccaccaatagtaaatccccctgcctatattataatggatcatgcgatatcaggatggggaatgtatgacatggtttaaaaagaactcattataaaaa

SEQ ID NO: 82968 - DNA, 807 bp, Homo Sapiens
  misc_feature (659)..(711): n is a, c, g, or t
  misc_feature (733)..(744): n is a, c, g, or t
tctcgcaaaaaggagcactttgttcaaaccttgtgagcagctcagactgcctgcctagaacagcctccttactccagcttggcagggaaggaaggaacctgacatccttcgcaggatctggaagctcaaccggcagagctgagagccgcagttgcatcctggagcctgatgctagaagcagcttccgtctttgggttctatgctgcctcggcctctgctctgttcagtttgctgttgtgtttttctcccccatgttggggtggtggggtacagggaaataaaatgctttctcccaggcccctaatccttccccatgcctccatcagcctcaaagctgctgacagtcatgaactgcaccttccagccctgcccataagctactcaaagcaaattcaaattctcttctggccaggaggaagggcagatgctccctccttcctcaagcctccctggctcattgatccattttgagggcatttgggggtcaaagttgagaccagattgcttcagtttgtataaaattagcatttcttatcacaccaaggccacacctgttctctggcctcacaaaccagtgaggatgtaaaggtttgttgaggtggaggaacagaagtgaaatgagcaatctgctccatttagaagtcagtcgcttcggctgnnnnnnnnnnnnnnnnnnnnnnnnnnnnnnnnnnnnnnnnnnnnnnnnnnnnncctcagtttgccacaaatatgnnnnnnnnnnnnttcttggaactgtgaggcttccctccgttgtggaccaatatacaaataaaacaatggaaaaga

SEQ ID NO: 82969 - DNA, 639 bp, Homo Sapiens
catgcacatccactgctacaagattttccatatccctatctgtttcctgatggactgtcttccatcgagactcttctgactaacatacaggggctgttgaaagttgccatagataatgccagagctcaagagaaacaggtccaactggaaaaaactgagctgaagatggattttttaagggaaagagaactaagggaaacacttgagaagcagttggctatggaacaaaagaatagagccatagttcaaaagaggctaaagaaggagaagaaggcaaagagaaaattgcaggaagcacttgagtttgagacgaaacggcgtgaacaagcagaacagacgctaaaacaggcagcttcaacagatagtctcagggtcttaaatgactctctgaccccagagatagaggctgaccgcagtggcggcagaacagatgctgaaaggacaatacaagatggaagactgtatttgaaaactactgtcatgtactgaatctttcctgttgaagaaatccatgttatagaaaagaactttgcagtcagacattcgtcatgggaaagttcagaaaaaaataaagtccttttaagggaacttcctgaattttgtgtattaatgttctttaaaagtttaagtatttctaca

SEQ ID NO: 82970 - DNA, 794 bp, Homo Sapiens
ttttttcccaccggtggagctgtttaagccaaggagttgtggagatctctgtgatgatccaaaatctgactaatataaaatcaactctgatgctaattaaatctgacttataacttgtctgctaaaagaaattataacaggaaactttggtgactggtaaggaatgttgaaaagggaaaatcagaaggaaaaacctggttcataagaaggaaggaaatattggtccaagcacgtcaagggctctaagtaaaaaccgatggcactacaattccacataatccattacatttggaaaaagaagctcctggtagacacagggcctctttgggatattgttctttgttctgattctgtgctcaccaggaaacaaatttcatctccgtagggggcccgtccttcagtaggaatggccctgctcctaggttcttggctcacttgccaagactacaatagcactcgcgtttatcagttatgcttgtgtgaagctggttattgcaattcattgttctcaaaatactttcatgaaaagcctgacctgagaaaaagccttctctgtaatcatattaattagaacataaatgtctactttgccataattatacaaagagcccaaatgggcaattaactccagttggttgcttctctctgagccttacttgccagctcttattaccgcattccagagagagtcaacctggatggagtttgtcccctaaataaatgtagcgacaaagaaaagggtgctccaaatcagtttcatcagaatgataaggtacagtactgcagccatgtcc

SEQ ID NO: 82971 - DNA, 655 bp, Homo Sapiens
gcgggcaggaggtcccaccatgtggacagacatagcccaaggaggcaccacaggtctatgtgtgctgggggatgtcaggtgccacccaacgctgtcctggtggtatttacaatgacatcctcctcctccatcactccaggggtggtgtctcggccgcccctaccagctggctgagccccctggcctcctgcgctccctcacttccctcagttcccaaagctgcccagtccatggggacagaaccgtcactcagatccacattcaagtgtgcccaccctgcagtcttcatcctcactcagctgctgcctctggaggtgcctttggccacatgtgctgtgctgtttgtctcctcgacagggagcctgtccaccagcaggctgcggtcccagcggaacttgggagcccccagggaggggctagtgttggtaggtcctagacgtggttccctccagcctccccaaaatcaaccctggtgttgagagaacgtccttctgtccatcgtgggtaacagccttggggagggtgcagagctctgcagagccatgggccaggtggggctgcctcagtcctgtccccttgggcactgaggagaggggcccattcacctttctcctagaatgctgttgtaaataaacaaatggatccctggaaaaaa

SEQ ID NO: 82972 - DNA, 1002 bp, Homo Sapiens
ccacattcaagtgtgcccaccctgcagtcttcatcctcactcagctgctgcctctggaggtgcctttggccacatgtgccgtgctgtgttgtctcctcgacagggagcctgtccaccagcaggctgcggtcccagcgggtgcgtctgcagctcctccccttgggcagcctggttctcccggaggacctttccttggggccctgcttcatgacgatgctgcctgtgtcaccctctaccatctgtaaacaactgggtgccttccccgaccacaccccaatgccttcccagcttggaagccaaggcagctgatgaagggagctcaggagagccgtcttcagctgggctggggttggggctgctgtgaggaaaacctgccattgtggccctggagagtcaccagcagctcttgggaaggacttgctgggaggctgagagaggctttgggcacagcctgctgtcttttccatttcctaaagtttacttcattgtcttgaggcttccaggtttgtttttgttttttgccaaagtagaaaaggcaggtggtgggcggctggcagggagtgcgggtccccgcccctcttcagtcctgccctcccctcctcagtcctgcccaccccgtgcagcccatgctgaggctgcagtggtgtcgtgggtgttacgtgcaggaacgtggagaccctgacgtgggctcactgcgtttggttttcttttcagaacttgggagcccccagggaggggctagtgttggtaggtcctagacgtggttccctccagcctccccaaaatcaaccctggtgttgagagaacgtccttctgtccatcgtgggtaacagccttggggagggtgcagagctctgcagagccatgggccaggtggggctgcctcagtcctgtccccttgggcactgaggagaggggcccattcacctttctcctagaatgctgttgtaaataaacaaatggatccctggaaacatactacacctcaaacccctcccccct

SEQ ID NO: 82973 - DNA, 752 bp, Homo Sapiens
ggtccatgcctgtgtaatgctggtccatgcttctgaacctgtgtctgccaagcgcctatttcattcagcacaagacatacgattttagaaggtgaggggaggggaggctttttctacctgagaaggggagtgtctttgagggccttaaaaggaccatggcccaggaatgggggcgctggttgggcttggagctcaggctgctgtggatcccggcgcatcagttctgacttgccttacctgggtggacagcagtgaatctccacctgtcttctccagggagctcccatgttggggctgaagacgagcaggggcaacctgccagcatcacagaattcagtgtagtttatacatttcgattcctttcatctcagcaaaatgggcactgccagagccatttctgatcacaccaccatcctggaccatgtgactggaaggtgggtaaccaagttcaccagcaataaaacccagcgcccaggtagcctccagcagtgcggcttcctggcaacaaggtaggccctggtgcagggcaagccgcagcgaccatttcagataccgtccacagccaggaccgctgagaactgggacagtttcctgggatgagtgccagcctgagcctgcatggtgccgccgagcccggggtggaggagggagccaggcttcgcttcaaggcggcctctaccttttctcagaatggtttcctgattgtgtcaatgtgaaagttaaataaaatttatgtgccaaacctgaaaaaa

SEQ ID NO: 82974 - DNA, 458 bp, Homo Sapiens
gataatctgttgtaccactccttccctgcaacagctgaatctgcaactccccctgaaaaccaaagcctttttcatgttagatgggatcctttccaaatactttgatctcatttatgtacataatcctgtgtttaagccttttgaaaagccagtgatgatctcaatgggcaatgaaaatgtactggaaattaagggaaatgatattgaccctgaagcagttaaaggtgaagtgttaaaagttggaaataagagctgtgagaatatacacttacattctgaagccgttttatgcacggtccccaatgacctgctgaaattgaacagcgagctaaatatagaggtgggattcctgcattcctctcatgatgtaaataaggaagccagtgtaattatgttattctcaggcttaaaataaatcattaaagctcatttatgtgtgggttttggctcatcaactc

SEQ ID NO: 82975 - DNA, 499 bp, Homo Sapiens
  misc_feature (26)..(26): n is a, c, g, or t
cggcacgaggcagcagctctgctgcngcagcagctccggcggcggatacggcggcggcagctccagcggaggccacaagtcctcctcttccgggtccgtgggcgagtcttcatctaagggaccaagatactaacaaaaccagagtaatcaagacaattattgaagaggtggcgcccgacggtagagttctttcatctatggttgaatcagaaaccaagaaacactactattaaactgcatcaagaggaaagagtctcccttcacacagaccattatttacagatgcatggaaaacaaagtctccaagaaaacacttctgtcttgatggtctatggaaatagaccttgaaaataaggtgtctacaaggtgttttgtggtttctgtatttcttcttttcactttaccagaaagtgttctttaatggaaagaaaaacaactttctgttctcatttactaatgaatttcaataaactttcttactgatgcaaactaaaaaaaa

SEQ ID NO: 82976 - DNA, 490 bp, Homo Sapiens
gcagcagctccgcggcggatacggcggcggcagctccagcggaggccacaagtcctcctcttccgggtccgtgggcgagtcttcatctaagggaccaaggtcagcagaaactagctgggatactaacaaaaccagagtaatcaagacaattattgaagagctggcgcccgacggtaagagttctctcatctaaggttgaatcagaaaccaagaaacactactattaaactgccatcaagaggaaagagtctcccttcacacagaccattatttacagatgcatggaaacacaaagtccccaaaaaaacacttctgtcttgatggtctatggaaatagaccttgaaaataaggtgtctacaaggtgttttgtggtttctgtatttcttcttttcactttaccagaaagtgttctttaatggaaagaaaaacaactttctgttctcatttactaatgaatttcaataaactttcttactgatgcaaactaaa

SEQ ID NO: 82977 - DNA, 1333 bp, Homo Sapiens
  misc_feature (98)..(98): n is a, c, g, or t
  misc_feature (106)..(106): n is a, c, g, or t
ggagaaggtcaagaaaggctcaagaatctttacttttaatacttgattgagcttcgagctttgtcaaaggtggctccatatttgagcgctcaatgtcngatcttancactggaaatgcagaagaagatgctgacacaaaaactcttctactgaatatctttcaagatacaaagtcctttcccatgcactttgatgagaaatccatgtttgcaggtgacaaaaaaggggccaagtcactaaagaaggaattccgattacatttcaagaatatctcccgtataatggactgtgttggatgtgacaaatgcagattatggggaaaattacagactcagggtttaggaactgccctgaagatattattctctgaaaaagaaatccaaaagcttccagagaatagtccatctaaaggcttccaactcacccgacaggaaatagttgctcttttaaatgcttttggaaggctttctacaagtataagagacttacagaattttaaagtcttattacaacacagtaggtaataaaggcttttatgtgtctaactagagacataaagtgactgtggaaagccttttaattatggacattcatcagaaagacactaatctgacttcaagaattctgaactattaaatagaaaatttaaatgctcacttgaatatttatgattcttaatagattattatcaactagagatatttataaatgaagtatatacttttaaaacatgtaagttatactaatttgtgtttaatttcatatgttttcatgtaatgaaaattctattttttttagaatggtttgtttttattctattatcctttatttccagttgtcaaactttaaatggctatgtctgcattctaataacactgttcagtctgttatggaaaaggagaactagggaacaaatgttgctcagggctggtgtcagtgagaaaaatttatcaatgctttttaatgtgtttttacccttgcctcactgtgtgtgtgtcactttctataatataaagaaatactataatatttctagaatctggaactgtcaccatgatgaatggccctttcaatgcatagttacagaaattcctgaagattccccaggacttcaatttcattggttcttatttgcagtttttagttgctgtaatcgttgctgtttccagtctaaaggacctcctttggtaaaggtgaacaagacctctcccctatgctaaccagccagattttgtgtgtgtaatgggctggcccaagagtgttcttttacttagaactccttttgattttgcttttctctgcccctagaaattttagggacaaagacattttg

SEQ ID NO: 82978 - DNA, 808 bp, Homo Sapiens
aaaagagaaatttctacatgaacaaggcaatttcagtgtcttacagcggccaaacccatgacgtgaagaatgagataggagacaggagatcaccataagcgtccctgatatagcagcacacattttcacgtttccacttaaatcgttttgcacaaagtcttgcttcgctcagatgagatgagatatgatttcctagagatgtaaaaataagaatgaatgtggcgcccccttcttccagatgtaatagaaagctctgccctatcacaaggggggtgttgaagcgccccttgtgttttaactgtatttaactgagcacaagatgcacaagctgtggtgggaaaccctcagtttacctttggagtcttccctgcagatcgcagacctgtttccaggctgatgtttctggtgtgtaattgctagcgtttctgaagggttttcccaattgttttagccttgtgaagtattcttaattataacttgcctttcagcgatggtacatgacttgattcaacgtttggttctgaacttacacactgatgcgtttactcatctaacataatctgacagggcctcagcaagggagccatacatttttgtaacattttgatatgttttaatgcatctgacttagatcttactgaaataaagcactttttcaaagaaacaacccccgtaaccgcactatctgcctccctcttttacaccctcgggaaaagaagcgcccacgccccactccaaataaatcaccttggtttgcgcgcgccctgcgggcccctcgaaaaaaggctttttctaagaaaccactttc

SEQ ID NO: 82979 - DNA, 458 bp, Homo Sapiens
cataacagggcaatgcagcaattaaccccacatcgttttctgtagttcctttttgtttcattttcttctgtctcacctcgttagaaaattcctcccagtcaggggtcgtccagtgcaggacgggggacccaagggtctcaagcctgcaagtccagaaggtgacaaacccaggagcactgggagttaagctttccttggggagggaagagccttgatgtccagcacacagcctggctataaagacacgaagcgacctacccactgtacagtccacttcacaggatcagctgaatcatgacctttaaaagttccgagttgaaactgaaggctctcctcagacctggctttttcctcagtccctgttcataccatctctgcacccacaatcacactgatttttcaaattcattttgtttttgctgtttcatttctggcattaataaaagtcttataaggag

SEQ ID NO: 82980 - DNA, 681 bp, Homo Sapiens
  misc_feature (482)..(482): n is a, c, g, or t
  misc_feature (485)..(485): n is a, c, g, or t
  misc_feature (502)..(502): n is a, c, g, or t
  misc_feature (528)..(528): n is a, c, g, or t
  misc_feature (534)..(534): n is a, c, g, or t
  misc_feature (635)..(635): n is a, c, g, or t
tgagccaccgcgcccagccggttcaacattttttcaaagcactaaccctaccccaaattcatgtaatactaacttgacttttatacaagttgcacagaatgcagagggcagaatttgaccccaaaaccttccacagaatatcagaggtgattggtccttccactcttgagtagaacctaagaattccaagagtctcctaataggatactggccctctggagaaatggccctgctggatcccattagttaggactctagttagctgctgtagaagggtgacctactacgaccctttttggggaaggcagagagctgggagactggctgtccacttagtgaatccaacactggcttaaagctatgcactgaataaagtgctcggtacatcctgcttttcaccctggaatgaaaatacacacttatcttaggaattcacctacttacaggtttgggggacaagatgtcagggctaaagatcccanganaatatgagcatgactangaggacaatgctctatagtgtcttanatctangattgaatgtagatgatcaagctgtcgtgtcataatgaacatctgctgtacatcaacgtgcagtactcacgggtgacgacatcgtgcattgtatatgtcanatgaacaacatgatatcggtagctggtaactctctgtcacgttcca

SEQ ID NO: 82981 - DNA, 935 bp, Homo Sapiens
cagttatgcctccatgtaaacagattcacataggcctccaatttcaatgagaccttttgcattttttctcaaagcccttatgttctaacccatgagaaccattttacctgccctctaagggccaccagcttcgacctgcctcaggggacagcagcacagaccagtggctccctgtccaaggccgcagagcagacgccatcccactgtacaatcgaatttgctggacaaacttgataggtttctctgcttagcaacgagcctatagttagttggcacatctgcgttttggcatctgaggctcccatctgagtggaggagaaagtgttgtgtttattagcaggaagtcttgtgaaaacagctcgctgctgtgtatgtttatggatttttctgatataacagccagcatggttaccgagtggtagagattctcgaacattctcaaactctctttttgggtaaatgattgtgctaaaaataaaatttattaataaagaaggggaaaaaggagtaactctacctgactaaatgttactctaatttatttatttctttactaattaagtaaaaccaggaagtatgattttacatcaaccagagaatttctgaatttatagggaaacactatgtccccataatgatgctataattctaatatatctagtccccataaacagtaagtacaaattatcattcctttaaagcatttttacacttcctggaatgagtatattatcagcaatcttttgtcaaatgccagccgtataaatgttacttctgctctttgtaaacctcaaaactcattattcttgattataagcaactggacagaaccatgccaaagcttccccgtttcagcgtggctgcgtcctgtgggggcggtgtggactcctcccagttcagcgagtatgtgctttgccgggaggagcggcggccgc

SEQ ID NO: 82982 - DNA, 484 bp, Homo Sapiens
ggggccgccgctcctcccggcaaagcacatactcgctgaactgggaggagtccacaccgcccccacaggacgcagccacgctgaaacccctctggaacagccgctccaggacctgcccaggaagaaacagaggtcatcaaggccaagctgcaagaggacacctggcttggcctggcagggaggtgggtgcctgctggggcagccagcaagggcaccttctcctgtgacgatctcagtcttgctcactgacaaaggtccctacagaaccacgtgctgggttccaccaccagagggacagaagtggccaggcccagtgacccctcaggttagcaaacctagttggacgaccccacccaggccaccatcctgctgccctcagggccttgattccgggaggcaaaaagaggctttgggtcccttctttattctgtagggtgtaacctatgccctctctccagacacatggccccaagtgtcctccctg

SEQ ID NO: 82983 - DNA, 645 bp, Homo Sapiens
gcggccgccgctcctcccggcaaagcacatactcgctgaactgggaggagtccacaccgcccccacaggacgcagccacgctgaaacccctctggaacagccgctccaggacctgtaccgagttgagccggcagtagccattgagcgggaagcggatgacgtgcgtggggtcctggttccagccggcgttgacggagttgcacatgacgtctccggtctcggggaagacctcctcgatgagggccttctcgccgctgagtgcgatccgctcgcccaagtcgggcgtgacgcgcaccaccaggcagtcacaggcccggctgcggcgccgctgctcctgctcctgctgccagcgctccagctcgcgcaccatgggctggagctgatagtagcgcgcctcctcgtacagcagactgaagtccttaaagtcatccggaagcagcagcttggacgtccgcaggaagctcaggacgtagcggaaaatctccccatcccggtcaatgaaataatgttgcttcaaactgtccaggacgaatgggtcagtgccattgaagaggcggcttatcctggagtcagggtacttggtgagcgtgggccagcttgctgtgtacatgtggccgcccacatcgatgtgcacaggtgcattgg

SEQ ID NO: 82984 - DNA, 544 bp, Homo Sapiens
  misc_feature (110)..(124): n is a, c, g, or t
ttttatgttacactgggcatttatttacaaagaggttagagaaacacacagaatctggcccccctttgcactggggagtcaccatcgtcataataaatacagtaattttnnnnnnnnnnnnnnntactagattggaacagctgagggtcatcaggcttcccccattccctctcacagggagtgggggtcatgagatagaaaccatcttccttcccctcttctacctccgaatcctccataattgtccagggatcgaagtgaaagagtccttctttccaggtgttaccaacccctacttgaccctcaaaacccccaaatcagtgctccttcccttcccagggcactctgcagggaccacctgagtcagacacagagtctctgaccagggtgccaaggggatatcttaagggtccagggacatggagggggcactttgtgaatgagagggggccatagctgggcaaggaaaggaggaatgagagggctcatcaggaatgagagggagagcggtggaggggaacaaacagactaggcttctaaacta

SEQ ID NO: 82985 - DNA, 500 bp, Homo Sapiens
ttttttctgatatgaaatttaatgtcttaggctgaaaaacactaaatttccatttttttgtaggtcagaagtggttgcaaactggatttttagactcttcctgttgggggtctcggacatttgctcttttccacagcggccaattcttcagagccacaaagaactgggcgacgcaggccagaggtgtgggagtccagcccttggttcgaatcccgctctccactgtccatggggttctcagcaagccctctggcctctccaagcacacgcagggttcctcaagcaattccaaactccagagaagacatcccaggtaaaatcggatggcagggacctgggacaccgctgtgacgggcagcccctgggctcgagtccacaactcccacgggagggcagggccccatcctgctcacaccggggtccccagccctcgatcctcacgagtcctcgtccaagaacaaactgtgcacacacgggcggtcagtcctggattcaaggtg

SEQ ID NO: 82986 - DNA, 712 bp, Homo Sapiens
  misc_feature (42)..(86): n is a, c, g, or t
  misc_feature (89)..(123): n is a, c, g, or t
ccgaaaagtgtatagactcactatagggcgctagctctgttnnnnnnnnnnnnnnnnnnnnnnnnnnnnnnnnnnnnnnnnnnnnncgnnnnnnnnnnnnnnnnnnnnnnnnnnnnnnnnnnncagtcgacggtaccggacatatgcccgggaattcggccattacggccggggacactttgtatggcaagtggaaccactggcttggtggattttgctagatttttctgatttttaaactcctgaaaaatatcccagataactgtcatgaagctggtaactatcttcctgctggtgaccatcagcctttgtagttactctgctactgccttcctcatcaacaaagtgccccttcctgttgacaagttggcacctttacctctggacaacattcttccctttatggatccattaaagcttcttctgaaaactctgggcatttctgttgagcaccttgtggaggggctaaggaagtgtgtaaatgagctgggaccagaggcttctgaagctgtgaagaaactgctggaggcgctatcacacttggtgtgacatcaagataaagagcggaggtggatggggatggaagatgatgctcctatcctccctgcctgaaacctgttctaccaattatagatcaaatgccctaaaatgtagtgacccgtgaaaaggacaaataaagcaatgaatacaaaaaaccaacaacacacacaac

SEQ ID NO: 82987 - DNA, 655 bp, Homo Sapiens
  misc_feature (248)..(276): n is a, c, g, or t
acctgagactcgcggggctgcgcacacgggcatcgccgaggaccccagcaatggacgtcgtgtctgtggtgatcccgccaggacgcggggagcgtgggcggaaattagtgtccacgttccgaccctgcgctgtgccaaacgctgcttcgggagctgtttatttagcctccgacagctaagcgaatcggcgggcggctggggcctggtgcaacccgattttctcgtgcagactcgcagccggctttggnnnnnnnnnnnnnnnnnnnnnnnnnnnnnggagccatgcagagggtagctacagccattaatttaaggatgtagataagctatctctaaaccaagaaagtaagaatggtgtgaattatatttattcccagccttccagtgtttattaaaataattttcggtgtccttgagaggagttaaaagccatcattttactcctgcttacctccgccaccgtaattaaccactttatactgcctcataatcccattaacaaattgcagtcgctcctcagccttcacattcattcactcaccagtttctactgtttcatcctgcccggactcttaactgttccctcccaggatcgacatgcacttggatcattgcagtttctgggcctgctgtcatctcccccttcagtacttcc

SEQ ID NO: 82988 - DNA, 441 bp, Homo Sapiens
aagcggcatagcacccgtggtgcatgcctgtcctgggagctggagaggatgtcagcgagcctgacattgccctccctgaatgcatcaaatactcttctccaaggactgacaaaaacaaccccccggctgtgggcacagtagggaaccatgccggtttgatcttccattgctcaagccagggaatgcattgcagaggcacctgcacaacgacaaacttgagtgtttccctgccacttctgtgcctccacagcctgctccagttccgcagctagagctgggcctaccttccccagccagccctgccacacacctggctgaggcatgtctgggaggggtggaggaggcagagggactccaggccagagggctgttctcacaacctcagcccactctcagtcaaggagggcagaaaataaaagatgacatcactgccaaaaaaaa

SEQ ID NO: 82989 - DNA, 914 bp, Homo Sapiens
  misc_feature (839)..(839): n is a, c, g, or t
  misc_feature (866)..(866): n is a, c, g, or t
cagtcgacggtaccggacatatgcccgggaattcggccattacggccggggagagaaagcgacctcaagatacaactggcaactgaggaaaaggcctcaattcaacaagagctaacaagcttgggagtttatttcggaatctttaaaagactcttctgcttacccacaatctgggatccactgcaggaaaacaaaaaaggaaaacttcatttaaaagaagcaagaagtaaaatgggacaaattgggaatgtttaagtctctgaaactctgcactgaaaagaaaataagattgataacttaagcttaacattctgaggcataaagaaacattaactttggagtattcatcttgactactgaaatacaagtttagaagacaagtggtttcattctggtcacagatcacagcttttctttaaatttataatcctatgggttggactcgttgactgtattttttaaaaggttgctcgtcagttaactgagccttggaattcatggattttctaaagactaacaaatgaaaatattttcctgttgaagaacccagcggaaattttacagcaacaaatttcatgtttcttttgggtatttctgagaaaaaggaaatatttataaaaccatccaaagatccagataatttgcaaataaattggaggttatagaggttataatctgaatcccaaaggagactgcagctgatgaaagtgcttccaaactgaaaattggacgtgcctttacgatggtaagccgttaacaagctcccactgcttctataaatgactccctttaaagtacactttgtatgggtgcatgttccagcaatggtgttttgtgcnttggggttaatatcccaattggtgttngccatatacattttcatctggcgtcctcaaagtcccgaaatggaaact

SEQ ID NO: 82990 - DNA, 1255 bp, Homo Sapiens
atcccccgagtataggatgcgtttctgcctcacaaaagtcccttgggggtggggggacgtcagcggctgaggcgcaggaaagaggagagcacacggggagtggcccttggaaccaggcgcgcaaaacctcagcccctaggctccatttccaggttcgcgggtgacctccccaagatggccgccgcctgggggcgggcctccacgctgcacgggtgttgattgggtgagacgactcaatggtgagcaatgattggttcacacggcgcaagctgggcggaaccggaagatggtgtgagccacgggctgccgggggcctggggctcggcgtcggtccccgggggatgtggagagctggcagcatgtcggccgagctgggagtcgggtgcgcattgcgggcggtgaacgagcgcggtgcagcaggctgtggcgcggcggccgcgggatctcccagccatccagccccggctagtggcggtcagcaaaaccaaacctgcagacatggtgatcgaggcctatggacatgggcagcgcacttttggcgagaactacgttcaggaactgctagaaaaagcatcaaatcccaaaattctgtctttgtgtcctgagatcaaatggcacttcattggccacctacagaaacaaaatgtcaacaaattgatggctgtccccaatctcttcatgctggaaacagtggattctgtgaagttggcagacaaagtgaacagttcctggcagagaaaaggttctcctgaaaggttaaaggttatggtccagattaacaccagcggagaagagagtaaacatggccttccaccttcagagaccatagccatcgtggagcacataaacgccaagtgtcctaacctggagtttgtggggctgatgaccataggaagctttgggcatgatcttagtcaaggaccaaatccagacttccagctgttattgtccctccgggaggagctgtgtaaaaagctgaacatccctgctgaccaggttgagctgagcatgggcatgtccgcggatttccagcatgcggttgaagtaggatctacaaatgtccgaataggaagcaccgattttttgggagaaccgggattactcaaaagaaacccaccccggacaagtgcgcgccagacgtgtgaaggcccgttggggggtggcaggagccttgacccaggatatgggagactaatttgcctaactgaaaattattgaattcccgggtcagcggctgtcccggacggggggaaca

SEQ ID NO: 82991 - DNA, 1724 bp, Homo Sapiens
  misc_feature (1217)..(1217): n is a, c, g, or t
  misc_feature (1266)..(1278): n is a, c, g, or t
cccacgcgtccgaagagagggggcgagcgaccgagcgccgcgacgcggaagtgaggtgcgtgcgggctgcagcgcagaccccggcccggcccctccgagagcgtcctgggcgctccctcacgccttgccttcaagccttctgcctttccaccctcgtgagcggagaactgggagtggccattcgacgacagtgtggtgtaaaggaattcattagccatggatgtattcatgaaaggactttcaaaggccaaggagggagttgtggctgctgctgagaaaaccaaacagggtgtggcagaagcagcaggaaagacaaaagagggtgttctctatgtaggctccaaaaccaaggagggagtggtgcatggtgtggcaacagtggctgagaagaccaaagagcaagtgacaaatgttggaggagcagtggtgacgggtgtgacagcagtagcccagaagacagtggagggagcagggagcattgcagcagccactggctttgtcaaaaaggaccagttgggcaagaatgaacaaggagccccacaggaaggaattctggaagatatgcctgtggatcctgacaatgaggcttatgaaatgccttctgaggaagggtatcaagactacgaacctgaagcctaagaaatatctttgctcccagtttcttgagatctgctgacagatgttccatcctgtacaagtgctcagttccaatgtgcccagtcatgacatttctcaaagtttttacagtgtatctcgaagtcttccatcagcagtgattgaagtatctgtacctgcccccactcagcatttcggtgcttccctttcactgaagtgaatacatggtagcagggtctttgtgtgctgtggattttgtggcttcaatctacgatgttaaaacaaattaaaaacacctaagtgactaccacttatttctaaatcctcactatttttttgttgctgttgttcagaagttgttagtgatttgctatcatatattataagatttttaggtgtcttttaatgatactgtctaagaataatgacgtattgtgaaatttgttaatatatataatacttaaaaatatgtgagcatgaaactatgcacctataaatactaaatatgaaattttaccattttgcgatgtgttttattcacttgtgtttgtatataaatggtgagaattaaaataaaacgttatctcattgcaacacacaanaatccccctaaatacctacaacccaacccccctaattcccttgtcttgnnnnnnnnnnnnnttcgcaaggttcctttaaaccatttcctttggccccccgacccccatccacgtctgggccacctcgccccttactctgctttcccccggagctcccgcgcccccagaccttagtggctttgggatcttttcccccgccacttaacaccctttcgtgtcgccaaacccaccggcccccgcaatttattcccccttcttttttttcccccgtggtaatttcccgtggcccttaacgtcacttgcatatctccatcccccctttttttccttccaccgttatcctcccgtcctttccggacccccattcgtacgcaacaaccccaccccaccgttttcaccccctttgccccgtgcaaatactctgcatccccgcatacacccctttcccaccacattatcgtcactgttgacaccccgaaccaccgctctcctatatttaacacatct

SEQ ID NO: 82992 - DNA, 1124 bp, Homo Sapiens
ggcacgaggcacctgcgccgagtgcgggaagaacttcggtaagaagacgcacctggtggcgcactcgcgcgtgcactccggcgagcggcccttcgcctgcgaggagtgcggccgccgcttctcccagggcagccatctggcggcgcatcggcgcgaccacgcccccgatcggcccttcgtgtgtcccgactgcggcaaggccttccgccacaaaccctacctggcggcgcaccggcgcatccacaccggcgagaagccctacgtctgccccgactgcggcaaagccttcagccagaagtccaacctggtgtcgcaccggcgcatccacacgggcgagcggccctacgcctgtcccgactgcgaccgcagcttcagccagaagtccaacctcatcacccaccgcaagagccacatccgggacggcgccttctgctgtgccatctgtggccagaccttcgacgacgaggagagactcctggcccaccagaagaagcacgatgtctgagacggtgggcggggccgtgttggctgagagagggctggggtccttcgtggtgggagtcgcagtgggctgggggtgcctgcctagtgctggagtaggggacaatgggaatcctagaggggatggaagacgcggggagtgagctgggtgggccctgctaagcgagagaggtcaaccccggtggccagggaacccacttccaagcgcagggacgccggcctccagctggtgtgtgctaaggctccgtcctgactgccctgtgccctggaaaagcagcaatagcatccgccccttagagccctctggctagaggagccaccagtggaaaagaagaccctccatcctctggtattaacgccttaatgcccctgtcttttaatgtaagttacttaaatcattttggaagcaggcgtggaaagtccgtaaagaatgcttgggctgatacagttgaagactgctggctgttaacaccttgggcttgcagctcagagggacgaacacctacttccttcctccatgccccgctagcccaattgaaaccttgcgatattttcctctccaaataccaggtttctgggtcgttttgcccactaagccggttgattccgtttttcacctcctg

SEQ ID NO: 82993 - DNA, 787 bp, Homo Sapiens
gcggccgcgggctcctcagagccggggccccgggcccgtgacagacgggccgaggaagggagagaggcggcggcgacaccatgtcatctcccagtccgggcaagaggcggatggacacggacgtggtcaagctcatcgagagtaaacatgaggttacgatcctgggaggacttaatgaatttgtagtgaagttttatggaccacaaggaacaccatatgaaggcggagtatggaaagttagagtggacctacctgataaataccctttcaaatctccatctataggattcatgaataaaattttccatcccaacattgatgaagcgtcaggaactgtgtgtctagatgtaattaatcaaacttggacagctctctatgatcttaccaatatatttgagtccttcctgcctcagttattggcctatcctaaccccatagatcctctcaatggtgacgctgcagccatgtacctccaccgaccagaagaatacaagcagaaaattaaagagtacatccagaaatacgccacggaggaggcgctgaaagaacaggaagagggtaccggggacagctcatcggagagctctatgtctgactgttccgaagatgaggcccaggatatggagttgtagtagaaaaagcacctgcttttcagaaagactattatttcctaaccatgagaagcagactataatattcatatgtaaacaaagcaattgtttctattactaaacaaggttgttatgaataatagcattgattatatatattatatatcaagctttag

SEQ ID NO: 82994 - DNA, 874 bp, Homo Sapiens
gcacagagctatttcagccacatgaaaagcatcggaattgagatcgcagctcagaggacaccgggcgccccttccaccttccaaggagctttgtattcttgcatctggctgcctgggacttcccttaggcagtaaacaaatacataaagcagggataagactgcatgaatatgtccgaaacagccagtttccaatgttagagccatccaggcaaatatcaatattccaatgggagcctttcggccaggagcaggtcaaccccccagaagaaaagaatgtactcctgaagtggaggagggtgttcctcccacctcggatgaggagaagaagccaattccaggagcgaagaaacttccaggacctgcagtcaatctatcggaaatccagaatattaaaagtgaactaaaatatgtccccaaagctgaacagtagtaggaagaaaaaaggattgatgtgaagaaataaagaggcagaagatggattcaatagctcactaaaattttatatatttgtatgatgattgtgaacctcctgaatgcctgagactctagcagaaatggcctgtttgtacatttatatctcttccttctagttggctgtatttcttactttatcttcatttttggcacctcacagaacaaattagcccataaattcaacacctggagggtgtggttttgaggagggatatgattttatggagaatgatatggcaatgtgcctaacgattttgatgaaaagtttcccaagctacttcctacagtattttggtcaatatttggaatgcgttttagttcttcaccttttaaattatgtcactaaactttgtatgagttcaaataaatatttgactaaatgtaaaatgtgaaaaaaa

SEQ ID NO: 82995 - DNA, 509 bp, Homo Sapiens
gattcggcacgatgggatatttatgtacatattaagataaatgtcatgtgtaagataactgataaatattggaactttgctagaacaagaccctgtagtaatagtaataatagttgaagtttggccaactcttaataaagttattttggtaactaatgttttatggcacttaagaataattagcagcgttaaattttgtttgtattaagcacttttaattttatccttcctaaaaatagtttattgtatctgacaagaaacttacttaaccattgtgtccttcccatcttttttgtcatctttgttttcttcaaatgccctcctcccatctgccttgagattcccttgtcttcacttaaaagccagagtgcaagtcatgatttgcgggagggctcttgaaccacttctggctgcaccacaattctgtacttgagtatcacagtcattgtttttgagacaaacatttttataattctaatttgggttaataaagattttaaatatttaaa

SEQ ID NO: 82996 - DNA, 1031 bp, Homo Sapiens
  misc_feature (75)..(109): n is a, c, g, or t
tggaagatcatatagggcgctagcgctttgtatgcgaacgacgagcgcagcgagtattgagcgaggaagcggcgnnnnnnnnnnnnnnnnnnnnnnnnnnnnnnnnnnncagtcgacggtaccggacatatgcccgggaattcggccattacggccggggagactgacagggagcaaataggtagcaaggtttttcgtaatgatgcctgtggtagtgctttaacagcacaactcttctttggaaagggaacacaactcatcgtggaaccaggaagtcagcctcataccaaaccatccgttttgtcatgaaaaatggaacaaatgtcgcttgtctggtgaaggaattctaccccaaggatataagaataaatctcgtgtcatccaagaagataacagagtttgatcctgctattgtcatctctcccagtgggaagtacaatgctgtcaagcttggtaaatatgaagattcaaattcagtgacatgttcagttcaacacgacaataaaactgtgcactccactgactttgaagtgaagacagattctacagatcacgtaaaaccaaaggaaactgaaaaaacaaagcaaccttcaaagagctgccataaaaccaaagccatagttcataccgagaaggtgaacatgatgtccctcacagtgcttgggctacgaatgctgtttgcaaagactgttgccgtcaattttctcttgactgccaagttatttttcttgtaaggctgactggcatgaggaagctacactcctgaagaaaccaaaggcttacaaaaatgcatctccttggcttctgacttctttgtgattcaagttgacctgtcatagccttgttaaaatggctgctagccaaaccaatttttcttcaaagacaacaaacccagctcatcctccagcttgatgggaagacaaaagtcctggggaaggggggtttatgtcctaactgctttgtatgctgttttataaagggatagaaggatataaaaagatataggactctttttttactcctaaaaaaaa

SEQ ID NO: 82997 - DNA, 507 bp, Homo Sapiens
gcggccgcaccacaaaatggcagtcgctcggtcgcggagaagcacctgctaaatgccgtgactccctccccctgccctgccccgctagcgccaacgtcgttctccccgcccaggcgccccggtcttcccacgccgccccgcccaggggcaacagggtccggagcccgccaacaacgcggcgcctttgtgcgggcgcacgccacctttactcagccacacgggcccctctccggggggctttttcttaaaggggcaaccgctggaagaaacggagcaccgccgcccgggacgcccctcaggcccggggttactacggtttccccaactcgcagcgttagcgtcaggccaccaaagtgaagatgggtggtgaaaggaccacagagcccgataggagagaaaacctaggaaaaattagtgaaagacgcccccaaccaatgctttggcggccacgctgagtcctaacgtactgagcccactcgacggggcccgtgcgcacaggcggctcca

SEQ ID NO: 82998 - DNA, 658 bp, Homo Sapiens
attttcagtgacattaaataataaggattcaggaatacaacgaatataacaaaaatgtaagatatctagggatgcgtataacaaaaaaattataaagcttcatttaaaacatttttaaacaaaataagtagaaagtaataccatctttatggaacagagtcagtattataaatgtgtcagttttcttcaactggtccatagacaacacaattttaactaagattccaattgggatttctgtggaacttgatgagttagggccaaaagtaatcaagatattcatgaggaaggataacagaatggcaaaacttgctttaataatttgtgcagggatagacaaatactgtacaccagtctctcaatagggagatcaaaaccaaattcacacagacatgaaaagttgatttatgacagatgatgttgcagtccctggggaaagaatggaaatggtgctagaataattggtttctatatgtatttctatatatgtatatgccattacattaaagtcaatgcctatggagtttgggaggagtgatcaaaatgttctggaattagatgtgatgtttgcacaactctgtgaatgtactaagaaccactgaattgtatatttttaaagcatggtatgtgaataatacctcaataaagctgttataaa

SEQ ID NO: 82999 - DNA, 456 bp, Homo Sapiens
agcctttaaaatgtttgtactgtaatactttgcttaaaagtcatgaggcattctgtgatccaacctctttcacttatttataagccctcttggttgctattccatattgtaggatgcctttctatttcaattggtaactttctgttttgttcttcctaattattctcccaagatcccacactgcagctttatctttaggcttatgaaaggtaacccgtggttaccggctctccaagtgattctgttcttctacatttttggcagttaatttgcagaagtaactgacagctgacaccatatgagaacctttgtataaaatattggcatgtaaacagcacagacaccgtaacacactctgtgccctgtttggttgttgacaatgaagcaccattatgtgactcttcatataacccttttttctacggcagcattaaaattgtctttttgctataaaaa

SEQ ID NO: 83000 - DNA, 1107 bp, Homo Sapiens
ttaagtgtaaaaagagtcaacaacacaccctttaagccaagaaaaaaaatacatcaggaggaacagtcacaattgagtagactgagaggaggcgtgaggggctggaccagagggccaggagggagcgaggcgtgacggggtgagggcccccctcccagcgcctggagatggggaggagtggaataggctgtgggtagcagctgctgcgagtctccaccccgaccaaagcagctgctcctcctgtgcccaggcccagcccatgctctgtggccatgcacctagcaggcacctagcgggacagtggcgtctgcttcagggacatgagcaccgagcgcaggcgggacacatctttgcactgcttgctgctcttggggttgaagtcacatagctgggccaccttctcccactctgtgcctggggtctcctcctttggattccttcacgaaagcctcctcggatgcccggttgttgatcttgttcttctctacttgttcactctggcgctggttccactcctccaggtccttcttggccttctcccgccattcctgttccgtgaccttagatgcagcatccagctcttgcagccgtttcctctgctcctctcgccacttgcggatgctctcaggctcctgggtcagcctgtcagcctgggcaatggctgcgtagccatcagcaggaccgttggcctcctgaaacacatctccattgactgtggtccccatgtcctcagaaccagccccactcgtggggcccggctgcgcgggggccgcatggctgccggcaggtgccccgaagccctcgtcgttctctatgcctgcaatctcgctctcctgctgggccaggaaggcggccgccgggtcctcctccgccgcctccggggcaccgctctccgacgacgagaagaagccaaagtcatcagccattttccccgcgcctccgccggagcctccgctgcgctcggctcatgcccgcgcctgccccgcgctgcgtccggcggccgcgacgctgtcacccgagccgcggggagccggcgtcggcggggacgggcttggcgcaggaccgcacttcctcctcgtgccgattaaaacccagcctgtacctagc

SEQ ID NO: 83001 - DNA, 531 bp, Homo Sapiens
tgcggccgccgggtcctcctccgccgcctccggggcaccgctctccgacgacgagaagaagccaaagtcatcagccattttccccgcgcctccgccggagcctccgctgcgctcggctctgcccgcgcctgccccgcgctgcgtaccattctgataattttcttgtcaattttggggtctgtaggaactctatattcaggaaacttctgtacctttttaatgtaaatccgagctggacaagtggctttgtagagctgacaagacctgctttcctgctcactgactttttttaactggaaaccttttcttcttggcccatactgacactccattaccacagctctactccctgcattaacaaatgggattccatcatatggaacatactgggatttccacatcaagcgtgtagcaggcttggctgggcttggagactgacgggtcccccaaacactctgtgtttgctgcttgtgaaatgttaggacactttctaattcagtctcacttacacagtagccacggtatgaatct

SEQ ID NO: 83002 - DNA, 534 bp, Homo Sapiens
tctttaagagacaagatcttactatgttgcccaggtgggacttgagctcctgggcttaagcaatcctcctgtctcagcctcctgagtagctgggactacaggcggatactactgcagctggctcctccaagtacttctgtcttggggcctgattcctcattcccaggtgcacagtgctctctactgctaccagcaaccatttctatggcaagggaaaggcctcaaatccagggacaggataggcagcagccagtgtacctagaatttgtggctgccaccaccttttctcttaggactggcttgtctctcccactggtggctgcagaagaggaacagagtgaatatcataaaggaatgctcaattcagaactgtatcacctcattttacaaactcccaaagggctgccaagagtcatcattatagatcgatgggttaaaataccacctaaggaactcattgtaaaagcagcaacttgtctgtaaggtcacaccaaacttacaggggttctgatgttgtttgcttccatttttgtt

SEQ ID NO: 83003 - DNA, 512 bp, Homo Sapiens
  misc_feature (84)..(104): n is a, c, g, or t
  misc_feature (126)..(171): n is a, c, g, or t
ggggagccgaggagtttgtgtggaagtttgcatctgagagtgcgagagctggacggagtgttacagagccgcgatgccttctcnnnnnnnnnnnnnnnnnnnnngatacagtgtctcgctcttccnnnnnnnnnnnnnnnnnnnnnnnnnnnnnnnnnnnnnnnnnnnnnnaaaatcctggacccaaaagatcctcccacctcagcctgcctcccaggtagctgggactacaggcgcacaacaccatcgcttcttggattaaaagaaaaggatgaaacgggccccagaaagaggcggtgacgtcccagaacccatggcaggggagttgggaaaataaatatttgtattgttttaatctcccttgtggctttttttaacccccgaaacagcaaggtatttttaaaagggatgaagagagttgcttcaaatgttttgagacgttgttatttttaatatgtgagtgaatatcttagaaacaaaatgaacaagaaataaaaattttagaaaatata

SEQ ID NO: 83004 - DNA, 923 bp, Homo Sapiens
  misc_feature (19)..(19): n is a, c, g, or t
  misc_feature (66)..(66): n is a, c, g, or t
  misc_feature (108)..(537): n is a, c, g, or t
tcgacaggacgagagagtncagggacgctgtttttagtctgcggttcccacttgactgactcgatnttgtgtcgtcaggggcgagctatgaaaacgcagcacgcgccnnnnnnnnnnnnnnnnnnnnnnnnnnnnnnnnnnnnnnnnnnnnnnnnnnnnnnnnnnnnnnnnnnnnnnnnnnnnnnnnnnnnnnnnnnnnnnnnnnnnnnnnnnnnnnnnnnnnnnnnnnnnnnnnnnnnnnnnnnnnnnnnnnnnnnnnnnnnnnnnnnnnnnnnnnnnnnnnnnnnnnnnnnnnnnnnnnnnnnnnnnnnnnnnnnnnnnnnnnnnnnnnnnnnnnnnnnnnnnnnnnnnnnnnnnnnnnnnnnnnnnnnnnnnnnnnnnnnnnnnnnnnnnnnnnnnnnnnnnnnnnnnnnnnnnnnnnnnnnnnnnnnnnnnnnnnnnnnnnnnnnnnnnnnnnnnnnnnnnnnnnnnnnnnnnnnnnnnnnnnnnnnnnnnnnnnnnnnnnnnnnnnnnnnnnnnnnnnnnnnnnnnnnnnnnaagaattcggcacgaggctcacccactctctcctaatcccctacttaagtagggcttgccccacttcagaggttttggggttcagggtgctgtgtctccccttgcctgtgcccaggtcatcccaaacccttctgttatttattagggctgtgggaagggtttttcttctttttcttggaacctgcccctgttcttcacactgccccccatgcctcagcctcatacagatgtgccatcatggggggcatgggtggagcagaggggctccctcaccccgggcaggcaaaggcagtgggtagaggaggcactgcccccctttcctgccccctcctcatctttaataaagacctggcttctcatctttaataaagacctgtttgtaacag

SEQ ID NO: 83005 - DNA, 1072 bp, Homo Sapiens
atgagccaccgtgcctggcctgcgagtttaattattttttcgggggtgggtgaacttctcgcagcggcccccttgtgggggtaacccggtggcgggtttcacttcggggtttggaggggaagttggagtctgtggggcgggtcccgcccggccccgaatgtcacggccgaggttctcggaagcagcagagtgaagttccttcctgccctgaccccaggtctatggcttaaaaatcagggtgcccaggctggggccgcgcagcccaggggccctctgtaaacatggcaggtgcagccagaaggggcttccgggaccccgggggacctgcggtgggcagggcagagggtcagggtgaccagagccatggagagggcaatgcccggaggacacgtagatatggggtgggggagttaggacccccaacatggagagagacaggggccaagaaagacagagaaaaggagacagagggagatctggagaatgggggagggaaggaaagagaaagagggtgagagaaccccaaacaagagccagagccggagaaatgaggacccctggatgtggctggtctggtccgtggctcccgccgccgcagcctccggcgcagacgggcccaggggcggctctgcttggggcgggtcctcggtgctcagcgggcggcaggcggcgggccggggcccggggcgcgcactgggtgcgccagggtgacggtgagcgcgtcgttgtgctgcaccagcgaggcgtgctggtagtgcagcaccagctccttcagcgacccgtacaggttgtagggctccgcgaagccgaagccggtggccgtgcggtagatgacgcagtgcttggtgtcgccgtccactaccacggagcaggcgtagcagccccgctggctgctctcgcggatgaggaaggtgccatcccgcttgccgctcagcatctcctctgcctgcgtgcggttgatcttgcccacgtaccaagtgcgttcctcgtggtgcgggagatcgtcctcgtcctccatgagtgcgtactggtcctcagtctcatttttacctcgtgccgaattcgccaccca

SEQ ID NO: 83006 - DNA, 441 bp, Homo Sapiens
aagtgctcatgagtccatcttttctggaaagcaaagaccagcctgaagcagtgggagctgctgcccaagcggtagtgaactggagagaaacaggccctggattttcagtgaggatgtggatctgaagagtcccccaaatgcctctgaagtctgacatctctgcttagccctaggagtctggttccctgccttcagttgcagagtgatgtgtttgtgtcattgttgatgtcacctcctaaaaagaccttcactttctggctgccacaaagccatatgtgttgctccccatatacagcctgacagagtaaatggagaggaagtgctggatttgtgtatcactggctatcagttcctcatgttgttaagcctcacacaggtgtgctagcattgaactgtagagtgtcacatacctgagtttgaaaataaaagcacatttccaaa

SEQ ID NO: 83007 - DNA, 489 bp, Homo Sapiens
tgataaatatgttataagaagctcttgggtgatctgaaagctgtccctagccttctgagattttaatgcaggattactaatctgtcccacaaaacatcttttaattccatgtgagagactgtttgaaccacagatataaacccagtatggcaagtcacttattggtgttttgttgttgttgtttaaaatgtagacaacattctcagagttgaggcaaaattcgctaagtctgttctgtttcacatttttttatgatagattttatgtatagagaggagagaaaatatacaatgtagaattggatccagctgctgataaaagagaacacagtaatgtttgacttactcgtaatacttgcatatatattttcaatatgttcatatggtttgaactcctaaagcaaattgtccaagttactagctttaaattggttttttttagcattagacaatcaggaaggcaaggaattctcttcaaattataactcgc

SEQ ID NO: 83008 - DNA, 528 bp, Homo Sapiens
gtatgtctgtctaatttggatttttaactgttatttgacctatttttttagggaccatgcagagtgccctgtgtctgcatgcacgtgtaaatgtatgcagttggatacaacggggaatatggtacctgcagagactgtccagccataaaatgttaccaccttaagagaacccttcaagtgtggagctttctagtaggtgtccttcatagctcagaaacatacctcagaacaagccattcatgacttacctgtaatgggaaaataaatcattctatcagatcagcagttttgatgtttgagtgattttgatatgcttcacagagacaaatgctgccaaaataaacatcgaagtatagacatgagttctgttcagcaggttgaaaagtctgatttagaaaaactttctaagttttggttgaaattatgaacactctagaagcagaatttctggaagagccaagaacagactttgagcctatatcttcaaagctgaaactggatatctttcaataaaataagtgcactttt

SEQ ID NO: 83009 - DNA, 1255 bp, Homo Sapiens
gcaggatcgaggccgtggggcgaatcggcacgaggtggaaaaccaaagttgcagtacgtgacagagtggcatttgcttgtaaattccttagtgatactcagttaaatagatacatcgaaaagttgaccaatgaaatgaaagaggctggaaatttggaaggaattttgcttacaggccttactaaagatggagtggacttaatggagagttatgttgatagaactggagatgttcaaacagcaagttactgtatgttacagggttcacctttagatgttcttaaagatgaaagggttcagtactggattgagaattatagaaatttattagatgcctggaggttttggcataaacgagctgaatttgatattcacaggagtaagttggatcccagttccaagcctttagcacaagtttttgtgagttgcaatttctgtggcaagtcaatctcctacagctgttcagctgtgcctcatcagggcagaggttttagtcagtatggtgtgagtggctcaccaacgaaatctaaagtcacaagttgtcctggctgtcgaaaaccacttcctcgatgtgcgctttgtctcattaatatgggaacaccagtttctagctgtcctggaggaaccaaatcagatgaaaaagtggacttgagcaaggacaaaaaattagcccaatttaacaactggtttacatggtgtcataattgcaggcacggtggacatgctggacatatgcttagttggttcagggaccatgcagagtgccctgtgtctgcatgcacgtgtaaatgtatgcagttggatacaacggggaatctggtacctgcagagactgtccagccataaaatgttaccaccttaagagaacccttcaagtgtggagctttctagtaggtgtccttcatagctcagaaacatacctcagaacaagccattcatgacttacctgtaatgggaaaataaatcattctatcagatcagcagttttgatgtttgagtgattttgatatgcttcacagagacaaatgctgccaaaataaacatcgaagtatagacatgagttctgttcagcaggttgaaaagtctgatttagaaaaactttctaagttttggttgaaattatgaacactctagaagcagaatttctggaagagccaagaacagactttgagcctatatcttcaaagctgaaactggatatctttcaataaaatatgtgcacttttaaaataaaatgactaattctgtgaaaaaaa

SEQ ID NO: 83010 - DNA, 822 bp, Homo Sapiens
acattgactgagcaaccaaaacccttaacaaaagtagcatggtgtcccactaggactggtctacttgccactttaacaagggatagtaatattattagattgtatgatatgcagcatacacccactcccattgggatgaaactcgaacccacaataattgaaagaagtgtgcaaccttgtgacaattacattgcttcctttgcgtggcatccaacaagtcaaaatcgaatgatagttgtaactcccaaccgaacaatgtcagacttcactgtttttgaaaggatatctcttgcctggagcccaattacatctttaatgtgggcttgtggtcgtcatttatatgaatgtacggaagaagaaaatgataattctttagaaaaagatatagcaacgaagatgcgtcttcgggctttatcaaggtatggacttgatacagagcaggtgtggaggaaccacattttagctggaaatgaagatccacagctcaagtcactctggtatactctgcactttatgaagcaatacacagaagatatggatcagaaatctccaggcaacaaaggatcattggtttatgcaggaattaaatcaattgtaaagtcatcgttgggaatggtggaaagcagcagacataattggagtgggttggataagcaaagtgatattcaaaatttaaatgaagagagaatcttagctttacagctttgtgggtggataaagaaaggaacggatgtagacgtggggccatttttgaactcccttgtacaagaaggggaactgggaaagagctgctgctgtggcattgttcaacttggatattcg

SEQ ID NO: 83011 - DNA, 1153 bp, Homo Sapiens
  misc_feature (115)..(115): n is a, c, g, or t
  misc_feature (127)..(223): n is a, c, g, or t
aaaagttgagcctgaattaaatgtaatgtttccaagtgacaggtatccacatttgcatggttacaagccactgccagttggcagtagcactttcctggcactgtggtcggttttnttttgttttgcnnnnnnnnnnnnnnnnnnnnnnnnnnnnnnnnnnnnnnnnnnnnnnnnnnnnnnnnnnnnnnnnnnnnnnnnnnnnnnnnnnnnnnnnnnnnnnnnngtgtgcgccatcacaactagctggtggtcagttttgttactctgagagctgttcacttctctgaattcacctagagtggttggaccatcagatgtttgggcaaaactgaaagctctttgcaaccacacaccttccctgagcttacatcactgcccttttgagcagaaagtctaaattccttccaagacagtagaattccatcccagtaccaaagccagataggccccctaggaaactgaggtaagagcagtctctaaaaactacccacagcagcattggtgcaggggaacttggccattaggttattatttgagaggaaagtcctcacatcaatagtacatatgaaagtgacctccaaggggattggtgaatactcataaggatcttcaggctgaacagactatgtctggggaaagaacggattatgccccattaaataacaagttgtgttcaagagtcagagcagtgagctcagaggcccttctcactgagacagcaacatttaaaccaaaccagaggaagtatttgtggaactcactgcctcagtttgggtaaaggatgagcagacaagtcaactaaagaaaaaagaaaagcaaggaggagggttgagcaatctagagcatggagtttgttaagtgctctctggatttgagttgaagagcatccatttgagttgaaggccacagggcacaatgagctctcccttctaccaccagaaagtccctggtcaggtctcaggtagtgcggtgtggctcagctgggtttttaattagcgcattctctatccaacatttaattgtttgaaagcctccatatagttagattgtgctttgtaattttgttgttgttgctctatcttattgtatatgcattgagtattaacctgaatgttttgttacttaaatattaaaaacactgttatcctacaaa

SEQ ID NO: 83012 - DNA, 759 bp, Homo Sapiens
  misc_feature (53)..(53): n is a, c, g, or t
  misc_feature (99)..(99): n is a, c, g, or t
  misc_feature (134)..(134): n is a, c, g, or t
  misc_feature (503)..(529): n is a, c, g, or t
atatgtgccctgtgcgccagaaggacggtatcttctatgtccgcctttcttgnggtcagcctctccccgcgtctctgcctggcttgtgtggcccgttgncagtcatttttctggcggttccagtttaggtttgngaaggtccagatgaggtgaggagctgcgtctctctcataagaatttaaatcacctccccaccctgagaggcctcttttccaggataaaggcctccacccccaagccaaggataatagcctcaccggagaggtcattgtctacctgcaggagcagtgcagagcgacctgaaagaaggtggttctcattcatctctctctttcatctccttgagaaatctagccacagggtaacacaggttttgagaggatgggaacgggacgtggcaaggatctgtgagtgtgcaggctgtgtttcacatatcattaaacatagtccagtgagggttctgcagataactggcgtttaagtttgttttattgaatcaaggnnnnnnnnnnnnnnnnnnnnnnnnnnngacgcaacttgcctgccagcccatctgactgttacaaatttaatagtagtttttatttatcttctcatgtaaaggtccttggcagtgatacctaatttcctaagatagccttgctttatattgtgtgattaagatgtcatgcatatcagagtatctggaaattcttctcaacgtcctttacatacgtgattaatcacatttccaaaataacataccaaaatgaataacag

SEQ ID NO: 83013 - DNA, 415 bp, Homo Sapiens
ctgatggaataaagcaccccttgtgaactcatcccataacaagcagaagttgtaagtgtcggggaagagcccattgcatacaaagtaaagtatagcccacactgcaaggaggtaggaaaatctgcttgacgcaagatgctcccagaatcaagaagagtgtcagaaaatattggcaggtgatgaatctgctgattaatatgttctgtttctgccaaacttctttaactcccaggaagggtagaattttgaaaccttgattttctagagttctcatttattcaggatacctattcttactgtattaaaatttggatatgtgtttcattctgtcacaaaaatcacattataatctgagaaggttggttaaaagatggcagaaagaaaatgaaaataaataagcctggtttcaaccctc

SEQ ID NO: 83014 - DNA, 495 bp, Homo Sapiens
cccccaccttgcctaataactgcaaatcgcatgttcagccagcagcctcctaagcccaccttcctcccccattagagaacacccatcctaggtgctctccaggctgtgtcattggcagggcttcacatgcaggaggcctctctcaggtgagtccaggttaaactgttgagttgtggcttcaacagatatgtatggcatgctgggatgtgccaggtgcctgcgttgtgccagttgctggagaggtagtgtgagcagagcagctgaaatcttgccatcaagcaaccctcattctcatgcctgtaggtttccattgctctgtcccaggacacttgcgtgccagagacgccacaacttcatgtccctgtctcttgcaagctccccgtgctgccagtacttcatgccttggatgtggtcccaccagcccagtggccggggtcagcttaggctctgcttcccagtggacgggtgtgctaagggtttattttatgtaaaaaa

SEQ ID NO: 83015 - DNA, 426 bp, Homo Sapiens
tgagagttgcagtttttagctccagttgctattttcatcaaaatcaaggctggtatttagctgatatgtaccacaactattatatgtagctggccttatgtgttgttatatatttagaatattactcttgcatcaagctgtttcttttgctaactgcttgttaacagttaactagcactgctaaaagcatttatattgatttttttcccatacaggcacatgatggctccgctacttacttgagattcattattgtatcagcctttgatcattttgcatctgtgcatagcgtttctgcagaaggaacagtagtctcaaatctttcctcataatgataacaaaatgctcttgcatgattttttaacaatatatttaaacaggaagttgtcactgatatactttattaaaaggatttttatcaaaaaa

SEQ ID NO: 83016 - DNA, 919 bp, Homo Sapiens
  misc_feature (600)..(600): n is a, c, g, or t
  misc_feature (603)..(603): n is a, c, g, or t
  misc_feature (609)..(609): n is a, c, g, or t
  misc_feature (841)..(849): n is a, c, g, or t
gggacctggaggcggggccaggcccagggcaggcgacccgagggccgagggtttggaactcgcagaggttaaacactttaagatgagaaaaattgatctctgtctgagctctgaagggtccgaagtgattttagctacatcaagtgatgaaaaacacccacctgaaaatatcattgatgggaatccagaaacgttttggaccaccacaggaatgtttccccaggaattcattatttgtttccacaaacatgtaaggattgaaaggcttgtaatccaaagttactttgtacagaccttgaagattgaaaaaagcacgtctaaagagccagttgattttgagcaatggattgaaaaagatttggtacacacagaggggcagcttcaaaatgaagaaattgtggcacatgatggctccgctacttacttgagattcattattgtatcagcctttgatcattttgcatctgtgcatagcgtttctgcagaaggaacagtagtctcaaatctttcctcataatgataacaaaatgctcttgcatgacttttcaacacatatatttaaacagcaaagtgtcactgatatacctcattgacgggtanttnaatccnccccccaaccttcaaaacatcacatcgcctatataagaaaatttcctctcaccatcccccttttctctccccataacaaaaacaaacttaacccatcaacactccccacgataaccaccctccgtatcatcccccctctctccccaagggaatttttacacaaaaaaactccccttagtgggaccctgttttgtttctgtttgggagcttttctttttcccccacaaaaaannnnnnnnnaaacaccacttctttcgtgtgtgcgcgccgcgccccctctagaaaaaaagtttaatttttgccgggcata

SEQ ID NO: 83017 - DNA, 812 bp, Homo Sapiens
  misc_feature (630)..(653): n is a, c, g, or t
ggggcgggtcgggacgctctgcgtggggcggggcgcaagggaggtttcgagcccggaaggtccggcgcccagagctaacgggagtcccaggttaaacactttaagatgagaaaaattgatctctgtctgagctctgaagggtccgaagtgattttagctacatcaagtgatgaaaaacacccacctgaaaatatcattgatgggaatccagaaacgttttggaccaccacaggaatgtttccccaggaattcattatttgtttccacaaacatgtaaggattgaaaggcttgtaatccaaagttactttgtacagaccttgaagattgaaaaaagcacgtctaaagagccagttgattttgagcaatggattgaaaaagatttggtacacacagaggggcagcttcaaaatgaagaaattgtggcacatgatggctccgctacttacttgagattcattattgtatcagcctttgatcattttgcatctgtgcatagcgtttctgcagaaggaacagtagtctcaaatctttcctcataatgataacaaaatgctcttgcatgattttttaacaatatatttaaacaggaagttgtcactgatatactttattaaaaggatttttatccnnnnnnnnnnnnnnnnnnnnnnnnaaaaaacatgttcgggcggcctcgggcccttccaagaaagcttttcctaaaccatttccgtttgggccgcgccggggccccaggtagggtaagggggaaccctggggccctaaaccgtggttccctaagggaaatatcctggggtccaatgaaactaag

SEQ ID NO: 83018 - DNA, 331 bp, Homo Sapiens
acaaagagcaagtacaggagctgttcaagatcatgtattcaatcaaaatgaaatgtgacttgtaccgactgctgaagttgtcttgatgtttgagagacttgaaatctgtgaagaaatttgaatagattaccttttataaaaatagtagtagtctttaagtgtagaatactgcctaactctggaaatgtaggaaaagtcagcattctttaggttcaagatattaagtttaaatagcagctgaatgtggcctcatggcaaagcataaagaccttttttttccttgaaaaggaatttcaaaattgtcctttcccctcacagtgtcctaaaatgt

SEQ ID NO: 83019 - DNA, 910 bp, Homo Sapiens
  misc_feature (73)..(114): n is a, c, g, or t
ccgccggcgccctgtttgcggccgtgtacccctggatgaaggagaacaaggcggccaagaaaaccgcacttcnnnnnnnnnnnnnnnnnnnnnnnnnnnnnnnnnnnnnnnnnnctgcttgcctcagccacaaagaatccctggaaatcgccgatggcagcggcgggggatcgcggcgcctgagaactgcttacaccaacacacagcttctagagctggaaaaagaatttcatttcaacaagtacctttgcagaccccgaagggtggagattgcagcgctgctggatttgactgagagacaagtgaaagtgtggtttcagaaccggaggatgaagcacaagaggcagacccagtgcaaggaaaaccaaaacagcgaagggaaatgtaaaagccttgaggactccgagaaagtagaggaggacgaggaagagaagacgctctttgagcaagcccttagcgtctctggggcccttctggagagggaaggctacacttttcagcaaaatgccctctctcagcagcaggctcccaatggacacaatggcgactcccaaagtttcccagtctcgcctttaaccagcaatgagaaaaatctgaaacattttcagcaccagtcacccactgttcccaactgcttgtcaacaatgggccagaactgtggagctggcctaaacaatgacagtcctgaggcccttgaggtcccctctttgcaggactttagcgttttctccacagattcctgcctgcagctttcagatgcagtttcacccagtttgccaggttccctcgacaagtcccgtagatatttcagctgacagcttagacttttttaacagacacactcaccaaaatcgacttgcagcatctgaattactaaaaacattaaagcaaaacaaagcatcaccaaaca

SEQ ID NO: 83020 - DNA, 811 bp, Homo Sapiens
accattcctggaaacaaaatctggtctcaggttggctgagtgatttgcagactcatacctgggacagcaattccagcaccatcgttttcctgtgcccctggtccaggggaaacttcagcaatgaggagtggaaggaactggaaacattattccgtatacgcaccattcggtcatttgagggaattcgtagatacgcccatgaattgcagtttgaatatccttttgagatacaggtgacaggaggctgtgagctgcactctggaaaggtctcaggaagcttcttgcagttagcttatcaagggctccagacacacctgaacacatcgtgatgatgacgtcctctcaactctctttgtaaaaattttgttatttttgcttgtttctgattaatgattgtttgtcaatataagctcaatttaattttgcaggatttgttgttctgacctgggttctgggacttttaaattcaaattttatctccagatggaatggggtcctagcaacctccacatgttcaactattaatggatcatcaggcctgttttagatatcccttactccagagggccttccctgacttacaagtgggaagcagtctcttcctggtctgaactcccgccacattttagccgtactttgctaactgtgctcctcacttcctcttcttcattgcagttatttagatcccccctttccttctaatttttcagctccttcaatgcaaagtacatgtatttttaatatatgcatccctggtgaaggatcttgcctgcatgaaacatgttctcaataaaactctgtgttgaattta

SEQ ID NO: 83021 - DNA, 505 bp, Homo Sapiens
  misc_feature (412)..(412): n is a, c, g, or t
cgttattggatgttccatcatacttgtgggccaggacttagttaaatggctacaccttgctacaaggaagtctgggaaatacagtctttcagctggatacatccccctggcctgaataaaagctgggttctcttacaaagcacaaaaaggggattgaatattggttaggcacctgtcaatctttcatatcagcccacgtgagatagccagggtttggtgaaataaaatgctgtttctcctcaaaacacttctctcttcctgattggggagggaccctgttctctgcagagaaattctttctcatgacagggccaacatgtctgccaaaagacagcaataggacttcccaatcattctatatatttaagggagactttttaaaaactacaatacggttgaactcatgtgattnttttttttgccatgaagtttcttgttaagcattgaacatttaaaagtaaattttgactaatgtgaaataaaagaatgttacttgaagcaaaaa

SEQ ID NO: 83022 - DNA, 615 bp, Homo Sapiens
  misc_feature (20)..(20): n is a, c, g, or t
  misc_feature (62)..(62): n is a, c, g, or t
aagtgttcacacttactctncaggcctaaatgattctctaatctacaggggagtgtatgcangttttagttggcaagggccaatagtttttgtttgcttttataaatataaatgtaatcctcttgctggtcattaaaggcatttgggttgagatacctgccagaatttcaggcagtgtgacaaagagaaatgaaaacctctttggagacaatgctagttaccgttcccctggagggtttggtacagcaccacttgacacctaaccctctttgtcaacttcctatgtagttgctggtttgaaacttctgaatctacacattctctaaaggtttgatgtcttttttgaagtatcatctatttaattgtagcaaggggtttgggtggggcacatgcttataaataccagtcacttataagtaaaacattccctatgttaatatttctaataattaatttaaacgtgaatcaaagcaatatttaaaggaaacaaatattttctagtttaaaatctcactattatcaatgacggcttaatgaaatcctaacttcacatttgctttagggaaacttttaattttttacttcctatcaggttccctacagcctgaacttcgc

SEQ ID NO: 83023 - DNA, 620 bp, Homo Sapiens
aaacaatgtattgaggaactgaaaattcaagtatggctggagatgtaatttggcaggaaaggaagctggaaaggtggtcatggccagattagggagagtcatgcaaatttggttggcacataattaaaaagtttaaaggaagggagtgacaggatccactcttaactgctatgtggaccagctggagtgggacaaggataaagacaggaagaacagttaaaaggctgatgtggtaatccagtttaaaaagacagcaacctgcagtagagtgatgggagtgagagaacagtgagaagaaagaaattcgagaatttaggaaagaatcaacaggactatggtaattaccggaagaagctctgaattcaaaaatggtcttaaaaattaagtttgttttgctaaataaccaccaaccaaaaactttaccagtagtcaacatgctcaaatcaacattaaaataagatatacttgagtggtttcatatctaatcactcatatgagcactgccttgctcttcatctatggaacaaattcctcctagaatttactacttagataaaaaactctaaatcagtggttggcctttttgtgcatggaaccctctgaaaaaaataataaaagca

SEQ ID NO: 83024 - DNA, 545 bp, Homo Sapiens
tggcatcccatttaaaattgcttctgaagagaagcatgaggttacatctgtaatctccctgcagcagagtcaactgcataagaaaccaaaagacacacctgctccatgccagcttcgataatttctttgtaccttcggcgaaagaagcccatctgaaaggcagaaagaaagagaagctgagttagaagtgctgaagaatcagccattgtgaccccaaggcagtctgtccctggcctaagccaccacataaaaagtcagaccatctgctggaagaaccacatggagaggccctgagtcaacatggagaggaagaaggacttgactgaatccagccttccagctgtccctaccaaggtgccaggcatgagaatgaagctgtcttgaactctgaagaccagcttagccaccagatgccaaacactgagcaggctttgttctccacccacaaaccagaggctgtctcagcaggaaggagttggagttggagaaaaaggagaattaagaatctatctggcgatgtggattaaataaacaacaaattggca

SEQ ID NO: 83025 - DNA, 520 bp, Homo Sapiens
atagacccaggccgactcgagagattaagtggatttcaaactgtggtattgagccttctgggaactgcccgaaaggaggggaaggcgccagcctcggagtggtccagctgcccggcctgttcacacactggcctttcagttgaagacagtgttcaaagcttacccgtgtaaatgccactgatctgtgaacccccttcctgtcatgcccaggacctggcagactgtggctagaagggtgggatcagagcagtgggtcacgtgacctgcgcacgggtgtgctggcctccctgggccgcggtggccaggacagccttcctttccctttccagccacacagggcaatccgtgtgctcagatttctgtctcatcaattacagagcgagctgccaacctgctgtgctgagactgtggcctggtcttggtcctggtgtcctagggctgatgactgaccacagcctttgtgcttttgaagcctatttgactatagtccttgtgtgcaactaaaaatgtagctttaaac

SEQ ID NO: 83026 - DNA, 499 bp, Homo Sapiens
  misc_feature (57)..(71): n is a, c, g, or t
cgaggcaggcgaatcacgagacagatcacctgggcaagagagggagactccatctcnnnnnnnnnnnnnnngaaaattaagtcccccccatgctcccgagtcttcttactcctcataggtgaccactgttcagtctaccgtttcttcccagaaatatgtgcacatacaagcatatacatatgtctactctttgcttagcaaaccatttattcagccaaattacaattgttgtctttgataaagcaggctacagacctccagatcctaaattggtggcaccaaaattagagaacttactttgtcttgaagagaacacttgcaaattgaccaggaacccctactgccagtgtacatgaattagacttccataaagattataacttaggtgccagaatacacattttgaaatgaatgtaggccatctaaaggcatttttagcttctaaacattaactttatgggggcataatttacagacaataaatatacctgcttacagt

SEQ ID NO: 83027 - DNA, 191 bp, Homo Sapiens
tttattttttaattcttctgatcatttattttcgagtgaaattcattaaatctaagactcaatttcatatatgtttgatcatttttaccttggtttttaatctcagcatatattgtaaaattaccttagtttttctaagtggaaatatagctccaaagtaaataaatgaaattaacttactaaaacgatgt

SEQ ID NO: 83028 - DNA, 476 bp, Homo Sapiens
catttcttaatattccagtcactgctgttattgtctgagggtaggcagcttggaaaaatgtaggcaacaccaagttttaatctttatacccccaacaatttgactgactatatcatggtccaggttactttacatttctctggacctcggtttcctcatcataaaatgaagatactgtagactaccatcttcctaaagggatattggtatttgaaagagaattaagtgctcctttctacaaacatgatgtgccaaaattgttttattataagggctctttgaaacatcctaacttccttgtgtggaggactggctggaagcccatttggtacctactgtttgcaatgcatgttattaagtttacatgtctcctctgtcctgctctgccccttttttaaattactggcattgaatattgagttcatatggtaatagcagggtttttaaatgaataaaaattatggatttatctctta

SEQ ID NO: 83029 - DNA, 531 bp, Homo Sapiens
aaccctctttcccgtctgtgttaaagttggtgaagataaagatggttttctagatagtggctctggggacacactgaagactcaaagattaaaatgtcaccatgtttcagcctgtttcagcttctactcagctatgacactgcttttatttaccactgcactgttttcttcattgggctgtgagggtgggcatggggacctgttattcatttctgttcctgctggtgcctggcatgtaatgggcacatgttttttgggtgaatgaatggataactgaagggacggaagggggagggagtgtgtgttacctctctttgctccctctaagacctccccacccgtccatccttgctttgccagacccttggctaagaaaatgccagccaacactgtgttctcaagtgactctcagttcttagaaacaaaatgatggaatttcagtattggaaaaatgcttagacatgacctcatccctacccaagctggttcatgaatcatccccataaaattcctggcatgccaattaaaacc

SEQ ID NO: 83030 - DNA, 625 bp, Homo Sapiens
  misc_feature (453)..(499): n is a, c, g, or t
gtaacttgttcaagttgagtgattgaataaattaatgaatgtctgacagctagtgtggtcttggtcacaatcagctcttctggttccctagctggaaccctgagccctccagaactgattcactgctaataaatatcaattactctacagataaaggaagtggatttggactgagggtgcctggaggactctgagaaagggctctgacaaatgaacttccccaaagcaaaccctctttcccgtctgtgttaaagttggtgaagataaagatggttttctagatagtggctctggggacacactgaagactcaaagattaaaatgtcaccatgtttcagcctgtttcagcttctactcagctatgacactgcttttatttaccactgcactgttttcttcattgggctgtgagggtgggcatggggacctgttattcatttctgttcctgctgnnnnnnnnnnnnnnnnnnnnnnnnnnnnnnnnnnnnnnnnnnnnnnnaactgaagggacggaagggggagggagtgtgtgttacctctctttgctccctctaagacctccccacccgtccatccttgctttgccagacccttggctaagaaaatgccagccaacactgtgttc

SEQ ID NO: 83031 - DNA, 776 bp, Homo Sapiens
tctggtaataatctaacattcatactttattgtagttctgttcaaaagtactgcttggagctgtgatttgggtatataaggcatttgtagtcaaagaaaataattcacatatgcattcatgaatcagtaaaaataatttagggtgtcgattctaggttagacaatataatgctttcattctagctttggttcatggttcatttcaaatcctcagcaaccaatctctgccacctccacgcagcacattctgcttctgcagccagcattcgaccagtgtacccatgtccttgggtaacgaatctgtggggggagccattctggtatcacctggtccccctcccactgccccctcatccaaggcctagcagtcagcttcctgggtgaccacaggaggtcagagtttgtctaagcgggtcaggcctacagtattgtccactcagaggaaagagaaagaatccgcgtgggaaagacacaaagaggaggaggaggaggcgacagagtaaggggaggagaacagaaactaaatataaatatgtgttggggatgttggggatggcagcagggtatggttagctggctggctcccacaccactgtcccacagcacagagggccagcatctgcacctggcaccatgctttccctaggaaagccgagggcattgggcttgtggtgcagccacacagggtacagacctgtttgggactgtcaggttcccacgggttgcctgagctctattaggtgggcgccttagagtaaattgtgtgaaaccaatac

SEQ ID NO: 83032 - DNA, 533 bp, Homo Sapiens
cagaaacaatataaaaagctttcagaaaagataaaaatattgtatttctctagtctgttcactctccagtgtctctggttctttcatatcatcttcctttcctcaaatcttttaatactccctccctcatcatttccaactagtgaccctactttctatttcattaagaaaacagatacattcagaagagaactgccagtttaaagaacatttacaaagccatcacccatgtaataaccagccagagcaagaaatagagccctttaataacctactcttctccccccaccactgatgacaccgctccctccatcttaggtgtagcccccatgctgacttttgtaataataatttctttgcttttgtttataagttttcttccttataagcatctctaaacaacagttttgttttacagatgttcaaacattaaatgctttttagacttggaattgtgactatcttgtttcactccacattgcttgtgagactcattgatattgcagatagctgtagttgatccatttttattg

SEQ ID NO: 83033 - DNA, 609 bp, Homo Sapiens
  misc_feature (437)..(499): n is a, c, g, or t
tttccaaaacataatcggctcaaatacgacagaagtttatttcttgctttaagggtggatgttcctggttggctgacagtttttctccatacatttagggtcccagtgccttctaatttatggctccccaggttatacagcattgttcactgtatgctatttgtatttacaaatctctgcttccagcatgttagcttataagcgtagtgagggcatagaattgccagactcagcaaataaaaacataggaagcccagttaaatttggatttcaggttatcaacacatttaagtgtacattttagtataagtatattccaaatatcacatggtatattcagtataagtatcacataaacatatttatactaaaaattatgtgttttttatctgaaattccaattcaattgagtcctgtgttttctctggcaacccttnnnnnnnnnnnnnnnnnnnnnnnnnnnnnnnnnnnnnnnnnnnnnnnnnnnnnnnnnnnnnnntctactataagatcaagaagtatctcaataatatttaatgaacaactgattttctgtcagaacccttattggcaaagaatactgattaatactaattaatactaatactg

SEQ ID NO: 83034 - DNA, 690 bp, Homo Sapiens
gtgaagtttaggtaaacatttgcagtttgctatgctgatattgaagtattatctgttggtaaatattctttgctgatacttaataagtattcttattaataacaagtattaataatatgtattcctcactaatgcttaatacaaatccttactaatagcagtattagtattaattagtattaatcagtattctttgccaataagggttctgacagaaaatcagttgttcattaaatattattgagatacttcttgatcttatagtagacaggtactgttttagattctggggattcagtcgtaactgagatagatgtaatccctaccctcaaagggttgccagagaaaacacaggactcaattgaattggaatttcagataaaaaacacataatttttagtataaatatgtttatgtgatacttatactgaatataccatgtgatatttggaatatacttatactaaaatgtacactaaatgtgttgataacctgaaatccaaatttaactgggcttcctatgtttttatttgctgagtctggcaattctatgccctcactacgcttataagctaacatgctggaagcagagatttgtaaatacaaatagcatacagtgaacaatgctgtataacctggggagccataaattagaaggcactgggaccctaaatgtatggagaaaaactg

SEQ ID NO: 83035 - DNA, 568 bp, Homo Sapiens
  misc_feature (168)..(181): n is a, c, g, or t
tgacttgctgaaaatagaaaccagatgggaagtatattagcattatgattgaaataagggtaaatgagcaatgtgtgaaggttttcactgacttcacctaaaagatagtttagctacttgaattttagtaaatagaatttttcctttatttcatcggtccccccaccnnnnnnnnnnnnnngcacctgccttgtaaatttaatagttaagtgacctctgcctagaggatgatatttggggaggtttgatgtttcctgtgggaataagacgattcacaggtgagagtggggccacattagctgttattgtttccatgggtcagtgtggaaaatggattaatcatattctaaacgttcatggacctcattacagtcacaattgtctattctgtttcctaccctgaacacattaaaatggtaggaactaatgcttatttaattactaaaagccaccattttctttgatagattgagctacagattgtaaacttcatgtatttctttataagtcaacccttttcaaagatatgcacatcaaactgaatgaataaataaatattgagaagttg

SEQ ID NO: 83036 - DNA, 1028 bp, Homo Sapiens
ggttatctactgggctttaatcaaattgagaagagaggaaatccatcacccagaggctaagggaggtggagagcttggcttccgctggctccgcgtcctgtaatgggttgggcgctgtccaaggtgctgaatgggcaccccgcccacgcccagcagggtctgtgccacgaacatgatccccaccacactcagatgctgggtttctgtgtagcttgagcagttgccattggagggggccgaggctggggccgaggttgtgggcaggcacagggaagccttgaagtcctgtggcatatcctcagggctgttgttgtcgtagcggtatggctccgagatgaagtgcgggagagtcatgagcaggcccgccagggccacaaggatagccccatagccaatcattcggggtcggtgcacccggctgccaaaatagctcacaaacacaatcaaggctgtgttccccacctcgttgaaggaggccagcagccccgacgtctggctggagaggccgaagcgcttctccactgtggagatggagctctttaggtagccggagatcatgagctgcgccagctgcagcaggctgtggcacagaacgaacagcttgatgttatggaacacacttggccgcacgtcctgagggtctgggctggctttgcctccaggtgtgttttctgtgcccattgtggctttggtttccttgtctggtacctggggtacctcacccgctggccctatcctgggtcccatgactgctggagtgcagtgagctccagcccctaattcaatctcaggacctggagcttagcaggggagaggaggcaaatcttctcaggggctcctggagacagcagcaggtgagccacagcagggatgcaataacggtgggagctccagacacggggtcagttcttcttgggccacacaggacatcagacttgtccagacacaggttagggagtcttgctcaaactcagccccaagtatctccaagtgtttgtctccctgggtcacatcccggaattccgacc

SEQ ID NO: 83037 - DNA, 926 bp, Homo Sapiens
  misc_feature (237)..(247): n is a, c, g, or t
catatctctctttgtcacagttccagaagaattcccaggaatttagctttccctttactctaatctcagaaggagctataccctctttgaagctccatagagagaaataggaacaaacttacccaaaacacacggtgggtatgagtgctgatttttatccccatggagaaagggaattttacagcaatgagcatagggtctctggtgaaaggtcatatccatacatatctttatagnnnnnnnnnnngaaggcttggaaatagtgagaacaaagcccagagcccagggcttggtgggaaagcaggccctggctccccttcctgcatgtgagttttgacttcttcctgtgctggtcagggctgcaaatggctgataatatcactgaagcctggactatcttcaaagcccgactggcacaaaatgacatattaatgtagtatctcatttcctttgcattctggggacaagtgggattggctcgatgcccagggatatcctgtgaactcatggaataggactgggctaagcctggctagcacctgacagatcctgtctatggaactagggacattttttctcactgcttcaattggttggaacataaaactaagatggcatttgatctgtcttgcaaagatttggttcagaaaaatcttacaaatatgctgatagtaactaaaattttctctgtatctgttgcttagatgcaataattatgtgttgaaaattgtatatatatcatatttatatactttagcacctagaaatggaagtatttagtgttatggaaaaacagatggatagatgaataagctctctctctcctctatttttctttccccattttatactttttaaaagttaatttaataggtagattaaagacatctttaaatgactgtaaaaataaagttcatgtttagaca

SEQ ID NO: 83038 - DNA, 385 bp, Homo Sapiens
gcacgagggcacgccgcacatgctcctggacctcagcgacctgctccaggtagacagcctccgtcctgcatctttccccacctggggttgtgacctgggggttgtgaccagggttgtgaccggggtgtaccccaggtgcctccacgcatctcagtggccggtctgtgctgcctgcccagtcaggaagttttggtctgtaggatgaggggccttcatgacatgggggtcacagtccgagacttgtgggagtgtgggtctccatggcaggagggcacctgccaatgctgggcacggttgggtgttagctaggcctgggtgaacagtgaacttttgtcctacacaaaggagattattttcaattaaaaaatttttttgtgagtaaaaa

SEQ ID NO: 83039 - DNA, 253 bp, Homo Sapiens
atctttatcagatatatgatttacaaatattttcttccattctgtaaattgtctttttactttctttacaatgttctttgatgcccaaaagtttttaattttgatgaaatccaatttatctattttgttgttgttgcttgatgttagctgtgggtttttcattataccctttatcaagttgaggaagttcccttctattcccagttttctgctggtttttattagggaataaaatgcctattctgatcaattg

SEQ ID NO: 83040 - DNA, 624 bp, Homo Sapiens
atatttaacagactttaattgagcaaagaatgatagactcagagagactccagtgcagccacgtgatggatgaagagttacagacagaaaaaggaaagtgacatacagaaaacggaaatgagtaacagaaacagccagattggttacagcacagaatttaccttatttgaacagtttgaactgacccctttaattggccaaaacttggtgatcggcacaagagtagactcagtctgttgacaactccatttaggttatagttcactatgtacagagaaacctttaggctgaacttaaaatatttaaggaggcagctttaagttaaacttgatttaacagttgagattcagtaatgaataaatcagaaaacattgtacatattttaaaataaaatgttaatgtggaacatataaaacattcttcttaaaattcagaagtataactaaatggtttattggggaataaaaaacgtgtcttagtccattcctgctgctatatcaaaatacctgagactgggtaatttataaaaaacagaaatttattcctcacagttctaggggcttggaagtacaatatcagtgtcaaccaattcaatgttttatgagcacctgtcccatatatggt

SEQ ID NO: 83041 - DNA, 518 bp, Homo Sapiens
  misc_feature (89)..(310): n is a, c, g, or t
cctctctccccaccccccctccacttttttagggatggtagatttagagttgggatagagaaagaaaagagagaaaactagccattgannnnnnnnnnnnnnnnnnnnnnnnnnnnnnnnnnnnnnnnnnnnnnnnnnnnnnnnnnnnnnnnnnnnnnnnnnnnnnnnnnnnnnnnnnnnnnnnnnnnnnnnnnnnnnnnnnnnnnnnnnnnnnnnnnnnnnnnnnnnnnnnnnnnnnnnnnnnnnnnnnnnnnnnnnnnnnnnnnnnnnnnnnnnnnnnnnnnnnnnnnnnnnnnnnnnnnnnnnnnnntcactgttatagtttttgcaaaggtgttttcacaaagcctgcgaggtggttgagaaacagaaagaaggccaatgggcatctgaactgcatagaatagtcagttttattgcttaaaatgtatttgcaagagtaagtctgactatagtaatataaatgactttgcttttttagtttttcaatacttaataataaaatatatcttaatttt

SEQ ID NO: 83042 - DNA, 817 bp, Homo Sapiens
gcgatgaaagctatatggacccttcgctttgttatataacatatgcacacatacccagaattttgcacatatgttcagagattcctagacctgcagacctgcctctgtgtgtcccaatttaagaacctctgttctttcttcatgactggatttgcccaattttgtgttattttgggacttaatttgtccctctttgggacatttccttatttattgccctcttcagagagtagatgtagaaaataaagagaggaaacctagattacttaatttttattttaacattttctatagatagcataccacgccaagtgtgctctgtcttgatccccttctttctagcatctgccagacattgtagagtttcgcaagcagttgtaggtttgagctgcagccagtcatttcttttattctttaaaagtacatagatttgtctttttagggctttactgaaagtaaaatatcctgacatttaaactgacagatgtaggaggtaaaaaatagagttctgaaacatatgaatttatgtgacagctgaagtcacgagatgagggatgtatgtcccccagggaggatgcagaaagaagaaaagggtactggaaacagcatgtcagtggtgccagctgagggctggaggcagccaggagagttgggagcctgggtgctgggtggagagaggttaacagggaagacatgggaagtattgtgaaggctggtgtgagcaggggactactccagccctgttggaacatagagccatttggcagattgacaatgcagtgacagctgtatataataaatgtgttgaaaggagaaa

SEQ ID NO: 83043 - DNA, 1086 bp, Homo Sapiens
  misc_feature (1076)..(1076): n is a, c, g, or t
gccaagggagtgaaatagtcctgaaacttcatccctcagcccaggtggccatcccatgagtgaccattgttgtctgccatctgcatggatggtgcctgtgccatcccatttcattgcaggggacagctgctggttagattgagccctctcttggtggcagatgtcctagcctggctttggagcagatgatgggggccagcgtcagctcttccgagcatgccatcagaatttgggactcctgggaactgtgccctaattttaattttctgtgcatggtgagtcttgggttgtcgattagggtctgcaacaggaaccaccttgttctcgacctagctgagacatggggacctgccgattgatttaggcaccagtatttggtgctctgctgcagcttcttctccctgtgatttgtgatcaggatgtggcaaaagctgacaagcacagggttgatgtgataatggtccatgtagagcatcccaatccatgcactgaaccccatgtctgctccctcatagccactctgcatgatggtcctgtcgatgcgggcaatcagccacatgccgaggaggcaactgatgagcagcctggaaaggcaggcacccaggcccagcagcacgttgtagaagaacagaaagtagttgaagttgtggaacgctttcctgcaaacagaagccagcccaaggcaccacctttcaacctttcagtagagcaaggttgctaggcaggtaggctctggagtcccccagacccagggtcaaatcctacaggtccaggctcaaagctttgtgacctcgtgccataaaggggagctgattgccctcacctcacagcactggtgtgaggaatggctcaggtacagtgtgggggccactgagcacagtgaagaatgtatgtcagtggggacagtcattgtttcatgcgatccttggagtttgaggcttcctgcatgataaggaatttcacagggctgcagctgggtcagtgattatggcagagggtggggcttccccactgtctgttgcacgagggacctattcctagctgcagctgttccaaagtcttccaaaggaaacctngtgccgaatt

SEQ ID NO: 83044 - DNA, 600 bp, Homo Sapiens
  misc_feature (374)..(473): n is a, c, g, or t
aagtgattctcaagaactagccagattttgccaggcaatacagtacttaacttggattctactgacatgtttataagttacccacatacctccaaaaacgtattaacagcaagatacaggactatctctgactttaataaggtacaaggtaagattgtgggagttgttgagctttctctttgccatatttttcagagaatatttatactaacaagcagcaaccaactaaataattaaaacagagtaacctagtggtaaccgtgtgatgaaattacatgtgcttgattttcttctctacatttgtctatattttccaactttttcaaggaatagagttgtttttaggaagaaaaaactttaagaatatatcatgnnnnnnnnnnnnnnnnnnnnnnnnnnnnnnnnnnnnnnnnnnnnnnnnnnnnnnnnnnnnnnnnnnnnnnnnnnnnnnnnnnnnnnnnnnnnnnnnnnnnagaaataaaatcttgtatttaaaaaagaatgaggaacagaagacatagagatgttttcacaatgttgctaaacaataaaaccttaaaacaaagcttattacaataatcccttgaatgggaaaacaac

SEQ ID NO: 83045 - DNA, 509 bp, Homo Sapiens
  misc_feature (49)..(125): n is a, c, g, or t
  misc_feature (350)..(350): n is a, c, g, or t
agggactacttgccttgtgcgtcagcgagtgacagcgtcacacacacgnnnnnnnnnnnnnnnnnnnnnnnnnnnnnnnnnnnnnnnnnnnnnnnnnnnnnnnnnnnnnnnnnnnnnnnnnnnnnccaggcagagaggctcagccgacccacacgctcccagagcactgaaagctaaaaatatagccggtgtgttagcaacagccttcccattggtcgggggaaagggagaagcggtgtctgattgggtttaggatccagccgctaagactgggcccttgggagtgtgcgtttgcgccagcgggcacggcaagggatgctggtatttgtagtcattgattaaggcagccnatgtaaataggtgggtttacatcccagttcggctacctactgtgtgatcttgatttaatgcagcaaaacgcttgacatcaccaaacctcagtttccccatctataaaatggagctcgtgtcggggattaaatatgatgctgtatgtaaagcctggctca

SEQ ID NO: 83046 - DNA, 715 bp, Homo Sapiens
  misc_feature (187)..(196): n is a, c, g, or t
  misc_feature (457)..(508): n is a, c, g, or t
agtctggagcccccgggggactgtgagtgaggtcttctccccggtccctccttagatctcccatttcccagttctcccctcccgcccacaccttttttgtcattccagacggttccggcccagcagcagccgccatccccacgttgggtggcgagatccgaaagtttccagctacgaacagtttgcnnnnnnnnnnccttgatcgctttttttggcaagggcggagagcaccagtagcgtggggggtttaaatgcactttccctgaatgcaacagagaaatgccgggctggagggcaaactccaccgggacagggaggcgggagatagcctgagcgcccccccatcccccacactctgagcgtcgcaaccccgggggcacctccagggactacttgccttgtgcgtcagcgagtgacagcgtcacacacacgccccctcccgcacatgcccgctgcnnnnnnnnnnnnnnnnnnnnnnnnnnnnnnnnnnnnnnnnnnnnnnnnnnnnaccaggcagagaggctcagccgacccacacgctcccagagcactgaaagctaaaaatatagccggtgtgttagcaacagccttcccattggtcgggggaaagggagaagcggtgtctgattgggtttaggatccagccgctaagactgggcccttgggagtgtgcgtttgcgccagcgggcacggcaagggatgctggtatttgtag

SEQ ID NO: 83047 - DNA, 716 bp, Homo Sapiens
tttacatacagcatcatatttaatccccgacacgagcggcattttatagatggggaaactgaggcttggtgatatcaagcgttttgctgcattaaatcaagatcacacagtaggtagccgaactgggatgtaaacccacctatttacatggctgccttaatcaatgactacaaataccagcatcccttgcctgtgcccgctggcgcaaacgcacactcccagaggagcccacgtcttagctggctggatcctaaacccaatcagacaccgcttctccctttcccccgagccaatgggaaggctgttgctaagcacaccggctatatttttagctttcagctgctctgggagcgtgtgggtcggctgagcctctctgcctggatggccaagagctaggggaaaagagagacagggaaggggagggggaaagggagtggtgcacgcgcggcattgtgcgcgcagggggcgttgtgctgtgacgctgtcagctcgctgacgctacaaggccagtagtccctggaggtgcccccggggttgcgacgctcagagtgtgggggatgggaggggcgcctcaggctatctcccgcctccctgtcccggtggagctttgccctccagcccggcatttctctgttgcattcacgggaaagtgcatttaaaccccgcgcacgctactggtgctctccgcccttgccaaataaaagcgatcaaggacc

SEQ ID NO: 83048 - DNA, 501 bp, Homo Sapiens
cttaagatccagcaacaggggattgctgtttaaaaaaaagactgtggtgcttgtttagaatgcgccgctgtgcagacataaaagtgacaacgtgacagtgtatttatggacatcggaggaagttcacggtggagtaaactttatagaaatgttgtttataaaccagtgtgcctgagatggttcgtgtctttgtaaaatctatttatagaagaggcttaggaaggagccgccctaaccacatttctggaggaataggagagaaacctggagggtgtaggtcttcacatttgcatgatcccggggagtgggggcggggaactgcctggggctgcagcgatcttcatcagtcactggtgaccttgagtgaacgagcctcagttccttcatctgtatagtggggatgaagcaggatttttgtactttttaaaaggcgagaattcatttcaaactcctagaaaagtgcctggcactgtgtgagcccttaataaacatgagcaaata

SEQ ID NO: 83049 - DNA, 572 bp, Homo Sapiens
accataccaaatgttggaaatgtagtaatgagtaggacatgtgtatatggtccgtacctgaaaggaagttattctagtaggagaggtgatctatcaacacataattacaacatgtgatatgagctgtgaacacttatgaacaaacagggtgctgtgtaaaagaataaaggaacaaagatctatgtataggagttttctggaaaatgtttggattcggcagtcattttcaaaggcagagggcattgatagcagtatcttaacatggaaaacattaaaactaactagatattagtagtctacttccaccaattcaaaaataaccagaagatagtgatgttgttttgaatataggatgtcaatctttgtgttaataatgtgttttgaaaaagcaagacttaattgaaaatatacgatcgaaattataatttcagtgtattaaaaaactgcctgtttaaatatgtcctttctttgctgtaaattttggttaaaatctattggagttatgtccttgtggtgaagtacaccctacccccaagagagcaaatgatgaataaatcagtaaatattccatg

SEQ ID NO: 83050 - DNA, 1121 bp, Homo Sapiens
  misc_feature (252)..(263): n is a, c, g, or t
  misc_feature (873)..(970): n is a, c, g, or t
aatttgcctagcattgataaagtatcagctgaggctgaaaaccaccaattttaacaaaaatcagcatatttcttcagtattgtgtggtgcttatctccttgggagcagaaagcagagactggattaatccaaaatcagggataaactgaccaggaggagcagaggaataatgggccaagagtactgaggatgcaagtaaaagtgctcaaattactgtattgaccttgtaatcccaagctgatcggggaaggnnnnnnnnnnnncaggagagggctggaaaattgtcacaggtaatgacagaggatcagatgtgctatagaaatgtgctgttgaaaatggtagactaagcccctctccaattatactgtggaatgagccgtataacatgttgtgattattggtttctcccttctggacctggagtgtcagttcttctaaagcagagacttccctttaatctctgtttaaacttggtgcctaggacaatgtaatggcatccataaaatatctaatggaatggagtttaacatgttttttagggtggaactggtggtgtgatttaaattctccaaaagagaaatgagaaaagttggaagctgttgtggcctgactttatacccccaaaattcatattttgaataccccaaaaagaagtataatgtaagtccagaatcattactggtgatgacattcaaaagtcagaattgagatataccccaaagaacacaccttgctattgccctagagaagtttaatgtgttttatgcctatgttcctattgatgccagttaaagtgaccaactattagcaacaaaccccaaattgtcctttgtacaaaaatagttgattaggccaggtgcagtagctcatacnnnnnnnnnnnnnnnnnnnnnnnnnnnnnnnnnnnnnnnnnnnnnnnnnnnnnnnnnnnnnnnnnnnnnnnnnnnnnnnnnnnnnnnnnnnnnnnnnngtgttaaaaaattagctgggctacttggaggatctggctacgtggtggctgagatgggaggattgcttgagcccaggagttcaagaccgcagtgagctatgattgtgccactgcactctagctgggcaagagtgagaccctttctcaaaaa

SEQ ID NO: 83051 - DNA, 916 bp, Homo Sapiens
  misc_feature (138)..(138): n is a, c, g, or t
  misc_feature (146)..(146): n is a, c, g, or t
tttcatgtttgcacttgtaatttattaaggaaagacttcttttctagaaatggaatgcatagggcccgttcaatgttaatacataataaggaaattatgtaaagtttcaattaaatgattcttataaagcttttaggnattcattngaatttttagttactcatcctcattaagggtttccccctaagtcatttatggaggaaaagaccaaagcatagaaatgccacttaaaatttttcctacatgtagagataggaaacagaacagtattctaactcagtcatgccagagctaattcatgatgagttgtatccgaggctgttgaagctgctgtcaagcatagcagtcatcagttccggtaaaatgcttcccagaaggtaccttttacattcactgggaaagatgaggaaacgttaattctggtaaaaatggaatggaaagaactgaatggaaaggttagtaactgagaaccagaaatagtagttccctgggagtgaactaaattattgctagtaacaggaaactcttgaggcaaggagatactggggtggggaaggagagagtaggaaagtggttagtggtggggcagttccaaaggagtgaaagaggggaaagacccaggtgagcagcatgcctgggcccacacagatatcacaggaaatcaattatgtccaaggctgtgggtctttcattgccttctttagtgaaactcctggtattggtcaatctcaaaggaaatgattcttcccctctcaagtccagtttggaactcatgatgcaatgactttagtctcagacctcagaatctagtacctggaaatcttgctcagtgaaggatgcggagattagagggaaaaataagctacacaggaaaatggttccagaaatcagtctttgagtccttggctaaacacgc

SEQ ID NO: 83052 - DNA, 913 bp, Homo Sapiens
  misc_feature (721)..(792): n is a, c, g, or t
agaagacgccctttatttagcttcagcctggaggactacccttcctttggatggaagagagggggtgggcccacctgccccggtccttctaccacatcacattctaccagaccccttcagggtctgaaaggggtcggtagactttttctgaaaagagccagatagtgaatgtctcaaactttgcagaccagatggcctctgtcgcaactactcagttccacccttgtagcaagaaagcagcagaaagaagatgacaatgaatgggtggggctgtgtgttccagtgagcccttatttataaaaacaggtggctggcctgatttggcttgaggacagtaatttaaaacttggccttgccaagtccccacagagtccactccacccccaggacaaagagttctagagcagtggttctcaatgttggggtgattttgcccccataggagatatctggccaggtttggagacatttctggttgtggcatgtggaggagggttactactggcatctggtgggtagaggccagggatgctgcccaacatcctacagtgcacaggacagggcacacaacaaggaattatccagcccagcatgtccatagtgcctggattgaaacacccttctctaaagcagtggctctcagagtgggtcattatcatctgggaaattgttagaattgcaaatcatctactcctcccctgcactgaataggaaaccctgnnnnnnnnnnnnnnnnnnnnnnnnnnnnnnnnnnnnnnnnnnnnnnnnnnnnnnnnnnnnnnnnnnnnnnnnactgctgaaagagaccaagggggccgaaggagagggagggaaggaaggcaggactggcaaactcagaactcccaccatatgccaggttctaagccacagaggggcctccagggcagtgaga

SEQ ID NO: 83053 - DNA, 907 bp, Homo Sapiens
aaaaccaagttgtcttggaacaaagatggcattctccatggagtcagatatcaggatgggaatctggtgatccaattccctgattactgtggcatgatcctccaccattcacactctaccctggactctgggaagggacactgctgccttgaaactctacaaccctgaaccttgatgctggttgctgcagacaagaactgcttctaccctgggtcactgtcactgctaagtggaaagtcatgaacttgatggtaccagtcactctgggcctaaaccgacatagccaggaaacggttcaccccccacaaacagaatcatctagacctgtccatgatttggaatcgtggcccaatacttcctggccccagagagagaaaaaagtctgaccaccccctactcaaagtgccaactcatttccttcccagaattaatcacttcccaaaatgtatgactgtgtgaacatcaattcccttcaggggaaaaccccactcccacctctcaggctgtcatcttaccctatgaccccaacctgacaatcatgcaacagcccattattggtaccttttccaatgtttaggtgactcattcttatctacaatcactttgttgttctaggaaagtttttgacacagcaggcatttgatatatatttcttgattaaatgaaagattaaatgaataccatcttagatgtctgcatagtgctttaaagtttacaccactattctttcaaatagtacaagagagaactaagctgtgtactcaactgggaagaagcagaactgagagtgggagcacctggtattctgatttcttgtctagaactatactatattctgagatcactaaactacaacctcaggcgactctgcctacttttgtaaataaagttttattggaacacaaaa

SEQ ID NO: 83054 - DNA, 575 bp, Homo Sapiens
ccattatgcttgactctgtaatgaaagtctaggaagtgaatgtaacatgaaatcattccttccgccttagcagacagatggagagagacattccagtttgtttccagccttttgtctttggagcatttttggcatttccttcaggaaactggaggttgtgacctaaggtttccttagtgaacacatttctgtttcccacagttaaccttacccagaaatgacatctactctattaggtgaggtttatcttcatgtcccaactgtgtcctgtgcatatacaatgacacttgaaagcacaaattctgaaagtagcgaaaagattagagagcccaacatgccaaaacactttaatcccccaaaagatgacaataatcaaaaacaagaattaactattacaataagtctgtgatgcttgcaaagtgccttcattttgtagttggaaaaattaatgactgagaatattaatgctttcagatactatgaattgaaggttttcagataaaagtgttatgctactcagcccacattttacagctagctgcttcactgatactgtatacttatatgtggttcag

SEQ ID NO: 83055 - DNA, 925 bp, Homo Sapiens
  misc_feature (200)..(200): n is a, c, g, or t
agtgcctaccagtcagtggtatggaagatagatcggcttccagacaaaaattcaagtctagatcatccccattgtctgtcatacaaattagagcttggatcagaccaagaaattccctctgattggtatccatttgctactgttcagttttccgtgcctgacacctgtgcctcaaggacagaggtcaggtctctgggaantgggagagtgatgtccagccacagaaacatgttcagcagcgagcttgctacaacatccaggttgaaatagaaaaaaagtggattaaaatcgatggagaagacccagataaaattggtgactgcataactcagtaggagtagcaagagtttatgatgacagcccacttgtcaaatatgtaattcaccgaaaccacaccaagtcctgctactgtagagtggaaatgacttctgaatagcggttttaggacaggtctgatggctgtgtttagagaagtttagacctaaaaccgaacaatctgtattttttgcttttcatgtgtttttgtcctaggggttcgatctaaaatgtttctataattcgtgtgatgttttgcttcctattgaaactcaaaggcactgttactcgttgtgtgaccccgcagccagtatgatttttgattactcagtggctgactgttttgctctctggattactgaggtgccgtcttcatttcttcccatctcttcttgctgcttagtgtctgtactagagggtaagggaatcaaaggagacataaaccaaaatagttaattttccctctttcttgcctctgaaatgtggctaggtgtagaatgatgttgaaaccacaggctaaaatgtagatctggaagtatctgtgcttttgaattacttatttacctgtcctcttaccgttggtaaataataattggctatatttggtaaa

SEQ ID NO: 83056 - DNA, 362 bp, Homo Sapiens
aagtcaagctgggaactgcttagtgccaacctgcctccccttctattcaaagtcacccctctgctcaatgaaataaatgcatatctgattgcctcctttggagaggctcatcacaaactcaaaagaatgcaaccatttgccttttatctacctatgacctggaagccacctcccgcttcgagttgtcccgcctttccggactgaaccaatgtacgatcttacatatgttgattgatgtatctccctaaaatatataaaaccaaactgtgctctgaccaccttgggcacgtgtcatcaggacctcctgaggctgtgtcacgggcgtgcatcctcaaccttggcaaaaataaactttctaaatt

SEQ ID NO: 83057 - DNA, 1086 bp, Homo Sapiens
gctgggagtgggagtgggaacgggacctcagcggtcgagctcggccgggaccctaggtgcgggggaggcggggtcccgggctccggctgcctgcccagacctggcggggatgggcccgtgcggctccgggtgtgggacgtatcctgggagcgcccggggttattcccactgactcccgggaggtgggtgtgcgcccttcgccccctgcctggtctgtggggatccatcgttgctggagactggaggtcgggggccatgggagccccggggcgaacggtgcgggcctgggtcttgtggaaaggaggagcgaccgcctgagcgtgcagcaggacgtcctcctgacctgaagtacaagtcacaagaccggaatacttcacttgaataagaactcagtgcaaagaagttggataaatcggagaaaaccacacacgtggccattgatgcccttggttgacagagttgacgggattttctctggctctcaccttgagggcatcatcagcatcctgaagtcactagcgggcctctgtgcagatgtcctttcgaggggccttcaggctgtggaagtgaccagtgaacacaggacctgcctggactcccagcctcacagcacagcaccacagcctggactgccccctgcctgatacttgcttggtttggaactttactccatcaaaacatccaaataaaaatatgtagactccccaccctatcccatctgctatagggttctaattcccccacagacatcccatcacagtgctttctcccatgacgggggactcctgagctggactccatccctcccctaccagaaaagcacaggtgctgtggcatgagttcaaccacctgaaattccctgatcttcagagtaataattctaaaatagggcaataatacccctgtcagtgttcttggaagaacttctcattacttgaggccccagaaatgcaaacactcctccggttttccagcatgctgtcaaccctggcatcagagctcttcctgccgtgggcactggtaattgacttactggagaaagtcaagcttttaagtcccaggaataaaggattcctatttccttaa

SEQ ID NO: 83058 - DNA, 643 bp, Homo Sapiens
ggaaattatatatagtgtgtgtgtttatgtattacacatataatacataatgtgaattttcccccatgataactattaaacatgtttatttaatagttaaatatccatctttgagggcttttaaaatttatatttctttgttaactttgaagttgagactgcatgcaaaggctgctccatttcaggtaaatagtgcctcagtagctgtttgatttaccttaaaaaggaaaacaaaatgacacaccttccaacccatagactttctgaggtctttgaaatacaacaataactagaagaggagaatttgcatagtatagtgatatggtttggctgtgtccccacccaaatctcatcttgagttatggttcctattatccccacgtgttatgggagggaccaggtgaaaataattaaataatcagagcagttttccccatcctgttctcatgatagtgagttagttctcatgagacctgatggctttataaggggcttcctgcttcactgggtactcattcttctctctcctgccaccatgtgaagaaggacatgtttgtttccccatccaccataattgtaagtttcctgtggcttccctaaccatgtggaagtgtgagtcaattaaacttctaccctttaaaaa

SEQ ID NO: 83059 - DNA, 411 bp, Homo Sapiens
atggagtgagacccagtctcaaaaaaacaaagagttgggggtggtgaatgaaatactaatgcatgctatattgtaaatgaacattgaaaataccatgctaagtgaaagaagccagtcacaaaagacaacatatggtagtcatattccatttatatgaaatttccatactaggcaaatctatagaggtagaaagtagattagtggttgcttaggactagaaggaagttggggagatatgaggatgagtgtaaaaggtacaggatttctttttgaggtgataaaaatgatctaaatttgactgtggttgcacatatctgtgaatatactaaaaaccactgatttgtacactttacatgggtgagttgtatggtgtgtgaattatatttcaataaagctgggttgtttttaaaa

SEQ ID NO: 83060 - DNA, 837 bp, Homo Sapiens
  misc_feature (52)..(108): n is a, c, g, or t
ggaacgagcatttgtcccttttgtccttctgccatttgaggaagcaacaagnnnnnnnnnnnnnnnnnnnnnnnnnnnnnnnnnnnnnnnnnnnnnnnnnnnnnnnnntgcgttcccccagtagacagacactgagatggaaatttgcataccgaaggtggattgaggattgtttatctgaaaaaaacatctatggtggagtaagaaaaatcacgactgggctatggagaaagctgaactgggatgcagaacagaagcttcagcctcactcgtggggagctctggcgctaaaaaaactcatcgaagatttcccaaattggaacaaggcctctgtactcctgcattgaccagtcatggaaagcaacagtgtgttcagcaagctggaactaaactgttcctgaatggagagttcccatcctgcctcagtggaatcaaagaaaagagaaaggctccaaaatgaacacaatgcgtgttatttgctaccataaactgtgcaactggtttctactgctgtgttgcaattgaatagtaatcaggagaagttacacgttgttcttagaaataatacaacgaatcctgtcaatcttaagtcctgacactgaatttaacgctctctgtttagtcctaccatcaaggatgatttgcaggtgaagaattcttgatagtcagatgcagactacgtcttcagatcctatggcctaaggttattaaggtgggagaagcaaaacaaatgcggttctcatccagtaataatggatttacaagaatttgaaacaaaactttccttccagctactgctttcatgtcagagaaataaaatacatgtaaaagatttaa

SEQ ID NO: 83061 - DNA, 679 bp, Homo Sapiens
aggcggacaccccaaagtaatgccagctgggaagcacctgggaaggacccagcacaaatgggaagacggaccagggatggtccacagaccaacgtcaccccgaccacacagggcaccctgagaacacaaccacccgcttcaggtctgtcagaagagcctccaatcacctagacttccctaattcactggaacaggaaaggtgttgccacaggcatacaaagcacttggtggtgagagtgagaacacttttggctccccctaatccaagccaggggaactcgcggggctcaggcgcagccctcgctgggtaatggaaggccctctcgcccaccttgccctttctgcggggctggcaaacactgacatctgaggaccgtggggtgccaggccttcccattatcctctttcacaatcttccgaatcaaggtccactaacacctcatttatccaaaaatcagtcaatgaatgatcccagctgctcaagaaagccactccccacccctgcccaggagcccagaaggtgccactaatgccacacctcacccagggccagtattctcttcctttatacccagctgtagctggctttccgggtaggcatgggtgagcagaaagagggtgaagagcacctggctgggcacggtgaccatggcccggcagggctgagaccagagcggcc

SEQ ID NO: 83062 - DNA, 751 bp, Homo Sapiens
ttcatagaaaccctatgggacatgggaataccttcagttatttacatgtgaatatgaggaagcattcatactggacaggaaaccctgcgaatgtaggcagtgtgggaaaaccttcaatggtcgtatgaccttttaaggaccatgagaaggcatatgaagtgtaaagaattttcatatgccctataaatgtaaagaatttataaccttaaaaatgtaaagaatgtggaaaaccctataaatgtaaaaaatgtagaaaaacctttatttgtcttagtttacttggaaaccatgaacaaactcacactggaaagcgacttcttaaatatagacattgtgaaaaagccttcagttggcccacatactaatatgtgagaatgcagactggatagaaatcctataaaagtgagatatagcaatgttttccattttaacaaatgctcatgtgatactcccttatgtgtgaaacttcaatctcatgttgaaactcccactagggaggtactgtataaatgtagataatatgggaaagcctgatgcaaattaattcatgtatattgttctagaaaattcacaacatgtcagaaatgtgataaaacatattatcagttactgattcttaaaatggatctctgaattatggatttctattactttcacaaaagaacactgagatgagataattctgtaagctcttatacagttgtacacaagttgaattgatagtattttttcattaaatcagtttctgaaa

SEQ ID NO: 83063 - DNA, 1211 bp, Homo Sapiens
  misc_feature (549)..(549): n is a, c, g, or t
ctcctctacgtcttggctctacatgaagtactcagagctggttacagcaaaaaggatggagggaaaattatacagcagacttggaacagaacatttgaaggtatcgccgggcaggtgtccatagatgccaacggagaccgatatggggatttctctgtgattgccatgactgatgtggaggcgggcacccaggaggttattggtgattattttggaaaagaaggtcgttttgaaatgcggccgaatgtcaaatatccttggggccctttaaaactgagaatagatgaaaaccgaattgtagagcatacaaacagctctccctgcaaatcatcaggtggcctagaagaatcggcagtgacaggaattgtcgtgggggctttactaggagctggcttgctaatggccttctactttttcaggaagaaatacagaataaccattgagaggcgaacccagcaagaagaaagtaaccttggaaaacatcgggaattacgggaagattccatcagatcccaattttcagtagcttaaaggaagccccccactttntttttttctgcctgagattctttaaggagatagacgggttgaaagacatcaatgaaacagaaggggcgttcttgaagaattcataattttaagcagttagtaatttcattttaaaatttctgtagaagctcaggaattatgattaatcaccatctgcctccaggcctttcatctcatgacaaacaaatataataatgatatcgtgtcactctgttaaatgttcatactgtttcaagcccatatgattagatttatgtttttaaaatctgttgtctccatatcttgatggcttttgggagcatttcacacaaggatataaaatgcggttttcttaaatgaaatgttttgtagctagaataaaatcatttttacaagtacagcattcttggaaagaatttaacacccaaaaaggggaaaatgtaatgaaaaatctcaaggttggaaatacagccttactctctctagagctggaggacaggtttgtggttgaggacttctctgtccgatgtctacattcaggttctgacttcatatcttgaaaaaggatttcctccctgtctttttcagtgtctcataaacgctactctggattgttgtaaatattagtgagatgggaggatttacagaagaaaagcaagtcaaaaatatttcctttttgatgt

SEQ ID NO: 83064 - DNA, 1067 bp, Homo Sapiens
cgtcctcccttctggtgtactgggtgggaggtggaactagtcggacaaagccctcgcgtcggacccttgccagaactcaattaatggatgcctcgaagttgacgtacatatatattcagaaatgttttgccacctgagacctatgaggaggttatgtctagagaagatatttccacactggtttcccttttcaagagctttatcgggagctgaagcagtcaatgccttgaggcctttctattttgcagtacatccagatttctttggacagcacccccgtagaaaagggaaatcaatgaaaaattctccttaaaaagggttaagtgtctacctagaaaacctccagaaaccaaggcttcaaagtctttgaaaccaactcagcttacattttatgtaagagaaacagaccagagttcctccgatggccaggaaccttttagtacttccggacttcaaatggaaggaggaagagcttgatctgaagaatgctgaagtatgttgaagacaactcctcacccagtctctccagggactagtatttgatagtatatgatctcttaccttttattttctcataattgaatatgggagatcaggagtcacaaattccttttcttggcagtttctccatctacctctgacttagagttttattaaaaatagccctattcttcaatatttaaagatagaaagtcaattcatagcccttttgtgaaggaacaggtatactgaagaatgctgtaaataatgaataataagcatgttgatcactctaagtgacacaattctgtttgaaagtttaaatacatgaatgtgctgttcctaggcatgagagtctcataagcaactgagatagattgttactagtgtaaaaccaaatattcataaatatttttaatagatgtatgctcctgttagtcagggtcaagattaggctaggaattaaataacatcttacatatatgtagtggtctacttaggtttcattatttctccaggaagacagatggaatttttagaggcagattacatcctttatagttgttaaaataaaaatattatcatca

SEQ ID NO: 83065 - DNA, 797 bp, Homo Sapiens
ggggtcctccctcctggtgtactgggtgggaggtggaactagtcggacaaagccctcgcgtcggacccttgccagaactcaattaatggatgcctcgaagttgacgtacatatatattcagaaatgttttgccacctgagacctatgaggaggttatgtctagagaagatatttccacactggtttcccttttcaagagctttatcgggagctgaagcagtcaatgccttgaggcctttctattttgcagtacatccagatttctttggacagcaccccgtagaaagggaaatcaatgaaaattctcttaaaaggttaagtgtctacctagaaaacctccagaaaccaggcttcaagtctttgaaaccaactcagcttacattttatgtaagagaaacagaccagagttcctccgatggccaggaaccttttagtacttccgtttatctgttgaacatatccaaagcttgaatactaatatgcatacccagcctctcaaagaagctaaaaggatgcctgacaggcccatcaaatgggacaagtcttattactcctttactgggattcaggaccctgatgaagaccttgaacaagtctcgagagtgggaaacactctcacgtatgtaaaagtttttatctaactaaactgtatttgcagcttgtgtttatgaccctgatttattggggatggcaaaaaaatttttttattaataaaaagtgtagttccccttttaaaattaaaacccaaattttccaggaaaagaaatacctatcaggcctagtttaatcccgttaat

SEQ ID NO: 83066 - DNA, 588 bp, Homo Sapiens
ggtggtgtactgggtgggaggtggaactagtcggacaaagccctcgcgtcggacccttgccagaactcaattaatggatgcctcgaagttgacgtacatatatattcagaaatgttttgccacctgagacctatgaggaggttatgtctagagaagatatttccacactggtttcccttttcaagagctttatcgggagctgaagcagtcaatgccttgaggcctttctattttgcagtacatccagatttctttggacagcaccccgtagaaagggatgatacatggaagagttttcaatgccctagtgatttttccttatgatgcatgctgctggaccactcccctacaacatcagttaatgtgtgctccaggaatacaaactgatatgaaaaatgacttatggtagatgtagttaagacagtcaatatattttaacattagaaaatacagtcagtccttcatatccatgggttttacatccatggattcaaccaacctcagactgaaaatattaggggaaaaaaatacatctgtactacacatgaacaacttctctttcattgtcattattcctgacgacatcac

SEQ ID NO: 83067 - DNA, 772 bp, Homo Sapiens
actttagaacgactaaactgattaatttatcaatgttaatccttcctctttgtgtaaatgtagttgacagccctttgggagaggtgttggagatgctaactgtctacaattcaatccacctattgatgtgttgatggaatgctaggcttaggaagggtactcataacccctgttatgatgtgtaaaaaaatccaggaaggtacagaagtacttttgaagtcttgatcaaatgaagtaaggggagctataacttcaaaacacattccatttaaatccaacaaggtctaggttaatatttttactaagaagtgttgtctacatactataaaattttggttgaccgttccctagtagatgacaacttcacatggctatttcctgaataaactcagagaaggtgattctagagaaagcttaccaggagaaatagatgtgttttagaagtggatactttctggaaatgtttatgtttaaaaatacttttccccaaattctctgtcttgtatgatctttgattttgctgactttggtcagtccattttcagggatgtaaactgtgcgattgatgaaggattattgtatggaacttacagacactatactttctttttcacagaagaagtacattgttttttctctaaactttaggggaaaatacctaaaggacctaaagactaaagaacaaaattaaaaaacacaagtagctattgccagttttgatctctatatttgacacaaaaaaggaaataaattgatatattttatttatgca

SEQ ID NO: 83068 - DNA, 379 bp, Homo Sapiens
aaaccctcccaatgtaaacttcagtctcaccttaaatgtcacttcctctggagcccttttcaatggtccctggtttaaatttagtccatacagcaaactgtgattgtcctccaaaccacttcaaagaactgtaatcatttaattatctatttataagtatctgatgtctgggttcttcactagactgtaaacttcatgatggcaggaaccataattgttctggttactcttgctctcaagagtgtaagagtgccacattgtgcctggcacgtagcaggaactttatgatgattgttggttggaagacaggttgcctgacaggccagtcatctcaactactgtacttggatgtgtggttggaaataaaatgaatccgttt

SEQ ID NO: 83069 - DNA, 734 bp, Homo Sapiens
ctgaaagctcagctgaccccgaggctcttctggtcatgcttagagtgggccctacatccaatgactggtgttctcataaggagagagagccaaagagtagacagacacaagggagaaggccgtgtgaagatggagacagagattggaatgatacagccacaagccaagaaacatctgcggccgtcagaagttggaagaggcaaggaatgatttattctttcccactcattgtttcaccaatgagcaccttccatgtgccaccgttctgaccctgctgacaatgtggtttcagacttctggcccccagaactgtgaaagagtaaatttctgttaagttatcttgcttgtggtactttgttacagcagccctgtggatctaatatagtcataagagacattgtgacctcctccctgctctcttgaaccactcattctgggagaagtcagctgccatgtcatgaagctactcagggaggtccatggagaggtccacatggcaaggaactgaggcctcctgccagtagccagcaccatcttgctggccatgtgagcgtgccatcttagatgcagatcatacggccccagtcaagccttcaaatgactgcatccctacttgacattttgactgtaacctcatgagaaaccctaagccagaacaccagctaagccactccccaattcctcatcaagagaaactgagataataaatgtttattattgttttaagctactaa

SEQ ID NO: 83070 - DNA, 552 bp, Homo Sapiens
  misc_feature (24)..(24): n is a, c, g, or t
  misc_feature (54)..(54): n is a, c, g, or t
  misc_feature (117)..(117): n is a, c, g, or t
gcaaaatgatcccaatggcatctntgaagcaatgaagctaatatatgggctgtncagtctggtctggaaactcaacagcgaggacattttttcttggctatagtttcttcaccatcntcctcagtgtgcttacctcttatcagccagtcacttggtactaaatttgattgtggtgtatctcagcaagaagcacgtctcacattctctgtattttatgtggtcatgagtgtgttcctgtcttattcttattttatgtggtgcatttttaaataggactgtacagaatacaagcatctatttgtatatgactctcatcttttatggggagaggtcagagtaggtgagcgtgcactttgattctctgctggaatctctttggattctatgtcccctgtcacatggtttattttcatatgcatatttctcatggttctcctgactcttttagcaatgctcattgcaggatattagaaattgtattacttctaatggcagaatgttagaaattgtgttgactcttaaggcaaaataaaatacccgaactcaccttta

SEQ ID NO: 83071 - DNA, 696 bp, Homo Sapiens
  misc_feature (554)..(583): n is a, c, g, or t
aacgcacgtggcgtatatgctccctctggttactctaaccgctgccaacgcgtgggcagcctgcagcaggaccaggccctcttgctgcccagcgacacggatgatgggtcgagcctgtgggaggtcacttttattgatttccagatccaaggttttgccatcaaggggggacgatttaccaaagcccaagactgcgcctcctccttctcgccagcttttctgatcggcctggcaatgtccctgatcctgctgctggtgttggcctatgccctgcacatgctcatctacctgcggtatctggaccaacaatatgatctcatcgcctctcctgcccacttctcgcagctgaaagctcgagacacagccgaagagaaggagctgctgaggagccagggggctgaatgctataaactgagaagccaacagatcagcaaaatctatgtttagcagcacaggctggcccccaccatgtccacagtgggctccgaaagttgtctctgttctgtgctatttgacttgtgaattacagattttcaccaaatggcttgattacnnnnnnnnnnnnnnnnnnnnnnnnnnnnnntagataatgaattctttttgaaccatccactggcctacttaggtagacttggggcaatcaaaaaaggcatctcagggatcccacagagacaaatatgactgttagttgcctca

SEQ ID NO: 83072 - DNA, 629 bp, Homo Sapiens
  misc_feature (494)..(583): n is a, c, g, or t
tttggttgactaggctgtggggctttgaccccactttatttaatcccctcagtggcagctccaataaatcctgaccagatccagagattggggaccactttacatttctaaattaatgtttttacaataatcctcgtagttatgacctttcatagaacagggctgaggtttgtaacatgctggagttcaaccaggatctgtgactcaaagcacactccttttactactagtaagtcagcctcctaagcttgtttaaccagaggttaaataatggccacagaaagcattgtggcatatgttaagtgctagatgcccctccaatctcgctccaaggacaggagtcctgagtgtccactataggcatccattacttcaagacttcccaggatagttcagatttcaagaatgtcccacggttatccctggaagtacactccaacctgacaccacatgacctgttttgaaaatgtggttggccgggcgcagtggctcannnnnnnnnnnnnnnnnnnnnnnnnnnnnnnnnnnnnnnnnnnnnnnnnnnnnnnnnnnnnnnnnnnnnnnnnnnnnnnnnnnnnnnnnngcctctactaaaactactaatatcagccgggcgtggttgcggacgc

SEQ ID NO: 83073 - DNA, 916 bp, Homo Sapiens
atatagtatgtgttttatttgtgtggcttctcgcacgtaactacttatgatgcaaacatgttgagcatcaacaatgtattgattctcatgatggatgttattacagtaaattagcatgccattactttttatctatgtatcttcttgatatttgtatcatttctagtttcttagtattacacatagaggtgcttctcagcttggagatgtaagcacccgataaaaatatgttattattcttacaacagctactaaacttactgatctgcaaattagcacatatacatcaaatttttgatgttataggacaaacaatatatctgaaatctgaagagagataaggacgtgcagggaaataaacaggagcagatgataatcttttctgggacagaggcttgccaaatgccatttaagttagcacacgattaaagtagacatattcattggatggtttcaatttgagtgtgatagagaagttattgtttaaattctcagagtgtatacagttgaggaattcctcctgctattgaagcctttttcttcagtactggggatacatcacaaaatgctccagcctctaccctttgggatggtgctgtctgggaaagcaaaacagcaactatagctgaaatgcatccagacacacctccccatcaccactacattgcaagagaaattatctgcagaggtaaagccaccaaaaccactgttctacagacactggagaaaccaataagaactgggacaggagagaggaatgcaccaagtccctgtccaggcccacctcccatcttccctcaggagtaacagccttattcaaaaggaaaaggcagaaactgaagaaatcagtgggaagacatagtggctgctgaaggaacatatgaataaaaatgaagaggccagttgcggtgcctca

SEQ ID NO: 83074 - DNA, 759 bp, Homo Sapiens
  misc_feature (57)..(172): n is a, c, g, or t
gcggctgacggacacagcccagcaggagaagcttttccctccattctttcaaggaannnnnnnnnnnnnnnnnnnnnnnnnnnnnnnnnnnnnnnnnnnnnnnnnnnnnnnnnnnnnnnnnnnnnnnnnnnnnnnnnnnnnnnnnnnnnnnnnnnnnnnnnnnnnnnnnnnnagagatatatgcccaggatggggctgaataaaaagctaataataatagccaccacctgtggagagcttctcttggaccacgcattctgctaagtccttctcttgtatgaggaccagttgtgcccagagaaccttctctgtctcctctaaccatgggataaaaggagatttccacaagagcggctcagggacgcagcccatctcttaagaaggaggctctgagagggacaagaccatggatgcagcacatggccacaaggcagtttcaagatgcccatgtcaggcagaggatggctcagtggtctctaacccacctaacatttcatgaactttactcctggtcccgctcccaaattagacactggagataatggatcactatactgcactgaagactcggaggggttgagccgctggagccacgcaaattcagacacctcttccgccccaggtcactctactcgcccacgctgcctgccacacccatccggttgtgcgggacactccccgcgtttcttcagcgattcttatcgggctccctccttgttcaataaaggtgaagggtgtggggttttctgtgcatacgct

SEQ ID NO: 83075 - DNA, 991 bp, Homo Sapiens
tgttctaataactacattgaaagaggtaaaaagaaataggcaaaattaatgttaataaggtatcttatttaaaccaatttatccaaaatattatcacttcaacatgtgattggtacaaaaaaattattaagatgttttaccttctttgtactaagctttcacatttttgtgtatattttatacctacagcacacctcactttggattcatcactgtcaagtgattaatagccatgtgtgactagtggccccagatctagagcataccatggtagtacattcacagaagggtgagcagggaaaacaacattgtgttaaatactcccaggcatcacactttggaaaacactgccattggcgtttccatagcctgagttcatgatataaagggatccctagtcattttatattaaatgagattccttaattgaccctaaaattgcccacaacctcttcagagagattgattaccctgtcctaggaaagatctttcatactgcaacagatgcatctagattcatcgtggtctgaattgccgttcctttgggccattgctgaaactaagaaaaactctgaactggcagcatttggttagataatggtttctgttttcccttctatctcctggcaagttttgcaattttacaatccaaagctttcaaagctgttggttgtcaattagctgctcctatggtatttatactgtactctaattctcatttcaggccatgtgcatagtcaacatggagtgtgaaaaagactatttaaagcatatatccattttttaaagttatcctcactacatgtaaaaatagcatacaccctgtcatcttgagtgagaattgtttagactagtcacacagctctgctatctgaatccactaggccacagaattgctcaactctgtttgccattgacaatataggtctgcttaattatgcatgttctgttttgtgtttcagtttttctgaaaataaaggatatgaaaaat

SEQ ID NO: 83076 - DNA, 757 bp, Homo Sapiens
agtgacagtaaataaattatgcctgtggatgcatgtcacaaatataaagttgagtgaaaagtacaaattgaatttttctcccctgggcacgtctttgctgcgaaggccctggtggccgagaccaaggctggctgtttacgtgaggccagccttgcaggtggggcagagaggaggaaattttgttgtaagaactgggacaaagttggcttctggaactcccaaagaaaatatttttctggcaaggggaatgcaaggcaaggcttctctgatgtgtaactgatagcctcagaaggtgtaaggttaaataatgatctcatcagtataacaggagctggacagtattaatcagtggtccaattcaaaataaagccacactgctataagcaaagtaatgaaggcttattgtgacctggggctccttaatgacacagatttgattcccacttaatgggcaactgaataatgcagctgatagcacagaccagtggggaaggcagaccagaggggtacaggaggctgcctggggtgaggcatctaaaggctgttatcacatgtcacatcatcagaccttgaatttgctattaaacagcaaataagcaaatatgccacttacagaagacctttccaaacttcaaggcatctactaaaattatatttatctctctttgatataccaatcacgcaactctaaactatttatgcagaaactaatctacatattaaattgtgccaataaatgttgtcttctctgtttaaa

SEQ ID NO: 83077 - DNA, 552 bp, Homo Sapiens
  misc_feature (155)..(155): n is a, c, g, or t
tgagttaatgctgaaatgagttaagaccttgggggggaactgttgggaaggcataattgcttttgaaatgtgaggacatgagatttgggatgggccaggggtagagtaatatggtttgtctgtgtccccactcaaatgtcatctggaattctcancatgttgtgaagaaggggtccaagtgggaggtaaccgaatatgagggtaggtctttcccatgctgtcctagtgatagtgaataagtctcacaagatctgatggttttataaggcagaatttccctgcacaagctctctttttgcctgacatcatccatgtaagatatgacttgctcctctttgctcctgccatgattgtgatgcttccccagccacatggaactgtgagttctcccattagacctttttcctttgtaaattgcccagtctctagtctgtctttatcagcagtgtgaaaatggactaatacatcctcctaaacagatttccaaagagtattttattccacttccttattttgcaatggacacagtaaaaataaagcattatcataatg

SEQ ID NO: 83078 - DNA, 695 bp, Homo Sapiens
  misc_feature (75)..(131): n is a, c, g, or t
  misc_feature (149)..(173): n is a, c, g, or t
aattagcgggtatggtggtgcacaactgtagtttcagctattcaggcggctgaggtgggaagattgtgagtccannnnnnnnnnnnnnnnnnnnnnnnnnnnnnnnnnnnnnnnnnnnnnnnnnnnnnnnngagtgagacattgtctcnnnnnnnnnnnnnnnnnnnnnnnnngtatagggaggttaaggacagagtctttgttatcaccatttatattaccaagagttattgcttgaggttggctagaaatctgagtgcagacaggcaaagaagttgccccacatcacaaagcaagtaaagtcaaaacagatgacactatcacaggctattcccaaggtatgttttttcctgcaaaaatatattatctggtcttgactagaggtgtgggtcctcaaggtgaggcagacagagcagcaacacatgggttcagtttacacatttattatacaaatccccttccagtgtgggtaatgtcttgggtccagatccactggtataaaaagaaaagcttaacgccaggaaaagggggtaggggaacccccagctccgaaaatcacagacaggtatcatagaaaacacaacttgtgtgggtttgcttaaaaagtggtggattggggctgggtgcagtggctcacggctgtaatcccagcttcttgcaggccgggggatgccggatcatgaggtcaggaaatc

SEQ ID NO: 83079 - DNA, 577 bp, Homo Sapiens
  misc_feature (176)..(287): n is a, c, g, or t
agacaaggtctcgctctgtcacccaggctggagtgcaatggtatgaacagtgcagccttgacctcctgggccccagtgatgctcctaccttgccttctgagtagcttgtagttagggaccacaggtgcgcaccactccgctgcacagctagtagggttttttgttgttgttgccgnnnnnnnnnnnnnnnnnnnnnnnnnnnnnnnnnnnnnnnnnnnnnnnnnnnnnnnnnnnnnnnnnnnnnnnnnnnnnnnnnnnnnnnnnnnnnnnnnnnnnnnnnnnnnnnntaaaccaccacacccagcctatactgagttctttagcttaaattttactgtttgttacattagtcttgcaacttaattttaggagacaagagaaaaactatttgctgagtactgccattatgagaaacactgttaaaaagccagctagcagctcctgctctgaccaattttaaatttgttaagaaaagaattggtaaaaggtgaagtcaggaaatgacgagcaggtacatcctagatccttcacccctagaatacatttcagcccagtgatctcaaaaacagtccctacc

SEQ ID NO: 83080 - DNA, 602 bp, Homo Sapiens
cggctcccaccatggctgaagaagaggaaactgctgctctcacggagaaggttatccggacccagagggtgtttataaacctgttggattcctacagcagcggaaacatcgggaagtttctatctaactgtgtagttggggcttcgcttgaagaaattacagaggaagaggaagaggaagatgaaaataagtcagctatgctggaagcttcctcaaccaaagtgaaggaaggcacattccagattgtgggcacgctgtccaagcctgacagcccgcggcctgactttgcggtggagacgtactctgccatctctcaagaagaccttctcatgcgcctgctggagtgtgatgttattatttataacatcactgagagctcacagcaaatggaggaagccatctgggcagtctctggtcagtgaggtgtactcttttatctccagggatgctattgtagtgctgcctacttcacctaatagtcatctaggaacactagacaaagtagggctatagaaaaactggtctgagacttacctaaagtatgaaatttatgataataatatggatagatacttctgaagaatagaatatttattaattat

SEQ ID NO: 83081 - DNA, 572 bp, Homo Sapiens
ccgtgcccagacaaattaaggctcttgagacgaggtcatcctgggttatgcagatggaccctgaatccgacactagcacccgtgtggaaggaacgagagggagatttggggtccgcagaggcaaaccacaggaggacggagtcggagactggagcaccgcggccttgatcgggggacaccagggctgccggctgtgccagaaggggctgaggctggaccggattctctccgagttcccagaaggagccagtcctgccgacgccttgatgctggactctggcctccagaaatgtgcgaggacaaacatctgcggtttctaggccccgcctgtggtcctctgttgcagcagcctggacagtctggactgcctggacagcatgcagatgggctctgcccgcggctgcccacgagttcccaccgcccgcccgtccgtgggagagccagtcctcgtatgtgaagcgtacctgtatccctttactccgcgtacacaggtgcctttgtcacttctcctttgacctggctggcacatcttaccggtttctgcgctaacaatgagttgaaggaaatcttga

SEQ ID NO: 83082 - DNA, 624 bp, Homo Sapiens
gcggccgcaggtctgcgaggcgctgctcttcgccctggcgctccagaccggcgtgtgctatggcatcaagtggctggcgctgtccaagacaccatcggccctggcactgaaccagacgcaacactgcaagcagctggagggtctggtgtctgcacaggtgcagctgtgccgcagcaacctggagctcatgcacacggtggtgcacgccgcccgcgaggtcatgaaggcctgtcgccgggcctttgccgacatgcgctggaactgctcctccattgagctcgcccccaactatttgcttgacctggagagagggacccgggagtcggccttcgtgtatgcgctgctgacctcaagacccgatacctgtcggccaccaaggtagtgcaccgacccatgggcacccgcaagcacctggtgcccaaggacctggatatccggcctgtgaaggactcggaactcgtctatctgcagagctcacctgacttctgcatgaagaatgagaaggtgggctcccacgggacacaagacaggcagtgcaacaagacatccaacggaagcgacagctgcgaccttatgtgctgcgggcgtggctacaacccctacacagaccgcgtggtcgagcgg

SEQ ID NO: 83083 - DNA, 1056 bp, Homo Sapiens
  misc_feature (14)..(14): n is a, c, g, or t
  misc_feature (582)..(582): n is a, c, g, or t
  misc_feature (847)..(878): n is a, c, g, or t
  misc_feature (950)..(988): n is a, c, g, or t
gcgaccgaggtctngcgaggcgatgctcttcgccctggcgctccagaccggcgtgtgctatggcatcaagtggctggcgctgtccaagacaccatcggccctggcactgaaccagacgcaacactgcaagcagctggagggtctggtgtctgcacaggtgcagctgtgccgcagcaacctggagctcatgcacacggtggtgcacgccgcccgcgaggtcatgaaggcctgtcgccgggcctttgccgacatgcgctggaactgctcctccattgagctcgcccccaactatttgcttgacctggagagagggacccgggagtcggccttcgtgtatgcgctgtcggccgccgccatcagccacgccatcgcccgggccttgcacctccggcgacctgcccggctgctcctgcggccccgtcccaggtgagccacccgggcccgggaaccgctggggaggatgtgcggacaacctcagctacgggctcctcatgggggccaagttttccgatgctcctatgaaggtgaaaaaaacaggatcccaagccaataaactgatgcgtctacacaacagtgaagtgnggagggcaggacatcaaaggaaaccgacaagattaaaaataacttggcagcctgaggctctggagtgcccacaggctggtgtaaggagcggggcttgggatcggtgagactgatacagacttgacctttcagggccacagagaccagcctccgggaaggggtctgcccgccttcttcagaatgttctgcgggaccccctggcccaccctggggtctgagcctgctgggcccaccacatggaatcactagcttgggttgtaaatgnnnnnnnnnnnnnnnnnnnnnnnnnnnnnnnnggatgtggaagctacagaaatatttataaaacatagctttttctttggggtggcacttctcaattcctcttnnnnnnnnnnnnnnnnnnnnnnnnnnnnnnnnnnnnnnnatgatctctattttaaaactagctttttaagcagctgtatgaaataaatgctgagtaagccccagccc

SEQ ID NO: 83084 - DNA, 272 bp, Homo Sapiens
ctgcctgaccgtctgtctgcgggccctgttccctcatctgtatatgggaattacagtagagtgtgtgtcacaggctgtagtacatagtatgtgctcaattaatgttggctcttattacttttgctatttattatttcccttctgttcctccgttctcactgttctggagagctgtcacctagacctcaaaaacacagggacctagacccttttagtccaggtgaatcaggagggctactttttaggtcaggttatgggaaagagctagggga

SEQ ID NO: 83085 - DNA, 466 bp, Homo Sapiens
aagccctttaagtaatgatataactagaaactacgtttcatctcaaaggaaaaaccacaggtgatatattctcatgcttcaggttaaaaacctctcttaaaaggctaggtttgcgaaagccttcctaaaattatgcttctgttgttactatcaatttgatattcagccagaaaaattaaaaataattattaatcccaaagcatactttcaaaatttctactaagaattatattaaatcaaaccaaactacaattttagagagatcaaactgagtaggagagagcatggtatgaaaatttactctccctttcatctaagccacacactataggtctcaataactatacaattactcttgtaattgactgatttctttacacttaaggatcattataacctgccatattagtttaatttaacataaaatcgtaatacagaaatttggtcacagtaggggatatctaga

SEQ ID NO: 83086 - DNA, 820 bp, Homo Sapiens
  misc_feature (250)..(334): n is a, c, g, or t
gaaatcttttcgggagtttattaaggttcataacaattcttgtatttctctgcagagttggagattatatttacacacacatgcaagtgcagtgacaaacattcaaaagtttaaataccaaattttagtagtatttttcagtggtagaattatgcatgcttcttatgttttcctttttgtatatctgcatttcataagcttgtttgttataaaatttaatcaaatgtattttactgagaaactgtatgcnnnnnnnnnnnnnnnnnnnnnnnnnnnnnnnnnnnnnnnnnnnnnnnnnnnnnnnnnnnnnnnnnnnnnnnnnnnnnnnnnnnnnaaatattgaaatctgcatttgaatttcttaatagattttctctgcagtcattcttgaattgctgttacccaaagcgctttgtgcttccattttctggtgacaatgccatctgtggcttctctgtatctggcatggctgttatccaatacagcattcgctattattttcaagacttggctttgagagcgcactggtaccttcttcacaaggatgggctgcagctgcactcttattcttttcccaatcagattatcctcttgagaaacaaagcctaacagtcctaccaatgatcattgcagcattcaccgggagctgtgagaagagggccactgtccccaagaccccagaatggtagatccaccgacagcttgcactgttcaccttttagtatgaggaggaccatgaggtctagtcacttattaatcatggtagccactcgtcactatactggtaaaaaggtttcttttacctaaaattaaaaggaat

SEQ ID NO: 83087 - DNA, 529 bp, Homo Sapiens
  misc_feature (275)..(275): n is a, c, g, or t
  misc_feature (321)..(321): n is a, c, g, or t
cttaaaaagaggccgatttcatctcaaaccctggtgcagaggtcctaggcagagtgggaaacttgccctggagaagcagaagcagagaccaaatggctatctagtaaggatgttttataatgaatccttcattcctttaaagagcccattattttctgaggcttcatgggatgcgtaatagcccatgccttcactgctaagcataaaacatggagctcttagtagcctctaagacaatcatccgtcattcccacgattgccttcatcaaggccanggtactaaagaagtgctcaaagaaatacacatttctgatacaacangctgatgtaattttatcccatttatagaatgagtgagatgatatttcgaagaataaagatgccctggctttggcttgatctctggtaccttatgtttaaagaaggatgggaacacaaaaagagccttcagatcctacatacttttaccaacagtgtaagtccctgacttttacaattgtggtaaaatagacataacataaaatttccc

SEQ ID NO: 83088 - DNA, 536 bp, Homo Sapiens
  misc_feature (73)..(73): n is a, c, g, or t
  misc_feature (166)..(166): n is a, c, g, or t
  misc_feature (340)..(341): n is a, c, g, or t
  misc_feature (347)..(347): n is a, c, g, or t
agcagatgctgacaccgttgcttcgtgtacagtctgtagaactatgagacaaataaactgctttgtaaatacncagcctcagtattcctttatagcagtgcaaaacagactaatcaaagggggaagcatttccaggtaaagacgataaccaattattgttattgtnaatatctaaaggaaaccgtaaatttcaaaaggtaaaatctaaccttattctagtgcccaaggaagtgctgggaatgtttaaataagagggcagcagggcatggaaggagcgcctcggaaatgcctactccatgccaggctccctactacaggctttacgtgttatcttgtacanntctcangtaagatgagcagacatggtgctttttaaaagacgtcatgggagtttgaaagggggaagattgggtaaatggaaaaacagaagtcatggctttgcaaaagttgaatcaaactgctccctggcccggccccatcacacacacagatcccccctggcatggccaaaatgagtgtgatcattggcaaatcag

SEQ ID NO: 83089 - DNA, 489 bp, Homo Sapiens
  misc_feature (438)..(438): n is a, c, g, or t
  misc_feature (465)..(465): n is a, c, g, or t
  misc_feature (473)..(473): n is a, c, g, or t
ctgaacggattaaaatggtgcaagagaaaagggcatttttacacaaaaggaagcattttctgtgttccagttcagctgttccaatgacatttggtggtgttatcagtgtgaattatacaagcaagtttctttatccagactgacgcatcaaccatgatctagcatttgcaagatgtgtaattactttgactttcaagaaaacatcttctgatctaaggaacttcccaagatatcaaagctggctggctcaggaatactctcacagtgatggcagaagagcaaatctggaagttcaaacactcaaatgtgttgttggatttctgcatgcatcacatgggctaacaactggtcaaagcaaatcacatggccaaactaaaaatcaaaggcctggaagacagacaaagtgctatattgaaggctacagaagaataaagaagntctgaatagaacagaagctttcataangcaggggntataacgaccaacaga

SEQ ID NO: 83090 - DNA, 491 bp, Homo Sapiens
  misc_feature (207)..(215): n is a, c, g, or t
ctaatccaagccacagtgatggtaagaattaagttccttccttcatctatcctcagaggacctcaaacaggtactcagtaagagtcttacaatctctttgataattctactagctgattatcttcaggtctaatggcagagtttgttgtatttattaacattctccctaactggattgttctcttgtgtgtttataactttataacnnnnnnnnntggattttcttgtcctccacagaacacatgcttggtatctaaaggaaccaaagccaaggtgatgttatgtatgctacttgagaatcccagatcactcaagcaggctaaagcttcccagctgctttctgcttttttcttctctcctgagcacattccaggatcatctctttcttctgtacaatgtgatatcttggcatctgggtgatcccagcatcaatagagcctgggagtccagctggtccagggccttctgactggtctcaggcaggatccacc

SEQ ID NO: 83091 - DNA, 231 bp, Homo Sapiens
ctataagtaaatgactcgccagtcaaaataaacggcaactttagggttaaaggcccaatctggctccaaagcttggggttttagttactacactacattgcttcactatattttacaatttactagctgcttataagtatgaattaaggctcagaagtctaattttccagactactcggaggactctcgccccactccactccacaaagattcagctcaacgactccttcc

SEQ ID NO: 83092 - DNA, 662 bp, Homo Sapiens
ggactcctgagaaatggggtcagtgctctgaagttaaaagttaagttcttccttatattagcagaaaacaaggacagttagtaggattataacattttctatataagcctcgtttatgagttacaactaacttttttttaacagcttgttttcatatcctttccaatttaaaagcatatttaatgttccatcttagacaatgtgatagtaatgaagtctttgtgtaagagaggaaagaggaaagttaatctacaatgaagatcaacagtgaacagggaaggggtcttctctggcaaccttctgtcatttaccacattttataaaacactgtaggtaaagaaaaggctaattgataaccaaaacaacaaagattactgctgcctgcgttacaactgcctgtcacatgactcaggtcccataatcacattcccttaaggctcaaaatatctgaaagttccaacagcttagattctgaattacttgttttcacaccatgctttcctcccatcattctcttggaatgccacctcctccctcctctagaagcctcaagcccctaatctttctgtcccctcaggatggtgtaaaaacttcagccatctgttctgtcctttgaatttcatgtttgcaaggctcctatgttcatgtatgtataaatatat

SEQ ID NO: 83093 - DNA, 575 bp, Homo Sapiens
ttttaattcactggccccgaaagaaacttctctgtcaggccacaatataaccagataccagacacacgagatgttttggagggagggtggtggagccaagattgcagctccttattgaggaaaacagtcctcagagatccagagtcatttctcctgtgttcagcttgaaaaccttgggcaacttctggagatttcaacgtctcacagagtgcggaaacatgactggcgcagcatcctttccggaattggtgatgtccttcctgtaagggttgattttccatctcatcaaccaaatcgggaaagccgcagcatccttttctccaagaatgacaggtggtttatctcaggcttttctgtcccggcgcctttctctccaatgcagtctgctgatgtaatgcagtgattttttgtttgagggccacaggaagaccccttgtggctgttgtactggcattccctcttcatagcagggatggtgcctctggacattttccgacagcagggatcgttgggtgaggttagcagcgccagcccgggttagcggaagcagccttcaggtctcctaggagagcccc

SEQ ID NO: 83094 - DNA, 478 bp, Homo Sapiens
tgcctctagctgcagcatcttcaacatatgccatgtgtttgagctgaggcccatctcttcctgggtaccccccagccaataccgtacaagctgggagtgctcgggtgtggccctgtctgcccagcatgggactcttctaatggggactctttgttccagaactccctattgcataggcagagatttatgcagatccacaccatggtctgaagctccccttgcccaattctgcctctctttctttcctttcacaggtgtctaatctgcatggaggtgtgaagactttcattgcccagtcctgtttcctctcccttctgtcatggccattagcccccaataaatttattgtactcctaattccatcttagcatctgcttcctagaggagctgatactgacagcaaagggcaacatcaacatgttagttacctgtaacaaagaaatcagacattacccgtgctaggagaatataggatcag

SEQ ID NO: 83095 - DNA, 736 bp, Homo Sapiens
  misc_feature (548)..(688): n is a, c, g, or t
ccaggggtcacattccttcctggaggcactagaggagaatccttttccttgcttttctagcttctagaggcctaccacattcctccaccatcaaaatccgcaactgcattttagatgagtcttttcgcaatggcatcaccctaactttctctcctgcctgcctcttacaggaagacttttaaggacccctgtgactgcatcattgggaccaccagtataattcagaatactgtccctattttaactcagctgattagtgtgactaatccatctgccaccttaattcctctttgtcatgtaacctaacatattcaaaggttctggggttagaaaatagagatctttgggaggccattattatgcttaccacacagagcaattaatttttgtggaactttcattagggaaaaaacgaggagtaatagaatatagaaaatgagctcagtggtagataaggatttattacttatttgcctttgttgtgatagttacaatatattacccacaactcaaaaataattaagtttgcaaaatttatcaagcatgcnnnnnnnnnnnnnnnnnnnnnnnnnnnnnnnnnnnnnnnnnnnnnnnnnnnnnnnnnnnnnnnnnnnnnnnnnnnnnnnnnnnnnnnnnnnnnnnnnnnnnnnnnnnnnnnnnnnnnnnnnnnnnnnnnnnnnnnnnnnnnacgccctgagaaaaataccatatatgggacaggtgctcataaaacatt

SEQ ID NO: 83096 - DNA, 506 bp, Homo Sapiens
  misc_feature (21)..(21): n is a, c, g, or t
ctttctctatcccaactctanatctaccatccctaaaaaagtggagggggggtggggagagaaggtttagattgcccttcctgttgcccattgcccatcctttgtcccaccaaatgttgccaagagcctcagcaatggatactatttactaccaagggaattcttttggagaatgcccaaaagtaaattggttcaagatcatgaaccttgaatgctctcttgaggtgtctggagatttaacagtagataactcagtgccactaaaggtatttgttcgaaactttggcagtatcatgtctgtgttttgcaaagaaacttaatgaaaatggagagaatagagctacacagagaccggaaaagtcaagcagctattttaacggtttagactacagatgttgagtttctaacttactgcagcgtcagtaaggttgtaatcagaaaagacaaatttgagagatatttcaggaataatctttaagagactcagtgaaaattaaagggcaacc

SEQ ID NO: 83097 - DNA, 763 bp, Homo Sapiens
  misc_feature (23)..(23): n is a, c, g, or t
  misc_feature (637)..(637): n is a, c, g, or t
  misc_feature (674)..(704): n is a, c, g, or t
  misc_feature (706)..(706): n is a, c, g, or t
gtctgttctatcacacaccaagnctctcatggttctgtttctgtgggtattttttacctattgatctagttgtccattcctgctctacgccatgttgttatttaaaaattatggtaaactctactttacatagaatttatcattttaatcctttttgagtgtacaattcagtggcattaagtacactgacgttgttgtgcaaccatcactactattcatctccagaaagttttcatgatcccaaaatgaaatgctgcacatattaaacagtaacgtcccattactccctggtaattaccattctccctaatttgtctataaatttaactcacttaagtatctcatatattatgcaatatttgcacttttgtgactggcttatttcacttactataatgtcttcaaggttcttccatgttgtagcatgtgccagaatttccttcctttctaaggttgaataatattctattttacatgtataacacgttttattcatccactcattggtcaatcataccatctggttttaaccactgttgctttactataaatcttgatatcagggatgtatgctccctttctttagtcctgtggtacaaaataatctgagctattcttagctcttacttttccctgntaattggggaaccccctagaagttgtgtacatacagnnnnnnnnnnnnnnnnnnnnnnnnnnnnnnnancttttagagattttgatagaattgcattgaattgctggattaatctggggatagctt

SEQ ID NO: 83098 - DNA, 475 bp, Homo Sapiens
  misc_feature (76)..(76): n is a, c, g, or t
aattcggcacgatgccagccttctgggagttcttaagggcaggtggcactgagatatatgagtaccgagaggtaanggacactcataactagaacacacatctgtctctacctttaaagctcatgtgatctgctgtggaggttcagaccacaggggaacaatagacagatggcccaattacatcgtgtgggtgtatgtcatattcaaaccatctacagaagtacccagggtgcagactacatgcccagagctcatggatttgagagtgagctacacttgaaaaatggaaatttcctcccttctctcctccccagaagaagaaaaaatataacacttcctcctctttgcatccaagtcctaagtcctttctttccttgtggtttgtttttaatctagtgcttttataagaatcctttatatttgaataaaaatgctgaagaacccactgcagtttgccaatttgtcattcacactg

SEQ ID NO: 83099 - DNA, 411 bp, Homo Sapiens
  misc_feature (169)..(197): n is a, c, g, or t
aataaaatagaataaacaattcaaaattccttttctcggttgcaccagccacgtctcaaacactgaacagccacgtgtggccactggctactgtattgaacagcagatgcgtaggcattcccagcactgtggagcgctttatagcccacatgtacccgttcttagatgnnnnnnnnnnnnnnnnnnnnnnnnnnnnngcgtgagccactgcatccagctcttagcatgtgcttttaaagtaaaaaccacgaggagaaggtactcattacttcataacttgtgtctcacccaccttgctgtcttcacatccccactttctgtatgcacattggaaggtgaatttgttcagctcacattaatttataggaataattttcattgctctgtgaataaaatgtgctaccactttaa

SEQ ID NO: 83100 - DNA, 573 bp, Homo Sapiens
  misc_feature (81)..(81): n is a, c, g, or t
  misc_feature (282)..(282): n is a, c, g, or t
gatgagttaatgagttacaaactctactagtcatctaagctatagcctttctaattgttcaccgtgtaggcatcatgcatntgagctccgattttgacttcattctcccactggcactgggcccctgctctgaaccctctcaagggtgccttaccaaccatctcccttttaaagacttcctcctctgggggttgaaccctgtctaccatgcaccaccttctaatagactagttatgtttgagatgttgcagttggctttgaatacaattcggttctccacantttgtctcttgtgtttcaccaacaaaatttaaacggtattgagtatggagcatatgatctaggtcttgaggtttgtgtagtcctatttattcacctttgtgtctatagtaaggacagttattccctttcctatttgtcttttctttaagactctgctcttggtgctccagcttgtgtcagcaccagacttcccagagttataaacagcagaagaaaaggaaggaacggaaatcagagaaaagtatattttaggtcactataagaaaaacttttaaataggcttaccagatt

SEQ ID NO: 83101 - DNA, 400 bp, Homo Sapiens
  misc_feature (240)..(240): n is a, c, g, or t
cgtgtggatgtctccaggctggaagtctgggttcgaaatgtctgcaatgcctcgcacttgtggcccgtccctgatcttcagaagccactggtttctccgccaaacaaagggtatgcacctcatgggctcaggtcaaaaaagtcttctaaacaaccctctaatgtttatctttcacagcctgccgggcacacccatcttcaaaggcagaggacggaaaagtgccaagatggatggacgatnatggctgtcgccgcactcccgtgtccaatgcgccaaggccgaatgaccacttaggtcaggagatttttcccctccaggctgctgttcccgggagatgtcccaacgtctctagtccagcccctaactcagcactctacacatccgacgcttaacgaaagct

SEQ ID NO: 83102 - DNA, 690 bp, Homo Sapiens
  misc_feature (313)..(322): n is a, c, g, or t
  misc_feature (342)..(370): n is a, c, g, or t
  misc_feature (421)..(473): n is a, c, g, or t
  misc_feature (651)..(651): n is a, c, g, or t
gaaaccttggcgtgcgcgagaatttcccagtgagtttgttaaaatgcagattcctcgggtctgcgtagacagactgtgccccacgcttttctaagtcagttgtttctcgggctaccctttaagagacactgctgaatggcctggtgaagaaaatacagaaacagatgggtacaagaactaagaaaacggctaagaaagtgttttggtcctgactactaccatttcgctctgtgatttggggcaattcacattggcttccctgccctttcttctttgtcaaaagacaaaatcacaacaaatttagttcaaagannnnnnnnnncttaagagacggactctggnnnnnnnnnnnnnnnnnnnnnnnnnnnnntattcacaggtgcggtcatagcaatcatggctatcacaggtgcatcctggnnnnnnnnnnnnnnnnnnnnnnnnnnnnnnnnnnnnnnnnnnnnnnnnnnnnntaaggtatgacagagccaaaactccaagtcatgtcagtagggcatgcccaatagaaaatgctttgacatctaacaacacccagaaccaatgattcctccctgtggtaccaagaagacctagacatgatcggaacctaaatgctggaactctttcaggagcaaagggtctgttgaccanaaagatccaggggtaaaatccacctcaacatacccgtgt

SEQ ID NO: 83103 - DNA, 490 bp, Homo Sapiens
tttccggcaaggactggaggtcctaagctttgtttatttggtgagccagtgcccaaatgagcaggggaatcttggcacagtcacctacacactcatttcagtgctctggccccttatccaagctagtcaaagtgtggtctatggtttttcattgcaagggatccccgggtgaatcttgtgtctgtcaaaggaggagaagcactgccctcaaaatatagaaaaggtgaactaatttatccaggcagcctggctatttatttatgtatttatttatcttgttgacgggaagattcaaattgacatacacaatcaccctcataaggatttcaggtaaaaaacagacaaagatttagatatcagatgtgttttacaattactgcaccagtctttttctacagaatctagtagtatatttccaatagatctaggtgaaaatttctatctcatgagccttctgtcagtatttttaaaattggatactctattagtg

SEQ ID NO: 83104 - DNA, 563 bp, Homo Sapiens
  misc_feature (480)..(480): n is a, c, g, or t
  misc_feature (509)..(509): n is a, c, g, or t
gtcatatggaaaagcattcagctgctccctgcctttgctcacagcgtgtggtactctcttagaagctattcctggaaactgcagagaagagaataatttgcaacccattcttctgaggcccaaattaactcaataccaacacaacataaggacactataagaaaacttgaagaagatgaagtttcttcttcattgaaagaaaataaaggtcacgtctgtgatcatcgttcgagaccaagtaccaaagaaaacagcaacatctggctgaaggaggcttcttctgagatggcaacaggcaactgcagaagagaggagggtagtttgtaattaagactgatggcaagcaacatttgggcatgtgcaaaaatatctctgatcactgtgttttcaccttaaaaggaagtgtgactcaaagttaggaaccattatttatatacagcttttgtcattcagttcactgacaagagttaaaaggcactntattttatttacaatatctcagtagactntgatactaaataatataaagtgtgaaaaaactgtatatgtaaaagaatatagta

SEQ ID NO: 83105 - DNA, 450 bp, Homo Sapiens
ttaacatctactatttaaatttataaaggagatgcagtgataattatgcatatgcgttttttgacttgttagctacattcttttttactatacttgctttctttattaagttctacattttgtcctacattaatatgaatcatttgaagtactttattctaatttaaatttgaaaatactattttctgaaaaaatgtattttattttggaagctcttcatttttaaaaatttgtggtttatattctgagcaaattaaaagtagctgttttggccatttaaaaatgttaaaagaatatgagtgcattaagagatataatgaccactataactattacttgacctgtttttatattcactacctaacatttatttaatgcctgctaaatacaaggcagtataattgagccagtttgtgtgatagaatatatatttgattctttaaatttttg

SEQ ID NO: 83106 - DNA, 387 bp, Homo Sapiens
  misc_feature (71)..(182): n is a, c, g, or t
  misc_feature (352)..(352): n is a, c, g, or t
gctcaatcttcccacctcagcctcctgagtagctgggaccacaggtgcacatcaccatgctcagctaattnnnnnnnnnnnnnnnnnnnnnnnnnnnnnnnnnnnnnnnnnnnnnnnnnnnnnnnnnnnnnnnnnnnnnnnnnnnnnnnnnnnnnnnnnnnnnnnnnnnnnnnnnnnnnnnnatacatcagtgagcctggcctaaactctaactggcactgtagtcctagctttataggcctgtcacagagatactcaacaaattttgctaatgttatatgtaattattacataatattagcacatactttattatttatttttcgagaccaggtcttgctctgttacacanggctggggtgcagtggggtgattgggttcactgca

SEQ ID NO: 83107 - DNA, 487 bp, Homo Sapiens
accaatatctaatacccaaatcagggataaaaaaggctgacctagccagtcatctacaaagactcaagaaaacccttatttgtatgttaataccgatgacaaaatataatcttttaaacttaaagataatattgtatgtcttaaatgacaccaatatggagaagaaaaagcctttcatctaagagccacttttactggcactcagattagatcagaagcagctctttcaggtcttcaggaaaagctcaatctccacccaaaacagaaaaagcaaatcctatgcatcctctctcctcatacttcttataacccacacacaaattatgaaatatcataattcagtatgttgttcagggaaaaattttcaaaaaagtgaaaacctaggaaggtaagtcattgcgtgaacacttttacaacagctaagcatttcctacgtgactaatctattttaaattcggctcctctgttcctatgcaatctcatatta

SEQ ID NO: 83108 - DNA, 848 bp, Homo Sapiens
caaatactaaatctgaaaatactaaaatgaaaagaatttgcaaatgtgagaatttgcaaacatgtggagtgtgttcttatgtgctttccagtttctctgatgataagaaatgagtaatgttgggccttgatttcctaaactcagccctcagtcactttctcaaattatttgaagaccttccaagttgcttcagaagcattgtccaaaggagattattcccagtagtgaagaataatagatggatgagaatgtctaaggaatcctacttctgtcgcagaagtggcactctccagaacctcaagggcccatggagttcatgggctttggagtcaggcagagttgaccctgagtcccatcccagcctcttaatagactagttacttgacttggaacagttatgcaagacaaagcacaatgatactgattgcagtaatgggaacaattcattcctctctgtatccatgccctttgcaatgcatgtttttagctactcccatggagggaaagattctgtttttccagtccttggatctgactggccttatttgctgtggccaattcatacttactgttctagtgaaacaattaggcatgttttgctcctcattctagactttaattaaaattaaaattttatgatattttatttctactgtattttgctgtattcattctgctcagtattctagttcactggtcctcttatctctgtttaatttagtggtgaacctatacattgtctggtaacttaattttgtattttcgtattctattgggctgtcgttcaaatgtggcttttaaacttcagttacttgttctttctacaaaaataaacattgattttctac

SEQ ID NO: 83109 - DNA, 953 bp, Homo Sapiens
  misc_feature (112)..(139): n is a, c, g, or t
  misc_feature (152)..(214): n is a, c, g, or t
tttaaaaacaaaccagttcctccgaagaagggcagtaatgcggacccttaggtcacaggacagaggctggttaaggaagcctttattgattccagagggttcccccgccaannnnnnnnnnnnnnnnnnnnnnnnnnnnggagacagggtcnnnnnnnnnnnnnnnnnnnnnnnnnnnnnnnnnnnnnnnnnnnnnnnnnnnnnnnnnnnnnnnagggctcaaaggatcctcccaactcagcctcccgggtagcgatggaaccggaggccaaagctgtgggcgcggggctccaagcgagcatcagtgtaatgggtgccgagctgttgcggaccaccaggccgtcgagattgaggcgcgcgtggcagatcacgggctgccagaagtcgcggggtccagcagcaaactcgaggtcaaggtcacgttggccagatccaggccggtgaagcgctccaggctttcggaatagatgacccggcttccatgcctcagggtcaccaccaagtagcccaccgggaacacctgcgtcacgtggcagcgcaaagtgtatttcctgccctttaagaccgcaggctccaaaatcacgctgtggggcggtttgtaggcggtgatcctggaggtggcccagcgtgtttttcctgcgcaggtcacgaggcagtgcgcgagggagctccaggccctcacgtcgagcagctggtaagacacccaacccggccctctgagcgtcttgccttgccgcagcggggtgcggaggctggaattctgcggctggggacagctgttgctgcaattgagctgcactgacttccccggctgcacagccacgaactccgggctcatgcgcacccagaagggcactgaggtcccggagggcgcgagagggctacccttggggctttgcgcccgcttagtccggaagtcccagcgcgctcccaactcccgggtaggcggccgc

SEQ ID NO: 83110 - DNA, 491 bp, Homo Sapiens
gggcgagagagctccccagggtcccttttataagggcattagtcccattcagactaatgggactaaatccagactctgtgctgagtgttgtggattttttgcatgttcatcctccccgcagtttgccaaggcggacaaagccgacacaatgggcctgtccactatcttctttcatatacacaaaatgtcagctcttcctgtttctgactggcaatatcccgcctgatgaccagcttagcaaattagagaccctgcatgggacttcatctctgtcttagttcgggcttctataacaatgtaccataaactgggtggctgtcccactcagaaatgagagtgtattagtccgttttcatgctgctgacaaatacataacagagtccaggaccaaaaagaggtttaattggacttacatttccatatgactggggaggcctcagaatcatggcgggaggcaaaagcacttttacaggcagagcaagagaaatgag

SEQ ID NO: 83111 - DNA, 805 bp, Homo Sapiens
ctgaagttgaagtacaaccagcatatcaatagattaccagaagcccagttgagcacagtagaatatatatctgttgcagcactatccaaaatatttgctgtcgcagcaacatacccatatcaagtcgtaagagctcgtcttcaggatcaacacatgttttacagtggtgtaatagatgtaatcacaaagacatggaggaaagaaggcgtcggtggattttacaagggaattgctcctaatttgattagagtgactccagcctgctgtattacctttgtggtatatgaaaacgtctcacattttttacttgaccttagagaaaagagaaagtaagctcaaagaggacaattccagtatatctgcccaaggcagcaacaagctcttttgtgtttaaggcataaaagaagaattctgcatagaaacatggctcatattcgaaattgctctatagtcaatagaagccagagaactgctaagtctcctgcaatgtttttctgctttttgccttccccatatatatggaacttggctacctctgcctgaaatggctgccatcaacacaatgttaaaactgacacgaagtatagagtttcacagatttctacgttttattggtggaagctgatttgcaacatttgctaaatggattagatgaatgtacttctttttgtgagcttacttgcctggattgctttaaaattaacctttgtgcaataccaagaaaatagctctttaaaagaatgtctttgtatgtctcaaggtaaattaaggatttactgaataaggtgttgaccaaatccagacc

SEQ ID NO: 83112 - DNA, 766 bp, Homo Sapiens
gcggccgcatagggtgctccatagatgcccaaggcggcgcccagctccggtcgcgcactgcccagcagtcgactatcgtagggtgcgcagcagagagcgggcgctggggtggagcctgatgccacatctgagacagagcgttgggtagattcgcagcatgtggtgctggaacttgccgacgccagaaactgggaagcgccgcggtacgggtgtccaaagtgtgggaaggacatggtggctgtccctggcccgtctctctcttccctgtcgagttcccgtctcagcccagctgttccgcgcccccagcagtgaggtgtctcagttccttacaccgctgcggatgcccagcgccggttccttcgcctggttggccccagtggaggcagagccgagggcagcccggctgccgagccctgcgctccggaaggcgcccctccggcccgtggggtccggaagacagaagggcccatggatgggcaggggaaggaagaagatgcgggttcccaaaggcgcgtggtggcgaggtgaggcgcggcgcggcgcggggctgtgaggctccggaggtgtcccagtccaaggtggccagaggctcaatgtgacgtcacggtaatcccgggccgccagacgggaccccgggccccgggaccctgggccaccaagcgtgccaagcgcagccagcccgtgcgcgcgcgcgcactctcacccacactcacacttgctccgggaggtttgtgcagctggcgaggaacgtcaaaaaccctgaccc

SEQ ID NO: 83113 - DNA, 1254 bp, Homo Sapiens
  misc_feature (1213)..(1213): n is a, c, g, or t
  misc_feature (1239)..(1239): n is a, c, g, or t
ggtccggaattcttgcgatatcgtcgacccacgcgtccgaattgggttcctccgagccgccgtaggactggttccggcgggctggtgaggaatggagccggtaggctgctgcggcgagtgccgcggctcctccgtagacccgcggagcaccttcgtgttgagtaacctggcggaggtggtggagcgtgtgctcaccttcctgcccgccaaggcgttgctgcgggtggcctgaatgttcgcatcttaccacatacagttctttacatggctgattcagaaactttcattagtctggaagagtgtcgtggccataagagagcaaggaaaagaactagtatggaaacagcacttgcccttgagaagctattccccaaacaatgccaagtccttgggattgtgaccccaggaattgtagtgactccaatgggatcaggtagcaatcgacctcaggaaatagaaattggagaatctggttttgctttattattccctcaaattgaaggaataaaaatacaaccctttcattttattaaggatccaaagaatttaacattagaaagacatcaactcactgaagtaggtcttttagataaccctgaacttcgtgtggtccttgtctttggttataattgctgtaaggtgggagccagtaattatctgcagcaagtagtcagcactttcagtgatatgaatatcatcttggctggaggccaggtggacaacctgtcatcactgacttctgaaaagaaccctctggatattgatgcctcgggtgtggttggactgtcatttagtggacaccgaatccagagtgccactgtgctcctcaacgaggacgtcagtgatgagaagactgctgaggctgcgatgcagcgcctcaaagcggccaacattccagagcataacaccattggcttcatgtttgcatgcgttggcaggggctttcagtattacagagccaaggggaatgttgaggctgatgcatttagaaagttttttcctagtgttcccttattcggcttctttggaaatggagaaattggatgtgatcggatagtcactgggaactttatattgaggaaatgtaatgaggtaaaagatgatgatctgtttcatagctatacaacaataatggcactcatacatctggggtcatctaaataataattaaagtggctttcataaaatggaacttttggggtccgccctttcngaaaatggaaccttggccatgtgtanttccaccaaatacct

SEQ ID NO: 83114 - DNA, 944 bp, Homo Sapiens
gggaggactggttccggcgggctggtgaggaatggagccggtaggctgctgcggcgagtgccgcggctcctccgtagacccgcggagcaccttcgtgttgagtaacctggcggaggtggtggagcgtgtgctcaccttcctgcccgccaaggcgttgctgcgggtggcctgcgtgtgccgcttatggagggagtgtgtgcgcagagtattgcggacccatcggagcgtaacctggatctccgcaggcctggcggaggccggccacctggaggggcattgcttggttcgcgtggtagcagaggagcttgagaatgttcgcatcttaccacatacagttctttacatggctgattcagaaactttcattagtctggaagagtgtcgtggccataagagagcaaggaaaagaactagtatggaaacagcacttgcccttgagaagctattccccaaacaatgccaagtccttgggattgtgaccccaggaattgtagtgactccaatgggatcaggtagcaatcgacctcaggaaatagaaattggagaatctggttttgctttattattccctcaaattgaaggaataaaaatacaaccctttcattttattaaggatccaaagaatttaacattagaaagacatcaactcactgaagtaggtcttttagataaccctgaacttcgtgtggtccttgtctttggttataattgctgtaaggtgggagccagtaattatctgcagcaagtagtcagcactttcagtgatatgaatatcatcttggctggaggccaggtggacaacctgtcatcactgacttctgaaaagaaccctcctggatattgatgcctcgggggtggttggactggccatttaggtgggcaaccgaaatccagaggtggcactgtgcttcctcaaacgaggaccgtaggtgattgagaagacg

SEQ ID NO: 83115 - DNA, 385 bp, Homo Sapiens
ggttttttgccagagttatgtcactgtcaatccatgtggccgaaaccatcttaactctaccagctaagataccccagcattggggaaggcagggttttgtattgtccagtccctggagaaaatcatgaaatgcctgagttcattgggggtcctcattcccttctgtatgacaggtataggtatggatatgacccatttttagccaagagggtctgagctgtatctgctggtggcttatacaaaaagtttactttcttcatggatattcttggtctcacatacttgtaatcaagtttttccagcctccaagtcacctggcctgggaaagtacttgcctcatgttgctctggtttgtgataataaaggctttacagtttaagccaaa

SEQ ID NO: 83116 - DNA, 679 bp, Homo Sapiens
gccagataaccccccgccccacataaccagctgcgctcctacacctagcaggccggctcacatcaccctttaacgcacactatattcacacacacacttgtgcacagtcttgaatgtgtgcccacacatctgcctgcacacactcatgtgcccacatgtgaatcacttggaagtgtacacaaaaccaaacccacagcacagatgggcagacaggtgagcctcgtgcagcatgtgacactcccacatgcacaagacatgtgtgcagaggcatatcacacacgcagaagcactcccgagaactgccttctcccttccagcctaggggcccctgttcccccacaaccgggcccagccctggagccccctccagcactcctctcccacccccacgctccccaagagcagcagatgtaggtctcccggctcccaaacctctgagatgctgctctgtctgaaatcatcatataaataatcattttttaatacaagggggtgggggtgtcaggcaagttccatgaaattgtgaattagccgctgctccaaataaatgcctgcttcggcccgagagcagccgcgctgcgcccgctgcgcccccaataatcgtgtgttgggtatctctccattgttccctgggccattagtcaaagggcaaattagaaacaatttcttgacgacaaaa

SEQ ID NO: 83117 - DNA, 609 bp, Homo Sapiens
  misc_feature (472)..(472): n is a, c, g, or t
  misc_feature (479)..(479): n is a, c, g, or t
  misc_feature (492)..(492): n is a, c, g, or t
  misc_feature (526)..(526): n is a, c, g, or t
  misc_feature (547)..(547): n is a, c, g, or t
  misc_feature (557)..(557): n is a, c, g, or t
  misc_feature (564)..(564): n is a, c, g, or t
  misc_feature (597)..(597): n is a, c, g, or t
gagatcaaaggaaagatggatgcggtggtgaacttcacataccagtacctgagcgcccccctgtgtgtcaccgtgtgggtgccccggctgcccctgcagatcgaggtctctgacacggagctcagccagataaagggctggagggtccccattgtgaccaataagaggcccactcgtgagagcgaggatgaactttgaaatagccagtttcagcagcctttcagggactcagcccatcacgtggcaggtggagtacccacggaaggggaccacagacatcgccgtgtccgagatctttgtcagccagaaggacctggtgggcatcgttcccttggctatggacactgaaatttaccacctttaccaccatccccccggacgacagctgccccacggtgaactccatcgtcagcagcaatgatgaggacatcaaatgggtgtgtcaagacgtggctgtgggtgccccaagganttagaantatctggagaacncaaagataaggttagccctctaccaaagggcctncagatgcttcttgtctggaantggccaagtnggagaancgttgtagtgggttagaaggcggtcaggtcatntaacattgaagt

SEQ ID NO: 83118 - DNA, 788 bp, Homo Sapiens
  misc_feature (79)..(111): n is a, c, g, or t
agcagggagcctggtcggggagagaagttctggtcaaccttgcccccaagccaggctccccagtggagacgaggcctcnnnnnnnnnnnnnnnnnnnnnnnnnnnnnnnnntgaagaaggacccattcctggtccccagagcaggctctctccaactgctgccactgtgcagttcaaatgtggggctccagccagtaccccctacctcctcacatcccaggctcaagacacctctggatcaccctctgaacgggctcgtccactaccgggaagtgaatttttcagctgccagaactgtgaggctgtggcagggtgctcatcggggctggactccttggttcctggggacgaagacaaaccctataagtgtcagctgtgccggtcttcgttccgctacaagggcaaccttgccagtcaccgtacagtgcacacaggggaaaagccttaccactgctcaatctgcggagcccgttttaaccggccagcaaacctgaaaacgcacagccgcatccattcgggagagaagccgtataagtgtgagacgtgcggctcgcgctttgtacaggtggcacatctgcgggcgcacgtgctgatccacaccggggagaagccctacccttgccctacctgcggaacccgcttccgccacctgcagaccctcaagagccacgttcgcatccacaccggagagaagccttaccacgaaccagtgacttcatgaagtttctccggagccacctgcatcctgctgctctgaagtcacttcctgcctgaggtgtggaggcggc

SEQ ID NO: 83119 - DNA, 540 bp, Homo Sapiens
  misc_feature (348)..(380): n is a, c, g, or t
cagatggagcacgtggtccaggcatgccaccgcttcatccaggccagctatgaacctctgggcatctccctgcgccccctggaagcagaacccccaacacccccaacggcccctccaccaggtagtcccaggcgctccgaaggacacccagacccacctactgaatctcgaagctgcagtcaaggcccccccagtccagccagccctgaccccaaggcctgcaactggaaaaagtacaagtacatcgtgctaaactctcaggcctcccaagcagggagcctggtcggggagagaagttctggtcaaccttgcccccaagccaggctccccagtggagacgaggcctcnnnnnnnnnnnnnnnnnnnnnnnnnnnnnnnnntgaagaaggacccattcctggtccccagagcaggctctctccaactgctgccactgtgcagttcaaatgtggggctccagccagtaccccctacctcctcacatcccaggctcaagacacctctggatcaccctctgaacgggctcgtccactacccggg

SEQ ID NO: 83120 - DNA, 526 bp, Homo Sapiens
gttgaggcagacactgtggtcttacgggaccaactcttatccatcttccttggttgatggaggcatgtcgccagcattaagatctccagcacagatgcacgccccggcctcttgatattattagtggcttcctggtttctccctgccgcctccacacctcaggcaggaagtgacttcagagcagcaggatgcaggtggctccggagaaacttcatgaagtcactggttcgtggtaaggcttctctccggtgtggatgcgaacgtggctcttgagggtctgcaggtggcggaagcgggttccgcaggtagggcaagggtagggcttctccccggtgtggatcagcacgtgcgcccgcagatgtgccacctgggagggaggagacttcaagtcctgcctctgggaggaacagaaccctccctatggccccaccccacctcttgcaggtttgccttggaagccacttggaggctggctccgtacctgtacaaagcgcgagccgcacgtctcacacttatacggcttctc

SEQ ID NO: 83121 - DNA, 518 bp, Homo Sapiens
gagattacaggcgtgcacatcgcgcccagccggttcaagttaatttttaaatgcaccgactcatcaacgatttcctttcctcgaaatgaaaatcccatccttaggatctgtgtgctggggctcctggcatgaacatgtgaaaggatggtgggaagccaaagacaaacaccgtattctctatctcttctatgaggacatgaagaagaacccaaagcatgaaattcagaagctggcagaatttattgggaagaaattagatgacaaagttctagataaaattgtccattacacttccgtttgatgtcatgaaacacgaatccaatggcaaactattcatccgattcctgctgaaatcatgggaccactccatttctccattcatggagaaaaggggcagtgggagactgggaagaaacacttcaccgtggctccagaatgagagatttggatgaagattacaagaagaaaatgactgataccagactaactttccacttccagttctagtaagggagaaa

SEQ ID NO: 83122 - DNA, 445 bp, Homo Sapiens
tttttttggtgcttacaggaccgcgctgttccggcttcttcacggctgacattcggctaacgagggattactttggccaaaacctttcaaaggatatgcagaaagatggtagggagcatttgggtttgaatctgaatgctatactggatactctgctccggaaagatgagctttttattctactacttggaaggaaaaggaattcctggtccacctgaattcctctatgaagcctaactcttgaggtctctaacataccttgtcatagaggaaaagcacagattatacctggatgattcaggagcacattctgattccaggtttggtagagctggctcttctactccgtaaagccgagtctgggactggcagcccatccaagtgtatatgaatgaataaagcatccaagtatatatgaatgaataaagtatgtaagtatcaccag

SEQ ID NO: 83123 - DNA, 470 bp, Homo Sapiens
tgggtccttcttcattttcggcaacacagcattgcaaattgaaagataaatcattgcacttgacaaggatcctttttccaaacttctcttcaaatgacttcacttctggctcagctgatgagaagtcaagcttctgggcatctgggtccaaataaaaaagtttgactctgctttcacttttcagtttgatttctgcttctcttgcactcttggcaagttccggcaggtagctatctaaaccggaaccagaaccttccaatttgctttgttcatcatcttcgtgagagtcgccatttcgcttttcttgcattgcagcttcaaagttgagctggaggatcttatttagaattgtgatccattcttccatttccacttcactgtctgctgccaagagataactacttttgtcctgcatcttgagctcaaaagcaaaacgcctgactttgttgttctgaacgacacccatacag

SEQ ID NO: 83124 - DNA, 770 bp, Homo Sapiens
  misc_feature (27)..(27): n is a, c, g, or t
  misc_feature (35)..(35): n is a, c, g, or t
  misc_feature (42)..(42): n is a, c, g, or t
  misc_feature (71)..(71): n is a, c, g, or t
  misc_feature (76)..(76): n is a, c, g, or t
  misc_feature (94)..(94): n is a, c, g, or t
  misc_feature (109)..(109): n is a, c, g, or t
  misc_feature (116)..(116): n is a, c, g, or t
  misc_feature (168)..(168): n is a, c, g, or t
  misc_feature (204)..(204): n is a, c, g, or t
  misc_feature (252)..(252): n is a, c, g, or t
  misc_feature (264)..(264): n is a, c, g, or t
  misc_feature (267)..(267): n is a, c, g, or t
  misc_feature (269)..(269): n is a, c, g, or t
  misc_feature (312)..(312): n is a, c, g, or t
ctcccagcagtcagggtcttgtggcancgctggcncctcagncacggtcggtgccaatttctgcctaatgncatcnccttctcagcaaaatagncgggctccccacagncagggcncagcgaggtctccccagtgaatgtcttcatatggggagggcctttaaagggnaagaggccctggctatgtctgaggtggagatgcccngcagcacctgcctgcatatggtgctgtcctctttcaaaagcatgctcnttccagagtgcnccncncaggcgcccaagagtctgccttctacaggcccagagctgagcnccctctgactccacctcctgccccatccctatgtgtattagggactatctgcttccttctcctgcttccttttcatcctcccaggggctcacgtacccaccatcccaaccctgttagcaactcaatcctcaggaaacttgagctgatataggagctggccacagcacggggtgtcaggtgttggggagcacagtgtcattgcctacttcagggaatggagggaaagaacagggaccagaggagaaaagttgaagaatatgagaggctggccttatcccaatgactcctctcctttagatcattccttccatggccctggcctgggacagacctaagttcctggccagctttgcctctgactagctttgtggatggacagtcatttgccctgtctggatctcactttcctcacctgtaacacacgaggagaggggataatgccatctgcccaattaacc

SEQ ID NO: 83125 - DNA, 481 bp, Homo Sapiens
  misc_feature (17)..(17): n is a, c, g, or t
  misc_feature (25)..(25): n is a, c, g, or t
  misc_feature (37)..(37): n is a, c, g, or t
ggaaccctgcaattacntgtcatangtctttcctggngttgactggcagcactggggttgatcagatgcctagcacgcttcccctagctctatcaaaacctgcatatgaacagaaaatgcccttagcctgtgaatagtcagctaacagcttgtgaacttggggaccagtaacctccaggcttggtatttctcagcctgcccccaccctttttcctattggtaatttacttcttactctgagtaccacattgttcatataggaattgtctgtgaagtttacagaaactgtctactctaatgatgtcctctaataggtcagactctcttacttgggcccctttggttttatgttcataagttaatgtgccagcagcctggaggggctctggaataacagattccatcttagagatagccttaaaagatgtggttttcattgatgagtggtttaatggagggtctggctggcgaatgacttggg

SEQ ID NO: 83126 - DNA, 1313 bp, Homo Sapiens
cggctaggtacgaggcctgggttgtgaattcggcacgagggtaggcggcccggggccacaccgcgtgcgcccaagccagtgcaaggcccaggggcctgacatcgctcccagcgctcgaggaccgaggcctgctgtggaggacaccgtgctccctcgggacctgctctggattccggcccggacgtccccttggagctctgcatctccaacctggaacccaacccagaagtctcaagtttgacgcatcacgtggcgtgcggatccactgagggtccacagagaggggcgcccatctcctgcgtctcagttatcctggtgttgggaattctgtgccctaaagaattccgactcagatccgaacggggatctggtggaatcgagggtgaaagaccagagggacaatgttctactatcccaacgtgcttcagcgccacaccggctgctttgccaccatctggctggcggcgactcgcggcagccggttggtgaagcgcgaatacctgagggtgaatgtggtgaaaacctgcgaggaaatcctcaattacgtgctggtacgagtgcaacccccgcagcccggcctgccgcggccccgcttctccctctatctctcagcccaacttcagatcggtgtgatccgcgtctattctcaacaatgccagtacctcgtggaggacatccagcacatcttggagcgcctccaccgtgcccagctgcagatccgaatagatatggagactgagctacccagcctgctgcttcctaaccacctggccatgatggagaccctagaagatgctccagatcccttttttgggatgatgtctgtggatcccagacttcctagtcctttcgatatccctcagattcgacacctcttagaggctgcaatcccagagagagttgaagagatccctcctgaagttcctacagagcccagggagccagagaggattccggtcactgtgctgccacctgaggccatcacgatcctggaggcagagcccatacggatgctggagattgagggtgaacgggagctcccagaggtcagccgccgagaactggacctgctgatcgcagaggaagaagaagctatcttgttagaaatcccgcggctcccacctccagctcctgcagaggtggaaggaataggagaggcactgggtcctgaggagctgaggctgacaggctgggaacctggggccctactcatggaggtgacccccccggaggagctgcgtctgccagccccacccagcccagagaggaggccccaagtccccccaccttctcgccgacgcccgcccgaccgc

SEQ ID NO: 83127 - DNA, 708 bp, Homo Sapiens
aaaaccaataggctaggtacgaggcatgggtgttgaattcggcacgagggttgggactctgtgccctaaagaattccgactcagatccgaacggggatctggtggaatcgagggtgaaagaccagagggacaatgttctactatcccaacgtgcttcagcgccacaccggctgctttgccaccatctggctggcggcgactcgcggcagccggttggtgaagcgcgaatacctgagggtgaatgtggtgaaaacctgcgaggaaatcctcaattacgtgctggtacgagagcaacccccgcagcccggcctgccgcggccccgcttctccctctatctctcagcccaacttcagatcggtgcgatccgcgtctattctcaacaatgccagtacctcagactcttggtctccatccctcgacgctggggcggcctgacctgctgcctgctaagctggctgtctacctcgcactccctgcccacagaggacatccagcacatcttggagcgcctccaccgtgccagctgcagatgcgaatagatatggagactgagctacccagcctgctgcttcctaaccacctggccatgatggagaccctagaagatgctccagatcccttttttgggatgatgtctgtggatcccagacttcctagtcctttcgatatccctcagattcgacacctcttagaggctgcaatcccag

SEQ ID NO: 83128 - DNA, 1156 bp, Homo Sapiens
ttaaggctaaggtagcgaggcctgggtgttaaattcggcacgaggctattcctgcagtaggcggcccggggccacaccgcggccgccaaagccagtgcaaggcccaggggcctgacatcgctcccagcgctcgaggaccgaggcctgctgtggaggacaccgtgctccctcgggacctgctctggattccggcccggacgtccccttggagctctgcatctccaacctggaacccaacccagaagtctcaagtttgacgcatcacgtggcgtgcggatccactgagggtccacagagaggggcgcccatctcctgcgtctcagttatcctggtaattgtgtatctgcccattgttcgttgcctcattaacttggctttctaggtgcacccaccttgccaccagagaagtccaaatcctgacttctctccaaggtgttgggaattctgtgccctaaagaattccgactcagatccgaacggggatctggtggaatcgagggtgaaagaccagagggacaatgttctactatcccaacgtgcttcagcgccacaccggctgctttgccaccatctggctggcggcgactcgcggcagccggttggtgaagcgcgaatacctgagggtgaatgtggtgaaaacctgcgaggaaatcctcaattacgtgctggtacgagtgcaacccccgaagcccggcctgccgcggcaccgcttctccctctatctctcagcccaacttcagatcggtgtgatccccgtctattctcaacaatgccagtaccctcgtggaggacatccagcatatctgggagccgcttccacgtgcccagttgcagatccgaatagattttgggactgagctaacccagactggtgttttctaaccacctgggcatgaatggaggaccctaaaagatggtccagaatccctttcggggagaggtcagggggaacccagaagttcagtcctgcaaaaccccagaatcggaccctctctaagggggatcccagagagcgtggaagagccctcggaagtgacaaggagccggaggccgaagaatacccgcacgacggacccgggcagcacacgagcgcgaccacgccggtacatcggacggagcgacagaacgacgaagacagctgcacaagaacagactc

SEQ ID NO: 83129 - DNA, 524 bp, Homo Sapiens
ggcgattcccggagacattctgtgtgccagcgcggcggggagcgcggccctgactcgtgcattttccctccgagaaaggttggggtgccgagtccgttctgctaacggggctgggggcgtcacacggcgctgggggggtgtgcgatgtgggttgtgcgcgccggccccagagttttgcagccaccttcgtcagggcagtctttttgtttgtttactttataaaagtgctgcacttaccgtctcgattttcttcttgggtatcttccctttccgaatgtagttttctttttaaaagcggaaggagagttttacatggaagtggcttacagaaacttggcgctgaggtgcagggaagccagaaactctttgtgtctctaaggccgatgaggaatttggaaacacatgtgggacatacaagcgttggatatagaggtgtgtgtgtgtgaccttatcatggagaaacactgaaaatactatcaaatctttgtggtctgcaaactcagagcttcaaagcttgagatagg

SEQ ID NO: 83130 - DNA, 510 bp, Homo Sapiens
  misc_feature (69)..(234): n is a, c, g, or t
caaaaggcacttcttacaaggcagcagcaagagaaaatgaggaagaagccaaagcagaaccccctgagnnnnnnnnnnnnnnnnnnnnnnnnnnnnnnnnnnnnnnnnnnnnnnnnnnnnnnnnnnnnnnnnnnnnnnnnnnnnnnnnnnnnnnnnnnnnnnnnnnnnnnnnnnnnnnnnnnnnnnnnnnnnnnnnnnnnnnnnnnnnnnnnnnnnnnnnnnnnnnnnnnnnnngaaagggatgaagtgacagcatatcctgatgtgtgtgatggtttcatgagttattatctatttcaaaatttattgcaatgtgtggaaaagaacaaggacttgtactatctgactttaaggtttactataagctattagacacaaggcatcaggagtgacaaacggataaacagcctgagttagaagacctgaaattgatccacagctatacggtcaataaatgggttttcaataaaagcagttcaataaaagaaaataagtcatttacaaaaaaaa

SEQ ID NO: 83131 - DNA, 737 bp, Homo Sapiens
cttacaactaaaaactcttctaccatttccactctatttactctgctgtagcagggagacctatttgctgtcccttaaacaaagcagatgtctcttctcctctggtctttgcatttgctggtcctattactgggagtgttctttttcccatcctcttgatgacttccctcatctccttcaagtcctcgatggaatgctcttacacagtgaggacttccctggcaaccatatttaaaacagaatcttcagtcccatgtccagcactctttatgcaccgtccctgttttataatagtttgagaaaatgagtaagtgttttggggacacagcacttactatcatctgacatcatgaggcataaaactgtatttcttacttattttatgtatttgtttgccttccatcataactaagcatttagtagagattgtctattttattcacaatggtattcctaattccttaaaagtgtttggtataaaacaaacatactttgagcatttgttgaataaaggaattatatgtaaaattatggtcaggcattattcgaggggaaaactcttagtgtctaaacaaatttatttggatacctggtaaattatactataactaatttgggaaataaatttgttcctcttatgtcaattgagggaagctttggcaagagcattctgcttcatctccaagtctttttcttcaaagcctattggtatttttttcaaatctgacaaccctatg

SEQ ID NO: 83132 - DNA, 547 bp, Homo Sapiens
  misc_feature (47)..(47): n is a, c, g, or t
  misc_feature (98)..(194): n is a, c, g, or t
acaaactcgacaagtataatctatcaccaactgggtgcaaaggtganaattaggccataaagatacatttaaggaggccaggtgcagtggctcacacnnnnnnnnnnnnnnnnnnnnnnnnnnnnnnnnnnnnnnnnnnnnnnnnnnnnnnnnnnnnnnnnnnnnnnnnnnnnnnnnnnnnnnnnnnnnnnnnngtccaactgcttgtaggttatagcgagatgatgtccttatttgctactgaagctccatagagaagtgtctccgtgagccagcaaagtcccaggagcaggtcacagaagctcagataaaaaagtggtcttatctctggagatttctgtatattatggaatacagcataggcaataagtgaacttgaacctataacactcagagtagccatgacaaattgtatccactgtattgcaggaagaaccgagggttggagcgggtcccaaccaactgcctgacggcccaaaggcaggaagaaacgatggtaggccttgtcatcttcgaaggagaggaaggacagcaaacgaattgctac

SEQ ID NO: 83133 - DNA, 808 bp, Homo Sapiens
  misc_feature (34)..(34): n is a, c, g, or t
  misc_feature (483)..(485): n is a, c, g, or t
cccagcgtgagcggccaggcctggaaccctaagntgggtatctacttccccatcccaggaatggagggggactccagcgaaattacaggaattcgtggtcacgggaccggcctccgccaatcgctcgtctgggcctggtggaaaacagagagcattatttggtttaattgattcaaaaacaccagaggaccacgaccaggacaccatgagcccccattcctacaccagtgcctcacatgctctctccccaatgcctccgtttctccagaaaagctagaggaaccttttcctcatccccttcgaaggaaaagatgagtgaggatctccgcgttggaggaagagggagtcgaaagaggcttccactctttgaaaaagacccaatggtggttgggcttcgggtcacgtgacaccttctttgtggctccggaagaggattgtgaagtttaggtttcgtggaagaaaccgataattgaggaaaaaaannntcaagatttggggggaattacctacaaagatgtaaggtgtgttaatttgggcgcttcttggattctaccctgaggaggaggcgcgtggtgagaggagagatcttgatctgccgctcgctgaggttcagcaggttggccatctctacaacgcgaggccggcacaggtagcggttaaaatggaactccttctccagctccaccagctgcgcgctcgtgtacgccgtccgcgcccgcttggacgccgccgccaccacagccctctgctggatcccagggggaggggtgggaaggggagaaaatgaaataaaagataattactgaac

SEQ ID NO: 83134 - DNA, 661 bp, Homo Sapiens
  misc_feature (34)..(34): n is a, c, g, or t
  misc_feature (131)..(131): n is a, c, g, or t
aatttacattctatctttgagggagtgtctttcntagtgaatttacttttagttctttctgtgtgcctaatttagtattttgcttttattttgggttggttatgtgtatctgtaaataatttggttttttnccttacttatttcaaaatttctgaaagcaaaaataaatattttaaatgatgggttcaggatggctaattaaaagtcactgccacagccactaccatctaaaacactggtccaaaaggatttataaaattatctttgctttcaagagattaatgagaaatagaatggaattctcaaacattaaggcatgccaagggtttgtgggactctagctgactacgtattatggcctgttctcatgcacatttttaaactgatgggcaaattacattaagaaagactcaaggcttgattgatcattattcagactctctaaaaatcccctgtaattacagaattaatgtgtagagccttcctagctctctctatccctctatttcatttctctgcctaattttctaacttttctactggtgttgaaataaaactctctgcttatggcttttcagtcaagcttttaaacagtcttaaagggctttcaaattaatgtcttacaaattaaaacagctctattataaacaacaataacaac

SEQ ID NO: 83135 - DNA, 562 bp, Homo Sapiens
  misc_feature (552)..(552): n is a, c, g, or t
aattcaacctaaaattgtacaaaatagagatgaacaggtaggcctggtttgatctaggagggaacagcgcctgaaaatgtcctgtgtctggtagatggagggcatggtgcatgcaagtagccggggctcctaggacccagacctagggggctcgtgacggcctgggggcgcgcacgatgtgagcctgggggagcacctttctcgatgagctggcgccaacgcttggcccagtcggtgagctgctgcccgtacgccttctcgatcttggcgcgctcctgcacgcagttcatcaggtcgttgcatagacggtggccgtcatcgatgcgcttcacggtccgcttgtagttccccacctcccagaagctgtcggtggtctcctctggcgccagtgaggcctcatcgtaggagctggacatggtgtagccgcagggggatggacaagtgcggagctgcggttagcaggctcggctgctcatgcacaatctgagaacaggatcgctgtgcctttgggccccaacctgttgactcatcctcacctccaaccactccccncgtgccgaat

SEQ ID NO: 83136 - DNA, 434 bp, Homo Sapiens
gccgcaagttgttcaccatgtggatcctctcatcgtcctccgagatgagaaaagcaaagctcaagagaggatgagtgatgggctcgaagatgcacagtgagtgactgaacaaagatgaaaacccagggctgctgggtccctcgttcaatattgtccaaaatcactggaaagggaggaagcggattttaaatttgactctcatttgtgtgtgtatgcaagtcctctctaaaaggacttaggagaagctagggagagtgtttacctacagggaggagactggacaccggaaggttgtggaaggttgtggaagggtgtggtatggcgtgggaaggacactctttactggtactcctttgtatctcttgaatgaattaaggcatgtattacctctttaacaaccaaataaaagttgatccagttctttccttcctgca

SEQ ID NO: 83137 - DNA, 546 bp, Homo Sapiens
gtaaaggatcaaatcagtataattgggatacttattgccttaaacaggtatcttttctttttctggaggcagccaaatgattcttatctgggtatttgaaaatatcaactagatttttgtgaactatagtcactctactagattgatcaaagcctaggtctcatttcttctgtctgtttgtacccattgatcaacttctctccatcctcttctttgctttgctgaattattgtttccacactggaattcctcagcatgcttcctgaatgccttctgctgtagcgaatctcctgcagggtccacacgttagtggctctgtacgctacttttactttaggtttctgattgtttatgttgtaaaggaaatatttccatttatgattttaaaaatattgtttgtgaaagaacaattcttttcacagtttttaatgaaaggtttatgcctataagtaatgtctatggaggaagagacctcagggaattgacttcaggaaatcatgaatttgctctttattatgttgtgtaataaaacacttttatattcaa

SEQ ID NO: 83138 - DNA, 546 bp, Homo Sapiens
  misc_feature (64)..(134): n is a, c, g, or t
ggagaaggtttatctaatgactgacatctgacgcataaggtgcaggcacacttactcagggtgnnnnnnnnnnnnnnnnnnnnnnnnnnnnnnnnnnnnnnnnnnnnnnnnnnnnnnnnnnnnnnnnnnnnnnngctgtcctcatctgtcttattttctggtcttaaatctaaagccaagaggcatttagcagcacaaatcctcttcagcagtcaacactcccaaagtttcaggcactgaggaaaataaaaacaaaactgtggccctttcccaagaagcgcacagtgtccacaagaatgtgaaagccatctggaaactgataaactgcaaaaagctcagccatcttctgttggcaaaataaaagaatggatgtccttggaagaacgatgtccttggaaagtcatcaaataaaaatgtgagagaaacacagccattagaagctaaacagcttgggacacccttgtttacacagcacgatcactgtaatattttgaagtaaattgttgtttttaaaatccaataaaatctactttccattcaccttga

SEQ ID NO: 83139 - DNA, 709 bp, Homo Sapiens
gaactgacataagctgacactctgctgtatatcttggcacaatattgctttcatctctggagtcgggtgtcttacaaatttaacagtgtcagttgggaccgtccaaagatatttacagtaatgctgaggtcaagcaatggcagtggaactgtacaggatgtgggggctgggccaaagccgtgggactccggatttattttgtgagttggagaattgtctagtcatcagaccaacagaggagcaaacctctaacagcatctccctgcttcttcccaccctctcaacaggaggcattggagaaggtttatctaatgactgacatctgacgcataaggtgcaggcacacttactcagggtgcgaatatttactgagtgtctctgtggggccatacactactctaggcactggacatacaccagtaaagagaagctgtcctcatctgtcttattttctggtcttaaatctaaagccaagaggcatttagcagcacaaatcctcttcagcagtcaacactcccaaagtttcaggcactgaggaaaataaaaacaaaactgtggccctttcccaagaagcgcacagtgtccacaagaatgtgaaagccatctggaaactgataaactgcaaaaagctcagccatcttctgttggcaaaataaaagaatggatgtccttggaagaacgatgtccttggaaagtcatcaaataaaaa

SEQ ID NO: 83140 - DNA, 1045 bp, Homo Sapiens
  misc_feature (351)..(390): n is a, c, g, or t
  misc_feature (393)..(472): n is a, c, g, or t
aattcgcacgagggcccaaagtgggatgcttgctttgctcacattgattgcgtctcccagtgcctccccgcgcctcatctctgtcgtcatcctttttctactgcaggctcatcagagaacacaagtagctcacagcaccctggagagggaaggaggtttgtgcagctaaaatatctgactcctaaaatggagtttcctgaaattattccttactcatagtgtaatgaggtgtatgtgttggatctattataactttctttcgctccgtctctcagaatagatgatcatcctcatctttgcatcatattccaattagaaagggatgatacaacaagaaagctctcgtaagannnnnnnnnnnnnnnnnnnnnnnnnnnnnnnnnnnnnnnnttnnnnnnnnnnnnnnnnnnnnnnnnnnnnnnnnnnnnnnnnnnnnnnnnnnnnnnnnnnnnnnnnnnnnnnnnnnnnnnnnaatatggcagatataacagcacgtaatttccaaggcaaggtcataaaagacattgtagcttctgccttgtcccttcctcttggatctcttgctatggagtagcagccccatgaagacacccgtggtggaagatcactgaggactcctgccaacagccacccagtgactgaggcctcttgcagaaatccatatgagtgggccagctgacaagaaaatcttccagctctagtcaagccttcagaacaccagctcttagtgccaggaactgccaggtaagaattctgacttacactgaggccaccatgctctgaggaagtcaagccagatggaaagatcacagcaggagaactggtcagcagtcatactcttgaactcatcccaacccagactccagacatgtgaattgacaagtcttcagatgattccagcacaaagccattgagtcacctccagccattgagtgtccccagccgagacaccagtcaccatcaagcagagccagtatgcctgttatgcctgtccaaattcttgacccactaaattctatgaaattaataaatggttgtttaagtt

SEQ ID NO: 83141 - DNA, 1058 bp, Homo Sapiens
gtctaaataaggaagctcgaaaatgggccacacgtgtggcacgtgagcataaaaacattgttcaccaacaacgggttctaaatgatctggagtgtcatggagctgctgtatcagaacaaagccgagcagagctagaacagaaaatagatgaagctagagaaaatattcgtaaagcagagataattaaattgaaagctgaagcccggttggacctgctaaagcagattggtgtttctgtggacacatggctaaagagtgccatgaaccaagtaatggaagaactggaaaatgagcgatgggcccgccctcctgcagtgaccaagtaatggcactttacactcgcttaatgcagataccgaaagagaagaaggcgaagagtttgaagataacatggatgttttcgatgacagcagttccagcccttctggcaccttaagaaattatccactcacctgcaaagttgtttattcctacaaggcttctcaaccagatgagttgaccattgaggaacatgaggtgttagaagtgattgaagatggagatatggaagactgggtaaaggctcgaaataaagttggccaagtgggttatgtgccagaaaagtacctacagtttcccacctcgaacagcctcctgagcatgctgcagtccctggccgctttggacagtcggtcacacacgtccagcaattccacggaagcagaactcgtttcaggcagcctcaacggagatgccagtgtatgttttgtgaaagcactttatgattatgagggccagacagatgatgagttatcttttcctgagggagcaataatccgtatcttgaacaaagaaaaccaagatgatgatggcttctgggaaggggaattcaatgggcgtattggagttttcccatcggtgctagtggaagaactttcagcctcagaaaatggtgacactccatggatgagagagattcagatctctccttcccccaagccacacgcctccctgcctccactgccgttgtacgaccagcctcccagcacccccatctgttaataaatatctcaactcca

SEQ ID NO: 83142 - DNA, 717 bp, Homo Sapiens
  misc_feature (260)..(269): n is a, c, g, or t
atctgattaattctcaatcagatgagcaaaagccacttgaagaaagatgagaatctttgccacatccttgtggtcacagtaatatactgtacgaatgcacatgatcagtaatttagggactgtgccctggaatgaggcctgttcttgagtctcatataaaaacagaccactgttaggcatgagggctgcccccctctttgctcctagggtccgctaggatttgtgctatggtaggagaaatgacatagaaaatgacaacnnnnnnnnnnggcacgaaatattcaaaacgtgggaggagtctaccaggccacccagtcacacataatcctccttgttttttgctctgttcaagagtcatcatcatgcaaaggtgcctaaaaaacaagactggccaaactccaagcctggccttgattgtagcagtaatggatgggcaagcccatcatcacaccagtgtgatttccacatcttcaatcttctctgctggccttcggtgattctgtgtaggtggagggggagctgcccggacaggtcgcagtttgccatatgaggtctcaggagtatgccttgatgcctgtgagaatcctggtgactcagcatgaaggcttttttcgtttgctgaaggagaccggggaaagtacagggagctcctcttatctgggctggggtaggggctgctgggaggctggtcgtacaacggcagtggaggcagggagg

SEQ ID NO: 83143 - DNA, 414 bp, Homo Sapiens
ggcacgaaatattcaaaacgtgggaggagtctaccaggccacccagtcacacataatcctccttgttttttgctctgttcaagagtcatcatcatgcaaaggtgcctaaaaaacaagactggccaaactccaagcctggccttgattgtagcagtaatggatgggcaagcccatcatcacaccagtgtgatttccacatcttcaatcttctctgctggccttcggtgattctgtgtaggtggagggggagctgcccggacctgagcaggaaacaattacgtagtttgtcagtcagttcctgactcagtatctgaagcatccccaaaacctaatcactcatctgtccaaggacatgggcaccctaagggtctcagaaatgttgtgagcacgtgctttcaacctagtcttcactat

SEQ ID NO: 83144 - DNA, 1171 bp, Homo Sapiens
aattcggcacgagggtgttggctgaggctccctcttgccggctcctgctcttgaaacacacccaagtgcaatgttcaatcatctacttgtttccaaagttatttgggtcagcattttcctccacccaccacttaaaactgatttgtttcatacatttgaaatgtatgaaaagccagaaatccaggacccaccctggcctgctccctttttctcacctactgtgttaaggataagtcaattgagcttcacttctctaattgaaatcaccgtgctgatggagtctgtctgtggaaatgaaaggtggctaccataatctgttgggagttgaattaatcctctgggagtgaggctgacctaattactcagaaatactgggcttgctttcattctgtggaatacagccatgagaaagaggccagcatgccatttcctaatcttttcttgaattgcctgaaactcacctaacatgaaactgagaagccttttcatttgaaagtggtatttcttatgttttttatctttttgcttgaaagtattcttaaactaaagaaaggagaaacagaaaaggtgaagaagccaagaggctggagtttccttttgaatggatattaatccatgaagctgttgattctgtttttctgttcctccagatgtctacacttttacctctgcttgcctgatacaaccaccaccagtcacctcacagaataactcactccttaagaatctgatcaggaatcagccttccctgatcacaaacactgagtttagaagtccctccacagtgtcccccgtaaccctgtgctacctcactgcctccatagtttagtgccgtttgtgtacatgcctatcttcggtccatggatccaggaacaacttgtaaaaatgactgtacttatcaccttcagtattcaatgactaaactataattttaacatatctggcagaatgaatcacttggggatttctgccaacactaccaatatattactcctaatttgtaattattacttagcatggattatagtaccggctgttggagagccaatgtggcagaccctaagtggaataaaatgtcagtagcagtctaggagcatatatttattggaatagatcattcattcattagttcattaaataatttgttcattaaataaacatttattaagca

SEQ ID NO: 83145 - DNA, 897 bp, Homo Sapiens
tttatatatatagatgatctttaatgatttggagggaaatgaaataatataacaattacacggtatttccattggcaaggccatcaaaagttgattcctcaagcacttctgctatccataaattctcacggttgatacttttctttgccctgcaatctgtattttattaaaagcttttgtttggggaattctttgctgctggctgaaagacctcatgaatgccctagagtgttgtaatagcacattaatgcaatattacattaatcaatagcaccacagacatatacaattttaaaaacaaaacaactgcaaaatccacatctgtgttgtatgggcaagtgtgatgctgacttggcaaaatgtcatattccaaattcagctatcctgaaacaaatccaatttgtgtactttacatcaacaacagaaaacactgactgagcaaaggtaatgtatttatggatccatcatttatcaccagaatatataatgtgaaaagaatgagacatgaagccaaagagaaacattcctttaaaatgaattagaagcttctaaagatacttatcaaaaggattcatacaggaaaaactgtataaattaacccaatcaaacagctctgtggatacaacaggagccaagccatggtcactgcagctttgaatacctgccagactgtcaccctcatacagctctgtttttcctccagaaggggattggaagagattatctggataatttgtagaaagcagatttcatgttttgctactccagccttagttcatggctggtgtgctccatcccttaaaagcacgaactgggaataaggcacatagatggacatattttccagggaagccaatttacctgccccactgccctggactacaccagagtttggtg

SEQ ID NO: 83146 - DNA, 628 bp, Homo Sapiens
taatttactgagcacccactaagcattgcaaattgctatctcattttatgcttcccaggaagaatgtgaagaattattctccccatgttagagatgagaaaactgagactaaaagactgacccaaagccacatagctagaaaatggacaagccaggattcaaagtcagatttgcctgacctcaaaattcatgtttctttttcactataattccttgaactaggtccttcacagctgggcctaggggacagttgggtgggaaagctcgatgtgaaccactttgacacccacagtgggactaggcactcccagagaaaggccagtccaggacctgggcccgttgtgtgctgtgtctgtgggtcctgccaccgattcatcctcctccctgaactttctaaaatcattcttgagacttttaaatgttttattgaggtgcaagtttacaatgacagcaaacctttcaaaccacagcaagagtaacctgcctccttggcatattaaaaaataatgttagtgtcggtttttacatcccatagtttggattgctgataagagtgcttccttgacaagattatttttgaggtttacagaaagcgtaataaaatatgtaagttacatttccacaaaca

SEQ ID NO: 83147 - DNA, 1042 bp, Homo Sapiens
gtatgagcaaagggctttcaggaaggaagaacaaatgcagggagacaagatgaagaaaccaaggcacagactcatgtccaggaccctaaaaccagtgcatggtggagccagcattcaaacccagcacacgggacgccagagtccatgctcctaaccactacattgtgatgccttgaaactcatggcagagaagagtttgagagaaaggtttcagaaagacaaaagtagaaatcctgaaagactctgagcataaagttaatgctgcagcaatagatttagaaaaatgatgcatgatgatctaagtggaaggtgtgacatacccccaaagaaatgctgaattccccaggtagggtggggatccaaacaaagggagacttgtgcctcatttccttagtggaaccgaaggagcaacaagcctccccttgctctctctctatacctccaccagtcacaggcagagaaagtaaaggtggggcctgctgagcacgtcagagcagaatgggcatggcatagctccgtcaagtctcccagagctccagagcagcacaaaaaggcatccaaatatttcctgtgcttccctgtcctctcacctcaagagggatgcaaaagacaaggctggagtgacctcaagcagtctagcagtcttgcaagttgtatgaactggaaacacaagtccagaggagaacaaggccatcttgaggataccagcaaggatagatcactatgcccggaagccaataggagccatcataaataaacaagaatttctgaggacaaaggtccccctcttgatagacatcaaagtatgatgacttaaggccccagaacttagaggcaactcagggagaaaatggtgggggaaaaaaaactccggaacagacttaataaataattgaccaaaggtagcctgagttgaatatgattgaaattaagttcagttacagaataatgttatatttgttttttgcacagaggattttgcagcctgagacttttacctgcttggctataaagaaataaaacttgtttaccttagcaaaaa

SEQ ID NO: 83148 - DNA, 527 bp, Homo Sapiens
cctgaggactcctggatgaatactgttatgtgcctgtttctcaattacccctggcctgagtgaggaacttttggaactctttggctcccagactgtggtgggcactaccggtcagctgcccagcagccagccctagtcccacttctgcctcatttgttacaggttggaagtgccaggttcagggatgggcctgtgacccaagttttagctgaaaggaaacctactagggacttctaggagagattttcttgcttgtaaagggaaggctacacaaggagaaaagccctttctaaccacatccccttatttcatgcttgggatgctgaccatgtgaagacttggttgttggagctgtggtggcctccctgccatgatgaggggagaaggcactgccacactgagcgtggcagtgggtacaggaagagtccagtctccgggatgccttggttaattgacaggacaaaccctggaactgccaacttccatcttgttctgtaataataaatctctaatatttgtaccactaa

SEQ ID NO: 83149 - DNA, 1142 bp, Homo Sapiens
aattcggaacgaggtgaaaatgtatatgaaattcaaattttgttgtccataaatacattttattgaaacacagccacacatcactaacatattgtttatgactgtgtttgtgctacaatggcaacagaaactgtacagcctgcaaagctgaaaatattcacaatgtggctatttagaaaaaaagtttgctgaaccctgctccattatctacttttttgtccatattatttatacaataaccttactgaaaaacttgtccagagctgagaaatcagcatagatgtcttcccagaaaagctctctctggaaacctctcccagtgacatccattgtatcatccagctttacttattttgcaatttagttatcaattttcctctctacttgtttattgcctaccttcttttatattatgtgatcctgagggtaggagataagttagctattgcattttcttttcctttacccttgataaatggtgagcttcacaaatcatttgctgaataaatgaatcaaggaagtgatgaagtaacaacattctaactgacggctttgtttctctgctaggctttcctggggtttgatgtatgctggcttcatccttatcatggccactttaatggctcttattgtaaaatctgcacaaattgtcgtcctgactggttttgtgatggtcttcaccctctttctcctctatggcctgtctttggtgagttggttaatttcatctaagtcttttattctctttctctctctctactgccaataatttatcactaattctggtctcacctcttttgttctctttggtagtatttgcatgaaacagtgtctaggggtggaaaaatataaaatatacttttataatataaaattccttttttgtgctactgttctcacagaattatataccagctgaagtctttctcttttctcagataactttagctttcctgatgagtgtgttgataaagaaacctttccttacgggcttggttgtgtttctccttattgtcttttgggggatcctgggattcccagcattgtatacacatcttcctgcatttttggaatggactttgtgtcttcttagcccctctgccctcccttcgattgtactttatcattaaaaatcaacttcc

SEQ ID NO: 83150 - DNA, 715 bp, Homo Sapiens
cttcctagcaaggaaggaaactcccagagactctgaatagggtggtcaggatggaagttcgactgcagggacagagggtgatgatggctgaagctgcaagacacactcatcttagatgaggaagggagatggcagcgtggctggggaaaacaagcatgacacctagttttccaaacgagggaggggaagcaaccagtagaaatgaagcagtgggacattctagagggaaagcaagaacaagatctcccagggattgggaagaaacagaatgaaggttcaaagcattgccctcagagagaagatgggcccctccctgtctgagagacacaatgccaggcacagcagggtgtgtggggctggccagactggtcacccctgctcagaatgtgacagttgttccagtctttccaatggattgtggtcacctatcctggagtgtccataaattagatcagacttttcagtcttgaagaggggcagagagaagcgagaaagtgattgcttggttttcccactccagttaagacacaagtcgccctctcttagattccagaattgtggaaagccaaatcttctaaaaaggtctggtgagctttagagtgaggaacggggaagctatttcggaagaactagtctctgcatgactgatgggcaggacgtttcctcgtcaattttctggggcaagaccgatttggatttgctttgattccaccac

SEQ ID NO: 83151 - DNA, 355 bp, Homo Sapiens
aaggtgtgagtcaccacgcccggcctcaatgagatattttatactcctttttcataataggtctgaaattggtgtgtattttacatttacaacacatagcagtttggaatatccacgtttcaggtgcttgtatggctaaatggatactgtattggacagtgcctgtctgtatctgtaaatgtcatagacagctgatgatttgggaaaagcctagcttgtaatgatgaggctgggttttgttactagcttccttcatcagttgggaaaatcctgtaacatttgaatttggggattatctgtcctatctcatgggttaagaagctccggttgaataaatcactttaccttaaaaaaa

SEQ ID NO: 83152 - DNA, 746 bp, Homo Sapiens
cacagggctggaggcaacacagggctgaacccctgtcagcctgccgggggacgcggtgcccgccctccggcatccgggaaacacagcgtcccagccggcgcctgcgcaggtgccacacttcctggtcctctctggctgcgtctgagggccttagctctggccaggggcgctgcaacgggctcagccttctaggggtggcgggtgaaggcctacacctgccccaggacggccaggtccaccagcacctgcaacagacggagaactgaaggagcatcttgaagctgtggcgggtgaaggcctacacctgccccaggacggccaggtccaccagcacctgcaacagacggagaactgaaggagcatcttgaagctgtggctgtcttgaaggtgtcgccgcttgtcctcacgagcaccattttgattctcgtgccctgtgtgcatgggtggccagcgttgctggtagggctcctgcacgctcagagtggccttggccaggaagtccagggtttccgcaggcagagtgtatgaacaaggtactgagaagatcacatactgcatgtcctcctaaaacctggtcctggcataaccttctaagctgttttattcaggtttgtccaaattccatgtgttttggaattttgaacatgatagaaatggtgcatttgccaaaggatacttcctttaaaaagcaagacaaatgagaaacaaatatgccaacatctatagagccatgaactctgtcagca

SEQ ID NO: 83153 - DNA, 505 bp, Homo Sapiens
cgggctgcgggctgctggggtctggtgcggagggccaacttctgggaataacctggctgtgggcttaaaaatcgtagtcattcattatcacgggcttctctctctcgaatacctttaacatttatcgccttgttagtctccacatccacctccgtgaaagagatggagtctcgctatatttcccagtctggcctcaaactcctgatcttaagggatccccagctcaacctctcccagcagctgggactaccgggctgtcaaatttacattaactatgagaattaagcagaatccgaaaagtcatctgagttggctatctgcacgttctctctgtaccagtgaacttgaactgtggctgtggcctggattccgcattcaaacatgaccaactgacctctggttgtagggatgtcttgaagatgctgaagaacaaacacagagttcagaggatggaagaaactgttataccatctacaatgatttgaaatgccatttgcaactgcag

SEQ ID NO: 83154 - DNA, 676 bp, Homo Sapiens
  misc_feature (263)..(306): n is a, c, g, or t
  misc_feature (444)..(469): n is a, c, g, or t
cctaccatggctccccacaggctgggagagggaatgttccagcaccagacctccgtggcccaccagcctgtggtcaggcagtgtgggcctcagactggcctgcagtcccctggcaccctcaagccacctgagttcctctactctcatggcgtgccaaggactctatcccctcatcagtaccactctgtgcacggagttggcatggtgccagagtggagcgacaatagctaaagtgaggcctgcttcacaacagacatttcctnnnnnnnnnnnnnnnnnnnnnnnnnnnnnnnnnnnnnnnnnnnncagtagccaagagaaccccacagacaagatttttcatttcacccaatgttcacatctgcactcaaggtcgctggatgctgatctaatcagtagcttgaaaccacaattttaaaaatgtgactttcttgttttgtctcnnnnnnnnnnnnnnnnnnnnnnnnnngatgagtcccaccccccactaccaccacacccatcaaccagccacattcacgctactccccagatctcttcccccattccttcttttgggctctagaaagtcttgcctcattgagtgtttttactagtgcgtagttggagtctgtccctgtcttggtgttaatgttgacattgttatataataaatgataatatatttttttctttc

SEQ ID NO: 83155 - DNA, 685 bp, Homo Sapiens
cccctgtctgcgttctggtctgcagacccctcagtcagcgctgatggggacacgacgtcagtactgagcacccagagccaccgctcccacctgtctcaggctgcaagcaacatagcggggtgttcaacctccaaccccaccacacccctgcctaacctgccagtggggcctggagacaccatttccattgccagtatccagaactggattgccaatgtagtcagtgagacccttgctcagaagcaaaatgaaatgctgctgttgtcccgctcaccgtctgttgcaagcatgaaggcagtaccagcggctagctgcctgggggatgaccaagtctccatgcttagtggacacagcagctcctccttgggtggctgcctgttgcctcagagccaggcaagacccagctctgacatgcagtctgtgctgtcctgcaacaccacactgagctcacccgcggaaagttgcagaagcaaagtgagggggaccagcaagcccatcttcagcctctttgctgacaatgtggacctaaaggaacttggccggaaggagaaggagatgcagatggagcttagggagaagatgtctgagtaccaaatggaaaagctggcctcagacaacaaacgcagctccctcttcaagaagaagaaggtcaaggaagatgaggatgatggtgtgggtgatgggg

SEQ ID NO: 83156 - DNA, 688 bp, Homo Sapiens
agggctatgtcatctgctagctcacttgtgaaggcagatggctatgggaagactgaagcatgggcctaggatttcaccagcaagtagtaatgggagacccttttttgggatttcccaggtcaggtggagattacacttagacaacaaataggaaatccttcagtgaggataaggtgaaggagatgaccttcctgtggaaggggaggtgggtcccagctgactggtaatgttaataatatcagcgtggtgaatatgtggggagtataattgtgttgtagaacagatggggaatgtagaaaagtgtaaagatgaaaaattaaaatcacataatatagcactgaaaagcactgcatgactgtcattttgaactagaaacgaacacagaaacatgaaaatgattggtttgttaaggcagtgggaaaggtaatttttttcctttcttttgacatctggtttgcaatggtttcttttagttcttttaatggaaacatataggtgaaagacagctataaaatattgctaaattttagaaatgtagaatgccattttgtttgttgcttttaaaattggttatcctcacttaaagcatattgtgaacttttccctaatgcataaacatttgtccaaaatatgatttaaatggctcctttgcattacatcacgtgaataaatcataattgatttaaaa

SEQ ID NO: 83157 - DNA, 774 bp, Homo Sapiens
gcaaaaaaacgacatgggaccctgttatccctgctgttcttatggattactgggaaagtgagccactgcgaacgacaggtacaagatcttcgacgcgcccggagtcaccaaccgagtctgccgcgacctagccgcggtcgtcatggcaacctggcccccccgccaggcctgccaggaaagccggcggacacgtaagccacgcccactctgggcccaacgcagtctctccgcggaggctctgaacccagccagggagaggcaggagggagtcccgccccttgccctccatatcggaccataggaacccactcattggctgcagtgtttgtcagcgtctggaggcttcgaacccaccaagcaaagacccagtgcatctgtgcgttgcacagtcgcatctgtgaatccctgcatccctcctgccctgcctgccaagactgatgtgcagcttttctaccatcacataccggtataatgtgtgcaaggtggggggtgtctccaggttttgagggatctgcaagcgttctctttaaggcaaagaatatgaaattacaaattcaaaattagatatgaaagtcaagtgagacacatacaaaacagttacagacattgtagatattaatccaactgtatcaataaccactttaaatgtgaataatctgattacaccaattaaaaaagagattgtcagaatggatttcaaaaacaaacaaagcccaatcgtgtgttatccacaagaaaatacattaaaagcaaaaggatagagaaagctaaaaa

SEQ ID NO: 83158 - DNA, 630 bp, Homo Sapiens
  misc_feature (615)..(615): n is a, c, g, or t
gcacgagggaatgcctgggtttgcgtacccctactcatctgatttcttcatctggtccacagaccttaggagtgctttagtgtatgtggtaggcctgggaattcagggattagagaatcagtctctttctctgaagagttccaagtattgggcgttagataagcaaacaattaaaatccagtgtgcttagtgaatggtagaggatactattggatactaggagaacactgaggaggggcttccaagtcctcttggagtggtcacagaataatttctgcaggaagcaacattgggtagaaatttaaaaacaacaataacacttattgtaactttttaatctgtacaaagattccattcttagaaggcttggaaaatatatcaatgtataaaaaatgatttataaatacatgagccaaagataaacattttcatatttctagtctttttatgcatatgtaacaaatatttgcataattgtgatcatactgattataaaattaagtacagtcattcactgcataacagtgtttgagccaacgatggatcatgtattcagcagtggttccataagattataatagagctaaaaaaattccagttgcctagtgaccttgnagctgtctagcgcaa

SEQ ID NO: 83159 - DNA, 223 bp, Homo Sapiens
acagcaaatgctggaaataagcaatttctactaagaaggcagattattgtgtaattaagccatagctataattcatctagacatctgatgttatgtcctattaactacttacatacatgaaagaactctgtttcctgatattatcttgaaagattatgtaagcattatcaaatattgttcaaatatttgaacagttttacagattagctttactaaattaaga

SEQ ID NO: 83160 - DNA, 697 bp, Homo Sapiens
  misc_feature (41)..(41): n is a, c, g, or t
  misc_feature (350)..(368): n is a, c, g, or t
  misc_feature (604)..(604): n is a, c, g, or t
agggactctattgtacatgaaatcttaatttgttccagaanaatcatgtctcagattttaagaatataaagtaaagaaacataggttttgggcatactatcccaaacctgattataacttgttcatgtgaatggaaactatcaattagttatttttttagtgaaaaggaaaatgtacaagaattagtttgtaactgcaaagacaaagcttatttcatatttagccattatgaatttcccattactgttaatgttcagttctttttatattatgtacttaaatgttttctttttgacttagaagattatagtcaattgagataactcatcaaacatttatattaagttacnnnnnnnnnnnnnnnnnnncacacatgtattttggatttaagtaatacataatctatatatgcaaaaagaaaaccccaagaaatcctaaatgaaagatgatggctgactttatgatgtatgtgagaagtaaccttagatttaatgttgagctgataccattttgtaaatgttactgaatagtctggctcaaagaagaataacaggttttaagcacaaggctttctgttgatacaaggaatccaattatttatttntttattttgtcaatggacttatatatgacttacacaaattatatgggaatcaaggtaaatgatgggtatgccttaggttcatatttaatgagg

SEQ ID NO: 83161 - DNA, 822 bp, Homo Sapiens
gggcatttctgtatatcattttagaaccaaattataagatttttataaaaaaggttgttgaggtgttgatataaggttcattgactactgtgaaaaactgatgtaattttgttgaggagtgaagaatatgactaatcacacgtattagatacactgtcagggcaaccataggatgcacagattaaaaaatatataaagaacagaccatcagagtaagcctgataaaagaattatgcaaaacaagacatcagagtaagctcaatgtaactattggatgaaaaactagggtatctgccatttacccaaccagagggggaagcttagttccacacaactgtagcttcagttccatataaatagagctaaaaatccactagttttatagccatgtgctagctacccaaatgctacatagtatttttatttctgttattcaacaataaaattagcagatccattttatgaatgggtttgctcttttggatttctcttttcccaccccaacaatatataaatcacctgggatgtggggggagtgatatctttaacattgagttcccacatccctgtccagtgaatggcatctttaattctcagttcccacatccctgtccagtgtgccctctactctacagtttttctcaactagaggagccccatgttttcacaacagacagtttagccaagcaggaaggggatcaagtggataggaaatcaagcaggaaatatgtgcagatgctgtgtttatcacacaggtattctcatccttgccaagtatgctctcctgcaggtcacttccagcaagggtgctcatctaaaaat

SEQ ID NO: 83162 - DNA, 258 bp, Homo Sapiens
aataagacttagttaaggatagttaactattatactccaacaattcatgagcaacagtatatacactgagtaaaaatataaaatagtaaaatttcactaaatttagagaaatgcacatggtaataaaaagtataaattataaatgcaattaactaagaacagctctgaatgtatttgcatgggattggtccttgaataaaattgtcttacttcattaatacttcacaatactatttgcataagacaaaataccacagc

SEQ ID NO: 83163 - DNA, 713 bp, Homo Sapiens
attgatataatactgacaagtgtggaacatcccaggaatcttgtcatggatcattgctgggatagcttcatctatgagagttctgccttcagatttagttctccgagtgaaatacaaggaattgcactgcctcctaaaggaaatatagatatctcattgttatttatacctcaaattatgaaattacacaaaacaatggttattattgagatgacgaaagcaaatggaaaatattggcctattgacaattttgatgagttggatataaaatttaaaagtattgtgggaatcgacagcgaagaaatccaagcaatacactggatataccctattgttggactcccacaagcaccacctcctaaatctcccccagttgtcatacaatgtcagtccaggaagcgggcagaagagaaggtagaaatcatactgaatgctggttttttcggatttagtcttactccagatctgacagaagttttagtgattccaaaaagaaattcacataattggtgtgaggatcccaatgaaattcctaaaatacatgaattcgagtatgaaattcaatttgaatctgaagctatgaagtctaagttggaatcctgtgtagctttatatatgattgaaaaatcttatgatattatggctaaaaggataacatttatcttcaatctggtattcacaccaaagaaaccattaaggtctcacataacact

SEQ ID NO: 83164 - DNA, 494 bp, Homo Sapiens
  misc_feature (292)..(292): n is a, c, g, or t
gtcgactcccacatagctctagtagtgaaaacataaagagtctcagccacagccccggtgtggtgaaggagcgtgctaaagaaatcgagtctcgagtggttttccaggcagggctcaccaaaccatcccaaatgaggcgctcagcttctctcgccaaattaggttacttggacctctgtaaagactgcttaccagagagggagcctgcctcctgtgaatcccctcatctcaaactgcttcagcctttcctcagaacagactcaggcatgcacgcgatggaggaccaagagtnccctagaaaacccaggtgtaatatgtaaggaacatgcactttattggttaattttataatattttggtcattttactgtttctggtgcatgcagggtttgggtgtttttcagtgtgtatgtgtgtgtatatgtaaggggaaagagagattgatctggatggcaagaccgtttatcattttttatttaaaaaaatcaaacctc

SEQ ID NO: 83165 - DNA, 619 bp, Homo Sapiens
  misc_feature (584)..(584): n is a, c, g, or t
  misc_feature (589)..(589): n is a, c, g, or t
  misc_feature (599)..(599): n is a, c, g, or t
cctgaagttattcaacagtcagcttatgactcaaaagctgacatttggtcattgggaattactgctattgaactagccaagggagagccacctaactccgatatgcatccaatgagagttctgtttcttattcccaaaaacaatcctccaactcttgttggagactttactaagtcttttaaggagtttattgatgcttgcctgaacaaagatccatcatttcgtcctacagcaaaagaacttctgaaacacaaattcattgtaaaaaattcaaagaagacttcttatctgactgaactgatagatcgttttaagagatggaaggcagaaggacacagtgatgatgaatctgattccgagggctctgattcggaatctaccagcagggaaaacaatactcatcctgaatggagctttaccaccgtacgaaagaagcctgatccaaagaaagtacagaatggggcagagcaagatcttgtgcaaaccctgagttgtttgtctatgataatcacacctgcatttgctgaacttaaacagcaggacgagaataacgctagcaggaatcaggcgattgaagaactcgngaaangtattgctgnggctgaagccgcctgtcccc

SEQ ID NO: 83166 - DNA, 518 bp, Homo Sapiens
caatgagatggggtgaggttacaggcatcagcccattctaggctttgctcttcaacacatactgtcctcctgagccaggacgcagaccatggctacttttgcccctgcatgtctgttctgatttctttcttcatatgggatgtctcactattcttctgctttgaatatggagcttcagtctctaagctaaaaggcccaagtacagattcacctgccaatgaagctctttaaattctctcttctttctcaggactcattggctgtaagtccatggagcaaaaacagaatttgctacttttcaatgacattgttttagttgagttgtgtttaactaacttgttgaatgaacggacactgtacgattctccctgtaaaataacagtgtgttttctattatgcctatgtaagtctgttgcctcaaattgacgttatgttgttaacttatctaccagacagtttatttaggttgtattcaagttggtcttttgtgacataaataaaatcaaggatgtgattat

SEQ ID NO: 83167 - DNA, 647 bp, Homo Sapiens
tgttttggcaaataatttattttacaaaattcagcaaaatagttattttatgtcaaatagtttcccaaggaaataaccttacaaaaagtagaaagaacaaatggtttacaaattgtcaaattaagctgtagctctacagggaaatggctgctttctcaagctttccaaataaagtatgataaagcctagctgatattaagagagtgagaggaaaggaaccacacagcgtttacaatgggttaattcttgagacagagtcaaattttcctggcacaactgccactagcaacaggaagaacaaaattatcatagtacaatgcttcaaaggaacatttaaagttagctcagtgagaaactgagtagagagcaattagtacgtttcaattccaaaccgggaacaaatacaatgcaatttgatggtaattagttatatttaatagaatactagagttttaagaaccatccaggtcatatagcccgatttttctcattttataatcaaggaaattcaaccaaaagatagcagaagatttgctggttagtggtaaaactggcctaaggtctcttgtttgttttaaatagttccttggtgtctaacattgaacagtgacttgtatacaaacaagggctaatcaagaaaaaattgc

SEQ ID NO: 83168 - DNA, 576 bp, Homo Sapiens
cctgacataccatgatatagtaaacttgaacttcatgaatgaaagcctctgcaaccatttaacaatctgaaaatccacacaaaatttaagaccaccatattactaaagacaatctactcaacaatctaattacagaaagattactttaaagggctttaaaactaaaaagaatgaatttattagcagtaagagattagagcatgcccaagtcctctgtctgatgagaggggagagttctgaggagatcagctcctattcaggatgttgaagaaactgaacaggtatgtttgaagttggaaaggaaacattagtagagttgttcaattctcagaacaattgaaatataagtcagcttgccccatcactctgtttactgaggaccattagtgagttacctttacttcaaaaacggaaagaagaccaagctgtggaatgaccaacctagcaagcctatctatagttaaaaataaatttaaaatagaagcacaccatcacatacaaagataagaatactccgtattcatacaattacagatacactaattcatacaccaccccccaacagataaacttaga

SEQ ID NO: 83169 - DNA, 327 bp, Homo Sapiens
tttgagattgactctgtttattaggctgatgaactatgctgttcaggcagagaagaaacttaggggacttgttgcaagaatgttttagcattttctcattcagctctggtttactggacagacatattcaggatagtttactaattcttttagggcataaacacttattcattccactaatagtcttcttttctagaagcttttaaagatatgagaaattattctcaatccaaaatgatttgaggttgggggataggaggtttttggagtgctggttaggggaacctgtttccaggactatctggcaaacatgaaagtccagtctcc

SEQ ID NO: 83170 - DNA, 536 bp, Homo Sapiens
  misc_feature (254)..(315): n is a, c, g, or t
gaggagaagaaatagaagaaagttctgcaacaaccatgtctgagaacttccagtattaatgtcagacaccaaaccaaagatccaggaagctccgagaacaccaggcagaataaatgccaacaacctacacttggacatataattttcaaactatatgaaataaaagataaaggaaaactctgaaagaaaccagaggtggggcagaaaacaccttacctacagagacacaaagataagaactgcattcaacattnnnnnnnnnnnnnnnnnnnnnnnnnnnnnnnnnnnnnnnnnnnnnnnnnnnnnnnnnnnnnncccaccaacctaagtttctgtacccactgaaaacacccttcaaaagtgaaggagaattaaggccttcctcagaaaaataaaaattcaagaaacttgttgccaggagacctgtcttgcaagaaattttaaatgaaattctttagggaaacaaaagatatgtaactgaaacctggatcaacatttttttaaaaagagcattaaagaaagaattgtggtacaat

SEQ ID NO: 83171 - DNA, 261 bp, Homo Sapiens
tcgagttacaaccatttttaaaagtggaactgcacaggattacctcagcctgctaagtccttccagctaggccgtccctgtgggtttaaacgcaatgtaaagaaagtggatgttaagtgttcttaccacaaaaatgataactatattagttaatgcatttgttagttagctagatttaaccatcccacagtgtattttatgtatttgtatttatatttcaaaacatcatattgtacataataaacacataaatgttaaaaa

SEQ ID NO: 83172 - DNA, 520 bp, Homo Sapiens
ccacttcccacaaacccgcttctcttaagaattctagcaagtggaaaattgaatttcattttctctgctgtccctctcctggggatgacagaaactgggttttgaaggagaaaaaagggtcccaggtaattcacccagagcagtgaccacatagttgagggttaagaacaaactgatccccacaactcaacacctgttgggtagctccacctggtaccagcaagaaaagggggggctggcaagcaagcattcaagggtattttccctgctctaacaaggtatgtttaattctacaagaaaactgttatttctctgcatcattttccctcttgacttcacctttaatgcacactctatagacgtcctgttgtttaactttgtgcttgcagttaagtgttagcattttgaacaaattaatgctgacttcctcttttcctataaaggctgcaccctctggatgtatttcagtgattatactaattcctgcatcaataaaatagaattacttttaattataaaa

SEQ ID NO: 83173 - DNA, 208 bp, Homo Sapiens
aagggtttctgcttaatgatattttatttaatatactcatggcaacagcactataactcatgattgaacaaagtttatctaacacatatgttttctcaataagatacatcacagccttcttccatttaagaacactagaaagcacttcagtactacacttgggggccatttaaacagtgaaatcaccaacaaaaagcacaaacaggtt

SEQ ID NO: 83174 - DNA, 575 bp, Homo Sapiens
  misc_feature (11)..(11): n is a, c, g, or t
agacttagctntgtgtttagcacatgattagaattcaataaatattaattattattagccattagccccttattgaggggacttctaaagacttccttagaagtcctagtgctctgtatagttggaaaatactgcccctggagtatctgatatgcagaccttactctgtggtcagaatctatccagtattcttcctacaaagtaaaaataactaatctcatattaaaaacaaaatcagagcttaagactcactttttctttttcctccaacaatacaagacttctggaggtctatacagtgcatttccatacagttttctaagagtccactttgtccacatgaacagattttataacaaccaacttcccctgcagatgatggcacctggattagtgtcccttgacggacaatgaaatcagaagcttctcccagtttgcaacctgtacaagcaaaaattagctgagagagatggtactgttctatgacattgttttataacattagatatacacttgataaaagtcttataggtactaaatcactattaaagattatgtaatagaactatcaccaa

SEQ ID NO: 83175 - DNA, 477 bp, Homo Sapiens
  misc_feature (37)..(37): n is a, c, g, or t
  misc_feature (51)..(113): n is a, c, g, or t
  misc_feature (137)..(239): n is a, c, g, or t
  misc_feature (262)..(281): n is a, c, g, or t
ggggatttactggcgcatgccactacactcagcccanttttggtatttttnnnnnnnnnnnnnnnnnnnnnnnnnnnnnnnnnnnnnnnnnnnnnnnnnnnnnnnnnnnnnnncaattagcctggcatggtggcagnnnnnnnnnnnnnnnnnnnnnnnnnnnnnnnnnnnnnnnnnnnnnnnnnnnnnnnnnnnnnnnnnnnnnnnnnnnnnnnnnnnnnnnnnnnnnnnnnnnnnnngacggagcgatgctccgtctacnnnnnnnnnnnnnnnnnnnncaagcaatttatagatatgattaaatgaaagctcttaaggagattatcctagattatccaatgagcctaaagtaatcacaagtccttacaaaagggaagaaagagggaagccacccagatttcaccctatatatctctcccttttgctgcttccaacatgtatcttttttgctataataaaactgtaagtccagca

SEQ ID NO: 83176 - DNA, 501 bp, Homo Sapiens
  misc_feature (16)..(16): n is a, c, g, or t
  misc_feature (265)..(265): n is a, c, g, or t
ccccttatatccaccncctcaaccaccctttttataaaatcttataattgggttctaaaaggatatacagaaatgccccaaggccaagagtagctaagacacttttgaagaacaaatttggataacttattagacttcttataaaacagtggtaattaaggcaatgtggtgttacacgagtaatcatgtagatcaatggtaaaagagaatctgaaaactgataattacctgtagacactttgaattatgacaaagttggccattnctagaacaatgggaggaaactcaccttttcagtaaagcctctggctcagttatccaaatgggtaaaacaaagaaaaaacaaatttactgcataccattcacaaaatttactctgcctaaacctataatagaggacaatgtatagcagtaagtatagatcaggcaaaaagaaagcctgaaaatacctaagcaacagtctcaataggttagaataaaaaaacgctaagatctaactcc

SEQ ID NO: 83177 - DNA, 511 bp, Homo Sapiens
  misc_feature (225)..(287): n is a, c, g, or t
ctggtgttctataccactgtaggacgactatagttaagaacattatattccatttagtttcaaatagctaaaaggagattttgtccccaacaaaaagaaatgataaatatttgaaaccatggatactctaatttctctgatctgaccactataaattatatgtattgaaacattattatgtatctcccaaatatgttcaattcttatgtcgctcaaaaaataaannnnnnnnnnnnnnnnnnnnnnnnnnnnnnnnnnnnnnnnnnnnnnnnnnnnnnnnnnnnnnnacttgaatctcattattttgacaataatttaattcttttattgttcaatctgttagtgagatgtgtcataggtattatgtcattagttcaaattcttgtggaaattatagctacattaaaagtgtaacatttttatttagttgtgtacttatttgttaataatacagacattgtatgttatcatactgcaatttacaattaaaatattttctataaattatttg

SEQ ID NO: 83178 - DNA, 518 bp, Homo Sapiens
agtttcccataatgttgatcgctactgaacctgatacggatgctgtcattgacattgaaggagttggtttatttaaggaatctgtttttgaacttaggctgaaaagtcagacaagaaatcctgagccgttcaccgcacacttccttacctggccagcgatctggagttttttggtaaaacctcagggctggagaacttcttccttttaacacaaacggaactctcatcactgtaggatttaaacctaaaatgtactgtaggaaatataaagcaacattagtaatacagacagaagaaatgtactggaagtatgagatcaatggattaactccaactaccgtgccaccaaaaaatgcaaaagccaaaattgatgctactcacaagacacatgacaacatgccagtccgtccacataattttgtccgtgaaaatactaaactcataagaacaggggtgtcttccaccatcaagggtgctcctttggtgaagaatcaataaaatttttttcaaaaataaaa

SEQ ID NO: 83179 - DNA, 1738 bp, Homo Sapiens
ctgagtataatctccaagaacttccttattctctttattcacacctgcacaacccctgcaaggggaaaggccaagagccaaggacccacacacactccccaggcacctacatacatgcatgcagagaatacatgttccctgcctcacagacacatggtcacacatggacacagatgtacacattacacacgttccttgagcagaactccaactctggggtgaaatcagaggtacaagcacctttcagctgcaaatttgaaatacagggtctcacagaaatgggctccaaacagaacttccagctgagatccaaccatagggatctactgtcctgcctggtttctatccacaccagcaagacagaattataggtggaatctgccgaagccctcctgggtcctctacaggtttggagctcctggacgcctgtccactggaatcactgaggccaagaacccaggcttaggggatccatccttcccaccccgtctcagcctcagccagagccccagtgccagggccccagccaccagtcccaggaaagaaaggattcccaaagacgccagcacagctacctgctccacagagtccctgtgatcaagtagccgagggtgtggttggagggagggccttggaggagcagggctgtccacctgaggctccacctctggctgcgtgtgtagctggccccatgctggtatctcctttggtatggtcccagtgctcggagttccccaagcctccggcctccaggtgctccaggtgccagcatctagaaagtcccgggcactgactcgtacagcatggggcagcccagccacagcatctgtgatcacctcctccagtccagctggctccaccgtggaccaggctggatgctgcgccggacggtactgcaaacggaacttgagcaggaagtggggctggcacggccaggaggcagggtatgtccagctggctcgcaggcttcgggggtaacctggtactgactctacccgcaggccctgggttggttcagggcgcaagatgctctgcaagctcacatccagcaggcgtgtgctggcacccagtgggttcacctcagtcacattaatccggtactggctccagaactcagccccgtggacaacacagcgggcagcccctaggggatcctgtgggcatggccagggccctgtggatggactcctcctctggctatcagctcctaggactgtcttcttcctgtaggaggtgaggtagcgggtgggtaaaccgctgatctggctgggactccaagtgcaagagaagttctcatagtcggctgcttggcaggagacaacagggcgggctggagggtagcccagctgcagggtcactgtgcccccaagtgcaccatccagggtctggcagatgtaggtgccctcatcagtgctgtctgcctgggccaggaccagttcatgccctagcccagagtcaggtccctggagcagctttggctccccatcccgaaaccaggacactgggtccccggcagtcactccaggacaacacagcttcacggacctgcctggctgcccatactggacccctggggggccccaggcctgggggcagggggaggaggcagacaccagggctgtagccacggccaccaggaccctgctcagacctgagcagctgctgctcatctcggtgatcccagcagcagagtgtccatagcctctaggacttcctctcaccagctacagcccccgtc

SEQ ID NO: 83180 - DNA, 589 bp, Homo Sapiens
gtagctggtgagaggaagtcctagaggctatggacactctgctgctgggatcaccgagatgagcagcagctgctcagggctgagcagggtcctggtggccgtggctacagccctggtgtctgcctcctccccctgcccccaggcctggggccccccaggtgagaagaaccctgctctacaacctcccaactctgacttgtgacttgccaccctcactgtggccccttcccatgcctaacttgtgacaccacccctgctcctgtcatccaacctgggtcctctctctaccctgttctctgacctctgtctccagattataacatgatgctttgatccagtgagccccccaccacccaggttttaacagtctgcttcttatctgtcattctcacaaagtggggaggggggtaaaggaagagccttacctcagaagtgccctccacaggggtccagtatgggcagccaggcaggtccgtgaagctgtgttgtcctggagtgactgccggggacccagtgtcctggtttcgggatggggagccaaagctgctcccagggacctgactctgggctagggcatgaactggtcctg

SEQ ID NO: 83181 - DNA, 519 bp, Homo Sapiens
  misc_feature (299)..(364): n is a, c, g, or t
  misc_feature (366)..(385): n is a, c, g, or t
ggcgtggcagcggcaatccctggccaaaggtacttggggtcattttccgcggggggttacgtgcgggagcgtgtcctccacaaacggattttccccccttaagcggacttatttccatccggagtgacagaatttaattccaaaccgagagctttccagactgacgaatttttaccgggactaacagagaattacctcagcctgacaacattttatctcgtgcgccacttcgggatccgagtggagccgaaagtcgagatagagcgcagttgggccttgggttcgaaaagactggacannnnnnnnnnnnnnnnnnnnnnnnnnnnnnnnnnnnnnnnnnnnnnnnnnnnnnnnnnnnnnnnnncnnnnnnnnnnnnnnnnnnnngcctggaaagaaattctgcggaatagaagtctttaagaaatgagatcgtgccctttaaaactaagtttaacaatagtgagggcttaataaacgataggtgttatctctgggttggaggggaataccttcaaaaa

SEQ ID NO: 83182 - DNA, 709 bp, Homo Sapiens
gaaccctcagtatcacagaccttgggtcccattctcaatatcaggtgaaactgccagagtacagagtctgatcatatttcctgtggcctaaactcaggtgcctctgagagctgtgggacctgtttccaacttgacatggagagagactgtatgtcttcgacctcagattccccaacctattaggaaacatttgacaattatttataaatagggtgactgtatgtccttttctgtccaagacagtccccatttacgactcttgttctggcactattaatagtgcccgctctgagcctcagattgccccagtttggaccaggaatcacatcatgtcctatttataaactaatttatagcagttttgaacctgtaggagacaacatctaaggtcccagcagtctctgaattgctccaggaagaatcatttaaatcttgggccagggttgaaattacaacataccatcaccagtcatgctgtgtagtggtcccttgttttcttccagctagtttctagaggtcttgtctggaagtgatcctactgtatcatctctccatgactgagtttaggaaacttggttatcaaaccaacctgagttggcacctggctctaccacctatcactgttaccttagctcaatgatgtcacctccctgagctacttttctcatcaattaagtgtggactgtgaacattaaataagctgaagtat

SEQ ID NO: 83183 - DNA, 508 bp, Homo Sapiens
  misc_feature (45)..(66): n is a, c, g, or t
  misc_feature (138)..(138): n is a, c, g, or t
gagagattgatctggatggcaagaccgtttatcattttttatttnnnnnnnnnnnnnnnnnnnnnngtcattttcagagaaccacctttatccaaaggccaaattgctgtttttcagtcaagctgcccacctgcttcntcattttgcccttctgagaaaaggccatggtttcttaattgagggaaggaagcagattcggaggggtggagataaaagctggggattggagatgttcccctgcctttgtgatgatggtttggtttccagacctgaggcatcgaatgggctaaaggtcagccagaagtcagagggctctcagccttcatccagccgcagccctttagagttcctgaaggaggcaggttccgctttgctttaaaagagggtcttccggtgttccagagtgtatcgttacagtaagacatgataatggccggctctgcaaatttatcatatagtttttttcccaagaaaattatttttgaaattaaaacaggaccacaaatga

SEQ ID NO: 83184 - DNA, 437 bp, Homo Sapiens
  misc_feature (414)..(414): n is a, c, g, or t
ctctcttgcccgcgggcccggctcagctcggctgcccaagctcccatcctcgtcgccgccaccgccgccgccgctgccgccttcctcccggtcggggaccacacgacttcgccaaagtcgccgcaccagccccgagcgtttggacctgaacatacgatatcctttggcgccaggggtgggggggaggcggtctccggttaccgggggtccgttccctcagcgaggcgccggctgcgcgggtcgcagcccacatgaagctccgccgcggacgccgtgcagaccgcgcacagcctgtcgtcgaaggggcgccgcaggacacaacatgagggagctcgccgaggcgagacggccgggaacacgcgcacgccgagccgcagtccgcgcgcgccagggttacatggaccacaggggggntgttaaaattcaggaccgccttt

SEQ ID NO: 83185 - DNA, 556 bp, Homo Sapiens
  misc_feature (393)..(447): n is a, c, g, or t
aatgcttgacccatgggcccaacgggtaggtagccaggttcatgacagccagttctaggttccaacgatccagccctcacatactcaccctgggagctgtgcagcgcatctcctgatgctcacgtcattggtgtagtttaggatcgctctttgagaaggacttcagaccaaactgggcctgcataagaaaacttatctcattattagagtactcacagcttgtatctcccagctacatcctagaaccccattgtcctttattccaccaaaccagctccaggtgaccagactctactcagaaagcaaattcgtcatcaaagaacagagactggccaccacaaggacatgcaggagaactgtcgggaccaggaagactcattccaaaaagcccannnnnnnnnnnnnnnnnnnnnnnnnnnnnnnnnnnnnnnnnnnnnnnnnnnnnnnggtatcgattgagcctcggaggtcgagatcagcctgggaaacacagggaggcccccatcgctacaaaatattttaaaaattagccaggtgtggtggcttgtgcttgttg

SEQ ID NO: 83186 - DNA, 571 bp, Homo Sapiens
  misc_feature (74)..(74): n is a, c, g, or t
ccccaaaagtgagtagtgagaagaagaagagggggtgttgtaccccctccctatggtggaggtccctcgctggncggaggaagtcagccaagccaagagagatggaggtgccctcgggcggggcccctgggactcctctgatcgatctgccctcctaaaaagcaagctgagggcgctgctcactgcccctcggagcctgcggagatccagctgcttcgggggcaggatggacaggattggagcccagagcggactgggctgtaacagcttccggtaccgaagataacagccagggaggacaagcagggctgggcctagggacagactgcaagaggctcctgtcccctgggttctctgctgcattcgtgtcatcttgttgccatggagttgtgatcatcccatctaagctgcagcttcctgtcaacacttctcacatcttatgctaactgtagataaagtggtttgatggtgacttcctcgcctctcccaccccatgcattaaattttaaggtagaacctcacctgttactgaaagtgaataaacttcagcaccatggacagaagacaaaaa

SEQ ID NO: 83187 - DNA, 831 bp, Homo Sapiens
atagaggggaacagagaggaaccagaggggagagacagagcagcaagcagtggattgctccttgacgacgccagcatgagctccttctccaccaccaccgtgagcttcctccttttactggcattccagctcctaggtcagaccagagctaatcccatgtacaatgccgtgtccaacgcagacctgatggatttcaagaatttgctggaccatttggaagaaaagatgcctttagaagatgaggtcgtgcccccacaagtgctcagtgagccgaatgaagaagcgggggctgctctcagcccctcccctgaggtgcctccctggaccggggaagtcagcccagcccagagagatggaggtgccctcgggcggggcccctgggactcctctgatcgatctgccctcctaaaaagcaagctgagggcgctgctcactgcccctcggagcctgcggagatccagctgcttcgggggcaggatggacaggattggagcccagagcggactgggctgtaacagcttccggtactgaagataacagccagggaggacaagcagggctgggcctagggacagactgcaagaggctcctgtcccctggggtctctgctgcatttgtgtcatcttgttgccatggagttgtgatcatcccatctaagctgcagcttcctgtcaacacttctcacatcttatgctaactgtagataaagtggtttgatggtgacttcctcgcctctcccaccccatgcattaaattttaaggtagaacctcacctgttactgaaagtggtttgaaagtgaataaacttcagcaccatggacagaagacaaa

SEQ ID NO: 83188 - DNA, 463 bp, Homo Sapiens
aaactaatctagaatcactgtctaaccactcactgtcatgaatgtgtacttaaaggatgaggttgagtcataccaaatagtgatttcgatagttcaaaatggtgaaattagcaattctacatgattcagtctaatcaatggataccgactgtttcccacacaagtctcctgttctcttaagcttactcactgacagcctttcactctccacaaatacattaaagatatggccatcaccaagccccctaggatgacaccagacctgagagtctgaagacctggatccaagttctgacttttccccctgacagctgtgtgaccttcgtgaagtcgccaaacctctctgagccccagtcattgctagtaagacctgcctttgagttggtatgatgttcaagttagataacaaaatgtttatacccattagaacagagaataaatagaactacatttcttgcaaaaa

SEQ ID NO: 83189 - DNA, 488 bp, Homo Sapiens
cccaccaaacctccccagggaaccctcgccaccccccaaatagcccgtagcccaatcccctgccctctgcacagggccttagctgtagaccagagagggcaggaggggtttgctggcataacaccccagaaccaagggaaatggatgggccgctgctcagtttcccaccatcctcagctcctggcctcatcccctcctagaatgagtcacccgtagatcagggtctggggaagaggctgatccctggcgctgcccggctccctcgctgccctctggagctcagggcagcccggaatagggctctttgaagaggaagtagaagccccagggtaatgaggcagagacccctcctggcagtggtgaggtgggggcatgcaccctcctttctgtaccgtgtgtgctggctccatagttctctcttctgtacatataagcatgcttgttctgaaataaagaagatttgaagtgaaccacaataaaatattttt

SEQ ID NO: 83190 - DNA, 343 bp, Homo Sapiens
gcccagaactcccatgtgtctataaatggagagtgaaggattcaactgttgaaggaagctcttgctgaacgtggactagtgcttactgtgcatgctatgcttacgttgttttgttttgaagtgtaaataggtagactcagaaaaccctgcttcctatggtccatctgcgccccctgagggagggatgctccagctggacaagagcttagacactgccttgagggcagcagtagtcagaatgcagctcccagaccgcacccctcatctcccaccagcggacccttgaacaagtcacttaactttctaaatgctgtttcctcattggtaaattgtgggccccagt

SEQ ID NO: 83191 - DNA, 1371 bp, Homo Sapiens
cgagagctccgggggccgctgcagccgcccaagcgcccgccatgcgcgctgcccgcgccgcgccgctgctccagctgctgctcctgctggggccgtggctggaggctgcgggcgttgcggagtcgccgctgcccgccgtggtccttgccatcctggcccgcaatgccgaacactcgctgccccactacctgggcgctctggagcggctggactacccccgggccaggatggccctctggtgtgccacggaccacaatgtggacaacaccacagagatgctgcaggagtggctggcggctgtgggcgatgactatgctgctgtggtctggaggcctgagggcgagcccaggttctacccagatgaagagggtcccaagcactggaccaaagaaaggcaccagtttctgatggagctgaagcaggaagccctcacctttgccaggaactggggggccgactatatcctgtttgcagacacagacaacattctgaccaacaatcagactctgcggcttctcatggggcaggggcttccagtggtggccccaatgctggactcccagacctactactccaacttctggtgtgggatcaccccccagggctactaccgccgcacagccgagtacttccccaccaagaaccgccagcgccggggctgcttccgtgtccccatggtccactccaccttccttgcatccctgcgggctgaaggggcagaccagcttgctttctacccgccacatcccaactacacttggcctttcgacgacatcatcgtcttcgcctatgcctgccaggctgctggggtctccgtccacgtgtgcaatgagcaccgttatgggtacatgaatgtgccggtgaaatcccaccaggggctggaagacgagagggtcaacttcatccacctgatcttagaagcactagtggacggcccccgcatgcaggcctcagctcatgtgactcggccctctaagaggcccagcaagatagggtttgacgaggtctttgtcatcagcctggctcgcaggcctgaccgtcgggaacgcatgctcgcctcgctctgggagatggagatctctgggagggtggtggacgctgtggatggctggatgctcaacagcagtgccatcaggaacctcggcgtagacctgctcccgggctaccaggacccttactcgggccgcactctgaccaagggcgaggtgggctgcttcctcagccattactccatctgggaagagcgagcagtacaaggcacacttctggccacgggacctggtggccttctccgcccagcccctgctcgctgcccctacccactatgccggggacgccgagtggctcagtgacacggagacatcctctcca

SEQ ID NO: 83192 - DNA, 616 bp, Homo Sapiens
cgcaggcctgaccgtctggaacgcatgcttgcctcgctctgggagatggagatctctgtgagtgtcgtggacgctgtggatggctggatgctcaacagcagtgcatccaggaacctcggcgtagacctgctcccgggctaccaggacccttactcgggccgcactctgaccaagggcgaggtgggctgcttcctcagccattactccatctgggaagaggtggttgccaggggcctggcccgggtcctggtgtttgaggatgacgtgcgctttgagagcaacttcagggggcggctggagcggctgatggaggatgtggaggcagagaaactgtcttgggtactcctactggacgctggcctatgccctgcgtctggcgggtgcccgcaagctgctggcctcacagcctctgcgccgcatgctgcccgtggacgagttcctgcccatcatgttcgaccagcaccccaacgagcagtacaaggcacacttctggccacgggacctggtggccttctccgcccagcccctgctcgctgcccctacccactatgccggggacgccgagtggctcagtgacacggagacatcctctccatgggatgatgacagcggccgc

SEQ ID NO: 83193 - DNA, 580 bp, Homo Sapiens
agcggccgctgtcatcatcccatggagaggatgtctccgtgtcactgagccactcggcgtccccggcatagtgggtaggggcagcgagcaggggctgggcggagaaggccaccaggtcccgtggccagaagtgtgccttgtactgctcgttggggtgctggtcgaacatgatgggcaggaactcgtccacgggcagcatgcggcgcagaggctgtgaggccagcagcttgcgggcacccgccagacgcagggcataggccagcgtccagtaggagtacccagccaccaccaggcccggcagcccctccacggccgtctccttctcagggttcacctgtttccgtccaaggtagatcaggtcccaagacagtttctctgcctccacatcctccatcagccgctccagccgccccctgaagttgctctcaaagcgcacgtcatcctcaaacaccaggacccgggccaggcccctggcaaccacctcttcccagatggagtaatggctgaggaaccagcccacctcgccctttgtcatagtgctgccctgagtatgggccatgaagcactggatcaggtctac

SEQ ID NO: 83194 - DNA, 427 bp, Homo Sapiens
cagtaaaggtcgtatctcctcttagtttatatttcccaggaatttccactgcaacagcagagttggtcatgggctcacagagctagagtgagagtcaggaaaactcaacagtggtagctactgtggtctgtccttgaagattctgagcagtgcaaatgtaatatcctgcatcaatcgtctcgaagtcttccactgtaatgacactctgggagattctcgtggtgtgtcccagtcctctgtggatcaacctccaagtgtcttggatcgtcacaggcctttcatcctgtttaacgacacccacaaagactgaagcaagagggacaagctgctataaagagctcccactcacccaacactgttgagcgttcctttcagagagcaaagcacatgcttataaaagactgtttagtatgcgtagatcataaaa

SEQ ID NO: 83195 - DNA, 829 bp, Homo Sapiens
  misc_feature (690)..(693): n is a, c, g, or t
  misc_feature (695)..(695): n is a, c, g, or t
  misc_feature (698)..(699): n is a, c, g, or t
  misc_feature (701)..(701): n is a, c, g, or t
  misc_feature (703)..(706): n is a, c, g, or t
  misc_feature (716)..(716): n is a, c, g, or t
gggggggcagatctcagatctccgtcaagtaccagctgctctacgtggcggttcccagtggccctccctcaacaaccatcttggcttcttcaaacaaagtgaaaagtggggacgacatcagtgtgctctgcactgtcctgggggagcccgatgtggaggtggagttcacctggatcttcccagggcagaaggatgaaaggcctgtgacgatccaagacacttggaggttgatccacagaggactgggacacaccacgagaatctcccagagtgtcattacagtggaagacttcgagacgattgatgcaggatattacatttgcactgctcagaatcttcaaggacagaccacagtagctaccactgttgagttttcctgacttggaaaaggaaatgtaatgaacttatggaaagcccatttgtgtacacagtcagctttggggttccttttattagtgctttgccagaggctgatgtcaagcaccacaccccaaccccagcgtctcgtgagtccgacccagacatccaaactaaaaggaagtcatccagtctattcacagaagtgttaacttttctaacagaaagcatgattttgattgcttacctacatacgtgttcctagtttttatacatgtgtaaacaattttatataatcaatcatttctattaaatgagcacgttttttgcccnnnncnacnncncnnnncaaaaccccnccacatggtcgggcgccttcggcccctcgaaaagcttttccaacacccattcggtttgggcgcgcggggccccggtaaggtaagtgaaacatgggcccataactggttttcca

SEQ ID NO: 83196 - DNA, 925 bp, Homo Sapiens
gcggccgccttcagcgcgcccacctcgtcatccagcgcctgcacgtggctccggagccgcgacgtggccgcccgcgcccgctcgccctccgctttgtgcgcgtccacggccagcgacacggcgtccacggcgttctgcagggcctgcagggaggagccgtccagctgccgccgctcgtccaggctcacctgggtctcctccagggcacgcgtggcgtccctctggccctcccggatgacgtccaggtctaaatagagcttctggcaattgcagtccttcacgtacttgatgaggtcggcatggccaccctgcaggtgctgcagcgtgaggttgagctccaggagctgccgctccacctcctccttgttctcctccatgatcagagacttctccatcaggatcacgcgcagctcacggagcgccgtgtggttcacctgcagctcctccacctgccgctccaccttgctaatctgatcgaaagtctcgtccgattcggagtacagttccttgatctcatccacgtgccgggacagggtggccctcatgtcctacagggtgtactgcaactcctcctccctgcgggccgtggtcatgtgcagctctgagaggttcctctgcagctggcccagcctggcctgcaggctgtccggctcaggccttgccccagccccaggcgttgccaacaccagactgccattggtccctggggcctcctgagccttgtgcagcctcttcaatttggtgtccacatcggcttggagctctgagaatcgagcggtgcagggtaaaagtgctgggcgtgcaggcggtcctccacgtctggtcgcagtgacccatctctgagtgttctcctggaccttggcctcaatttggaccaagtcctggcagtcagcctgggcagggactggtctggactctggaatgg

SEQ ID NO: 83197 - DNA, 765 bp, Homo Sapiens
gttaacttgctgtatacctcagtgtaatgtccattcaaggagtattaaatgaggaattccctgcgaggacatttactgtagtgctacttaaattatggaagacaatatatcttcaactttaataaaacctattcagaaaattaccaattcagaattcggagttcttatccaggtgctctaactaacttcagggaaattggaacaataagttatgttacatgcacactcaaattctttattttctccactttaagcaggaaagggtaaaaactgttttggtactcaagcccagccttacatactgtgtttctctctctgtctgcatgcatattaaagtggaaaaattgtatttatatcttagttattaccatagtacctatgaaccttatcagaattgcttgactggtgttacagctgctattaatctaagtctattgtttttctattttagtagataatttagttttaaaatacgtagggtttgagagcagatatatttatttaatctgttttctctagtaactattgctgaagggttaggcattcagtattcctatttgtcctaattttgaagttaaaaattttggttacagatagatagagggagaaaagttcaaaatgagtgagagagaactttatgcaggttgagataatgcctaaaataatgagctggccagactgtggaggtactctttgtattttgtaacattgactttgggtaaatgctttttcactgttaataaatatatatcctgtatacgaaaa

SEQ ID NO: 83198 - DNA, 558 bp, Homo Sapiens
tgtattttgagtttcagctggaaacttctgtaaggggcagcagttgaggtggggtagcgccgcagtggggtcaagctgagctggcttcggagatggagtcccttttcattctcctcctcctccctcctcactccctaggcccaagtctcctaggggcttggtcctagggtgggaaggggctagggaggaccaaagggatggtattgagaagagagaaagaagatagtgagatttaagttcctgctgcctgggtaggccccacaaggcctggtctgggagtatacggaaacaaaaatgatcctcagtgcaaaatgtcttgtgtatttctctgtgaatccatgggtctggctagagggcccaaagcttgtaaatatggggatagtctgggtcagacccatctctcccttacccatcttgcttccaagaccatttgtagtgagcgagtggatgctgtgctacgtgtgaaatctgtctttgcggggcctgtctcagtgattcgcttttggtatttgtttgtagctttcctggaagtcaaataaatgtttcccccactcaaaa

SEQ ID NO: 83199 - DNA, 817 bp, Homo Sapiens
  misc_feature (718)..(718): n is a, c, g, or t
tttgaaagtgtaattcccctctgacacaatatccctcacatacaagatggtgatgtaccactcccgagaatattcccatctgtattttgtgctgatgttcctgcatccagttgttctcggtcatacttttgaccacttgtgactggagttcagtggccctggcaggcttgtcctgctcttgaccattccactgactaactttggtgttttgtttccaagttaagtgattcctccttttttttgttcaatgttaaatttaaaaataacaatgtgtatgggtcctcccatgtgtaatatggtaacatgtaacttgcagtgtttgccagctttcaaagcaggctttgtgaaaatgtaatacaaacagcagtgaatgggactcaaatgttgtgcttcctataaacagctccgctctttcagggaaggatggtaacaaactagaaggacaaatatgtacgtatttataacgtattaaaactcttttaagtagcttaaggtattgtgcaatggcctagcctagtagaaatgggggaaaagcattgctgtggaccattgttaaagtgacaggagttgtagggttacccctttgacaagcttccatagtcttcagacacgcacattgatggcatccctacagtcttcttcacttgaactttgtaaaactgcatatggacctgtaatcaacttttgatatttcttaataaaggcgttggaaaccctncccagccattttccacgccgactcgagtacccttgtccggccccccttcgggtctttcgaaaaaagcttttcctaaacaccattcgctttgggccgccc

SEQ ID NO: 83200 - DNA, 426 bp, Homo Sapiens
  misc_feature (222)..(230): n is a, c, g, or t
aaagttggtccttgactgtggcattgcactctgcactgtttctctctgcagacctaggggaaaactgcaggtgggaagtgcttttctactaaggcctcttactttgggggggatgtgccctacagaagacatagaagatggggaaatgccaatgggcaaagagctactttgaatacataattctcttcaaagacttcagcagcaaaccaaaacagcaggttnnnnnnnnngatgcttttttgggtgcaagtctaacctgtctagcatgagatcttcttgattttctgattattttatgtagcttgagacaaagtgaatcaacttccacttagttgtaccgagcataaaacagaacttgggcttcctggcagtgaggccactgtcccatcacagatttttaaaataaatatgatttgaagtaaaaaa

SEQ ID NO: 83201 - DNA, 562 bp, Homo Sapiens
  misc_feature (126)..(362): n is a, c, g, or t
aggtctcaagtattcccatgtgttttaaaagcctgaagtcagtgagatgaaattcaacatcaagaatttgaagtaacttgtaaggaaaaataatataaagataccattggggcagtggctcacacnnnnnnnnnnnnnnnnnnnnnnnnnnnnnnnnnnnnnnnnnnnnnnnnnnnnnnnnnnnnnnnnnnnnnnnnnnnnnnnnnnnnnnnnnnnnnnnnnnnnnnnnnnnnnnnnnnnnnnnnnnnnnnnnnnnnnnnnnnnnnnnnnnnnnnnnnnnnnnnnnnnnnnnnnnnnnnnnnnnnnnnnnnnnnnnnnnnnnnnnnnnnnnnnnnnnnnnnnnnnnnnnnnnnnnnnnnnnntgacagagaaaagaaaaagaaaacattacataatttggctagagcataataatttgattttctggtttttgaaaatttgagttgcaataaaaggatatttcagtgtgcgatttcaattttccgtagcaaatgtatatatagaaaaatgttaaaatagatgtatttgaataccttaaaaaatacaagaaactggaagaaag

SEQ ID NO: 83202 - DNA, 790 bp, Homo Sapiens
  misc_feature (115)..(166): n is a, c, g, or t
  misc_feature (254)..(301): n is a, c, g, or t
  misc_feature (323)..(352): n is a, c, g, or t
ggaaatcgcacactgaaatatccttttatggcaactcaaattttcaaaaaccagaaaatcaaataattatgctctagccaaataatgtaatgtttctttttcttttctctgtcannnnnnnnnnnnnnnnnnnnnnnnnnnnnnnnnnnnnnnnnnnnnnnnnnnnggggctcaagtgatcttacggcctcagctccccgagtagctggaactatggggtgagcaacaccacagccagctaatttttaaagttnnnnnnnnnnnnnnnnnnnnnnnnnnnnnnnnnnnnnnnnnnnnnnnngggcttcaagcgatccttccannnnnnnnnnnnnnnnnnnnnnnnnnnnnngtgtgagccacggccccaagggtatctttatattattttcccttacaagtttacttcaaattctggatgttgaatttcatctcacggacttcaggcttttaaaacacagtgggaatactggagaacctaagaagggtggtgagtcaaataaaaaagtagaacctaaagtatacggaagttatccaaatacattcaaactataaagatcccttatagattacggccatcaggtaggacgggaaaagatacaagaggttaaatgcaaccactccatcacgggttgtcacccattatgggtatacagtttatcctaacacaagagcagcttcttaactggtccataaaattccagcaagaaagaaagctccagaatagggttccccgtgaaatgggggggccaaatccatacaggattccaaaagacccttgattattgga

SEQ ID NO: 83203 - DNA, 513 bp, Homo Sapiens
gcggccgctatgcccccagggactgcgtctctcctcacaaggtggccatcatcattccattccgcaaccggcaggagcacctcaagtactggctatattatttgcacccagtcctgcagcgccagcagctggactatggcatctatgttatcaaccaggcgggagacactatattcaatcgtgctaagctcctcaatgttggctttcaagaagccttgaaggactatgactacacctgctttgtgtttagtgacgtggacctcattccaatgaatgaccataatgcgtacaggtgtttttcacagccacggcacatttccgttgcaatggataagtttggattcagcctaccttatgttcagtattttggaggtgtctctgctctaagtaaacaacagtttctaaccatcaatggatttcctaataattattggggctggggaggagaagatgatgacatttttaacagattagtttagaggatgtctattctcgccaaatgctgggtcggga

SEQ ID NO: 83204 - DNA, 390 bp, Homo Sapiens
gcccttatgaatcattgtaacctctaaactgggtttcattagaaaatcatcaccttaaagtggatacatgctggtatttactctatgtattattagtgttaaattattgatggcaaccaacatcatatctgtgtttatgtacttgactttcttgtaaagacgaaaaatgattatcagaggtttttgaatggttgtagaatctgtgatgatcttgtttatcatcatggagaaatctaacaaatatgagttttctaacttgtagaaacttattcctttaagcacagatggaaatctctttaacatgttaccttctgtcctacattaaaaacagaaagatatgttcctttctttatccctattctagggaacttggaaaaaatacagaagagt

SEQ ID NO: 83205 - DNA, 837 bp, Homo Sapiens
  misc_feature (628)..(641): n is a, c, g, or t
caaagggcaaaggatagactgtaaggaagcccagataaagcttggagtagcatgagaacttgaggaatagtatgatatgggctgtgcagcaggcagagagaatcaccttagctgaaacatgggtgttaggagcagaccatgaggtggtagaaccatcatctatagtaaatcaggtactacgctataactattgataaggaaacagctgactgccactgaaagaataagcagttttaggggactagctcctatgggagataaaggtcagaaatcgtagtatctgatgaagatattttgatgagcaggtgagaagaaagataaacatggccaaatggccaaggactgggataagtagccgtttcacattcaattaaaattctgtggctggaataagatcagggagagcagtaggaagatatagtattctataattcatagcttgttgtgttagagattaattaggattctgctgttgaatcttagtacaaaaaaatctaatatttattaggaattaagggaagatggtacttctgttatgttgcctaagcagacaggaagctacaagaaacaccagtctgaagcagtgcctcaggatctcagatgatttaggaagtgtgctgtaatgtcnnnnnnnnnnnnnngtattgtctttagtatatctatgtatagtctcgtgggaaaagcattggttgtggtatcaacagatattctggttccagatgtcttgtaagttaacctgcctccatttccctttctgtaaagcaaaataatgtttacacctaatctgtctctcagggataccatattaataaaaatcatgtctataaagtgaaaaaa

SEQ ID NO: 83206 - DNA, 427 bp, Homo Sapiens
  misc_feature (76)..(115): n is a, c, g, or t
tttcctctgttactttataaccctttcatactagttgaacttttttttatataatgtacatgtactactttatagnnnnnnnnnnnnnnnnnnnnnnnnnnnnnnnnnnnnnnnngaattaatcacagtggaacatgaaatggaatgtcaactttggggacgggtcatccagaggagtccaagagccccaacatggtcgcgtgtctctggtcctcaggtcatcacccagcctcacccacagggcacccgccacggccgtggcccaccgtgcaagcttccacttggtgcctgcgtgggaacgaaccacctgccgtggaacttcctcctgcggggcagaggaggggtccagaagccacaggagtcaagtcagcaaaattaagttaatttacaaagttatagtaaaaaccacaatagtgacccagtccct

SEQ ID NO: 83207 - DNA, 1362 bp, Homo Sapiens
tgagacaggtgtgcaccgctgcggtgagggccaagtgtgccacaacctccctggctcctaccgctgtgactgcaaagccggctttcagcgggatgccttcggccggggctgcatcgacgtgaatgagtgctgggcctcgccaggccgcctgtgccagcacacgtgtgagaacacactcggctcctaccgctgttcctgcgcctccgggttcctgctagcagcggacggcaagcgctgtgaagacgtgaatgagtgtgaggcccagcgctgcagccaggagtgtgccaacatctatggctcctaccagtgctactgccgccagggctaccagctggctgaggatgggcacacctgcacagacatcgacgagtgtgctcaaggcgccggcatcctctgcaccttccgctgtctcaacgtgccagggagctaccagtgtgcatgccctgagcagggctacaccatgacggccaacgggaggtcctgcaaggacgtggatgagtgtgcactgggtacccacaactgttccgaggctgagacctgccacaacatccagggtagcttccgctgcctgcgcttcgagtgtcctcccaactatgtccaagtctccaaaacgaagtgcgagcgcaccacgtgccatgacttcctggagtgccagaactcgccagcgcgcatcacgcactaccagctcaacttccagacgggcctcctggtgcctgcgcatatcttccgcattggccccgcgccagccttcacgggggacaccatcgccctgaacatcatcaagggcaatgaggagggctactttggcacgcgcaggctcaatgcctacacgggtgtggtctacctgcagcgggccgtgctggagccccgggactttgccctggatgtggagatgaagctctggaggcagggctccgtcaccaccttcctggccaagatgcacatcttcttcaccacctttgccctgtgaggtgccagcacgggccacctgcgggtgtggcgcagcccagggctcacactgcgtgggagggactgggtcactattgtggtttttactataactttgtaaattaacttaattttgctgacttgactcctgtggcttctggacccctcctctgccccgcaggaggaagttccacggcaggtggtgcgttcccacgcaggcaccaagtggaacctttgcacggtgggccacgggcccgtggcgggtgcccctgtggggtgaggcctggggtgatgacctgaggacccagagacacgccaaccatgttggggggctcttaggacttcctctgggatgacccccgtcccccaaaggttggaccatttccattttccttgtttcccaactggggaata

SEQ ID NO: 83208 - DNA, 1401 bp, Homo Sapiens
  misc_feature (1037)..(1037): n is a, c, g, or t
  misc_feature (1359)..(1359): n is a, c, g, or t
caccaatctacctacattccatcaccacccgccccccccgtgttgcgcctgggatcggcattctcgggatgggcgcctgacttctcctcccggccagttctcgagcgcctcaccgggcctcgccctgcagcctcgctctcgctggcgctgcgcggcctaggggactgggctgctggcctccgggtgcggggtgggggcaggctccgacctggggcgtcctggcagcgcgagccgcgggatgggggcccgggccgcggaggaggcgccgctgctgtgtcccttggtggagagggcgctgccggccctgcgcggtttccagccaggaagcttcgggaagcctggacgtctgctcactggagatgacacgtgcgtggggtgttggcattcttgttatttaacacgggaaggaggtgacttcgcctgtgatggacttccagtgtgagcactggccagagtgaccaggctgaccagcaccagccctgatccagatgcagaggccaggatgtgggcccagccctgtgccaggaggctggctggaataaaggtacagatagaggcctcaccccctctgggaccactggcactcagggtgtttgcagcctcagagcccacctgcccccagggccacagctgcatctcctgccctgctgtcattacagggatgggcaggctggcatgggggcagccgctgcccctgcctgggtgttgctgtgtattcctgccggccaggggccactgccaggaccacgcctcccttttcatatcccgattcttaagttctgctattgtggtattctggtggagaaaaaagaaccgcgtggctgtttttgaactgcctggaacctaagaccctgaattcttttcccccccaaggggaaaatctatatggaaaacatttattttaaaatacaggatgaagtgaattaaaagatttaaatgcacatttctttaaggataatatttctgtgttggcaaaatttgagagtaaattggtcttgaatggaatggattgtcttgactcacacattgcggaagangcccgcactgaagaaaggtgttgctgtggtgggatcttcccacgagggtccttgcctgttctcctaggggatggttgctgggtgccctgggctactggggagagcgtacggggctggagaagatggccattcctgggctgtttcctagggaatgagttgtacatctcatggctggattttgtaaaatcagtttttaaaataccgcatatatctgttttcttactggaacacctttttcttggtctgttgtgcacagcccaggtttggggggtactggtcattgactgtttcagaagccgctgtgtttggggaactgccctgngcggcttcagaggtgtgtgtgggttgaagggcaggcagctct

SEQ ID NO: 83209 - DNA, 493 bp, Homo Sapiens
gacgttgcctcactggaaatgacacgtgcggtggggtgttggcattcttgttatttaacacggaaaggaggtgacttcgcctgtgatggacttccagtgtgagcactggccagagtgaccaggctgaccagcaccagccctgatccagatgcagaggccaggatgtgggcccagccctgtgccaggaggctggctggaataaagggatgggcaggctggcatgggggcagccgctgcccctgcctgggtgttgctgtgtattcctgccggccaggggccactgccaggaccacgcctcccttttcatatcccgattcttaagttctgctattgtggtattctggtggagaaaaaagaaccgcgtggctgtttttgaactgcctggaacctaagaccctgaattcttttcccccccaaggggaaaatctatatggaaaacatttattttaaaatacaggatgaagtgaattaaaagatttaaatgcaaaaaaaa

SEQ ID NO: 83210 - DNA, 494 bp, Homo Sapiens
ggtaccccaagaaggatgtgagaggtgggcgctttggaggtttgcccctcacccaccagctgccccatccctgaggcagcgctccatgggggtatggttttgtcactgcccagacctagcagtgacatctcattgtccccagcccagtgggcattggaggtgccaggggagtcagggttgtagccaagacgcccccgcacggggagggttgggaagggggtgcaggaagctcaacccctctgggcaccaaccctgcattgcaggttggcaccttacttccctgggatccccagagttggtccaaggagggagagtgggttctcaatacggtaccaaagatataatcacctaggtttacaaatatttttaggactcacgttaactcacatttatacagcagaaatgctattttgtatgctgttaagtttttctatctgtgtacttttttttaagggaaagattttaatattaaacctggtgcttctcactcacaa

SEQ ID NO: 83211 - DNA, 968 bp, Homo Sapiens
ttttttgcagtacctgctgcggccgctttcggcatggaggaaatttatgcgaagtttgtgtcccagaaaatcagcaaaacccgctggcgaccgctgcctccgggaagtttacagaccgcggagacgttcgctacaggatcttgggacaatgaggaaaattatatttcactgtggtctattggagattttggaaacttggactctgatggagggtttgaaggagaccatcagttattgtgtgatatcagacaccatggtgatgtaatggatttacagttttttgaccaggaaagaattgtcgctgcttcatcaacaggatgtgtaacagttttccttcaccatccaaataaccagactctgtcagtcaaccagcagtggactacagctcactaccacacaggccctggcagtccttcctatagcagtgcaccatgtacaggtgttgtgtgcaacaacccagaaatcgttacagttggagaggatggtcgaataaatctcttcagagctgatcacaaggaagctgtaaggaaccatagacaatgcagatagtagtacactccatgctgtaacctttcttcgaactcctgagattcttactgtaaattcaattggacagttgaaaatatgggatttcagacaacaaggaaatgagccttctcagatattgtcactgactggtgaccgagtgccactccactgtgttgatagacatcccaaccaacagcatgttgtagctactggtggccaagatggaatgttgagtatttgggatgttagacaaggtactatgcctgtatctctgctgaaggctcatgaagctgaaatgtgggaagttcactttcacccatccaagccagaacatctttttacctgctctgaaggtggatccctctggcactgggatgcttccacagatgtacctgaaaagtcgtcactctttcaccaaggagaaaaggcgctcctcaacc

SEQ ID NO: 83212 - DNA, 1049 bp, Homo Sapiens
tggaccggtccggaattcccgggatggcggctgggcctggaacagtcggagcagccgctagcagaaggatgacccaagacgggaagcgggctgctgagcctcgccgattcccgtgcttgtaactgccccagccggacaccccccctcccttgacctacccggtctgtgtctcgttccggctcggcctgcgccccccctcgcttcccagccggtttcccctaaggatgggcctgacccgtatcccaagctcttagcgctcaggtcttttccttccgccgacccgaagtcatcgctgggagtactggttgccctttcctcagtccttcagtgaatctacagacctattttctcaggagctcagcctggccttacttcagtgataaaaggaggaaaggctggctacagcaaacatcattcaagatgtccagcaaagggagcagcacagatggcagaacagacttagctaatggaagcctgtctagcagtccagaggagatgtctggagctgaagaggggagggagacatcctcaggcattgaagtggaggcctcagacctgagtttgagcttgactggggatgatggtggccccaaccgcaccagcacagaaagtcgaggcacagacacagagagctcaggtgaagataaggactctgacagcatggaggacactggtcattactccattaatgatgaaaatcgagtccatgaccgctcagaggaagaaggaagaggaggaaaaagaggaggaagaagagcagcctcggcgccgtgtacagcgcaagcgggctaaccgtgaccaggactcctccaatgatgagcgggccctaaaagaacggggggtcctcaaaaacattcactttaaccccgaacctccctgggaaaccccctcccggccctttcgggaaaccggaaacttgggttcaaaagccccgcttttttccatagaggggcccctcgggggcgcaaatacccttttgtgggccagttatttacccccttctacactacatggctcttataaggtacaccaaacacgcggcggtgcgt

SEQ ID NO: 83213 - DNA, 977 bp, Homo Sapiens
  misc_feature (465)..(514): n is a, c, g, or t
ggctggccatggacgaggacggtcgcaagttcgtctacttcaagtccctcgggccctaccacaagtcgcgctcgtcgtcgtggagcaagaagcgcgccgagagcagcgacgaggagaacttgccccgcatgtatgagacgggcaccgagttctgcccctacgccagcttcgtcaagtacctgtcgaaacgcaaccctctctgcaaggcgttcttccagcggccccgggaccactgcagcgagggcgatgtgacctggtacgagaacaaagccatcggcaagaacttgctaggcactcggatgcagatgctctccaaggcggccaagctctccaagacctacaccaaccactgcatcggcgccgtctccatcgccacgctcaacagcatcgcgggcattggcaccaagctgggctcgcccgccccgcagggctgctacgccgaggctctgaacggggcggcacggnnnnnnnnnnnnnnnnnnnnnnnnnnnnnnnnnnnnnnnnnnnnnnnnnngccgccctcgctggggaacacttacatcctccccaaagacagccaggtcgggcccgacgtgaaatccgaggctgcgcccaagcgcgccctgtacgagtctgtgttcgggtcgggggaaatctgcggccccacttcccccaaaagactttgtatccgcccctcggagcctgtggatgcggtggtggtggtttccgtgaaacacgaccccctgcctcttcttccagaagccaatgggcacagaagcaccaattctcccacaatagtttcacctgctattgtttcccccacccaggacagtcggcccaatatgtcaagacctctgatcactaaatcccctgcatctccactggacaaccaaggcatccctactccagcacaactcacaaaatccaatgcgcctgtccacattggatgtgggccgggcaccatgtacaccagccagcctgggcccccctcaccaaaa

SEQ ID NO: 83214 - DNA, 781 bp, Homo Sapiens
gtcacaggcatctttatagttcacgttaacatatagacactgttggaagcagttccttctaaaagggtagccctggacctaataccagccggatacctctggcccccaccccattactgtacctctggagtcactactgtgggtcgccactcctgctacacagcacggctttttcaaggctgtattgagaagggaagttaggaagaagggtgtgctggctaaccagcccacagagctcacattcctgtcccttgggtgaaaaatacatgtccatcctgatatctcctgaattcagaaattagcctccacatgtgcaatggctttaagagccagaagcagggttctgggaattttgcaagttatcctgtggccaggtgtggtctcggttaccaaatacggttacctgcagctttttagtcctttgtgctcccacgggtctgcagagtcccatctgcccaaaggtcttgaagcttgacaggatgttttcattactcagtctcccagggcactgctggtccgtagggattcattggtcggggtgggagagttaaacaacatttaaacagagttctctcaaaaatgtctaaagggattgtaggtagataacatccaatcactgtttgcacttatctgaaatcttccctcttggctgcccccaggtatttactgtggagaacattgcataggaatgtctggaaaaagcctctacaacttgttacagccttcacatttgtacaattcattgattctcttttccttccacaataaaatggtatacaag

SEQ ID NO: 83215 - DNA, 1329 bp, Homo Sapiens; identical to SEQ ID NO: 5577
  misc_feature (944)..(944): n is a, c, g, or t
  misc_feature (963)..(963): n is a, c, g, or t
  misc_feature (1065)..(1065): n is a, c, g, or t
  misc_feature (1112)..(1112): n is a, c, g, or t
  misc_feature (1114)..(1114): n is a, c, g, or t
  misc_feature (1121)..(1121): n is a, c, g, or t
  misc_feature (1177)..(1177): n is a, c, g, or t
  misc_feature (1242)..(1242): n is a, c, g, or t
  misc_feature (1280)..(1280): n is a, c, g, or t

SEQ ID NO: 83216 - DNA, 309 bp, Homo Sapiens
tcccccacgattgtcctcagcttccgtccgtccgtcccgaaactgagacacaacgatggtcctcagcttatccagtgccttggataagctgaaggagtttggaaacacactggaggacaaggctcgggaactcatcagccgcatcaaacagagtgaactttctgccaagatgcgggagtggttttcagagacatttcagaaagtgaaggagaaactcaagattgactcatgaggacctgaagggtgacatcccaggaggggcctctgaaatttcccacaccccagcgcctgagctgaggaccatcgttg

SEQ ID NO: 83217 - DNA, 928 bp, Homo Sapiens
ttaaaagcttaaatgtaaagaaaagtttggcttcttttggtatttataaataaatatttcatcagcctgcaacattccattaagtattagaattatcagatcagaaatggggagtaaagttgaaatataatgttgtctttcttcagcttatgatacacagcacctgtaaggattctttgaagattaatccaaccaattcctgttcctccactgaaatgggagtttttggtccttttcacttgtctcaacagcatgaattgtcctattatcctgtgatttcctaggagcttggaccccgattggctgcaatgctgaactttaatcttcagcaactttgtggccccaagtgccgtgacctgaaagttgaaaaccctgagaaatacggctttgaaccaaagaagctgttggaccaactgacggatatttacttacagctggactgtgctcggttcgcgaaagccattgctgacgaccagagatcctacagtaaggaattgtttgaagaagttatttcaaagatgcggaaggcagggatcaaatccacaatagcaatagaaaaatttaagctgctcgccgagaaagtggaggagatagtggccaagaacgcacgcgcagaaatcgactacagcgacgctcctgatgagttcagagaccctctgatggacaccctcatgacagaccccgtgcggctgccctctggcaccatcatggaccgctccatcatcctgcggcacctgctcaactcccccacggaccccttcaaccggcagacgctgacagagagcatgctggaaccagtgccagaactgaaagagcagattcaggcgtggatgagagagaaacagaacagcgatcactaaaccgttccgccgcccaccctctgctagacacagccaaggccaacgaggcaagcagaagcagcggccgc

SEQ ID NO: 83218 - DNA, 408 bp, Homo Sapiens
aaagcactggtgctcttcttaagtgaaatgttaacacagggctcaatacataaaagagaaagtgaagttgttccatttggggggtcccataaggggcctcatgtttccctaggtgttaccccttcagacacagcacagcctacaaagccatggaattaaaatattaacaatgaatgcataaagatttcactgacaaataaaaaccagggagtgcattcagtgaccacaactttctaagcttctgcttttccacatgcttttctttggttttatcactttagaaaactctttgaacattaattgtctgaatggcagctatattagtcagaagctgtaatgctacacctgggaatttatctacatgatagatgctgctgaataaaatccaacaagaacgattttgtttaa

SEQ ID NO: 83219 - DNA, 745 bp, Homo Sapiens
  misc_feature (645)..(645): n is a, c, g, or t
  misc_feature (677)..(677): n is a, c, g, or t
ggtactcaggagacaaagaaaatggaaatgaaaggagagccgaaagacaaagtagaaaaaataggattagttgaagatctaaataaaggagctaagcctgtagttgtgctacaaaaactgtctttggatgatgttcagaaacttattaaagatagagaggacaaatcaagaagttcccttaaacctatcaagaataaaccatcaaagtcaaataaaggtagtatagatcaatcagtgttaaaagaattaccccctgaactcctggcagaaattgagtccaccatgccactttgtgaacgtgtgaaaatgaacaaacgcaagcgtagcacagttaatgaaaagccaaaatatgctgaaatcagttcagatgaagataatgatagtgatgaagcttttgaatcctctaggaaacgacataaaaaagatgatgataaaggcttgggaatattgaagaacgtgacagaaagaagctctgggggggatcataggagaaaggggccactctcatgaaaggaagaacgagttccggggggtgggtcctttatcgaaaacccgaagtcccgtcacattctgaccttgggaaagattatttctcctccctccccagcctttaaggggaggttggctaagggaaaatggaaccancaaccaaccatcgcccttctcgaatatgtttnccttggtccgggccggccttgggcccctcaaaaaaggttttttttaaaacctatttccgttttggggg

SEQ ID NO: 83220 - DNA, 1031 bp, Homo Sapiens
  misc_feature (795)..(795): n is a, c, g, or t
  misc_feature (801)..(815): n is a, c, g, or t
  misc_feature (841)..(841): n is a, c, g, or t
  misc_feature (885)..(885): n is a, c, g, or t
  misc_feature (935)..(935): n is a, c, g, or t
  misc_feature (945)..(945): n is a, c, g, or t
  misc_feature (949)..(949): n is a, c, g, or t
  misc_feature (975)..(976): n is a, c, g, or t
ggcacgaggcttcagtgtcagctcgcgagccctggcgtcgcgtaggagggaggatggagagcggcgacgaagcggccatcgagaggcaccgcgtccacttgcgctccgccacattgcgcgacgccgtacccgccacactgcatctgctgccctgcgaggttgcggtggacgggcccgccccggtggggcgcttcttcacgcccgccatccgccagggccccgagggactcgaagtgtcgtttcggggccgctgtctacggggagaggaggtggcggtgccgcctggcctcgtgggatacgtgatggtgacagaagagaagaaggtgtcgatggggaagccagaccccttgcgggattccgggactgacgaccaagaggaggagccgctggagcgggacttcgaccgcttcattggagccactgccaacttcagccgcttcaccctgtggggtctggagaccatccctggcccggatgccaaagtgcgtggggccttaacttggcccagccttgcggcagcgattcacgcacaggtgcccgaggactgagaaccagagcttgaaattcaaagctgcgatcccttcacagcagtaaaccagctctttggaaccgattccatcaccccaataaaggagctcttcacagcacctgtgagtctgggcgcctttagagcccctaagccagcatgggccctttccccctccccaccaagaactttgcatggctctggcatatagaaacaatttattgccgggggcaataaggggtaagagaaaagccagaaatttttgcagncagcannnnnnnnnnnnnnnaacttctactttacaaaaagaaattnttacaatcaccagcccctctgtacagaagcttcccccatccggnatccccttctcactggtacacaagctgccctgggctcccctctggtcccntggctttcanaagngagggccctggggccttgtgggcagnntctggaacctttgtggaattttggctcttgaagccccgggaaacttccgcccctt

SEQ ID NO: 83221 - DNA, 1115 bp, Homo Sapiens
atttttgatggattactgccatctcagagatttcaacttcagcaggcttgatgggtccatgtcttactcagagagagaaaaaaacatgcacagcttcaacacggatccagaggtgtttatcttcttagtgagtacacgagctggtggcctgggcattaatctgactgcagcagatacagttatcatttatgatagtgattggaacccccagtcggatcttcaggcccaggatagatgtcatagaattggtcagacaaagccagttgttgtttatcgccttgttacagcaaatactatcgatcagaaaattgtggaaagagcagctgctaaaacggaaactggaaaagttgatcatccataaaaatcatttcaaaggtggtcagtctgggattaaatctgtctaagaatttcttagatcctaaggaattaatggaattattaaaatctagagattatgaaagggaaataaaaggatcaagagagaaggtcattagtgataaagatctagagttgttgttagatcgaagtgatcttattgatcaaatgaatgcttcaggaccaattaaagagaagatggggatattcaagatattagaaaattctgaagattccagtcctgaatgtttgttttaaagtggagctcaagaatagcttttaaaagttcttatttacatctagtgatttccctgtattgggtttgaaatactgattgtccacttcaccttttttattatatcagttgacatgtaactagtaccatgcgtacttaaatagatggtaattttctgagccttaccaagaacaaagaagtatccatattaagtttagattttcagttaatttttgagactgagtagtattcttggatacaggctgatgtgtacttaaccacttccagatttatacagtcttcctgtggaagtttagtaaatgtctttttccctcctttcttctagtaatgcagttcatgggctttaggtacttcagttatgaagtaggcttttcatggggagagattgggattatgctctctgttgtttaagaaactgtttgattttagagtctatttctatgagatagtttaccaaataaatgttccttataagatgaaaaaa

SEQ ID NO: 83222 - DNA, 736 bp, Homo Sapiens
cagtccgcccttcgcctttaaataaaagcctgccggctcgagatcggcgtcgcgatggagtgcccgtggacttctacgcttgcgggaactccgagtggacggatagcggcttatgaattttgctttttagagggtacacaaccctttctctagggtggcgtgcatcttctgcaaacttgttattgccaatacgctaatagtcgctttcagcacacaacaggtaatacattctaaacgcctcgtgtcaaaataaggagagtccttatttgtgcaccgtggggcacagttaaggagcaggaagaagacaaaggaggccgttatttatgtgccgtcctattatcaaaactttccgtggtggggcagggtgcgtggctattggcctctgctgaatggactttcagagtgattgaggtgagttgcaaatcttcatttagaattatgaaacgtatatgattatacataatagttagtcaaatgacctgaaataaatctctgagaattacgtgatctttgatctttggagaacagaacttgggtttcttgaaaggaagctttctccatgtttagaaagcttcagggatgctttgtgaagttactaaaaatagttacatttctttatgttggcagtaatgactgccacattcaagagaagagaaaggaattgttctataaagaacggctcattttaggggttaaactttaggagttaaacacaataaaacaacttcagatttgg

SEQ ID NO: 83223 - DNA, 825 bp, Homo Sapiens
agcataccgtgtgtcacttcttctctctgaatcagagatgtagctgccccgatgcctacaaacacttgaactatggcccacactcttgccagcagatgggggactgcttgtgccaccagtgctctcctaccactagcagctttgtccagatccaaaacggcgtggcacctctgaaggccacacaccaagctgtcgagggctttgtgcaccccatcacgcacatccaccactgtccctgcctgcagggcagagtaaagccagccggaatgcagaattctctgcctaggaattttttcctccacccagtgcagcacattcaggcccaagaaaaaattggcaagaccaatgtacacagtcttcagaggagcatagaagagcatcttccaaagatggcagagccatcgtcatttgtctgcagaagcactggatcgttactcaaaacgtgttgcgaccccgagaataaacaaagggaactctgtaaaaatagagacgtgagcaatctggagagcagtggagggactgaaaacaaggcaggagggaaagtggagctgagcttgtcacagacggatgcaagtgtgaactcagaacatttcaatcagaatgaaccaaaagtcctatttaatcatttaatgggggaggctggttgtaggtcttgcccaaataattcacaaagttgtggcagaattgtgagagtgaagtgcaattctgtggactgtcaaatgccaaacatggaagccaatgtgcctgctgtattaacacactcggaactttctggtgaaagtttgttaataaaaacactataataaacgcagcattcaattcaga

SEQ ID NO: 83224 - DNA, 744 bp, Homo Sapiens
aattcatctctaggcttcaaaccaattaaaggaaattcagttttaaaagctactcaaaataggctttgtaataaaagaaacatttaaaagataagtaagcaatgtccaaaaaatgaatgcattcgtggattacgatcagaagaaaattttaatcacagtgatttgtggttcatgactgtctgcaataacttctccatttccagtttatctagcaaatcttgtagtctttaaagggcccatatgttcacttttcccggattagttacttctgttggctcttttttatgctttataacttggaattctatctttggctgttatctgtaagcaggtgactacctcaaaccacctttgctgtctcctttttttctaatactcattgttcttggtctcctgtacacatgtcctgactcagaaggagagcaataagtgcacaaagtatggcaggaagatgaagacaatgaaagcaagatagggttgaaagacaggaaaagcaagatagggttgaaagacaggaaaagcaagccttgcctttgcacacaactgctagatcattgcaactttcatctgtggtaatggcagtatccagctctgaaatacacaggggtctctacactttcttatgaataaatcctccaattctcaggctggctttcaaagctcttacaaatagggtccattgattctccttctgggtctctgttctcacttcgtccccatcattacctctgtctcaagtgcgct

SEQ ID NO: 83225 - DNA, 947 bp, Homo Sapiens
ggcggcggtggcggtggctgcggcgacggcagaggcgaagggagccggatcgccgacctgagcgggaggcggcggtggcggccatggcggcagatggagagcgttccccgctgctgtctgagcccatcgacggtggcgcgggcggcaacggtttagtggggcccggcgggagtggggctgggcccgggggaggcctgaccccctccgcaccaccgtacggagccgcatttcccccgtttcccgaggggcatccagccgtgttgcctggggaggacccacccccctattcacccttaactagcccggacagtgggagtgcccctatgatcacctgccgagtctgccaatctctcatcaacgtggaaggcaagatgcatcagcatgtagtcaaatgtggtgtctgcaatgaagccaccccaatcaagaatgcacccccagggaaaaaatatgttcgatgcccctgtaactgtctccttatctgcaaagtgacatcccaacggattgcatgccctcggccctactgcaaaagaatcatcaacctggggcctgtgcatcccggacctctgagtccagaaccccagaccatgggtgtcagggttatctgtggacattgcaagaatacttttctgtggacagagttcacagaccgcactttggcacgttgtcctcactgcaggaaagtgtcatctattggggcgcagatacccacgtaagagatgtatctgctgcttcttgcttggcttggcttttggcagtcactgccaacgggccttgcctttggcacatggaaagcatgcacgggcgatatggaggcatctatgcagcctgggcatttgtcatcctgttggctgtgctgggttgggccgggctctttaatgggcctgtttgaaggcaggcaacctgttccggacttctctgggcttgtgacccaaatgttcctggcccca

SEQ ID NO: 83226 - DNA, 475 bp, Homo Sapiens
  misc_feature (421)..(434): n is a, c, g, or t
ttgattacaaaccgaacccattgagggagccctggtgatcatcaacgagtatggctcgtgtacctgccaccagcagcccgcgagggaatgtgaggtgtgattgtcccagtggctctcaacccatgcgctaccaaatacgcctgggcagccgggacgggccggcgggcaccaggctggggtctccttggctgtgctctgatatgctccttgactgaaactttaaggggatctctcccagagacttgacattttagctttattgtgtcttaaaaacaaaagcgaattaaaacacaacaaaaaaccccaccccacaaccttcaggacagtctatcttaaatttcatatgagaactccttcctccctttgaagatctgtccatattcaggaatctgagagtgtaaaaaaggtaccaatcattgannnnnnnnnnnnnngtaaactaaaatgtttaaaataaaatagcatttacagtttt

SEQ ID NO: 83227 - DNA, 726 bp, Homo Sapiens
ggtccggaattcccgggataccgcttgctgccaaacagtgggggctgaactgacctctcccctttgggagagaaaaactgtctgggagcttgacaaaggcatgcaggagagaacaggagcagccacagccaggagggagagccttccccaagcaaacaatccagagcagctgtgcaaacaacggtgcataaatgaggcctcctggaccatgaagcgagtcctgagctgcgtcccggagcccacggtggtcatggctgccagagcgctctgcatgctggggctggtcctggccttgctgtcctccagctctgctgaggagtacgtgggcctgtctgcaaaccagtgtgccgtgccagccaaggacagggtggactgcggctacccccatgtcacccccaaggagtgcaacaaccggggctgctgctttgactccaggatccctggagtgccttggtgtttcaagcccctgcaggaagcagaatgcaccttctgaggcacctccagctgcccccggccgggggatgcgaggctcggagcacccttgcccggctgtgattgctgccaggcactgttcatctcagcttttctgtccctttgctcccggcaagcgcttctgctgaaagttcatatctggagcctgatgtcttaacgaataaaggtcccatgctccacccgaggacagttcttcgtgcccgcggactcttcccgaacgcccacaagcgctgt

SEQ ID NO: 83228 - DNA, 863 bp, Homo Sapiens
  misc_feature (790)..(817): n is a, c, g, or t
ccaccatgtcccactaatgaagcccagttctttgggaatgatgaatccctactgtgcacatacagcaatcatggatcctgcctatcgaggtgattcacaatacactttcccatttcaaaaatgacgggtattttaattagtccacatttcaggtgttaaatgtgggaaagggattagctaaacttgctcaattctgttttagctgaatgagtcataggtactgctgggctgtcctacagttccttctggctttccctccgagcagggtgggaatgagcagtgacctggtcaagggacccgggccacttgatagacctctcctcccactcttctgctagcagctcagagaagtcaaggatgttttgttgttctcatcatttagggtgcttggctgttgggttcagtgatccttacatctagccccagctagtggtgttctggtaaatcgttaaccaccaactctttgagcctcccggggtaatgaaagttacacctctagttagcatgtttatgaaatagatcccttctgcacgcgaagacctgcatgtagggcagtatggtggaaatggtcctgaatactgtggacggtccacctagaaggaacccgcccagaccaagtcttagcagtggggttcttactgaccaccttcttccctggctctcctcagtggagggaatggaaggctgtgccagctgtttcagagctttctcctctctgctcccttctctatagatgcagatgccttggctctacctgccactaatgatctcatggggtatgactttagannnnnnnnnnnnnnnnnnnnnnnnnnnngggaaaaggtttgggggcccccagggtgggtttgcgggggaaaaat

SEQ ID NO: 83229 - DNA, 324 bp, Homo Sapiens
atgtagtccctcacctgggggtagggtccctgcccagaagcggttggcacgatcatttcccaggacaatgaataactgtactatctcattactccagacactcgtgtccagcttcaggctctgcaccttggagatcccagaacccagggcccggtgctgacctgcacactgcttgcagatgaccacccccaaattgacagcagcccaatctgggcgggaggacccacagtccgcacactgccggttggcccgattagaccagatcttctcagccacctcgtagtcagacagggtctcggttactgcttcctgcagagcggccgc

SEQ ID NO: 83230 - DNA, 434 bp, Homo Sapiens
tttaatatacattctagctcctgggagctacagctattgaagacaagctacaggatggagttccagaaaccatttcaaaacttgcaaaagctgacattaagatctgggtgcttactggagacaaaaagggtaattcattgtgcagggaagcatatctgttaattcacaaatatttatagctgccgtttcctttgcccaagatgacctcctcagacttttcatcctgtacaaacactgtttctttggacggaagatgctttttctgagaaaccctcctctgtttttccagcacatccttctgcatcctttcctgatccccctcagtagcagtttcttccttataatttagctcctggccatgtcttgctgattataatcggtcttatctctccagccagacgtgggttcccgtcctgaaagggccatccctcttg

SEQ ID NO: 83231 - DNA, 1588 bp, Homo Sapiens
  misc_feature (45)..(90): n is a, c, g, or t
  misc_feature (94)..(128): n is a, c, g, or t
ggagggagaaaattgtatagactcactatagggcgctcgctcttnnnnnnnnnnnnnnnnnnnnnnnnnnnnnnnnnnnnnnnnnnnnnnccgnnnnnnnnnnnnnnnnnnnnnnnnnnnnnnnnnnncagtcgacggtaccggacatatgcccgggaattcggccattacggccgggggatttgccagctccggtgactccacaacctcgatcaattagtggcccttcagtaggagtaatggaaatgagatcacctttacttgcaggtgggtcaccaccacaaccagttgtaccagctcataaagataaaagtggcgctccaccagttagaagtatatatgatgacatttctagcccaggacttggatcaacacctttaacttcaagaagacagccaaacatttcagtaatgcagagtcctcttgttggagttacatctactcctggaacagggcaaagtatgtttagtccagcaagtatcggtcagccacgaaagacgacattatctcctgcccagttggatcctttttatactcaaggagattctttgacttcagaagatcacctcgatgactcttgggtgactgtatttgggtttcctcaagcatctgcttcctacatattactacaatttgcacagtatgggaatatcttaaaacatgtgatgtctaatacaggaaattggatgcatattcgttatcaatctaaactgcaggctcggaaagccttaagcaaagatgggaggatttttggagaatccatcatgattggtgtaaaaccatgtattgacaaaagtgttatggaaagcagtgacagatgtgctttatcatctccatctttagcctttacaccaccaatcaaaactctaggtacaccaacacaacctggaagtactcctaggatttctaccatgagacctcttgctacagcatacaaagcctctactagtgattatcaggttatttctgacagacaaacgccaaaaaaagatgaaagtcttgtatccaaagcaatggagtacatgtttggctggtagtagaacaccaagaaggaggttgctacactaaaacagagttagcagagtgctgctggttccttcggttagttatataactgttcctgcagtattggatagctatctcatacttcttttagaaagaagcctttttcattaaggatacaacctatttgtagctcgcactttaaaagatgcttgagatacattttaaagaaaactaaaaatccctgtaaataggattttgtgctttctgtaacagtgcatgcttcagcacagaaaactcagcattgattattgtaaattaaataactgaaattgtggtgagacgtcatagtcttcatgagaacgtgggggtgaatttcatgaaggggaactatagttatttctaccgacacaaatattataattagcaatttgaattatggtcttttaatttagatagtatttaatattttaattatccttgtttgtatatgtcctgtcacagagtgtcctcttggtgtattctaaaacgagcattcttttaaaaaacctaaagtttcttgataataaacattgtcaatgataaa

SEQ ID NO: 83232 - DNA, 766 bp, Homo Sapiens
  misc_feature (23)..(23): n is a, c, g, or t
  misc_feature (35)..(35): n is a, c, g, or t
  misc_feature (45)..(45): n is a, c, g, or t
cccccgtggcggtgctttcagtntaatggggaagncaaagaatancaagtaagggaaacatacagaaaccacaaattgtaacacaggctagtggaaatgaacttggtgcagtactcattggtgggcatcgagcatcttgcttagataggagatccagggaaggactcttggaggagattaggcataggaccaaagatcagaaacaggtatctggacctgactgtgatgctgggattagaaatgacaccccacacatgtgaaaacacttattcctcagaaggtagtctacagctatttgttgccaattcccaatctaaaatatgtactatagctttatcttgaacatactcagctgatcgttggaatccagacagtgttaatcctccaagtatgcaagtatctactgatctctggtgaatctcggattcttaccaacggtcctttagatctgtgctgtttcatctcccagatcagtcatgatggatgaccagtggtggaagagatagtgatgtgagctcatatgtaattactcagtctcccatacattgcttctgctttttttccactaaagaccacactttaagatcctcttgatggctgtacatccatctagggtgttgcttcaaactgctgcttatttgtccatgagtgcatccatgatattttgcccttgattccctcagcaatgaacactcagactgcttctcacttcctatcacagtgaatactgctgcacaggcaccattttgaaagactggttcccatt

SEQ ID NO: 83233 - DNA, 631 bp, Homo Sapiens
cctcacctgccgcagccttagctgagcagccgccgccactgggcgccccccgctccccacttcgccagcgcccgctcctcggctcggcccggggtagtttgtagggacgcagctctccacgtgcgcgactgcgaggctggacgctacgggctcctggaaaggagcagacaccagcatttgccacaatgctgtcatccactgactttacatttgcttcctgggagcttgtggtccgcgttgaccatcccaataaagagcagcagaaagacgtcacactgagagtatctggagaccttcacgttggaggagtgatgctcaagttagtagaacagatcaatatatcccaagactggtcagactttgctctttggtgggaacagaagcattgctggcttttgaaaacccactggaccctggacaaatatggggtccaggcagatgcaaagcttctcttcacccctcagcataaaaatgtgcgccttcgtctgccgaatttgaagatggtgaggttgcgagtcagcttctcagctgtggtttttaaagctgtcagtgatatctgcaaaatcctgaatattagaagatcagaagagctttccttgttaaagccgtctggtgactattttaagaaaaa

SEQ ID NO: 83234 - DNA, 495 bp, Homo Sapiens
ggccgctttcgccagtccgtccggccgttccgcattaggtccgggataactaggtggagtaggtgtgcggcccgccgccggacagcccgctcgctgtttctttaagcccccgcctccgtcttcacggccctctcccgttctgctggaaagctgacgtggggcaatccgttcagaccctccatggagaagtttgggatgaatttcgggggcggcccgagcaagaaggacttgctggagactatagagacccagaagaagcagcttctccagtaccaggcacggctcaaggatgtggtccgtgcctataaaagcctgctgaaggagaaagaggcattagaggccagcatcaaggtgctgtcggtatcccacgaggcagatgtgggcctcgcaggtgtccagcttccaggcctcacctttcctgactctgtggatgaccggtgctccactcacagcgaggatagcactgggaccgccactagcttggatacctgcggc

SEQ ID NO: 83235 - DNA, 837 bp, Homo Sapiens
  misc_feature (66)..(66): n is a, c, g, or t
  misc_feature (140)..(140): n is a, c, g, or t
gaatatttttgaacacccactgtgagctcagggctgtgttaggagcataggctgagggggagaccntcttgtgtgttattaatcctggcacttttccagatgattaccacatgctgagggcacctgacacagagcccggngcagagcacttgcccactagaggtttgccactgagactgccagtgaagaacaaatcaatgcaagggcactgaagcttgtcgttcttggcgaagggacaactctacacgaccagctctcgaaaggctgtcttttgaaaagcagtctcttcacctgtgggttttgattaagacacactctcctccatcctgaggatccaaattgtacatataaaggtgtccactggatgacgcaactagcagccgtggcaacttctggatcctaagggccaaggaaaacataaaccgtgatgacaacgaagatgggcgatggattcgcttccaatgacaaagcccccctcaccctagctgtcaccagattctgcctttgacaaacccttagcccactgatctggtctgggcttctggctattcctttgcattctggccttgggatctactttcaggattatttcttgtctttgaacgtgacagtgtggatgaggcaagtgagtgtagatgctgcgaccctgcgagaagcaatagctagtgaacacattagctccctacatgggacgcagtctccctctgacatgtgtctctgcccttaaccaagacagaaagggggtaaatggaggattggcttactgtctttgctggttagttttgtgaaattttaaaaatgttcaacttttgaataaactcctttaaacttcttaaa

SEQ ID NO: 83236 - DNA, 1347 bp, Homo Sapiens
ggaagaaagaaaagatttctatgaaagctttctgttttgagcgctatacattttttaacaagggagcaaataacagaaaaaacaaacatacacacacaaatgagggattatgaaatcacttacctcctgttgttccatatattctctatgtctccgagctgcctcatgcctccataactttaggcaaaccaaagcactaatgagataaactatcatggtgacaaacaggaagatcattgcagctatctgtcctccttctacccggcagaacactgcattcactggtgtattaaataacggatagtagcagaggccacctcgggttggtatcattcacattagacttatggctgcggccatatacaaaataaacaaggcaacgttaattccaaattcagttaggggccaccaattagagtccagaagaatggtccggtaatacatggacatgccaagaaccagaataataatggtggtgatccaagctaatccagcaaccacgagtacaaaaggggtcttagggccagtgtagtaatagcccccatacatactgcccaatccaccaacgcctcccatgccatacggttgtgaatatccaaacaagttgtaccactcactgtccttgtgaatgtaagctgtgacacaagcaaagacaccgccccccaaaagcagctccaccacacccagtattctcagcaggcctgcccacgacttcatgtaggagtatctcaggttatactcctccaccttctcactgtatgttcgaactgtttgtgtgtgtcggtctagagatccatagggatcccggggaaacactgcgtcagcctctttccgggaactaaaggttccttctgaccctccgtagggatctttgcaggagttgaggggcgaacggtggtttggtcttgctggagaggctggtggtgaacactccactccatcggagatgtacctgatatcagacaccggcttatcccattcggggtcctttttcttccctctgaaaaagttcttccaggagtcagggacaaagcgccttactggtttgagatctggcgctatagctggttcttctgtgtcacttgagtagaagtctgggccgaatggtggctgtaatgggagagggggtggtggcaagggatcagcgctcactgcccgctcactgtcatgaagaattgggtgggttcttatggtggtatcttgatagggcaggtcgcttgggacctcatcgtagcgcctgtcccgattcctggatcttccatcatttgacatttgtgattttcacacctgcgcagccgccaggaagagcgcgcacgctgcccaggactctgaaaccggatcccggga

SEQ ID NO: 83237 - DNA, 373 bp, Homo Sapiens
attacagggtgacaccacgctggcctgtgtggaatctaaagttttattgaagcaactgccccctgctctaagtagcgcccagactgaaagggaacatggccaggttcccagaagcccctctgcctgcctgagccactcccaacctccacgtgtaaccaacgtctcggtttctaacaggggacaaactctgtgttgaatgagactgggtggcagtggtgagggcaggcgccccttcctggtcacaggaggaaaacgcccagcagctccccatcgagcaggatgtcatctggtagcttttgagagactccctcatcaggttaaaggattttccttcttctcctagtttgctaagagtgcttgttataaaagggtt

SEQ ID NO: 83238 - DNA, 1208 bp, Homo Sapiens
  misc_feature (42)..(76): n is a, c, g, or t
aaaacgacgagcgcaccgagttatgagcgaggaagcggccgnnnnnnnnnnnnnnnnnnnnnnnnnnnnnnnnnnncagtcgacggtaccggacatatgcccgggaattcggccattacggccggggggcgccatttcgtgctggagtggagcagcctctagaacgagctggaggattctgcctaccgatacagagccttcgagtcgtccggggccgccattacaatccacctccatccgcttggaaatggccttcgtcccggcctatgactggtcccagcgggcagtacagaccccctagaagcccctggagctcccctttttcgggccccgcccaatcctcggagtctgtccaccccctctactccgccctcaagaggatttcaaagatggaggcggcggctccctaaaccacttttcgtgttcatccgcctccatccgagatcgaaacgggacctcgtcggccccgtaggggcccgacaagaagagggaatccctgcagaccaacagcgggctatattgacgacggtgtctgagatcggggaccgtcttttgaagagtcagtccctccttagttgcccgcctcagctgaggccgccgccattttcttgctgtccgccgtctgcagagcgcgccaagctgcccggagctctccgagaggccccaaagagactgctttcgtgccggccaggcagggggtttgtcgcctggaggcccaagaggaacggctccccccaacttagcgggttatgctggaccgggcggtgaggggaaccgaggccacccggactttccgcggctgagggcagcgccggttccttgcggtcaagatgctgcaaaacgtgactccccacaataagctccctggggaagggaatgcagggttgctggggctgggccaagaagcagcagcaccagggaaaaggattcgaaaaccctctctcttgtatgagggctttgagagccccacaatggcttcgcgtgcctgctttgcaacttacccctgccaaccagcagcccggaggtgtccaatcccaaaagccaggagaagttacaaacagctgccatacctacacaaggtcagtgatgaaggctctgtggaaacatcagttcccatgggcaattccggcacgcctgtggatcgctggcaaaattgggatctaccgggattatcaccaaattttaaacacgctatggacatgggacta

SEQ ID NO: 83239 - DNA, 497 bp, Homo Sapiens
  misc_feature (193)..(193): n is a, c, g, or t
  misc_feature (454)..(454): n is a, c, g, or t
  misc_feature (457)..(457): n is a, c, g, or t
  misc_feature (462)..(462): n is a, c, g, or t
agagatcttgagggcaagagcctcagagaccttcaggcaccgagcttcgtgaaggtttccaagtgcccctctctagcttgcttcccagggggaattagtggttgcttacaagtaagtttaagagggtcgtggtttttcgcaacccgggcggcgagatggcgctttggtgtaagcgaggtaaggtgggtgcacntgggaatctccgctctcggagcctccagctgactgccacgccgacttgtggccagacctgcgacaaccgccctaccacgcggcgccagcctctggaatctggcgtcgcccccacctctccagtcgaagtgggagtccctctgtgcggggcctcgccgccatacccaggccgaatgggggtggggagggaagctggcagagctcggcctcaggatccgcgcccctgtggaaagaccgcagagggaagccgtttcaccagccntcntcccntctggggtctcgggaaacacgcggtaattaccgaa

SEQ ID NO: 83240 - DNA, 622 bp, Homo Sapiens
gactggacacaacgagggacctgggtctacgataacgcgcttttgctcctcctgaagtgtctttggtccaacgttgttccagagtgtaccatggcttccagtaacactgtgttgatgcggttggtagcctccgcatattctattgctcaaaaggcaggaatgatagtcagacgtgttattgctgaaggagacctgggtattgtggagaagacctgtgcaacagacctgcagaccaaagtgctgggattgcaggtgtgagccaccgcacctggcctaaaccagatttctttagggcacaattttttctggaatctcactcttgtttttcacagtaattttaaaaacgtttctactccaattaagaatatatatgatgttattatatatgcttatgaaacagatttatgagaaaagttttttttaaataaattatttaatcctagctctttgttattcaccagctttttaaaaaagtgtttgaaaattatacattctcgactttggggattagtttattcttgtggcatcattataaggcttaattgtggaaagctaagtacttgcttctattccttccaatgagagattataacataaactattaaaattattctgctaatat

SEQ ID NO: 83241 - DNA, 916 bp, Homo Sapiens
ggggtttcccgcatgctcagtagctgaggtagggatgccatccttctcaaaagacttattgacagtgccaaagctcggtactggacacaacgagggacctgggtctacgataacgcgcttttgctcctcctgaagtgtctttggtccaacgttgttccagagtgtaccatggcttccagtaacactgtgttgatgcggttggtagcctccgcatattctattgctcaaaaggcaggaatgatagtcagacgtgttattgctgaaggagacctgggtattgtggagaagacctgtgcaacagacctgcagaccaaagctgaccgattggcacagatgagcatatgttcttcattggcccggaaattccccaaactcacaattataggggaagaggatctgccttctgaggaagtggatcaagagctgattgaagacagtcagtgggaagaaatactgaagcaaccatgcccatcgcagtacagtgctattaaagaagaagatctcgtggtctgcgttgatcctctggatggaaccaaggaatataccgaaggtcttcttgacaatgtaacagttcttaatggaattgcttatgaaagaaaacccataacaggagttattaaccagccatattacaactatgaggcaggaccagatgctgtgttggggaggacaatctggggagttttaggtttaggcgcctttgggtttcagctgaaagaagtccctgctgggaaacacattatcacaactactcgatcccatagcaacaagttgggttactggactgtgttggctgctattgaaccccgatgctgtgctgcgagttaagaggagccggaaaataagaatttttcagcttgatttgaagggaaaagccttctgccttaatgtatttttgcaagtccccggggtttgt

SEQ ID NO: 83242 - DNA, 1190 bp, Homo Sapiens
  misc_feature (857)..(958): n is a, c, g, or t
  misc_feature (964)..(1054): n is a, c, g, or t
tcacttttgagttttgtttttaaatgaaggttaaatgtgacctgtgccctcacatttaattccgtttcatggagacatcttcctgactttgttggatagctgccactagggttgcttcgatcttcagccacatgctgtccttgaagcagctatttgaagatgtgttttctgaggaaaacaggctacaactgtttattaaaaccacttgcagtgcattcgtttatcagatgctcagtgcaaagtgtaattgggtcatggtcaaaaacgcttgcaacatctaattggcgttcaagatagtcattcaaaagttcttggcccgctgaagtctgttaacagttgaaacattctacagttaaccattagcatgctagttgtcctaatggaaatttttgaagagtttttcaatatataccctacccttgccaggaagagaagtaaaatcctcaggttgtggggtatttgtttctactccagcctggcaggcaaggctaaaacctgagattatcgatctatgagacatcttgatatgtaaagcacttaatattaaaggcataaaagtgaaactgctaaatatgtatagagaggttgacgtgtgatacgtgggacagttcacatagacatcagagaatttattccagaaaggagcctcctgaatgtgatgaatacggcaaagcctttaatcacatctcagcccttagcatcggaaagcttatactgtaaataaacttgatgaatattatatgtgaggaaaactttcatgtatagcactcattgcttcagacagaaaatgaattccgtcggtatgttccaatcgtgatgaatttgagaaacattgcaagagggagctcaatcttggnnnnnnnnnnnnnnnnnnnnnnnnnnnnnnnnnnnnnnnnnnnnnnnnnnnnnnnnnnnnnnnnnnnnnnnnnnnnnnnnnnnnnnnnnnnnnnnnnnnnnnttgttnnnnnnnnnnnnnnnnnnnnnnnnnnnnnnnnnnnnnnnnnnnnnnnnnnnnnnnnnnnnnnnnnnnnnnnnnnnnnnnnnnnnnnnnnnncacggggccggctgtaaccaatacaggagctacagcaggcaacgctgaaccagcagtgagtgaggaaccagccacccaggcaaccgcggatagaacagccggacaaaaccacgcggcccactccgacatacacgaa

SEQ ID NO: 83243 - DNA, 549 bp, Homo Sapiens
cagggtatccccagggtccacgagctcaagattgaagaatatgtgcagcgggggctacagcgagtggggctagatccccagctgccactgaatctggctgcccttcaggcccacctggcccaggagaaccgtgtggtggccttcttcagcctggctctactgcttgccccactggtggagacgcttattctactggaccggctgctgtaccttcaggaacagggtttccatgctgagctcctgcccatcttcagtcctgaactctctcccagaaacctggttctggtggccaccaagatgcccctgggtcaggctctttctgttctggagactgaagacagctgatgcagcctgaggagacatctcagaccccatcatctgaaagtgcccagagagcacagtggcagagtacatctcatccagagaaacagcatcctgcatcctccagagtcctggttccttcagtttcatcccctttctctccttccatggattatgtaatacattgtaaagttttaattaattaaaaattggatatctgtttccttc

SEQ ID NO: 83244 - DNA, 1559 bp, Homo Sapiens
  misc_feature (35)..(36): n is a, c, g, or t
  misc_feature (117)..(117): n is a, c, g, or t
  misc_feature (144)..(144): n is a, c, g, or t
  misc_feature (1371)..(1430): n is a, c, g, or t
  misc_feature (1547)..(1547): n is a, c, g, or t
gaagatggcaggagctcagcatggaaaccctgtcnntgaaggtacagcagccggtccagtagaataagcgtctccaccagtggggcaagcagtagagccaggctgaagaagccaccnacacggttctcctgggccaggtgggcntgaagggcagccagattcagtggcagctggggatctagccccactcgctgtagcccccgctgcacatatctaaccacgtggtgtggggagtgacgagggctggtttggaccacctgcgggttcctcttctccctctttctcccagagcctgcagaagctcctggtcccaggcgctgggctctctcccaccagtctctgatccccttcgatgctcttcaccatcaaccccaggcccaagagccatgaagcgggagagatggccctggcctgagcccacgtctacaacctgggtgcagcctgtgaaatcactcagcttcttcaccaactctcccagcctccggatctcatgctgcttcttgggcctgacatgtttccggaatggagctgttagtcgggagctctggctggggttctccaggaattctgagggggtctgaaagccaggcatccgggtaaaggccagggcacacgccgtggacttcagggccagcagggtgagtggccacactgacctgtacctgacgacctccccttccccaggcatccccagcagcattgtggccagctgtggtggtttcagtccatccaatgcttcctgccatgagcaagggagtgtgtcccataggttgtctgtgaaaaattcgatgatgtaggcatccaagatggaacggtagagtgccaggacacgggtgaggttaacagctagctgcttcctcccctcatgagagaggcctcgggcggagatgcccggcatcccggggtccagcagggagcgcggggagcgagaaacgcagtgaacagggatccaagggtcagtactacgcgggtccaggacccggacggggctcaactctgcaggcagaacaggaagagttttgggtccagttctccgacgtctgcctttccgggatccgatgctggagtggaagatttgaggcgccccccagacgtcacagtctgcgacgtttcacatgtgagaatggtgtcagcgtcagagacacgtaggttcggggtaacagtgcagtgacgccactaaagcgtgccgctgagctcagctcacaacgaggcggtccaagttccagttcccgccccttgccgtacactcctctcctcttacggaagtgaagccggaggtgtaccgacgggctgcagttccggtttatcgcggccattcccacaccttcgcgttgtacacaccacggggctagagggaccggggagcgcatnnnnnnnnnnnnnnnnnnnnnnnnnnnnnnnnnnnnnnnnnnnnnnnnnnnnnnnnnnnncgggtcctggcctcctacctggggtcggggcggtgcgggtgtgcgcgcgccgcctctggcgcgttctacccgccctcgtgccggttcgcctcccggcctcgctcacgcgcccgtatngtctgccctgta

SEQ ID NO: 83245 - DNA, 608 bp, Homo Sapiens
  misc_feature (109)..(127): n is a, c, g, or t
gtgggcggagatatgtaaatagaaagtgcgtacagttagaacgtccggcacgtaactgatcggagcattctgggaagaagtaatttattccttttcggcagccgaatgnnnnnnnnnnnnnnnnnnntgtgcgagctaatatggcaaaacaactggaaggacgctaaataataggattgctcataccagcgcgttatgaactcaccctagcttgtaacggaatctttttcactgagtgcagaatgtcggcggtttgcctgtatcgtcaggtgggataatccttacctgttcctcctccggagggcagattagaacatgatgattggagatgcatgaaacgtgattaacgtctctgcgtaatcaggacttgcaacaccctgattgctcctgtctgattctttctgacgatcacttacatttgtgttacgctgattagcagatatccacaaacatagctatgaagttctgactgggataaccttgctgtttgtctattttgcagtcttgctattgctgtttgtctattttgcagtcttgctaaatttgtttgttcttgaaaattgtgatttggtttttgttgctttctggaatttaggcagtgaaataat

SEQ ID NO: 83246 - DNA, 512 bp, Homo Sapiens
  misc_feature (16)..(16): n is a, c, g, or t
cattaagatagtgcancttttaaaacacatcatcacaacacaaaggagctccttgcactcatctaacttctccactttataccttggcacacaacacaggaattttgattcatatttttaaaacaaaataaaagttccacaccttaggagaaaaagcgaactggctggttcttccccacaataatatataataatgcttccttctttattcagttaattataaaacatgccattctggcctcatttatctgcaaagtctcctttcacaattaaatacatcaaatacctctgtgggttttatttcatggtatcttcaaagcatcccgttctctgttttcccctgcccacacccccatcccaacccctgtccccaaataaacactgtttgcggtcagaccagatggaagtttgtatcatttcagtctagtttgcatgcaattcccctaaaaggaatcagaaacaaagaccgtgtttgctcatttggttttacttatttgtaccatgtgaaactg

SEQ ID NO: 83247 - DNA, 670 bp, Homo Sapiens
aaaattccctttaacaccttcaaggtcaaatgcctgcctttgtgaacagttaataaactgacattttcagacatttgccattcagaagggagcattgtagcctgctgtagaccattccagcaaatgtcagaatgcagggcaagatgtgtgtcgactatgttttttatgtttaagttacttacttatttcttcaggtaagtgtgtaccaaataacaatactgaaaagccctccccttgccaggccgaggaaataaagcttaagtgaaacagctcttgggggaaaaatgccactttacaaatacttttctaacaaaatagcattataatgaagtttttacttaattccattatttatatgttgacgtgaatgtaagtggttaaaaagtattcatgtgggacatctcattactttgtagctgtggctttattaaccagtgaatgctgtggcccttagcgaaatgcgttgtcttctgcgtgatgtggaattcgcgcctgtattttaaaagatggtgtggtttctcccttgtttgtattttaataaacaactgctctaattgatgtgtttagacattataaagctttacctttaaaatattttcagggtctgttctgaaatcaccccttgttaaacttctctaaccaaaatacaagtgtagaagaatgtcaggct

SEQ ID NO: 83248 - DNA, 697 bp, Homo Sapiens
atccactgagcactggacataaggaaggctgcatggggaggactcaggacagtgacatcacaggatacccctcctattaggaaaatcaaggcccagaattcactcggctcttccccaggaggaccaagccctgaatcagatgcagtgctgcctgccccactgtgccatgggccccgggctcctctgctgggcactgctttgtctcctgggagcaggctcagtggacactggagtcacccaaagtcccacacacctgatcaaaacgagaggacagcaagtgactctgagatgctctcctaagtctgggcatgacactgtgtcctggtaccaacagggccctgggtcaggggccccagtttatctttcagtattatgaggaggaagagagacagagaggcaacttccctgatcgattctcaggtcaccagttccctaactatagctctgagctgaatgtgaacgccttgttgctgggggactcggccctctatctctgtgccagcagcttggcacagcccatcagagtcactgacgttctgtatataaacttcctgccttagctttgccttgagagctgcaggccccacccagatttcactccttcaagggaagcttttagttgtttggaaggcatgtcttgtgtcctactgagggcagagctctcccaaccaataaagcccaagtttcctgtgtaaaa

SEQ ID NO: 83249 - DNA, 833 bp, Homo Sapiens
  misc_feature (81)..(115): n is a, c, g, or t
aaacgtatctacctcatatggcgcatcctcttcattcgaacgaccgagcgcagcgagcctattgagcgaggaagcggccgnnnnnnnnnnnnnnnnnnnnnnnnnnnnnnnnnnncagtcgacggtaccggacatatgcccgggaattcggccattacggccgggggatcacctaaactgttttttgggccttagacctgataaatgagaagctatccaggagaaataagtcaatttgttgtttgtgcaacatgcattggacatactttgtgtaaatttcactgagttggctagctagcaagttgctgggtagggatttgaactatgaagtgcctcattccaagagccatcatatactttgtaaagtttccaggcttcctgctgccatagagaggcttgcaagtacatgctagttctaagcattcatatgctagaagttatcaacaccctgaattcccttgtattttattgtaatctcatttgttttatcagcagaggaagctccgtttagaaatagctccttggtcacatgctggacaaacatggaacagcctatggaacagaacaatcatatctctatataatgtgcattggtttctttgacttgcctggtgtcgtgaggaggggtcctccttcagattttcatccaggtccacgccaactctgttaaacaaaaccaaaaactggtcaatcccctgctgcagaaggaatgagacagtcttgtgtgtcagatgacctaagccaaacacaatgtgaatctgagaacagatcggcagaaaactatcctacgtcttctggaatcaaagaacctcagattaatcccaaatcagaac

SEQ ID NO: 83250 - DNA, 831 bp, Homo Sapiens
tccatatccattcattaaaaaaatgagatataaagcaacaactgggctgacctctatagatctgccagtaaagaaggctttctttcattatcagggtgaaggtctttcctgattcttccaagctttgaggtgactcagagctaagaatgaaataggagaccaagttagaattcatgatactggtttatggagaggcagtcatacctgttcagagaaccaggaagactcaatatctatctcagaggaaatatggttacccaggaaagaaatggtctgctagagtgataagactcagaacaggaagcctgcatgtgactgagcaagtcacctacataaccctgcctgtactaaggtgtacacctgtctattgtaagtttgcctaggctgttggtgtacagagaccagaggagagagacacactaggactaacaatgtcctaacaaaatggtacttagtttgttggtctttaggagaaagcattagtaatgaaagaagaaagaattttcacttggttggacattggggctgcttaagaaagttgacatttgtcgtggaatgactttggaaagacttctaaaagaatctttttcaaatccctgaaaatcaggatagcacattttgctactgactgtgacagtgttttattcttttgagagaaatgacatagttttccctttatttcccaaattcctttcatgttcttaactgctacccagaaattgagcttcagaagattgaggatagcctttgattggtatttaaaataatttctaagctgtgaagcttatagcatttttaaagtatggctattaaaaacactaagttgataaa

SEQ ID NO: 83251 - DNA, 759 bp, Homo Sapiens
cgtcacggtactcgtttccagacagaagtcatgaggaacaagagggaaggtgctttcccgtgtgcagcgcttggggagactcacacagacagaggatctggcatgacagggaaaggaggaaatggcttctgttaatctctccttcagcttctcccgcccttcccatgcactcttcctgtttccctttccagttctcacggtgactcaaggaacaacgtgtgaaatgaaagacctcaggtgctgtattggctcttgacagctcttcagaagaaaatacctcctgcctgttctgttcagtcctggtgcaggtggtcctggacaacactttgaaaaatgctggggcagaaacaagccagcaagcatatgggattcatctgctgtgagtgataatttatctagtttctaaaaatagtgttataggctggactgtgtccccttcctgtgccccgccgccatgcatatatggacgcctagtacctcagaatgtgactgtatttggaaacagggcctttgaagaagtaattaagttaaaatgaggtcattagggtgggcagtaatacagtataactggtgtccttataagaagagattaggacacagatgcacacagagggaagaccatatgaacacagagggagaagacagccacctgcaagccacagagagagcccttcaaagaaaccaaccctgcagacaatttgatctcaggtttctggcctccagaattgtgagaaaataaatttctgttgtttaagtcaa

SEQ ID NO: 83252 - DNA, 680 bp, Homo Sapiens
  misc_feature (153)..(214): n is a, c, g, or t
caaggtgtttaacaaggtagttattaaaaggtgtttaacaaggtagttattaatacatgtgttgtgtatataattaccttgttaaacaccttttaatagcacaaggtttttatatttgcaagctgttgatatctttctaaaactgtttaggtnnnnnnnnnnnnnnnnnnnnnnnnnnnnnnnnnnnnnnnnnnnnnnnnnnnnnnnnnnnnnnatggtaccaaaaatacatttcttaaggttaaaagcatgcacttccatgcatacttgcttttggggagagtggggagaagacattctaataatcagtttgtgaaatagcttctgttggaaaccttttgaggggaataaggaacggtcatctaaaatgagagattctggattttaatgcagttcaaagttgagctgtatttttgttgttgatttatctggattttttttaaagccttctaaaacccagtgaattcaataccttaattagtacatactatcttatgtaatgcataaagcaatgccagtcactgagaacatttaaatatatttatattcctggagatacacattctcatttttgttggtttattataaattattcttctagatgcatcttttataactaggatttcattttgtgtgtatagcttatgtaataaattttaaaggtgaaaactctcttaaaa

SEQ ID NO: 83253 - DNA, 732 bp, Homo Sapiens
  misc_feature (25)..(25): n is a, c, g, or t
ccaggtcagcgtttctcgcagcacncatccccactttttttgtacccctttttgcacactgtcagcaaaacacgtccctttgagtatctccggctcaccagccttggagttattggggccctggtgaaaacagatgaccaagaagtaatcaactttttattaacaacagaaattatccctttatgtttgcgaattatggaatctggaagtgaactttctaaaacagttgccacattcatcctccagaagatcttgttagatgacactggtttggcttatatatgtcagacgtatgagcgtttctcccatgttgccatgatcttgggtaagatggtcctgcagctatccaaagagccttctgcccgtctgctgaagcatgtagtgagatgttaccttcgactttcaggataaccccaggttttcagatttgactttctgctggtcatcttttcaaagaaaatgaaacgtttaaaagttcatctgataatactgctaccatagttttgttttcactgctcatctcttattaaggtttttaaccataaaactgaagcaatttctgtaaagacacaaattgataacttagtatagaattaaaattcattaagttatcataagtttgatgatatccttgttaatgtactgatttttgaattattttatttgccataatccatatatttctaacatgagtattttgacagtatttaataaatcagaaagctgtttgaa

SEQ ID NO: 83254 - DNA, 1173 bp, Homo Sapiens
  misc_feature (75)..(109): n is a, c, g, or t
aagaatgtaatcatataggcgctactcggcgcacgaacgacgagcgcagcgagtagtgagcgaggaagcggccgnnnnnnnnnnnnnnnnnnnnnnnnnnnnnnnnnnncagtcgacggtaccggacatatgcccgggaattcggccattacggccgggggagccggagtcggatggcggctacggcggctcattattttccgctgcaggggtgctgaaggggggacgcgggtcggacgcgtccggctgtggaagagagcggcggccgctcacaacatgcacagcctggcgacggctgcgcctgtgcctactacactggcacaagtggatagagaaaagatctatcagtggatcaatgagctgtccagtcctgagactagggaaaatgctttgctggagctaagtaagaagcgagaatctgttcctgaccttgcacccatgctgtggcattcatttggtactattgcagcacttttacaggaaattgtaaatatttatccatctatcaacccacccaccttgacagcacaccagtctaacagagtttgcaatgctctggcattactgcaatgtgtagcatcacatccagaaaccaggtcagcgtttctcgcagcacacatcccactttttttgtacccctttttgcacactgtcagcaaaacacgtccctttgagtatctccggctcaccagccttggagttattggggccctggtgaaaacagatgaacaagaagtaatcaactttttattaacaacagaaattatccctttatgtttgcgaattatggaatctggaagtgaactttctaaaacagttgccacattcatcctccagaagatcttgttagatgacactggtttggcttatatatgtcagacgtatgagcgtttctcccatgttgccatgatcttgggtaagatggtcctgcagctatccaaagagccttctgcccgtctgctgaagcatgtagtgagatgttaccttcgactttcagataaccccagggcacgtgaagcactcagacagtgcctccctgaccagctgaaagacacaaccttcgccccaggggctaaaagatgacaccccccacgaaaaccctgggcttgcacaactgggggaagaaacctgccagaagggccaaggtcacccaattccccgggggtattcccc

SEQ ID NO: 83255 - DNA, 2182 bp, Homo Sapiens
  misc_feature (144)..(144): n is a, c, g, or t
  misc_feature (945)..(945): n is a, c, g, or t
  misc_feature (1845)..(1854): n is a, c, g, or t
cccaaccatcttggggtggactccctgccagcccaactgttgtattttcagttcttccagtgtgaatcagttaatattctcgggaacgaggcgagaggttgatcctatgaggaaatcaaccacagtgaaaaggcttgggccgcnttttgttttcacctccttttgttgaacaaatttgatttcccggagtcagtcattttactgtcaagacatttcttcggcattctgcaacagtttccaacatggccagatccatcagaaactgaagccgtggagaacgctctcggggcctttgccacttcttggagtagaagccgacagagagctgtttggaaacttctccttcacacaccagttgaagactaggctttggaggttttcaaagcagacggtgcttggatgggcagggagaagtaacattctgcaaatcgccgtcagaggtcctgaggacacagacctacctggcttgcattccccttgctgaatggcgtgtgctgcagctgcccactgagggctcttttccctgggattctggacttcagagtaggacagcaggctgggaagatgctgagttccatcaagtgcgtgttggtgggcgactctgctgtggggaaaacctctctgttggtgcgcttcacctccgagaccttcccggaggcctacaagcccacagtgtacgagaacacaggggtggacgtcttcatggatggcatccagatcagcctgggcctctgggacacagccggcaatgacgccttcagaagcatccggcccctgtcctaccagcaggcagacgtggtgctgatgtgctactctgtggccaaccataactcattcctgaacttgaagaacaagtggattggtgaaattaggagcaacttgccctgtacccctgtgctggtggtggccacccagactgaccagcgggagatggggccccacagnctccctgcgtcaatgccatggaagggaagaaactggcccaggatgtcagagccaagggtacctggagtgctcagcccttagcaatcggggagtacagcaggtgtttgagtgcgccgtccgaactgccgtcaaccaggccaggagacgaaacagaaggaggctcttctccatcaatgagtgcaagatcttctaaaccccaagagactttcacacaacacttatgtatgcaccccaaagactaatggggagagggagggccgggaagccaggaaagcttggtgttttctctgggtacaccccaagcagcgtctccttttggatacagttattgatgaggcttggccactggatgttttcactaactacactctacaagtgaactccttgcccaggccagttagaaaatcccttggggaactgtgatgaatattccatctttgattaaaaaagtgaaatagtctccataattttggacgatgaagtgagtttttcaaagaattccatatttaaagacacattttatttaactaataacaaaatgtattgcttttgtatatatttagttctccacacttggaaaatcttttcctacatcctcgaaaaacataaactcctctgggagtgacaaggctttgtacgaagctctgccaacacgtttcggagggttacttcattttcccccccagcaacaaaggcctggttgaaaccaatttgccctgctggaattctaaatgggggaaatcaaacttttaagattggacccacccggaagctttttgcaatttcgtgtttcccaccttaccctgcgtacttccccagtttggataattaaaccccccgtgttccaaaacaacacccccaccccccgtcctcgttcccgcccctaaaccgccccttttnnnnnnnnnnttaccctcgttggggggcaccgattacgtctgctctacgcgttatcgcccccccctaccgtgtttcgctagagggcccccggtgcttcgttcgggtcgcgccccctggacccccgcgaaaaaagatattttttaaagaacaccctttttgtcctcggctactcgagtgtgccacccgccgccactttgttttgaacaccccccccgcggacgaacctcgcactatccctagagaaacgactatgcggcggcgtgtaacccaaaccgcgccgccgcgcggcttctcccacccgcgccactataccaggcgccgtcgcccttgtcgcgcc

SEQ ID NO: 83256 - DNA, 469 bp, Homo Sapiens
ttttggttcctctaattcaccatactggtgcatgcctcccacatttgcccttggtcttctctctttctagaatactctgcactcaactttcctcatggctggctccttgtcatcattcaggtccaccttccccggtccctcagagacacattctctgaccagcttactattttatttcctcatagcacaaaattatctatctgttcatgtatttgttttcttgtttattttcttcttttccctctttagtatgtaggtcccatgagattaaggcaagggttggcagattatagcctgcagggcgaatctggcctgccacctgttttgtatggcccacaagctaagaatggtttttgccttattaaatggtttttaaaaaatcaaaaggagaataatattttgtagcatgtgaaaattatataaaattcaaattttggtgtctgttaataaagttttattggaacacaaa

SEQ ID NO: 83257 - DNA, 1200 bp, Homo Sapiens
  misc_feature (99)..(156): n is a, c, g, or t
ggcctgggtggcgaattcggcacgaggcaagaagaaattggtccacgagggcccactgacgtggcgggtgactaaggacaaggcagtggaggtgcatgnnnnnnnnnnnnnnnnnnnnnnnnnnnnnnnnnnnnnnnnnnnnnnnnnnnnnnnnnncaagtcccatagccggacactgacgcccacgcccgatggcaagaccatgctgcggcccgtgctgcggctcacctccgccatgacccgcgaggtggccaccgatcacaaagccttctacgtcctttttacctgggaccaggaggcccagatatacgagctggtggcacagactgtgtcggagcggaaaaactggtgtgctctcatcactgagactgccggatccctgaaagtccctgcccctgcctctcgccctaagccccggcccagcccgagcagcacccgagaacccctcctcagcagctctgagaacggcaatggtggccgagagacgtctccagctgatgcccggaccgagagaatcctcagtgacctcctgcccttctgcagaccaggccccgagggccagctcgctgccacggcccttcggaaagtgctgtccctgaagcagcttctgtttccggcggaggaagacaatggggcggggcctcctcgagatggggatggggtcccagggggcggccccctgagcccagcacggacccaggaaatccaggagaacctgctcagcttggaggagaccatgaagcagctggaggagttggaggaggaattttgccgcctgagacccctcctgtctcagcttggggggaactctgtcccccagcctggctgcacttgaggttcccgcccaggaaggccttttgcaagaaggagaggaatgggggagaggacgtgagggaccacccccacccacacagctgccgcagcatctcacaccccgagggcctgaggagagggagctgtgggccacgcctgggaggggcccagctggggttactggccccgcatgagcctcggccatctctccctcctgccctctgcttgggggactcagggctccattctggagggcaccacggtgacccgggccatctcagtattgcctgtggggggccacccctccacccccacccccaagtgccttcgctctgtttttataccctgaattggaggtttattttttaatatatattatctaagaag

SEQ ID NO: 83258 - DNA, 1256 bp, Homo Sapiens
cgtgggccgcctctgtcaccagcagctcgctgatgacctcctgccgcttcacctggctcttgggcaggctgtgcagggtgtctggggagacgagttcccgccagccgagaggctcttctggttcaagctccagtcccgaccgccccggctccccctcatctccaggctcggggctctcggtttcggccccctcgtcggtactctctgggggcgccaaggactccaggctcattgggccctgcggggatgagtcccccagctccaggggggcgtcagcacctggttcccggtctgggctgtccagggacagagggtgcagagagactccaggggtgtcctgcccaggagccccgatattccggtcccgagagggcatccccacgcctcccttccggtctgtagcacctggcttctcggcatcaacctctgctttgaggtgtcgaaaatctggaacctggggctctccccggttccagcgggcggcatccaggatgctgctcagccccttcttggtcttggcaggctcgtccgaccgccggttccccatcacctttttccggaagaagttcctccccgacttcttgtctccactcttggtccgcaccccaaggtggcgcatgtacaggccaatggcgttgaccacggcagcactcttttcttcgtcggtagagatggtatgttgcatctcctccaggtgcatgagcagccgctccgccacgtgccgctcccgggcctcgtagctggctcggtcccgcccaacccaagcctccagctgggccagctcctgctcccagggcgtcatgcccatgagccgcttggaacggaagtcctccagctgccggcccacggctacctgctggctttgcaccacctcctgcacgaaccgccgctggacatcctcggagatgaggtcagccctagtgcggtcaagttcaaaggcgacgttgggagggaccggcacccggagaaccgctgtcttctccaggaagctgtggtagaagtccaggaaggccttcttggcctccttggggcccagtgagcccagcatgtcggcatgcagacagcaaagcaggggtcctggctcaaactgcagggccacgtgctgcaggagggccatgaggtgggctgggcgccgcttcacctgctccaggctctggaactggctgttttgctcttctgagtttgtctccagctcgttctcaaaatcccctcgtgccgaattcggcgcgccgtcgacttcatactcttccgcccct

SEQ ID NO: 83259 - DNA, 781 bp, Homo Sapiens
cgggacccaggcccgggatcgccgagcccgacctcgggcgccccgccggtcacctccgcgcggacaccagccctgcagagcccagtgagatggaagacttcgcccgaggggcggcctccccaggcccctcccggcctggcctggttcccgtcagcatcatcggggctgaggatgaggattttgagaacgagctggagacaaactcagaagagcaaaacagccagttccagagcctggagcaggtgaagcggcgcccagcccacctcatggccctcctgcagcacgtggccctgcagtttgagccaggacccctgctttgctgtctgcatgccgacatgctgggctcactgggccccaaggaggccaagaaggccttcctggacttctaccacagcttcctggagaagacagcggttctccgggtgccggtccctcccaacgtcgcctttgaacttgaccgcactagggctgacctcatctccgaggatgtccagcggcggttcgtgcaggaggtggtgcaaagccagcaggtagccgtgggccggcagctgggaggacttccgttccaagcggctcatgggcatgacgccctgggagcaggagctggcccagctggaggcttgggttgggcgggaccgagccagctacgaggcccgggagcggcacgtggcggagcggctgctcatgcacctggcgggagatgcaaaataccatctctaacggacgaagaaagagtgctgccggggtcaacggcattggcctgtacatgcggcaaccccga

SEQ ID NO: 83260 - DNA, 1317 bp, Homo Sapiens
  misc_feature (1187)..(1187): n is a, c, g, or t
tagtctagagatcccgtggagcaggacactgaccggggttgaacgctctaagaggctgaaggctgcttcttgggatggcccaagctggggccctaacaaggcctctgtccacagccccgagcctggagatgagggggagccggggcggtcgggactggagcttgaaccagaagagcctcccggctggcgggaactcgtccccccagacaccctgcacagcctgcccaagagccaggtgaagcggcaggaggtcatcagcgagctgctggtgacagaggcggcccacgtgcgcatgctgcgggtgctgcacgacctcttcttccagcccatggcagaatgcctgttcttccccttggaggagctgcagaacatcttccccagcctggacgagctcatcgaggtgcattccctgttcctcgatcgcctgatgaagcggaggcaggagagtggctacctcatcgaggagatcggagacgtgctgctggcccggtttgatggtgctgagggctcctggttccagaaaatctcctcccgcttctgcagccgccagtcatttgccttagagcagctcaaagccaagcaacgcaaggaccctcggttctgtgccttcgtgcaggaagctgagagccgcccgcggtgccgccgcctgcagctgaaggacatgatccccacggagatgcagcggctgaccaagtaccccctgctcctgcagagcatcgggcagaacacagaagagcccacagaacgggagaaagtggagctggcagccgagtgctgccgggaaattctacaccacgtcaaccaagccgtgcgtgacatggaggacctgctgaggctcaaggactatcagcggcgcctggacttgtcccaccttcggcagagcagcgaccctatgctgagcgagttcaagaacctggacatcaccaagaagaaattggtccacgagggcccactgacgtggcgggtgactaaggacaaggcagtggaggtgcatgtgctgctgctggacgacctgctgctgctgctccagcgccaggacgagcgactgctgctcaagtcccatagccggacactgacgcccacgcccgatggcaagaccatgctgcggcccgtgctgcggctcacctccgccatgacccgcgaggtggccaccgatcacaaagccttctacgtcctttttacctggngaccaggaggcccagatatacgagctggtggcacagactgtgtcggagcgggaaaaactggtgtgctctcatcactgaaactgccgggatccctgaaagtccctgcccctgccttttcgccctaagcccc

SEQ ID NO: 83261 - DNA, 417 bp, Homo Sapiens
  misc_feature (94)..(94): n is a, c, g, or t
atcatcaatggtatatacatcaaacaagctagagagtcacagaaggtctcccatgtgtaagacagtgcgtggaaaggagggagcgtgggtctcntggcttacgcagttgtgaaggttgtgaggtctccttgaagtgttgtgagcttctccactctttgtgttgcttgttgtgcaatgttttcaagttgcatgcttgtcaacatggggactgacctggcttccacgtcaccatcgctacagagcctggctgaacacgcgtcatctgccaaaagtttcaggccagaatctaattagggctttgctcgtaagcaaaactgtttacatgaaaatggtatacaacttcttcgatatttatgtggttcttgtgtttttatatcccgcgctattgtgtcttaattaaaagttttatcaactggc

SEQ ID NO: 83262 - DNA, 425 bp, Homo Sapiens
  misc_feature (57)..(57): n is a, c, g, or t
  misc_feature (76)..(76): n is a, c, g, or t
  misc_feature (235)..(244): n is a, c, g, or t
ttttgttttctaacaaaagcagttcttagttcaggaagaaaagactaatctggcttntatgtcaatttgtcctccnatagaaatgaaagcctcctcttgcttctttcattattagcttcacaccaatgactgtgatgcattagaatttggacagagtaagtcaagcctcacttccgaattcaaatataatgtctatcttcaaattgagtgtgctgtgaaattgttctgtctttgnnnnnnnnnngtaagattattttgtgtgccactttgggtaaagtttcaagaatacttagactgtccaaattgtattatcaccatcattgaacttagtgctcaaagaaagcattgtgaggtatttttctaaactttagactctatagagaaatataggattgttctacagaagaaaagcaagactcctaatt

SEQ ID NO: 83263 - DNA, 679 bp, Homo Sapiens
  misc_feature (147)..(147): n is a, c, g, or t
  misc_feature (316)..(316): n is a, c, g, or t
aaaatttatatgtcccattgcagtttaagtgaaatgatctacaataaaaacctaactgccctggtatttttagagccctttttactatgaaataaacactcagaaacctggagaattgcagtggttaagtctgtgagtgggaagganggctgctcattcacagaccctcccagcgcccgttgtttacatagcctattccgtgagcaggatgctgacagaacacaattcacagaatttccacacacaggtccaaccataacaaagtctgcagcttttacttttgcttacagaacctcttgcttgctcgctcattagnttccaggggggggaaatagagtaggcttcccaaaaacccaaaccaaaaggctttagaaaataagcctgaatgaaaccatggcattaaaccgtatctataagaatgtatacagaaatatgtagatacacagacctgggaaatgtgtgctttactaaaatacattcactaggagcagatcatgcatttgataaatattctgccaggcttaaataatcatccctttgaaaacaccctcatctccctggcttgcccccttttctaaagtccagtggtacttgctgtgtaaaaccttggcccttgtgaatccatgctgcagcttttcttcctggtgcccacacagctgaacactgcctggagaatatc

SEQ ID NO: 83264 - DNA, 590 bp, Homo Sapiens
ttacaaaaataacagggtttgcacagctctattaattttttaaaattacacaggcaaggtttatgcttcagtataaccatttttactttggatttaagtgggaattttaggcctaaaaataagattaccaagcagaggccatctagccacacagacacaagacatcttgagctccatgaaactagaaatgtggtgatgtcatcctcacacgggggggctacacatccccatcgattattttaactaaaatacaaaagcaaaatagtgtgttaaaataatcctctactcaatgcattagcacatataccaaattatactatctgcatgacagtctctaggtaccaagactgtatttttgcaagtgctattctctacttcattaaatacagtacccagccagcaaccacaaaaagagaacgcatgctgtacagcaagagaaggggagggagacgattttcagggccataacttccatggcaaccaaaagaaaaataagtaagacaaatctcacatgacagatataaaactaatttgcagtgacatttgatatatagttttatcagaagtaatacatttaggttacagttaca

SEQ ID NO: 83265 - DNA, 161 bp, Homo Sapiens
tgacaaccaacgcccagcggaaccctacagtctttaattcatatttcctcatcactaagaagggctgggatagttcccactctatttgcttattagttgtattaattcttttttataaaatgtggatattttgcctgtttgtttgggagttaatgcttttt

SEQ ID NO: 83266 - DNA, 722 bp, Homo Sapiens
gggacctggatagggttctccctcgcaccagaagtcatcggcctgtggggtctccaggagccacacctctcgaggcaggtcacaggccgagctggaggcctccttgggcctgaccggctccagcacccggtaatagtggcagtcccggccatcgtccgggtcgtagggcggggccaggatgtccaggaaggcggcaggcccttccacggcgtcgatctggtgcaggttgtcccggtgcggtgtgaggatgcaggggccgctggcctcggtgtactcggcccgcgaacgcagcacgcccggccgcacggcttctcgctcccggggctgcagcggcggctcgaactgctgctcgggcggcaaggcccgcggccgttgcccgccgcccgcgtctagcttgtccatgcagctgatgcgcacggtgccgtacagcaccttgagcatgccgtgcatgcccgggtggtcgtgcagcgggatggacgtgccgctcttgagcaggaacacgcccaggctgaagccgtccgtctcgtagatgtgcatgtaggtgactggcggcaggttgggcggcagcggctgcagtgtggccttgcgcggggcgatgttcaagtcctcggcgcggagctgggtcaggaggctcttcagcttgctcaggttctcggggaagcccggctgcatcggcgcctccgggccagaagccgcgtcgcgatcggaagcgccgcggccgc

SEQ ID NO: 83267 - DNA, 831 bp, Homo Sapiens
  misc_feature (116)..(116): n is a, c, g, or t
  misc_feature (123)..(123): n is a, c, g, or t
atgggaagctgtttgatgagctcacagcctcctacaagctggaaaagcagcaggagcagcagaaggcccaggagcgtcaggagttatggcaaggtctggaggagctgcggctacgngcttacnaggggacccagggggccaaggaggccccctcaagcggcttacaccccaggtggccgccagtgggggtcagagctagacagcacctcagaaggggaaaagctaaacccagagctgtcagtccctctatcccttctcctgtccaggggcccagagagaaacacacctacccctggccttgccagagtggcttctgaggactccctgcccagcccagctttcactggggggagacgaggagaggcaatggtggtcttggcaacagaatgctcagcccctcgtggcaggacttgacaagggcaagcttgaccaggaagctgccatcagggatcttcccctgccccgcaaagctaggctccagctgcaggcgggctcccaccctctgctcctggccttgggcaagggcactcagcgcctcgcctgcccctgccttggccaatgcgaggtccttccttatccccaccatggggtccatggtctatttattctcgcccagctcaccctctacacagacactgtcctgggtgcacactcctcccttccctcgctgtgtacttccttgtcccctttttatttattgggcagggggagggggagggcacaggcaagaagagattcacagtgtcctggggtaagggggggttcacagtaatcatggtctactcctctttccgtggctgggggtagacttaataaagagagaaattcaaa

SEQ ID NO: 83268 - DNA, 649 bp, Homo Sapiens
cagtcgacggtaccggacatatgcccgggaattcggccattacggccgggggctagatcaaggtgttggcagggttggtttcttctgaggcttcttttcttgccttgtagatggctgctttgtcactgtgtcttaatatggccgttgccctgtgttttctgtgtcctcatctcttcttctaaggacaccagtcatattggattaacgttcatcttaaagaccccactttaacttaggtaacttttcagaggtcctatctccaaatacagtcacattctgagctactggggcttaggacttcaacatctgaatttctagggggacacaattatagcattttctttctagtaaactttatgtttttcttttgatttatctacatctcacacaggtaaggttccatgataacaaatattgtagtgaaaatttctgtgtgacataaaacttcctatagtcaagtcaggagtcaattaattttaatctttgattaaaagaaattcatttatttaaaaacagaacttgagaggtagttattgaaataacattcggcaatatttgaaagataccactattacttaaaaacctatataaacattctataacctttatgtcctattaaaaaaaacactatcagtgaacaaggtgctgt

SEQ ID NO: 83269 - DNA, 508 bp, Homo Sapiens
tgcggccgcggaagggccccaagacccgggagaaccagcaggacgtgcatttcatgaagcgctaccccaaggggcagccggagcttcagaagcccttcaagtacacgacggtgaccaagaggtcccgtcggatccggcccacacaccctgcctaggccaccccgccgcggcccctcaggtcgccctggccacactcacactcccagaaaactgcatcagaggaatatttttacatgaaaaataaggaagaagctctatttttgtacattgtgtttaaaagaagacaaaaactgaaccaaaactcttggggggaggggtgataaggattttattgttgacttgaaacccccgatgacaaaagactcacgcaaagggactgtagtcaacccacaggtgcttgtctctctctaggaacagacaactctaaactcgtccccagaggaggacttgaatgaggaaaccaacactttgagaaaccaaagtcctttttcccaaaggttcttaaagg

SEQ ID NO: 83270 - DNA, 156 bp, Homo Sapiens
cgtcgatgtgagtgaagagatgtcactgtctgtggtcttggagaactagtctcgtagctgaggggtggggtccctctgtctggggcactggcacccacagcaggactccgccagtctgatgccaggactgaataaagtgtatttgccccgaaaaag

SEQ ID NO: 83271 - DNA, 462 bp, Homo Sapiens
  misc_feature (257)..(317): n is a, c, g, or t
  misc_feature (437)..(437): n is a, c, g, or t
  misc_feature (444)..(444): n is a, c, g, or t
aaactgaggcactttggtgtaggggtttgggactgaggcgtggagagcagatgtgatggcaggaagactctcgcttttaaacatctggtttgggagagaccatcgacttggccagtgagactgagaatggattccgagtagtgatgggccgtttgcacctcggtttttccacgtgagaaatggggagaacgctgctgttaggaggaagttgtgtccagttcagggtgccctcgggagccctgtccctgttgctgtgnnnnnnnnnnnnnnnnnnnnnnnnnnnnnnnnnnnnnnnnnnnnnnnnnnnnnnnnnnnnnttgccctcactacctgtatctcaccggcgtgtgttcacctcccgggtggctcacacatctcattcacacacacaaattcaggaacaaacggtccagagtctccggaccctgcccaggtcntgcaggntctgcccaacgttccgtg

SEQ ID NO: 83272 - DNA, 245 bp, Homo Sapiens
tgcggccgccccacaccccccttgccctcactacctgtatctcaccggcgtgtgttcaccctcccgggtggctcacacactctcattcacacacacaaatctcaggaacaaacggtcccagagtcctccggacccctgcccagggtctctgcaggtctctgccccacgcgttcccgtcgctgacaaagccaccagctgcctcctttaagcttggtgctccggctctgggcctttcttgcgctcta

SEQ ID NO: 83273 - DNA, 1016 bp, Homo Sapiens
  misc_feature (272)..(272): n is a, c, g, or t
  misc_feature (799)..(823): n is a, c, g, or t
atctctccatgaagtcagtgccctggctcaaggctggtgaagtcagtcccccaatcttccaggaagatgcagccctagacctgtcagtggcagcccaccggaaatccgagcctccccctgagacactgtatgacagtggtgcatcagtggacagctcaggtcacacagtgatggagaaacttcccagtggcatggaaatttcttttgcccctgccacgtcccatgaggccccagccatgatggatagtcacatcagcagcagtgatgcgtanccgagatgctcagccagcccaaccaccccagcggcgaagtcaaggctgaaaataacattgagatggtgggcgagtcccaggcggccaaggtcattgtctctgtcgaagatgctgtgcctaccatattctgtggcaagatcaaaggcctctcaggggtgtccaccaaaaacttctccttcaaaagagaagactccgtgcttcagggctatgacatcaacagccaaggggaagagtccatgggaaatgcagagccccttaggaaacccatcaaaaaccggagcataaagttaaagaaagtgaactcccaggaaatacacatgctcccaatcaaaaaacaacggctggccaccttttttccaagaaagtaaataacggctttttaaaatttgtatgattataatatggggaaaggtgcattggttttataaaaaggcatttaaaacaaattatctttgttaattattttggggagtagttgggaaatggaaaggtgaattggctctagaggccctgtatgctagtatcannnnnnnnnnnnnnnnnnnnnnnnncacaaatgagtaaataagagcaacctatttttcaagcagattgcacattttttgcagctttaatggaatattgggtgaattagaggggtaaaaaaagctattttcattgccacaaagtgctttgatgatgtaatacctaataaagggtaggatgaatatttcacaataaatgtttgtttgcactaaggggaaa

SEQ ID NO: 83274 - DNA, 405 bp, Homo Sapiens
  misc_feature (60)..(155): n is a, c, g, or t
ggccagcaccaaaaatgccagtgtgtatgggtttattcactcagtaattccctttagcannnnnnnnnnnnnnnnnnnnnnnnnnnnnnnnnnnnnnnnnnnnnnnnnnnnnnnnnnnnnnnnnnnnnnnnnnnnnnnnnnnnnnnnnnnnnnnnaatcaaagacaaacacaggatatggaataaacccagaattatctcattgtaaaatgtgttaagtaccacgaggagaaatatcagggcgatctgacacagctaatgatttgaagaagggtgtgacctgccaccattttaaatctagttatttcactcctgagctgtgtgtgtggaaaacttgtagtaaaaaatagaatgtctatatttataaaaagtttatgaaaagatatcaatttatttacattttgaa

SEQ ID NO: 83275 - DNA, 1124 bp, Homo Sapiens
ggagggaagagccccagtctgctgctgaacaggatgttgttgttcaggaaacattcaacaaaaactttgtttgcaacgtctgtgaatcaccttttctttccattaaagacctaaccaaacatttatctattcatgctgaagaatggcccttcaaatgtgaattttgtgtgcagctttttaaggataaaacggacttgtcagaacatcgctttttgcttcatggagttgggaatatctttgtgtgttctgtttgtaaaaaagaatttgcttttttgtgcaatttgcagcagcaccagcgagatctccacccagataaggtgtgcacacatcacgagtttgaaagcgggactctgaggccccagaactttacagatcccagcaaggcccatgtagagcatatgcagagcttgccagaagatcctttagaaacttctaaagaagaagaggagttaaatgattcctctgaagagctttacacgactataaaaataatggcttctggaataaagacaaaagatccagatgttcgattgggcctcaatcagcattacccaagctttaaaccacctccatttcagtaccatcaccgtaaccccatggggattggtgtgacagccacaaatttcactacacacaatattccacagactttcactaccgccattcgctgcacaaagtgtggaaaaggtgtcgacaatatgccggagttgcacaaacatatcctggcttgtgcttctgcaagtgacaagaagaggtacacgcctaagaaaaacccagtaccattaaaacaaactgtgcaacccaaaaatggcgtggtggttttagataactctgggaaaaatgccttccgacgaatgggacagcccaaaaggcttaactttagtgttgagctcagcaaaatgtcgtcgaataagctcaaattaaatgcattgaagaaaaaaatcagctagtacagaaagcaattcttcagaaaaacaaatctgcaaagcagaaggccgacttgaaaaatgcttgtgagtcatcctctcacatctgcccttactgtaatcgagagttcacttacattggaagcctgaataaacacgccgccttcagctgtcccaaaaaaacccctttctcctccc

SEQ ID NO: 83276 - DNA, 539 bp, Homo Sapiens
  misc_feature (132)..(132): n is a, c, g, or t
tttaggatttaaaatacagaaacagtttatgtataggatagctataagtaaatactgaaacacattatgcctctgtaattggggttgacacatgaacagaatagcagacacaatgcatatggaaagttacangaatatggtaaaagtgggggtaaagatggggtttttaatgatactaagataactgaaaataggcatatagatatattccaagccgcctgacgatctaattgtaaaaagtaaagcatacaaatacttagaagaaaatggaggaaaacgacattatatgtgacttaaaacctagaagaaataaataaaactattgatcaattttaactacataaaaatgtttataggacaagaaaaaccccaccataacccaaggcaaacaatgtattgacaggattccaataattaagaatacttcatacaaaaagaaatgtaaatgacctttaacatgtaaagatgctcaccttgttcagaagagaataaaccagtgtttttacctttcacttgaaaaagaagtataaaaacaactg

SEQ ID NO: 83277 - DNA, 736 bp, Homo Sapiens
tggctaggtacgaggctgggtttgaattcggtcgaggctgcccgtctgctccgagttcaggctcctgggcggcgcttttccagttccaggtgtgcagaagtgtcctctccccacgcgcggcgggctgcacttggtcgctggctccgagatcgcgcggggccgcggaagcccaagacggtaccgggggccgcagccgcagccggcgccgccctccgccctccccaacagcaggccgagtcccgtagcatccggtagggaaatggtcgtgctttcggtccccgccgaagtcaccgtgatcctgttagatatcgaaggtaccacaaccccgattgctttcgtgaaggacattttatttccttacatcgaagaaaatgttaaagagtatctgcagacacattgggaagaagaggagtgccaagcaggatgtcagtctttttgaaggaaacaaggctgaaagaggacgcccacctggatggggctgttcctatccctgcagcatctgggactggagtggatgatctgcaacagatgatccaggccgtgggagataatgtgtgctggcagatgtccctggatcgaaagaaccattgcactcaaacagttgcagggccactgtggagggcggcattcacagtgggccgctgaaagcagagtctttgcgatgtagtccagcagtcagagttgaaaaagcgaataagtgtcatctatcccaggactggagccaaacgaacggcac

SEQ ID NO: 83278 - DNA, 746 bp, Homo Sapiens
  misc_feature (16)..(16): n is a, c, g, or t
  misc_feature (140)..(149): n is a, c, g, or t
caaggacagacagttntttcccgaccatactcatcaaagatttacgtttgtatattagtaactagtgcattactagagcaggtgcaggtgaggtctttaaagtttcaatgaaagtttcttctggatctacagaaaaaaannnnnnnnnncaatctaaaaactggaaattctagggtttttgtacattttggatgcactgggaatttattagcacaaaatcattctttgcaactcaaaattcagaagggactctaccatatcttagctcagagcacagaggagtgccttatccccacacttgactgggctgtggaggtgggcatgtgggcccctggccgagactggggacagagcccttgttttgtgacttaggattttgatgtggttcccatgttctctaacagggccagctgagcagcacaggccaggaggccacagtgtaagcaataacagatctgccacatgcagaagcaaatatcaggcctgtcgcacacgggcggcatttaaataggaatttctatttttgaaataagggatggtctatgaggcatacagtagatttgatgtgatccttttctccctcccttccataatggatcgtggtctgtgtgactgaacccacacagagtgtcatgggtgacagtttctggttgaagtagctccacgcctgggcttctgtggacagcagattcttttccttctcacaaggggctcatttaaaatttggaggctgggtgctgctgtca

SEQ ID NO: 83279 - DNA, 597 bp, Homo Sapiens
gcggccgcattccctgagtcaccaggaatgttaaagtcagtgggaacgtgactgccccaactcctggaagctgtgtccttgcacctgcatccgtagttccctgaaaacccagagaggaatcagacttcacactgcaagagccttggtgtccacctggccccatgtctctcagaattcttcaggtggaaaaacatctgaaagccacgttccttactgcagaatagcatatatatcgcttaatcttaaatttattagatatgagttgttttcagactcagactccatttgtattatagtctaatatacagggtagcaggtaccactgatttggagatatttatggggggagaacttacattgtgaaacttctgtacattaattattattgctgttgttattttacaagggtctagggagagacccttgtttgattttagctgcagaacgtattggtccagcttgctcttcagtgggagaaaacacttgtaagttgctaaacgagtcaatcccctcattaaggaaaactgacagaggagggcgtgactcacccaagcatatataactagctagaagtgggccaggacaggccgggcgcgg

SEQ ID NO: 83280 - DNA, 717 bp, Homo Sapiens
cagtcgacggtaccggacatatgcccgggaattcggccattacggccgggaggcacagacaccaaggacagagacgctggctaggccgccctccccactgttaccaacatgaagctgctcgcagcaactgtgctactcctcaccatctgcagccttgaaggagctttggttcggagacaggcaaaggagccatgtgtggagagcctggtttctcagtacttccagaccgtgactgactatggcaaggacctgatggagaaggtcaagagcccagagcttcaggccgaggccaagtcttactttgaaaagtcaaaggagcagctgacacccctgatcaagaaggctggaacggaactggttaacttcttgagctatttcgtggaacttggaacacagcctgccacccagtgaagtgtccagaccattgtcttccaaccccagctggcctctagaacacccactggccagtcctagagctcctgtccctacccactctttgctacaataaatgctgaatgaatccaaaacaagcaacaacccccccaaaacacaaacaaaaccttgtcgggccgcctcgggcccctcaaaaagcttttcaaaaaccattcttttgggggccccgggggccccagaaggggtaaagtgaacaaggggctcataaacctggttttcccaaggaaaaaccccggggtccatgaaacaaggggcttggggaat

SEQ ID NO: 83281 - DNA, 447 bp, Homo Sapiens
  misc_feature (15)..(15): n is a, c, g, or t
cccaagaattcggcnacgagggaaaggagacccacagcaccccgggcgtggcatggacagctttggagggcagccttgccactcagcagctgcccactccccatgcggagaaaatatgtccatgagcccgaggtgttttcagcaccatgtgcttaggccaaccctagtcttgattgacagtatcacataatcctagcatgtcagagctggaactatccaataagcacactgtgcagaaggggaaactgaggccatgacagtgacatgccccaagtcatagagtaagtggccagcaaatccagaacccgaatccgggggtctccaatcaggaaccttttgcatcccactttgctgttaactcagtcaccagcccatgcaatgtgggactagggctgctacacccccacccctatttcatcgaataaacacatcagtgcttactataaa

SEQ ID NO: 83282 - DNA, 332 bp, Homo Sapiens
caagactctgtctcaaaacaaacaaacaaacaaaagacccaatctgagtcttatcgttgtactgatagaagggtcagatatccccacatggagttgagtgggagaaagagattcactagagaataactccttagagaccaatgtctgtagcaggtgtacagcatcttgtgaaagttatggagcatgaaaaagactgaagggccaggacagtttgcatgggctgagttataccagctagaccaggaatagaacaaagaattctatacctcaggatttcaaaaagttagcaacttgagaggccagtgctgagcaacccagtacccaggaaatga

SEQ ID NO: 83283 - DNA, 457 bp, Homo Sapiens
  misc_feature (47)..(47): n is a, c, g, or t
  misc_feature (52)..(52): n is a, c, g, or t
  misc_feature (60)..(60): n is a, c, g, or t
  misc_feature (72)..(72): n is a, c, g, or t
gagtggggattagcctaaagaagggggagaagggaagccattttganggtgncgtaaaangttttggtatcntggattatggtggctgttatggggggtgcacatcccaagtgtcaagactcatcgaactgtacacttttgttctaggtacattagacctcaataaagtggattttaaacctaaataagccaggtaacagctttgcctgggtggctgggggagaggcttgggacactttacattgatctccctcttaggcatgttcgttttggtttggttttgttcttatgatgtattatttattcgaaaaatatatcattagcagagtgactgatgtaaatgtaaaaccattgttaaggaaaccaacaaaagcgggaacaagagacactggtgcatcctgttagagggataagaataagcactcgctgtccaagctcataaaatattttggaaatg

SEQ ID NO: 83284 - DNA, 897 bp, Homo Sapiens
  misc_feature (29)..(29): n is a, c, g, or t
  misc_feature (41)..(42): n is a, c, g, or t
  misc_feature (47)..(48): n is a, c, g, or t
  misc_feature (56)..(56): n is a, c, g, or t
  misc_feature (141)..(141): n is a, c, g, or t
  misc_feature (241)..(241): n is a, c, g, or t
  misc_feature (276)..(276): n is a, c, g, or t
  misc_feature (762)..(762): n is a, c, g, or t
ggtggggccaacccaggttggctgggggncccaacaaagtnnccaanncttcaccnttgggcccttttgctgcaaaaggtcagcccttctttgatggagatgaggggctattgggacttggccatctcccaatcacccacnccaccagccctttttcacgttttctgcgggaattcatccatcttatcatgtggagtttatctcaccctgctgttgcagaatgctatttgcatgtgtcacncaggtgatgttttttctttggggagtaggggtttnggcttcctcattcatccctcttgctaaaagaggagatagttgatgttgcatctaaagatgctataagacaatgaaagtttgatgttgtacatacctacaagtaccatttttgtgcatgattacactccactgacatcttccaagtactgcatgtgattgaataagaaacaagaaagtgaccacaccaaagcctccctggctggtgtacagggatcaggtccacagtggtgcagattcaaccaccacccagggagtgcttgcagactctgcatagatgttgctgcatgcgtcccatgtgcctgtcagaatggcagtgtttaattctcttgaaagaaagttatttgctcactatccccagcctcaaggagccaaggaagagtcattcacatggaaggtccgggactggtcagccactctgacttttctaccacattaaattctccgattacatctcactattggtaatggcttaagtgtaaagagccnatgatgtgtatattaagctatgtgccacatatttatttttagactctccacagcattcatgtcaatatgggattaatgcctaaactttgtaaatattgtacagtttgtaaatcaatgaataaaggttttgagtgt

SEQ ID NO: 83285 - DNA, 718 bp, Homo Sapiens
attcatgtgaaaaaaggagaacctggacttctcatttctcgagtgaatgcaaaaaatcccttctttggctatgctgggccttataagcacacaaaagacaaattgctttgtgatgtttttaagaagggagatgtttaccttaatactggagacttaatagtccaggatcaggacaatttcctttatttttgggaccgtactggagacactttcagatggaaaggagaaaatgtcgcaaccactgaggttgctgatgttattggaatgttggatttcatacaggaagcaaacgtctatggtgtggctatatcaggttatgaaggaagagcaggaatggcttctattattttaaaaccaaatacatctttagatttggaaaaagtttatgaacaagttgtaacatttctaccagcttatgcttgtccacgatttttaagaattcaggaaaaaatggaagcaacaggaacattcaaactattgaagcatcgagttggtggaagatggatttaatccactgaaaatttctgaaccactttacttcatggataacttgaaaaagtcttatgttctactgaccagggaactttatgatcaaataatgttaggggaaataaaactttaagatttttatatctagaactttcatatgctttcttaggaagagtgagaggggggtatatgattctttatgaaatggggaaaggggagctaacattaa

SEQ ID NO: 83286 - DNA, 664 bp, Homo Sapiens
  misc_feature (184)..(184): n is a, c, g, or t
cacaaaccaaaagtaagttctcgtggtaacaaggatgggaattatttctaggttgcagtccatgagctgggaaaggaggcagtgctcttgggagaaacagcagaggcctcaagtttcgggctgaagccaacagagtcccaaccagtgggcgtatcccaagatgaagaattttggaatacatacngagggtctgcaagaacagctcagcaggaatactcataaagagactgagcctgtgtatgagaggggtaaggagcttcatgataattttcttctcctgggagctgtgataatagtttattcacccaaaatgtcatgggcattttttgaataccctgctctgtggatttgtaaaaccagccttgatagcaactatgatgtccttccaggcagcagtagaaatgccaactgtggatgaaagtgggagtaggcctagagaacagaaatatctaaaccacagaactcttggtaataacagtgtgaactctgttccttagactagtggagaggaaggaaagaaatggagtgggaaggcttggggccacttcatccttgtaaaatacagaaggaattgagatcagatgggctgttagtggcagaatgtgaaaacagttgtgtaccaggaaaaacataataaaagacaaaaaacttcatctcctaccat

SEQ ID NO: 83287 - DNA, 272 bp, Homo Sapiens
  misc_feature (33)..(33): n is a, c, g, or t
cgccaaagatgatgtgcggggcgcctccgcacnatgcccggccaccgccacgacccagcacatcgccgaccaggtgaggtcccagcttgaagagaaagaaaacaaactacttcatcaaggtgcacgtcggcgagaggacttcgtacacctgcgagtgttccaatctctccctcatgaaaacaagcccttgaccttatctaactaccagaccaacaaagccaagcatgatgagctgacctatttctgatcctgactttggacaaagggccttt

SEQ ID NO: 83288 - DNA, 582 bp, Homo Sapiens
ctgtgtgtgccatcgcctttcaggaggactagggcttctggggagctaagaaccccaaggaacaaagtgtgggatgtgaggcatcccctgcacatgcaggagaacacaagattgtcttcagctggctgctaatgacctggaggggcgcagcaaggtgacttgggatcagaggcttcgctcactccgctctcttcccaggtgcacgtcggcgacgaggacttcgtacacctgcgagtgttccaatctctccctcatgaaaacaagcccttgaccttatctaactaccagaccaacaaagccaagcatgatgagctgacctatttctgatcctgactttggacaaggcccttcagccagaagactgacaaagtcatcctccgtctaccagagcgtgcacttgtgatcctaaaataagcttcatctccgggctgtgccccttggggtggaaggggcaggattctgcagctgcttttgcatttctcttcctaaatttcattgtgttgatttctttccttcccaataggtgatcttaattactttcagaatattttcaaaatagatatatttttaaaatccttaaaa

SEQ ID NO: 83289 - DNA, 884 bp, Homo Sapiens
  misc_feature (670)..(670): n is a, c, g, or t
  misc_feature (731)..(794): n is a, c, g, or t
gtgacccacgcgcctacttgacatgagtagccgccgcgtcccctcgccgagtcccctcgccagattccctccgtcgccgccaagatgatgtgcggggcgccctccgccacgcagccggccaccgccgagacccagcacatcgccgaccaggtgaggtcccagcttgaagagaaagaaaacaagaagttccctgtgtttaaggccgtgtcattcaagagccaggtggtcgcggggacaaactacttcatcaaggtgcacgtcggcgacgaggacttcgtacacctgcgagtgttccaatctctccctcatgaaaacaagcccttgaccttatctaactaccagaccaacaaagccaagcatgatgagctgacctatttctgatcctgactttggacaaggcccttcagccagaagactgacaaagtcatcctccgtctaccagagcgtgcacttgtgatcctaaaataagcttcatctccgggctgtgccccttggggtggaaggggcaggattctgcagctgcttttgcatttctcttcctaaatttcattgtgttgatttctttccttcccaataggtgatcttaattactttcagaatattttcaaaatagatatatttttaaaatccttacagattgcctcctttgttttagacttttttcttcgtntgaaccaccccgggcaggtccttcccctcgggggcatggagggcggagagactgcctggcnnnnnnnnnnnnnnnnnnnnnnnnnnnnnnnnnnnnnnnnnnnnnnnnnnnnnnnnnnnnnnnncaccactctttacatgttggtgctttgactcttaggtcctggccccaagcttcagtttctcccataaaataaaagagtgtgagtaaatcc

SEQ ID NO: 83290 - DNA, 555 bp, Homo Sapiens
  misc_feature (219)..(219): n is a, c, g, or t
  misc_feature (229)..(229): n is a, c, g, or t
agaaaagagagagaacatcatcacaatgaagaaagcctggtgcagtaaatcaatgtggtgccagggatgacttgcgtatatacaacgtttgccatggagtcctgtgctctttgcagaggtgagattcaggtttgactctgaacttctcagcagcatgaactgggaaactgttgaaaccaagctgatatgtggttgctagctgattccgaataagaggcntcagaattangaatacttgatccagagttttacattattcatccctcccgtcttgtttcttctgagcagcagccagagatcacaggtttgctatagtcgccactccactcagcacccaaaatggaactggcaaggctcaaacttgctcctggatggaccctgtcagctttcatccaacctctgaccaagagtttcaacatgatgtttctgggcaagatgatcgccccaaagttggcccattggtgctgcagtctatttccttagggtcaggggtctcttcagtattgtcccttcatggtcaccaggaagatgttaccagaaaagggtcccaatcgc

SEQ ID NO: 83291 - DNA, 482 bp, Homo Sapiens
atggtcattatatatttgtgtcaagaattagaaggcaagggtcactaaatattttaaggattaaggtaccagaggcatcagtggtataaggatggagtctggtctttaattacgacaagggtattgcttacattctactctctggttttcaaaaagatctgacatgctgacaaatccagctcctcacaaatcttgtttgaaggacttgtgggaagtgatattccttactattagatcacgccccttataactacatgttaacatccagccttttatctgtttgagtaattgtagggatagaaagtgaagcccccagagttaggtgcaagtatagcacccagctgaaaggcatcatggagtctaagggccttctacagaaggggcaatcctttgggttatttctggtgtaccactgtcttctctacctcggtccaacaccacctctcttggacaaaaaataaaacaagcaacagccatcaaaa

SEQ ID NO: 83292 - DNA, 689 bp, Homo Sapiens
gtctcctatgtgagttagaacaaaggattgacatctttgacaataattagactggcataagactaccacatgttataaagtgctaaactgcatatcatagaataaatgatccgagagtttagatgaggcaaataacagagtaatcaaaaatggcttcaggtagtcggtaaaatttgaacaggtagaatcagctaggaaaaagatattccatatagagtgaatatcctaggcaaatgcagagaatgagcagggagtttgtaaaggacagagtgatttgtaggcctcttatctcacactcttgaaactgattttgggggtctaccctcagtgcagtgttcagaaataagcattttttaaaagttacctgtcttatctgcacaatgaattttcagaattatcctgctaggtgatggaaggtttagacattttcctgtgtcaaatctgcccaactgtcattgttgttgctgaactcctaaatgtctttattggtgatgggtatgggaaggatgggcgtgaagtcccctaatctgagattgtgttattttagtccctgatgcttcctgcgtttatgaagttgtataggaatttttccaccatacatgatacatgatcatatctaagatgtcagcatgttcataaagaggattatttttgtaaaactattaaaagttttgcttttctcgaaaaaa

SEQ ID NO: 83293 - DNA, 752 bp, Homo Sapiens
  misc_feature (46)..(69): n is a, c, g, or t
  misc_feature (485)..(494): n is a, c, g, or t
  misc_feature (638)..(675): n is a, c, g, or t
tttcatcttttaatggcattgtgggtctgtctttaaagtggttacnnnnnnnnnnnnnnnnnnnnnnnngtctagtgtcgactggtgttttccctcgtgatgtttacagcttgctgtttgctgcccagccataacccactcagtgacagacgaacacagctaaggcctcgctgccagccttctgacggcgggcgagcacacggtctcttcccctgccccaactggccctctccaccaccaacttctctactttgggtttgtttggttttttccctctatttgtctggctggttttttgctcttttctccccttgagaccctaatatcttgacttcattgccaaaaaacaacccattgagaactttcttcctactgatcccatctcttttcccttctttcctcctggttccggtcagttcagaggatttaacaatcacaagtgtcctgcaaaaatgcctgaacattattcttaggccctcgtggannnnnnnnnncagaaaacttaaacaaaaaaagacttactaagaaatatgtacagctacccctgttttcaggcactatgtttgagaacattttagccattgatgttcacacgtggcatcagcccatgcaagataggtttctgtatttatatattnnnnnnnnnnnnnnnnnnnnnnnnnnnnnnnnnnnnnngttcaaagcttgggagaaaagctttcttcattagtcaaggtgttttgatatggtattaaaatgtctaataaaagatg

SEQ ID NO: 83294 - DNA, 482 bp, Homo Sapiens
  misc_feature (255)..(301): n is a, c, g, or t
aaacaggggtagctgtacatatttcttagtaagtctttttttgtttaagttttctgaaaaaaaaaaatccacgagggcctaagaataatgttcaggcatttttgcaggacacttgtgattgttaaatcctctgaactgaccggaaccaggaggaaagaagggaaaagagatgggatcagtaggaagaaagttctcaatgggttgttttttggcaatgaagtcaagatattagggtctcaaggggagaaaagagcnnnnnnnnnnnnnnnnnnnnnnnnnnnnnnnnnnnnnnnnnnnnnnngtagagaagttggtggtggagagggccagttggggcaggggaagagaccgtgtgctcgcccgccgtcagaaggctggcagcgaggccttagctgtgttcgtctgtcactgagtgggttatggctgggcagcaaacagcaagctgtaaacatcacgagggaaaacaccagtcgacactagac

SEQ ID NO: 83295 - DNA, 261 bp, Homo Sapiens
ccccgttgtgtgcaagatttctgctgtattagtgttccttctaaatattgtatgcagttttcccagtgttacgagattggtgttgctatccatttgttgtgaatgaagacttgtcctatagtacatgacagggctgagagtggactgtagttcttagctgaaccctttctactgtttaaaacaatcatcaggcctatcctctgctcccaggggaatgtgggagagaaaagggttcttggccaggctgtaggtggtggctca

SEQ ID NO: 83296 - DNA, 1053 bp, Homo Sapiens
  misc_feature (26)..(26): n is a, c, g, or t
ttttttacttctctcgtgcaactttntccgtaacggtcaaaggtagcgagcctgggtggcgattccaaacgagggttccgcggagttgactgcctcggcgccgtcggtcctgagcgctgccttccgcgttccgccgcggccccacctggagcccccgccccgcgccatggccggagctcccggggcgcagcgctgacggcggcggggggagcgcgccatgcccagcaggaccggccccaagatggaagggagcggcggccgcgtccgcctcaaggcgcattacgggggggacatcttcatcaccagcgtggacgccgccacgaccttcgaggagctctgtgaggaagtgagagacatgtgtcgtctgcaccagcagcacccgctcaccctcaagtgggtggacagcgaaggtgacccttgcacggtgtcctcccagatggagctggaagaggctttccgcctggcccgtcagtgcagggatgaaggcctcatcattcatgttttcccgagcacccctgagcagcctggcctgccatggtccgggagaagacaaatctatctaccgccggggagccagaagatggaggaagctgtaccgtgccaacggccacctcttccaagccaagcgctttaacaggagagcgtactgcggtcagtgcagcgagaggatatggggcctcgcgaggaaaggctacaggtgcatcaactgcaaactgctggtccataagcgctgccacggcctcgtcccgctgacctgcaggaagcatatggattctgtcatgccttcccaagagcctccagtagacgacaagaacgaggacgccgaccttccttccgaggagacagatgggattgcttacatttcctcatcccggaagcatgaccagcattaaagacgactcgggaggacctttaagccgtttatcgatggggatggatggaatcaaaatctctcaggggcttgggctgcaggactttgaccctaatcagagtcatcggggcgcggggagctacgccaagggttctccctggtggcgggtgaggaagaaatga

SEQ ID NO: 83297 - DNA, 1212 bp, Homo Sapiens
tggccgagtgattcggcgttccccagtactgcttcgtttgttcacccagggcccagcactgtccttggcccatgccgtattctgtggagctgtgatgtggctcggtccgcattccatgaaggacctttgtcccagcgttcaggggccctgttagatgttccccgcttctcgtgcaggcagttgagggcgatgcagattctcgccgcgtagaaccttggcgtgctcctcagggagcttcctctgcctcgtgcattgtggaacattcaggtccccgccgttgacgtactcatgaccaggtacaaccgacttgtcgtctggaagcaggagtgtaatccgaccaggaaggggttgctggatgcctgctcaaacacgtgcttctctgtctgtacccagtcaatatcctcgtcatcatgcaccagctctttcttcaccactttcatggcgtaaatttggtcattcttcttcaaccgcaccaggagaaccttggcgtagctcccgcgcccgatgactctgattaggtcaaagtcctgcagcccaagcccctgagagattttgattccatccatcccatcgataactggcttaaggtcctccgagtcgtctttaatgctgtcatgcttccgggatgaggaaatgtaagcaattccatctgtctcctcggaaggaaggtcggcgtcctcgttcttgtcgtctactggaggctcttgggaaggcatgacagaatccatatgcttcctgcaggtcagcgggacgaggccgtggcagcgcttatggaccagcagtttgcagttgatgcacctgtagccttgcctcgcgaggccccatatcctctcgctgcactgaccgcagtacgctctcctgttaaagcgcttggcttggaagaggtggccgttggcacggtacagcttcctccatcttctggctccccggcggtagatagattcggctttcttctcctgcctcctcagcgcagattctttatgctctgtgcgcggcgggcgtgcagggaggcatcttccttcccgttgacgagctgatgctgcgtcggctcgcctccggccccgacaataggcagggaggctcgagcgcgaggagcagatatttaacggaaggccggctgtcctgtcccccgcccctcacatccctgcctcctcatgtctccaggcccgggtggtacccggctcccccgggaagctgtagccagcagctgag

SEQ ID NO: 83298 - DNA, 1209 bp, Homo Sapiens
  misc_feature (735)..(1027): n is a, c, g, or t
  misc_feature (1047)..(1084): n is a, c, g, or t
  misc_feature (1135)..(1169): n is a, c, g, or t
tcaagaatccaaaaaagtctcaaacaggaaaagaaaaaacctacaaacaaaccacctagtgtgccagtcacgtttctattctcagctgcaagctcatccttgtagtctctactgttctactgtagctgccactctgtaaactacatttcccagattcccttatcagctggcttcctgttagggtctaccaatggaagccactagagggagattagacggcagtagatagcaattgccctagacccagtggttttttgcatgagacaattttatatattaagcccctgagatttagggattattactacagaaaaagcccatcctatcctaataaaatatgcaaaaaattaaaagtagaactttacacttcataccacgtataaagataaacctaaatgacaaagactatatagctttcagaagagaacacaggaaacatcctcatgatcttggggtatagaaggatttctcaaataagacatctacacatagatcaaaaagagaaagctgatagatttgacataaaaatttaaagctcctgtgtatcagaagacagaactaaaatagtgaaaagacaagccacagaagatatttgcaaaatatataacaaagaacttgtgtacatattgttaaaatttgtatgaataagaacacttgaagaaacctaataactaataaacatgaaaagttgttcaacattatcagtaatgttcaaatagacactatacatgtacnnnnnnnnnnnnnnnnnnnnnnnnnnnnnnnnnnnnnnnnnnnnnnnnnnnnnnnnnnnnnnnnnnnnnnnnnnnnnnnnnnnnnnnnnnnnnnnnnnnnnnnnnnnnnnnnnnnnnnnnnnnnnnnnnnnnnnnnnnnnnnnnnnnnnnnnnnnnnnnnnnnnnnnnnnnnnnnnnnnnnnnnnnnnnnnnnnnnnnnnnnnnnnnnnnnnnnnnnnnnnnnnnnnnnnnnnnnnnnnnnnnnnnnnnnnnnnnnnnnnnnnnnnnnnnnnnnnnnnnnnnnnnnnnnnnnnggccgggcgcggtggctcannnnnnnnnnnnnnnnnnnnnnnnnnnnnnnnnnnnnncccggccgtaatggccgaattcccgggcatatgtccggtaccgtcgactgnnnnnnnnnnnnnnnnnnnnnnnnnnnnnnnnnnncgccgcttcctcgctcaaatactcgctgcgctcgtcgtta

SEQ ID NO: 83299 - DNA, 853 bp, Homo Sapiens
  misc_feature (608)..(608): n is a, c, g, or t
  misc_feature (619)..(619): n is a, c, g, or t
  misc_feature (629)..(629): n is a, c, g, or t
  misc_feature (633)..(633): n is a, c, g, or t
atttcggcacaggtggggatacaactctggagtcctctgagagagccaccaaggaggagcaggggagcgacggccggggcagaagttgagaccacccagcagaggagctaggccagtccatctgcatttgtcacccaagaactcttaccatgaagaccctcctactgttggcagtgatcatgatctttggcctactgcaggcccatgggaatttggtgaatttccacagaatgatcaagttgacgacaggaaaggaagccgcactcagttatggcttctatggctgccactgtggcgtgggtggcagaggatcccccaaggatgcaacggatcgctgctgtgtcactcatgactgttgctacaaacgtctggagaaacgtggatgtggcaccaaatttctgagctacaagtttagcaactcggggagcagaatcacctgtgcaaaacaggactcctgcagaagtcaactgtgtgagtgtgataaggctgttgtcacatgttttgctagtaccaacatgacctacaattacaagcatcagtactattccaataaaacgtgcagagggagcacccatcgttgtgagtcccctttttccctggaaaccctnccacccagtgntgaatttccntatntcataccctccctccctaccctaaccaagttccttggccatgcagaaagcatccctcacccatcctagaggccaggcaggagcccttctatacccacccagaatgagacatccagcagatttccagccttctactgctctcctccacctcaactccgtgcttaaccaaagaagctgtactccggggggtctcttctgaataaagcaataagcaaatcatg

SEQ ID NO: 83300 - DNA, 737 bp, Homo Sapiens
gggcagaagttgagaccacccagcagaggagctaggccagtccatctgcatttgtcacccaagaactcttaccatgaagaccctcctactgttggcagtgatcatgatctttgaatgatcaagttgaccacaggaaaggaagccgcactcagttatggcttctacggctgccactgtggcgtgggtggcagaggatcccccaaggatgcaacggatcgctgctgtgtcactcatgactgttgctacaaacgtctggagaaacgtgggatgtggcaccaaatttctgagctacaagtttagcaactcggggagcagaatcacctgtgcaaaacaggactcctgcagaagtcaactgtgtgagtgtgataaggctgctgccacctgttttgctagaaacaagacgacctacaataaaaagtaccagtactattccaataaacactgcagagggagcacccctcgttgctgagtcccctcttccctggaaaccttccacccagtgctgaatttccctctctcataccctccctccctaccctaaccaagttccttggccatgcagaaagcatccctcacccatcctagaggccaggcaggagcccttctatacccacccagaatgagacatccagcagatttccagccttctactgctctcctccacctcaactccgtgcttaaccaaagaagctgtactccggggggtctcttctgaataaagcaattagcaaatcaaa

SEQ ID NO: 83301 - DNA, 1578 bp, Homo Sapiens
gctgaggaagtccgctatgcttgcttgtggagagtggattgtgtgctcagagtccacaaggatttaagaatccgagccctgctgcccttgcctcagcctgtgcattagggcccggtggtgagagcactgagccagtgtgaatcaaggcccctccctcgacctgcatactaacaggccagaagagcttgcttgattttggtcctaggctcctgcctgtgggttggattccaggggcactctctcctccacaaaccagacggtggcaggtacatcccctcaatggaaattgcccacacttcaccctaaagacagatcctgctgttcagcaacaatgtgagtggcccacacatttgtccagcatgaaaccgtttgcagattcctttccagtacacagtcccatcagccggtcacttcacgatgacagctcctcgaagcaccttctggtttgccgttgtgtagcttagaagtaggagcctgcacggcttcaggaattcacagaaggagcacactttgtgcttggagaagttaattataggaatatcctgcaaccttgtgctctgagcctgtgcacctggggtgtttccctggaggtcctgtgtatgaggatactcatcagcatgggggtctgggaagcctagcactggagacaacctaggtggtcctctccaggggagtaggtaagagccctacagcagtgaaaagcattgaaggaaaagtgtgttcagcagtgctcttaatctgatcagagcagcctgaacacattctaaacacagggcatttagaactagggtagaggcactagagcaccatagatacaaactcagattctgaaggtaaatgcccaggttcaaatccaagccccctcgccaagtgaccacgactcccccgagtcacctgacctctgtgtttacatcctcaaagttaagtagtcaggaaagggggcttggggcttgccacatggatggttgccactctcctttgcaaagtgtagtccccaaaaacaggtggaagagggaagggtccaattagaaggccgagtaccagctgccatgaatatgccagagctgctggctagtgataaataactgaaacccagggggacagcagagcttgggtgaccatacattctaggaaagaaaacatgcctgttgtcctggctttttatccagcttagacaaagatgggcaaagaaaataatttagaaaatggtagagatgggcacagagaaagggcacggagggaggcacaaacagaaggccaagtgatggtggaggcagacattggagaaatgcctttacaagccggggaatgccaaggatgctggcaaccctgggagtgggaagaacctggaacacaccctccgtcagagtctccagaaggaactggcccttcatcacctttcggacttctggcctccagaactgggcaagaaaatgtttctgctgttggaggccatccagctggtggtcatttgttatggttgccacagaaaacgaatatagatttagacatctaatttgcatatatagatatgcatgtgtatttgttaaataaaagataaagcatgacaactcaaaa

SEQ ID NO: 83302 - DNA, 980 bp, Homo Sapiens
  misc_feature (48)..(299): n is a, c, g, or t
  misc_feature (860)..(881): n is a, c, g, or t
gctggtaccggtccggaattcccgggatatcgtcgacccacgcgtccnnnnnnnnnnnnnnnnnnnnnnnnnnnnnnnnnnnnnnnnnnnnnnnnnnnnnnnnnnnnnnnnnnnnnnnnnnnnnnnnnnnnnnnnnnnnnnnnnnnnnnnnnnnnnnnnnnnnnnnnnnnnnnnnnnnnnnnnnnnnnnnnnnnnnnnnnnnnnnnnnnnnnnnnnnnnnnnnnnnnnnnnnnnnnnnnnnnnnnnnnnnnnnnnnnnnnnnnnnnnnnnnnnnnnnnnnnnnnnnnnnnnnnnnnnnncaaacaaaaaatcccacagctattggatcatccacagattttttctttacaatcttgttctccttgtccatggaccatcaatagttgacttgccaggtttaattctttcattgcttgagaagaaaggaatcaaaggactgtgtgtacgtaagctgacggtaaagttaagattaaattaagacagagagagaatacatatcactgccaggcctgataggaaaaatctgctcttccttttaataacagtgatgaattgtcaggaccttatttaggaaaccctgacctacccataactccctgctaggctaagtagaaaccaggttatttctccctgcttatggctccccgcaaagggacttgcagcgtgtcctgcaactttgtcttcagatagtgcttcctacaaaactaggtcttgttttgtaatcttttctcgtgttgaatcagatctgcttacttatttaggtttggttatgagcttgtatctcactgtatttctcatgctttgttcttttaaacaaatcctttaaactgtgtcattttgtatacacatgtgaggtttgnnnnnnnnnnnnnnnnnnnnnngaactaccttgtgagttttgctcaaaatgtggcctaagtagccattggcatgtctagatgcacaaataaaaataaagataatttctttaaaatatcaaa

SEQ ID NO: 83303 - DNA, 443 bp, Homo Sapiens
  misc_feature (65)..(65): n is a, c, g, or t
  misc_feature (217)..(340): n is a, c, g, or t
ccttgagtagaacttctttagggcttcaggagggtacgcagacctgatcaactgcaaagtttccnaaggtaaaggattaaaaaactttcagacggttcttacttcttacccggtgtttcacaaatagcctgaggatccaactatttttaaagcaaattggggccagacggtggtgcctcacgcctgcagtctcaccatttgggagacctaggtgggnnnnnnnnnnnnnnnnnnnnnnnnnnnnnnnnnnnnnnnnnnnnnnnnnnnnnnnnnnnnnnnnnnnnnnnnnnnnnnnnnnnnnnnnnnnnnnnnnnnnnnnnnnnnnnnnnnnnnnnnnnnncattctcttttacctataaaattcagtgtattagtttcattacataggagaaattatatttctaaacattttatgatgtttaaaaacaaaacaggctgttgta

SEQ ID NO: 83304 - DNA, 964 bp, Homo Sapiens
  misc_feature (101)..(126): n is a, c, g, or t
gttcccagccaccacccactctcgccacaaccactaccgcagccccagcctctccgctatgagcgaacatccagaaccatgtcttacaaagaacagactcnnnnnnnnnnnnnnnnnnnnnnnnnnccttaaacattcttacagggatcttaaagaacagaatacatgttaaaaacctcagtaatttatatcaattttaagcggtactttatatacaatggggaaaaaacacatgcatagtccaaatacaatgttgaaaacagcattttcataacaaaaaaccccgaacactaagtgttaataccatgtacatgaattcaagaaggaccaccctttttgtctgttgcacacagtttatttaacaatatgatataagaaatgagttggtattttaccattctatacagtgattgaatcttctcgagtttcgtatttataggaattagagcgcttgcatgatttacactagaattgcttttcctcatttcaagtttcacatagaagaaagaaaagaaggcttcttctctagtaacattagcatggtctaagagtgatcatccctattttttgtctaaaaccagttttatcagagaaacaaagcaacaatttctacatctgcaagacaagtttggcttcagcaattatgtatagatagatgtgtgtgggtgtgtacgtgtgtgcacgccggagtcaattcctatcatccagggtaatactgggagacgcccacagagttcactatagaaaaaaatcttcccgaaacatcacaaagttatcgggatacattataagcttgcattatttcaggaatcagttctgaatattatttttcttcttacttttaaacataaatgtttaaagtcttgaaaatacaaataaaaaatatgaatataatgaacttgtttttcccgttaaaaaaaggcatgagtcaccagcaatgacgacaaaaagaatccaaacaaaa

SEQ ID NO: 83305 - DNA, 717 bp, Homo Sapiens
  misc_feature (81)..(115): n is a, c, g, or t
aaatgtaatagatcatatagggcgctagctcgccgagcgaacgacgagcgcagcgaagtcagtgagcgaggaagcggccgnnnnnnnnnnnnnnnnnnnnnnnnnnnnnnnnnnncagtcgacggtaccggacatatgcccgggaattcggccattacggccggggagaggaggggcaggaatgtctgaggtggcaacacttctcttcagccagacagcactggccagttggagtctgtccatcctgcaggccacaagctctggatgaggaacttgaggcaagtcaccagcccctgatcatttcgcctaaaagagcaaggactagagttcctgacctccaggccagtccctgatccctgacctaatgttatcgcggaatgatggcccaggctcctcagagcaggaactccactattgcatctctgcagaggctgccagtgcccagcagtgagggacctgacctcaggggcagagacaagagaggcaccaaggaggatccaagagctgactatgcctgcattgctgagaacaaacccacctgagcaccccagacaccttcctcaacccaggcgggtggacagggtccccctgtggtccagccagtaaaaaccatggtccccccacttctgtgtctcagtcctctcagtccatctcgagcctccgttcaaattgatcatcatcaaaacttatgtggctttttgacctttgaatagggaa

SEQ ID NO: 83306 - DNA, 448 bp, Homo Sapiens
  misc_feature (52)..(52): n is a, c, g, or t
tcagccctattcccatgcctccctctcattggaggagctgaccaaagcagancctaacgggccataacacttgaccaattcagctgctggcagagggaggaaacaagtgttttcccaagtggcattttcatctcgctttcaccctgactaaagattgtcttaagtagcagcccagcccgcccagccccaggtgggtagtggggaggagagctggcattcctccaggtggcaaatggcgactctatactctccgcccgccccagggctggatggattagaaaaatgcctatttttcttgtatcgatgtagagactctattttctcccaaagacactatttttgcagctgtttgaagtttgtatattttccgtactgcagagcttacacaaaattgaagaatgttaatgttcgagttttcttatcttgtgtttagaggttgttttttgca

SEQ ID NO: 83307 - DNA, 570 bp, Homo Sapiens
  misc_feature (349)..(349): n is a, c, g, or t
catgggaaaaaacatttatcatgccagttgccatgggtcaggagtgcaggcactgttaacctgactcttctggcttggggtctgtcacaagctacaaatcaaagtgtcaagtgggctgcagtctcacatgaaggcttcactggggaaggatctgcttccaagctcattcatatggttgtcagcaggattcagttcctcataggctattggactgagggtctcagttcttcactggctgttttctggaggcctccctcagttcctcacatgtgagcctcttccccatgggcaagctcacaacatggcagcccatctccatctgttcgggcctcggtcgcgccgccggggncttgcagacgcgaatgtaaacagaaacacagtgaaaggcgttcggagagcctcgtgactgcggcacggcggcgagccgggaacatcagtgcgtccaaagcaaaatgaacgaatgtacgcatgactcctggagcgaccttcacgagggaaagcgcgccccccggcacccacccctaagcgccccaaaatgaccagcctttacacaacccagactcgcaggcg

SEQ ID NO: 83308 - DNA, 926 bp, Homo Sapiens
  misc_feature (74)..(91): n is a, c, g, or t
  misc_feature (614)..(664): n is a, c, g, or t
  misc_feature (667)..(667): n is a, c, g, or t
  misc_feature (673)..(807): n is a, c, g, or t
  misc_feature (910)..(910): n is a, c, g, or t
tttattggtgtttaacggcgccgccccatatgtgcggggaaatattttctcgtgtagagaggagatttattttnnnnnnnnnnnnnnnnnnagctttttttgggccgggccttcgccgcgaagaggggggaccccaaaattgtgtgttgaaaagggggggaacatgtgttgggggttcttcgtttgcgccccaaggtgggggaaataaatagcggcgagaggggatataaactaacgggtccccgcattgttggtcttggggggggagtacacactcctcttgttagaagggggttctcgtggagggggccccaacttgttgttggggaaaacctgcgcaattgttccggaaaaaagaaaagccaggaaggggggccggaccccggggacccgtgtttgggtttttggacccccccctagaaggcaccccgcggaaaggtgtctctatatatgccgtcagggagtgctctttggggtgggtggggaacagccctcgggggattctaaagggggggtttgtttttttcgcggaaaccgggggccgggccccccccaaggaattctttgtaggggagtttcgggtcccttgtgggggccacccggccgctaacgtnnnnnnnnnnnnnnnnnnnnnnnnnnnnnnnnnnnnnnnnnnnnnnnnnnnggngggggnnnnnnnnnnnnnnnnnnnnnnnnnnnnnnnnnnnnnnnnnnnnnnnnnnnnnnnnnnnnnnnnnnnnnnnnnnnnnnnnnnnnnnnnnnnnnnnnnnnnnnnnnnnnnnnnnnnnnnnnnnnnnnnnnnnnnnnaaatataaatttccatatgatttattgttgttccttgtacataagaaacagtaatatacaacttacactgctttagaatgtaaaatggataaaaatgtgtacnaaaaaaagccccattc

SEQ ID NO: 83309 - DNA, 531 bp, Homo Sapiens
  misc_feature (56)..(73): n is a, c, g, or t
attcggcacgaggctaatatttgttgctattgccaatttttcaatgaaatgacctnnnnnnnnnnnnnnnnnntaacctatacggtagttgctttagggggtggggggatgctatctgttagtgcttaaaagggggtaaatgcttgccgctttagaggtggatggtgctcataaaaggccccagtcgggggtatttaaaaaggactgaacagaaatccttagctagtagaatggcagcacgctgtaaaattattactgtattgtgtactggctataagatgtagacacctttcagtaagccaatcatttgtaaccattctagcagtgtcatattaggttaataaggctgctgtgttttaaagggcatttttatttgggttttggtgaaattctttaatttgttgattatattcacataaaatcagcattcattgacacatagctctaatgacatatgtatgaaaaaccatacactggatgacctagtcgattatttaagcataaaataaattgtgttaaactcttcaccta

SEQ ID NO: 83310 - DNA, 792 bp, Homo Sapiens
cagaatataaaaggtgttatttattagtcagcacctagtaaccaaagatttcattctttaatatacctgaaaacaacgaaaaaaaggctcccatgttatgtgtagtttaggaaatagattcttgccctattcctgcagccaatgactcctcagggccaggatcaagttggtcatttggcagaatcccaaactcaggagggtgcatgtgcaaagcgctctggaaaggataaatttaaagtgctttgtctgattttagctcatgcttaactttgtatcgattagaaacaggcacacaaaatggtctggtgggatttcagttttgctttttctctttcaacagtcatttgaagagttaagtggttcccagaagtcatcccatcttttctaatagttaagtcaatctgcattttattgaccttggttttctctaagccagtaaggaaatcattcatttcaccccagaaattatattagaaacatgatgagcagctcgttctctaggccttgtccaggaatacaggtaaagggttctgcgtacagaaaatggggtcccgctacattttaattttcaacagtcacacaatttctgcatcaaaatgacataaaagaatactagcacaaaaaccctaaaatgggcacctcagactgcagtccaatttacagatctctggcttacgttatcctaaggtgttaccacaaatataaccaaaatgtgagatataagcataattctttcaacagctttcgttgccttttaaaatgtgaaaaagtctccttgctgcctttgagtcc

SEQ ID NO: 83311 - DNA, 719 bp, Homo Sapiens
cacttttttaaaacaaatgtattttactccatcaatactgcaaggaagataactgaatttagaaatgctctctctctacagcaaagtaaacttaactttcgggggcccaactggcctatcatttagatctttaatagcagccatagcttcataatagtttatcatagcaacaatggcttcccctgtaggtaagccttgctcattatactgtatcgaaactgaatcaggtatgattctgtaaccatggaaaaagtctaaaatttcattcacattagctttaaatggaagattcattatcttaataggagttactctacctgaaccacaatttatttttggatcaggcataaatctcccctcaggaaaacttcccatattatgctttccaaaatcaaacttgccaccttctgggcgaccaaaattcacaaaagggcggtgacttctaaaatcatcaggcgggctcctaaaatcctcaccaggaggtctaaaattgtcaggaagtctagggtcctcctccggagcttccctaaggtcttcctctgggagctgcctgaagtcctcatcagaagggcatctaaaatcttcctcctgggggctcctgaagtcctcatcaggagggtgcctaaagtcttcatcaggagggcccctgaagtcttcatctggtgggtgcctgaaatcttcctctcgggagcgcctgaaatgctcctgaggcggccgca

SEQ ID NO: 83312 - DNA, 1072 bp, Homo Sapiens
  misc_feature (624)..(626): n is a, c, g, or t
  misc_feature (629)..(630): n is a, c, g, or t
  misc_feature (633)..(633): n is a, c, g, or t
  misc_feature (642)..(642): n is a, c, g, or t
  misc_feature (650)..(650): n is a, c, g, or t
  misc_feature (771)..(780): n is a, c, g, or t
  misc_feature (923)..(933): n is a, c, g, or t
cggtccggaattcccgggatcattcttggcaggatggcttctcatcgtctgctcctcctctgccttgctggactggtatttgtgtctgaggctggccctacgggcaccggtgaatccaagtgtcctctgatggtcaaagttctagatgctgtccgaggcagtcctgccatcaatgtggccgtgcatgtgttcagaaaggctgctgatgacacctgggagccatttgcctctgggaaaaccagtgagtctggagagctgcatgggctcacaactgaggaggaatttgtagaagggatatacaaagtggaaatagacaccaaatcttactggaaggcacttggcatctccccattccatgagcatgcagaggtggtattcacagccaacgactccggcccccgccgctacaccattgccgccctgctgagcccctactcctattccaccacggctgtcgtcaccaatcccaaggaatgagggacttctcctccagtggacctgaaggacgagggatgggatttcatgtaaccaagagtattccatttttactaaagcagtgttttcacctcatatgctatgttagaagtccaggcagagacaataaaacattcctgtgaaaggccnnnccnnccnccacccacncaccccanccccccccagggccgcggacccaaaaaatcccccacaggggcccaaaccctacgaaccaaaaggggcgccccttcaaagaattccccctcgggggggcccaattttaaccccaaacccccnnnnnnnnnngaaaaaagaggggccccctattggggagcacccttaaaataaatttggagccattggggcccccgtattataaaacccccggggaggggggaaaaaaatctggcgcattggggaactttttggaaaaagaaacctttcttttnnnnnnnnnnncaaatttttgggcacaaaactctccccacagaaatttctaactctttccgggggagaaaataataaatttttttacggggaaacaaaagggtgacaaacaataacctgtctaaatctcccgcccgggcattagaaaaaa

SEQ ID NO: 83313 - DNA, 447 bp, Homo Sapiens
gaaagttctcctcctgatcacagccatcttggcagtggctgttggtttcccagtctctcaagaccaggaacgagaaaaaagaagtatcagtgacagcgatgaattagcttcagggttttttgtgttcccttacccatatccatttcgcccacttccaccaattccatttccaagatttccatggtttagacgtaattttcctattccaatacctgaatctgcccctacaactccccttcctagcgaaaagtaaacaagaaggaaaagtcacgataaacctgggtcaccctgaaatggaaattgagccacttccttgaagaatcaaaattcctgttaataaaagaaaaacaaatgtaattgaaatagcacacagcattctctagtcaatatctttagtgatcttctttaataaacatgaaagcaaagattttggtttcttaatttcca

SEQ ID NO: 83314 - DNA, 652 bp, Homo Sapiens
  misc_feature (503)..(503): n is a, c, g, or t
gaccacagcagatcatatttacttcgatagattggttttctcatgggcacatacgggtggttgtgatttttataatgcacgtcaattaattatatagccattttccttcttcaaaagcgtttctgtttgttttgtgatggaatgcaatatatcaaaattttatcatgaataagttagagaaaacaccgccctcccgaacaaatacttggcctcttattcacagtttttccagccagatcgcagctactccccttgatagcaaagttgtctaatctctgttcatttttgctttcttatttgtttgctttgcataaaccactccatgtccctggtactctccccctattcctgactgcagaaacctccccaaccttaaaagaccaaattaactctctacttggtgaaaacttcaaaaatcatgatgactccttctaactcagagcatgtcttgcctctgctagtcatctggcacttaatcaagtactgcctagtggggagataanatacatgcagaaatcacttgagtagaagacagattgagcaaaatggacagtatatataatgtgaatatgggaagatcaagacttcgaaggggagagaagtccagattcacatcaaaatgtaaacctggccggttaaggaggagtttgag

SEQ ID NO: 83315 - DNA, 776 bp, Homo Sapiens
ggaccgccagctgcactgctgtcacctggccagtctgcaggagctcggtggacccccaggccccccagaagtttgccgcgtccaggattgcattctggtgccaggagaactgcgtggcgctcctgtgcgacggcactcctgtggtctacatcttccagctggacgcccgcagacagcagttggtgtacaggcagcagctggcgttccagcaccaagtgtgggacgtggctttcgaggagacccaggggctgtgggtgctccaggactgccaggaagcccccctggtgctctacaggcctgtggggaccagtggcagtctgttcctgagagcaccgtgttaaagaaagtctctggtgttcttcgtgggaactgggccatgctggaaggctctgccggcgcagacgccagctttcagcagtctctacaaggccacgttcgacaacgtgacctcctacctgaagaagaaagaggagagactgcagcagcagctagagaagaagcagcggcgccggagtcccccgcctgggcccgacgggcatgccaagaagatgagaccgggggaggcgacgctaagttgctgatcgtggcggtctgtttctgtcgactgtggaccacttatgtgcgatccgtggaccacttgcgtgcgatctgtcggccgacgatgagcttgttcggatgtagctccatcgtaagtcgaggagcatctgtgatttgtcctctgcttatgggatatgtttttccgctactgagtctgtgtagtaaatttttgactagga

SEQ ID NO: 83316 - DNA, 313 bp, Homo Sapiens
tttcctaggcaaaaatttactacacagactcagtagcggaaaaacatatcccataagcagaggacaaatcacagatgctcctcgacttacgatggagctacatccgaacaagctcatcgtcggccgacagatcgcacgcaagtggtccacggatcgcacataagtggtccacagtcgacagaaacagacctagatatgacagtaataatgaattagcagaaaaggaacaattatcttaaatttgctccatatgctcgagggtattttttaaagcatgattatgattaaaagagaaatggaagacactgcgtgc

SEQ ID NO: 83317 - DNA, 1372 bp, Homo Sapiens
  misc_feature (676)..(760): n is a, c, g, or t
  misc_feature (815)..(836): n is a, c, g, or t
ggtgcaagttattcttgcaccacatgctcaaatcttcttgaggtgcattaactcttttaggtaactagagcagtacttggtgaactagatcaggaggtcagtaaactttctgtggaagggccagagagtaaatattttaggctttgcagcccatacggtctctgtcacagctagtcaaccctgccattttaccacaaaagcagcaatagacattatgtaaacaaatgagcacagttatgttccaataaaactttatttacaaaaacagatgacatcccagatgcagaccatgggcaaccaaccattgcactggctaaatcattatttatggagaaatcctctttgtgtctctactctagatgcctaaaagagtttatatacttctaaaagctcctaacttatatccaaagaattgctttctgattcgtgtagtctctcccacagattcataaacttttatgacttatattgtttccaggtggggcatggtttatttcccagtttaacagttcagaataggggcatttattttatcatattttagggtgggttaggagtatcctttctggagactgagaaaggggtgtatttaattccatcaggtccagtacagtactaggagtcataatactttataatcaattaaataaatagaaccactgagacaataatgtannnnnnnnnnnnnnnnnnnnnnnnnnnnnnnnnnnnnnnnnnnnnnnnnnnnnnnnnnnnnnnnnnnnnnnnnnnnnnnnnnnnnaatacaaaagtaaccacttggaattttaaagataatgttatgtgtgtatgtgaannnnnnnnnnnnnnnnnnnnnngtttatttcctaaaagaagaaaagatacctttctgttcaacttgtatcaactcctcttttctaattgctgtgaaatggcaactgttgataaattattgtgattgttttaaaatctaatgggaagtaaaatatattttgattttacccagcttaatctgtaaagtagcacttaaatatatctgatagcaacacttaagatattgcatggggattactttcctatcatccatatgcatttgtgcaacttcaaacatattgggtgcttctgaattcctgatgattggatttaagctattgaaaattggataatttaaacttaatgatttttataattttctgatcttaaaatttggttaatgcctataatctgttgctttttctcaatatgtgtcctattggaaattcctcaaatcgttggtgccatcagtgatttacaaacaatattttgatattgcagatgacttgcttactgtatttgcattgttagaaaacagtttgtagacaatgattcttttttaataaaatcaaataattct

SEQ ID NO: 83318 - DNA, 474 bp, Homo Sapiens
acaatcagtttggccgtcccccatgatggtaggaaatatagagagcaagttcttctgccagggtcacactgtggtctctgaactgacaagtatatccctaactcctctttgatagagaaagagtctcaaatggacaactgtcctgtgttgctttccctaggccttcagcagcctattggctctccctgcctctgagctctggactctgtttgaatattccaagtagtatatggacagtccagggcttatgcccagcagcccactggaggcattcttcaggctcctttaaggcaggtgcattgatagttccattagtgtgacccttgcattggcacccctccagcctggaggccaggcttccagcaacttccttctgccctagagcaagccatgagccccagagcagtagcaggagacttgagaagtagagtgacaaaaacaagcacttaattaaattataaaatttaactttat

SEQ ID NO: 83319 - DNA, 757 bp, Homo Sapiens
agaaaacaactacacctgaaggggaggtggttcctattcaccaactggacattcctgttgataacccaatcgagagcaataacatttttctggtggcccctttgatcatctgccacgtgattgacaagcgcagtcccctgtatgacatctcagcaactgacctggccaaccaagacttggaggtcatagttattctggaaggagtggttgaaactactggcatcaccacacaagcacgaacctcctacattgctgaggagatccaatggggccaccgctttgtgtccattgtgactgaggaagaaggagtgtattctgtggattactccaaatttggcaacactgttaaagtagctgctccacggtgcagtgcccgagagctggatgagaaaccttccatccttattcagaccctccaaaagagtgaactgtctcatcaaaattctctgaggaagcgcaactccatgagaagaaacaattccatgaggaggaacaattctatccgaaggaacaattcttccctcatggtaccaaaggtgcaatttatgactccagaaggaaatcaaaacacatcggaatcatgacagcaagataaccccaagacagtcttttatcaagttttgacggtttatgctgggcactgccagactgaaccagagctggaacacaataatgtgtccttctacattttattacactaaatgatattcatattcaagcaacagcactttctgtagtaataaaaagtaacacacca

SEQ ID NO: 83320 - DNA, 868 bp, Homo Sapiens
cacggacctaccactggccctgcgtatgtggtgcagcctctcttcaatccctaagaactggttctttcaaagcatgtattttctgaagaaactttagaaccacgtttattttaaaagaacgaattggagaaaacaaatcgattaatgctcacagcttcttgggtgctttctcacgggtaaagccatggcatccgtaccttccattggttgccttctagccagaaatcagtattatcgaaagtccagtgtttcttcagttagttctttaactagctctgattctgttaacttcatagatgacgacaaaccacagcaagggttgcctgaagtggcagaatccacctggtggtttaaatcgtttttccattctgaacctgtgctttcaaatgtgagaataaaagatctgtctgctactggattacagatgagcactttgtagctgatcatctttgcactgccatttgatgaacatgttggtaacggttgcctgccttatgtagcatgaacagttgattctgacaatcaagatcctctgcctgctgcagtggtccatacatgaacagctccccttcagcgccccagctattccaggactcttctccattgtaagaagacaaaaatgtgtctgagatctcatttatgagacaagatcacagcagccactgatataacaaaagtttaggcatttttctcaacacaaagactatcgctggaagtggcacttgctacctggtgcatctttgaaaagtgtgcctttagaaacaagacacccttttaaagtaatatgtcttcaaatgttgtgacttacataaagtagctctttcattacttatatcatttttattaaaaaaacttaagttagactctt

SEQ ID NO: 83321 - DNA, 529 bp, Homo Sapiens
gcggccgctgcctccgcggacccaaaatcatgaaagtcaccgtgaagaccccgaagaaaaggaggaattcgccgtgcccgagaatagctccgtccagcagtttaaggaagaaatctctaaacgttttaaatcacatactgaccaacttgtgttgatatttgctggaaaaattttgaaagatcaagataccttgagtcagcatggaattcatgatggacttactgttcaccttgtcattaaaacacaaaacaggcctcaggatcattcagctcagcaaacaaatacagctggaagcaatgttactacatcatcaactcctaatagtaactctacatctggttctgctactagcaacccttttggtttaggtggccttgggggacttacaggtctgagtagcttgggtttgaatactaccaacttctctgaactacagagtcagatgcagcgacaacttttgtctaaccctgaaatgatggtccagatcatgtgaaaatccctttgttcagagcatgctctcaaatcagac

SEQ ID NO: 83322 - DNA, 1258 bp, Homo Sapiens
  misc_feature (23)..(23): n is a, c, g, or t
aggatgtcctcgtggtgcgtgangcttctcagcctcggtcagggtgtttggcatgtcctccgaggcaatcgctgtctgggtcctagagagccaggactggaagtcgtccaagtcccgtaggaactgctgcagcttgctggcctctcccagggaggcctctcggtttttcagggtggtcttcatctcctcccacacgtcgctgatctcggccagccgagacaggatggcctgggctggtcggggtgctcggactccagcttctccgcctccttctgcaggtcactcagctttgcctcaatggccaccaagtcccgctccatgccggtcagcttgcgctgcagggccatgacgccagccaggtcattgcccaggtcctgggtggactcgatgaccttggtcttttcccgaatccaggatttggtttcattgcactcgaggtggtagttctggatgctcagggcagacaggagggcatccttcttcctgtcaaccagttctctgaactggctccaccttgtgtcgagtttgtcctgctgggctttgatttccttctcacttgggtggccgcagtgcatcagctggcgtgcaatctggttcaccactgcaacccgggaagcctggttgttcatttctggttctaggctctcaaatctgtgctggatgacctccagatcctccagcttctctgggatctgcatgttgttgagccactgctccttctcgtcgatccagagctcacaggcatcagcctcgctgaacatcttgtacagggccagagtgtcctggagtgcctgcttccgcagccgcgtcagctctgccacctccttataccgctcctcgatgcccgacagcctgcccctcacgtctggagactcggcatgctcctgggggagggcgctggcttgttcgtgcagcgtgtcaagggtgggcctgtaattggcgatctcttccgccacgtccttgtgtttcttgaccagagactgtgtggaatactcatcgtggcccacgtcgctgctggagacaatcttgaggatgtccagcatccaggcatcaatgtcatcagcatctgcctggaactggtgcagcagggaggcctcctccaggcgcttcttccgaatggccgagagctgctctaggttggcccactgctcccggatgtaaatgatcctctcacggatcttctccgacccgaagtgctcctccgcgatcatgtcttcgccttccttgatggaaagctcaaagtggccactgcggccgc

SEQ ID NO: 83323 - DNA, 513 bp, Homo Sapiens
  misc_feature (188)..(213): n is a, c, g, or t
tttttttcaccctctaagcttaatgccagttattaaacacttggggggctaccaatgatttcataaaagtataaaagacactttaataatttaaaagaaaaaagtttttgatacactatattctgcagtatagattcttagtataggcaattatctctgacttgtgccaaattcttaggaacaataannnnnnnnnnnnnnnnnnnnnnnnnntcttctctcagttacacacgtaagaccagaggttacttgcacaagactgtgaaaccaacaaaatgtggggtggtgtatagatcgcaggctcagtgatattgcagttctgaaggccaaattcttctcccaaggcccagctcaagataatcttttcagcatttatgtataactaagttagctgaagacccctctatacttgattgtaaaacttatgaataggtttttcctgtgccattagtcatgcaaatgataaatacttcacgactatgaaaaccaaaaatgtcagagcttgagcacctt

SEQ ID NO: 83324 - DNA, 855 bp, Homo Sapiens
  misc_feature (85)..(119): n is a, c, g, or t
  misc_feature (662)..(662): n is a, c, g, or t
  misc_feature (665)..(666): n is a, c, g, or t
  misc_feature (679)..(679): n is a, c, g, or t
aaaagcatgtactagactcatataggggtagcgtcgctatagccgaacgacgagcgcagcgaagtagtgagcgaggaagcggcgnnnnnnnnnnnnnnnnnnnnnnnnnnnnnnnnnnncagtcgacggtaccggacatatgcccgggaattcggccattacggccgggtccggggcggaggtcaccatggcagctgccttggctcggcttggtctgcggcctgtcaaacaggttcgggttcagttctgtcccttcgagaaaaacgtggaatcgacgaggaccttcctgcagacggtgagcagtgagaaggtccgctccactaatctcaactgctcagtgattgcggacgtgaggcatgacggctccgagccctgcgtggacgtgctgttcggagacgggcatcgcctgattatgcgcggcgctcatctcaccgctctggaaatgctcaccgccttcgcctcccacatccgggccagggacgcggcgggcagcggggacaagccgggcgctgatactggtcgctgacagcgccaaagagaccaacaagatgattttagcgtggactaggacacttaacctaagaagagtttcacttaatcattcaaatcactatctgaagggtcacggagcgcaaaataaagtttaaaaccctgctaccacntcnnaaattacactcancccttcctttcatgtcggccgcctcggcccctccagaagcctttctagaaccattcgttttggcggcgcggggcccccgtaaggtaaagggaaacatgggccataaacctgtctcccctacggaaaatcccgtggtccatgaaacaacggggctttgggatttccctcaccacaat

SEQ ID NO: 83325 - DNA, 287 bp, Homo Sapiens
  misc_feature (12)..(12): n is a, c, g, or t
  misc_feature (26)..(26): n is a, c, g, or t
ttttggcgcctncgaggcccaagtanttcggcacgaggagcggcccctcattgccgcgcggcagctcccaggcctggggaacgtaggtgtgtgagagcggcacccgggaaggacgcctggcctctggctcagccctgcttggcgggctcccccgtggacaccctgttgactttgcacttccctcccgggccccgcacccccgaaccgaccaccgatcgaccggcaccgctgttgcctcgtaagccatagcgcatgcgcgctctcagaataaacaggccctgcctggg

SEQ ID NO: 83326 - DNA, 584 bp, Homo Sapiens
  misc_feature (525)..(525): n is a, c, g, or t
  misc_feature (553)..(553): n is a, c, g, or t
gcggccgccgccgtggccaaggcggcccccgcccccaccgccagctccaccatcaacatcaacacctccacctccaagttcttaatgaatgttataactattgaagattataagagcacatactggccaaaattggatggtgccatagatcaacttttaactcagagtcctggtgactatatccccatatcctatgaacagatatacagttgtgtgtataaatgtgtatgccagcagcactcggaacagatgtatagtgatctgattaaaaagataactaatcacttagagagagtctcaaaggagctgcaggccagccctccagatctctatattgaaagatttaatatagctcttggacaatatatgggagcattgcagagcattgtgcctcttttcatatatatgaataagttttacatcgaaaccaagcttaacagagacttaaaagatgaccttataaagctgtttacggaacatgttgcagaaaagcacatttacagcctaatgcctgtactttttagnagcccagtcaacaccatttcagggtcanacctttcactatggcaatattgtgaaaggcc

SEQ ID NO: 83327 - DNA, 457 bp, Homo Sapiens
cgggtttaggagtaagtgtgaactgtctgtgcatgtgatccttgacaagccacgcatgtttacatgggcactaatacttttcttgctgccaggggggacatctcccattaaatataagagcccaagatctcaggaagagatatcttaggacatggattttgctagagtgtctcataaataatattcacccaacaaagatgtgttgaaataatgcatgcatccatcagtgaagggttttaggtttaacacatgtacagctcctataacaaaataacaaaactgaaaaaatatgtatatggttcacaggtgaagaaacgcaaatggccagtaatcacaagaaaatgcattctagctcactaatacattaaagaatgctaatgaaaccatctaaatatccttttatcacctatcatctgacaaaatttaaatgtagaaaaaaaccgaaaaagaatttttt

SEQ ID NO: 83328 - DNA, 728 bp, Homo Sapiens
  misc_feature (666)..(674): n is a, c, g, or t
gaataagctggcggccgccgcgctcgcgcccctcacctgggtggccgtggcgctgctcgggggcgccttttacgagtgcgcggccaccgggagcgcggccttcgcgcagcgcctgtgcctcggccgcaaccgcagctgcgccgcggagctgccgctggtgccgtgcaaccaggccaaggcgtcggacgtgcaggacctcctgaaggatctgaaggctcagtcgcaggtgttgggctggatcttgatagcagttgttatcatcattcttctgatttttacatctgtcacccgatgcctatctccagttagttttctgcagctgaaattctggaaaatctatttggaacaggagcagcagatccttaaaagtaaagccacagagcatgcaactgaattggcaaaagagaatattaaatgtttctttgagggctcgcatccaaaagaatataacactccaagcatgaaagagtggcagcaaatttcatcactgtatactttcaatccgaagggccagtactacagcatgttgcacaaatatgtcaacagaaaagagaagactcacagtatcaggtctactgaaggagatacggtgattcctgttcttggctttgtagattcatctggtataaacagcactcctgagttatgaccttttgaatgagtagnnnnnnnnnttgttttgaattattgctttattaaaaaataaacattggtattttttgagtgca

SEQ ID NO: 83329 - DNA, 208 bp, Homo Sapiens
aagaaatgaggctttcactgagatttgtgtgctattcataattttaggaattactgcttagaacagctgcttgggtgtatttttctacacaggtctgtacttctgccactttctccttttaaaaaaacaaaactatgcatattatgtattaaagttttcttggttttatatatcagagaataaaaacttttttgacttttgagtaaac

SEQ ID NO: 83330 - DNA, 237 bp, Homo Sapiens
ggcaaatgaaatgtaccatttcaactttgattttaatagtgctagttgatattggtaataatgctaaccaagagatcaatgccagatttttctcttggggtaagttagctgaagtcatttaaagatggaaaggtgggaaaattctttgatatttgatgtcattgtatccacatttgttgtaagacatattgcataccaattataattatatcaattaaagttgataaaagcttcaaa

SEQ ID NO: 83331 - DNA, 813 bp, Homo Sapiens
gcaatcagaagatagattttatgtcaggtcatctagttacatagatatttccctgttgttattcctgagtccttagtaaaaaccttaattaaatgttccagccttgtctcggctgtgctataggaggtaaagcacaagtttatgtcatgattggttcagtgacaaaagggaacagactctttccaagagcaaactgggtgacaaggataaacttagtggtctagcagatgtgtttcagtggagtctcccaccgtccatggtgaaagcatgcaggttttattttctcagggtaaaagcttaggacagaatttcctgaagaaaggtacttccaccacatacttaagaatcacgtgagattaaaaatgcagagatctgagacccatcacagatacagtgaatcagaatctttgtggtaggtggcaggaatggcatttttgaaaagctgccccaaatgattctgaaactaaggcttcagaatcattgtgaaccatcactttatatagattggttctcaaagtgtgcctgagggatccctggagattcccaagacccattcagggcactgtgaagtcaaaacgtttttcataatcatactaaggcattatttgcttcttttcattctttcaccagtatacagaggtgttttccagagtctacatgatatgtgactgcacaacagactgaatgtagaagacatgagaacccatctatcttctttatgacagaaagtaattccccccaaaaaaccggccgcttttctcactaaatcgtttcatgttttataagttattattggctgggcacagtggctca

SEQ ID NO: 83332 - DNA, 895 bp, Homo Sapiens
  misc_feature (559)..(583): n is a, c, g, or t
atatttaatatagttatatataagtatgtatgtttatattttaagtgtagaaatatgtaacagttttactttttatgataagaactgaagtaaaatatagcaaaatattttggttcttaggagtggaaaccttgtaatttactactgtatgtaactatattcctattagaatttagagttatttatataaatatctgatttttttgtgtggtttttaaggtaatgctatgggctatgtacgaatgataagatctggtggtcttcattgtagcagcaatgccattagatttgttcctgatcttgaagatattgtaaattttgaagaactagtaaaagaagaaggtcttgcagaagaaacattaaaagcagcaaggcatttggattcagtcctcagtgatcacacacgaaattctgccgaaggcacagaatatttcaaaatgcttgtagacgtttttgctccagaatttcgaaggccaaagaatatacatctccgaaatttctatataattgttccccctctgaccctcaactttgtagagcattccattagttgcaaggnnnnnnnnnnnnnnnnnnnnnnnnntggagctgcctttactgatgatggctttgccatgggtgtggcttacattctaaagcttttggatcagtatcgggagtttgattcacttcactggttccagtctgttagagagaaatacctgaaggagataagagcagttgctaagcaacagaatgtacagtcagccagtcaagatgaaaaactcttacaaaccatgaatctcactcagaagcgactggatgtctatctacaggaatttgaattgctgtatttctcactgagcagtgcaagaattttcttcagagcagacaagactgcggctgaagaaacccc

SEQ ID NO: 83333 - DNA, 1027 bp, Homo Sapiens
  misc_feature (942)..(976): n is a, c, g, or t
actgaggagttagtccccattagttcttgtatcacattttcatttgcacgacattactcgcaggtggtggggagcctgggcttttggggaaccaggctgctctggtccccagcattgcctcctcctagcccctctagtccagtttgcctcccttaccctcattttccaaacctcttgtaccctcctctccctcccccagctggtatgtaagtgtcttgaagttcagtatgttatgatggaccaataattctgccacttcgggtttctccctacattcctgctccccagttttcatgtggggtactcaactgacattcccatggggtttccctcccatctgcctgatccacctcctcctcccaccaggagagttgggggttggccacaattgatctcttgtgagaggggtggctaccagtgtgtgtgtgggggtcatcactgccttggggaggagtggggcagggcagagaatccccccaattcctgcctgaaatctctggcctcacccctgctgggggttggactgaaaaccctcctccccaatttggggggtgttgccccatcactgcccagctcctctgactgccccccctgaatttagggtgggggtactagtcactgccaatgtgtgtatgggacttgctggaaaacggggatgcttgcccctctccaggactattgagcccagagagagctgtcctctcattgggtgaactgattgaggaagggtctattgtctttttaaatggcacaattttaagggtttgagggtacagtcccttaacctgccacgggagggggcccccaaactttcttccccccacacttctggttttctgtgtggagggggagcagggatatctaagctgtggtgtgaaagggtaggagagatgctggaggtgggggtgctgtgttctagaccccccatattatcccagtgtnnnnnnnnnnnnnnnnnnnnnnnnnnnnnnnnnnnattctgtggcgcatccagattgtgaaaatgtacaataaatgtgtaatgagt

SEQ ID NO: 83334 - DNA, 498 bp, Homo Sapiens
gggtacttgcaaaacttgtaaattagcagatgacttttttccattgttttctccagagagaatgtgctatatttttgtatatacaataatatttgcaactgtgaaaaacaagttgtgccatactacatggcacagacacaaaatattatactaatatgttgtacattcggaagaatgtgaatcaatcagtatgtttttagattgtattttgccttacagaaagcctttattgtaagactctgatttccctttggacttcatgtatattgtacagttacagtaaaattcaacctttattttctaattttttcaacatattgtttagtgtaaagaatatttatttgaagttttattattttataaaaaagaatatttattttaagaggcatcttacaaattttgccccttttatgaggatgtgatagttgctgcaaatgaggggttacagatgcatatgtccaatataaaatagaaaatatattaacgtttgaaattaaa

SEQ ID NO: 83335 - DNA, 692 bp, Homo Sapiens
cttgcggccgccaacacatctccccgcctcagccagaccttcctccaactctcagatggtgacaagaagacactcacacggaagaaggtcaatcagttcttcaagacaatgctggccagcaaatcggctgaagaaggcaaacagatcccagactcgctgtccacggacctgtgagctgctgctgactagggctgcatgggagagccagggaggggagtttctggaagaggaaagccatgcgtggaacatcgaagcctcagagagtgggagactgtccccatcagttgtccttacttagaggagacagagaggccaatcaggtcccagagcttgaatgctaacaagcccagcatcccctggggctgtgatcatggtggatgaggaagcctcaacgtagattcctgaactcaaggtaccagcaagaatgccttctcccagtgtgctctccccaacatcctaggcacagctttcataacccagtttcttaggtgtaagaaactgtttttatctcatttattaagtctcagaacttaacagaaaaggaagccttttaaatattctttttaattttattttagattaacagttttgtactttacatttttttatacaaccaaccagtttcttttctagccaatcatctctgaagagttgctgtttcttactgacaataaaaaatgttctcttggttc

SEQ ID NO: 83336 - DNA, 582 bp, Homo Sapiens
tgttaattcacctgctttgccacagaaaatggaggctttcacaagggtttgatcagaattaaaaccccaaacccgccctctgttaggggtggtctttataactttactgaacaagagggaagcaactgtgatgggaagagattacctagccttactaacaagaagcattctaatagataaactagtaccatcatgtaaggaagatgaagccatgttgcatccacatgttcccgtttgcagaaacctcacaggacagtacgaatatctggcatttttaagttcattaaagcagcaaattccttctcgcctttaagggctatggttgtagtgtgacccgtggctaacctgctttcaaaatcaagtatttgctgtagcagagctttattgcaggcattttaaaaattgaataaccatgtgaaataatttgggcttaaaagtgaacattaaattatagagtggaaggtaagggacaaaagccttttacctttaattttcctggagaattatataaaggttttcttagaacaattttgccctgattactgaagcgtcaaataaagctggagtgaaaattttgttttg

SEQ ID NO: 83337 - DNA, 522 bp, Homo Sapiens
gcggccgccttctcatcgctcctggaaggtcccgagcgcgacaccatgtcggagcccgggggcggcggcggcgaggacggctcggccggattggaagtgtcggccgtgcagaatgtggcggacgtgtcggtgctgcagaagcacctgcgcaagctggtgccgctgctgctggaggacggcggcgaggcgccggccgcgctggaggcggcgctggaggagaagagcgccctggagcagatgcgcaagttcctttcggacccgcaggtccacacggtgctggtggagcgctccacgctcaaagaggacgtcggtgatgaaggagaagaagaaaaagaattcatttcctataacatcaacatagacattcattatggggttaaatccaatagcttggcattcattaaacgtactcccgtgattgatgcagataaacccgtgtcttctcagctccgggtccttacactcagtgaagactcgcccgtcgaaactttgcattcattcattaacagtgcagtggcgtcc

SEQ ID NO: 83338 - DNA, 500 bp, Homo Sapiens
  misc_feature (39)..(39): n is a, c, g, or t
  misc_feature (263)..(263): n is a, c, g, or t
caagctaagattaggagaaaatattgcaaagaacatatncagtgtgtgttctgaatatacagagaaatctcaaaactcaacaggaagaaaacaagccaattgaaaaatggggcaaaatacttgaacagacactttaccaaagtggatatacagatatcaaatacacacatgaaaagatgttcagcatagccatcagggaaatgcacattaaagccacagtgagatatcacttacacccattgaaaaatgactacaataaaaanaaaatctgatagtaataccaactgtcatcgaggatgaggaacagctgaaagtcatgcattgctggagggaacatgccactgtggaaacaggtgggtgctttcttatagacttgtatgtgcactcaccttatgcccaggagtccctctcctgtgtgttcaacccagagatatgcaagctgtgttcacacaaaaacctgtatgtgaatgattatactagctctctttataattgcaaaa

SEQ ID NO: 83339 - DNA, 476 bp, Homo Sapiens
tcgaggccaagaattcggcacgagggaaatatttgcaccaaaagaaaaaagtgccattgttgtgatcaatggagtaaagctggggtatagtagaggctggggaagccctgcccatgttctctccaaggccacagcttgcacaccgtgaatggtggccccactggctccatggagtgtgccttcacgcgggggaatgtccttgtccaacacgctgtaatctactccatgggaactgactgtcctgcttttcacaacattgagaaacaggcccagagcctgtctcatgtgccaggtgcagtcacattattgttaaaataaagtggcttctgacaaatcagttcttcaaaatagcatcctatgtacttttcatttcttccaacaaccctcaggcccccttttgccagttttctcccccaggggagattttcaagactactggagaaaaatctgttaataaaacatttgctctgaaaaaa

SEQ ID NO: 83340 - DNA, 487 bp, Homo Sapiens
tttttttgctcaagtgacatctttcaatataatctctaaaactctatgaattgaacagataaaatacctctgggctattttgttacaaaatatttgccatttggattagttgctgggtgcagccaccctgcctttccctagagaggtttctctctcatgggtgacgggtgtgcggggagagggtgcagcaggagttatgtacagcaaaaacagggacggacagacagatggtcatcagggaagcctagtgggtacaaagagactcctggcgggccgtggggaccggtggcacaggggctcgaagacgcagggctggatcaagacacctgtgcagacgggcaggcaggcaggcaggcttccaggacacgctgctggtagagcttgcttcagatctaggggtgggacttgtccaaaagtgggtggaaaactagtttcatctcccattcccgactctggagtttgggccgaatggatcaaatcaggagag

SEQ ID NO: 83341 - DNA, 451 bp, Homo Sapiens
agtggccttcaacccatcagcgccccagcttgccacagctaccttggatggtaaactccagctctttctagctgagtaaccactgacctgtgagctgggtccaggaatgctgtgaggaacaacttaaaagtaagaagtagtggttcatccatcagggggccagaagcagcaactgtttttcatattttgagacttgcctcagatttcccccgtttgcaagctcctcccctctgtgtgtgccatgtcagagttttatgtctttctgctcctcaaaagggatccccttcattgggaaaatggaaatggcgtccagtacttctgcacagaatttggtaaagttaaaacaaaatatctttcaataaaacataatatagtatttgtttgataattagagttggaagaaaaaagagagaatttcttttgggcagtgaaaataaagcagttaacagtc

SEQ ID NO: 83342 - DNA, 428 bp, Homo Sapiens
aaattctggacacaatatgtttaatattagaagaatgattacacatagcttgttacagatttccaaaaaacagtaggtacagtttttaaaatttacattcacagagaattttaatgacattggaaaatgtaagaaactttgaaaaaaagatggagtaaaatatgtataaaattgataatagttgatttagggtggtagaagtaaacataattttttctgtttatatttttctctatcttttaaattttgctaatgtgcatagattcttttaaaataataagaaaataataaggttaatacgttataaaaaatagggacctggctgttgaagtgcgatggagacaatttgttagaacatgtggcttgttacacagacgcttgagaagtttgttgagagagaacgattacctagaaacaagagttacagt

SEQ ID NO: 83343 - DNA, 238 bp, Homo Sapiens
  misc_feature (20)..(20): n is a, c, g, or t
  misc_feature (60)..(60): n is a, c, g, or t
  misc_feature (95)..(95): n is a, c, g, or t
gactgctcccttttgtttgntgtttttttgaggggaattaagggaaaaataagtgggggncaggtttggagagctgcttccagtggatagttgantgagaatcctgaccaaaggaaggcacccttgactgttgggatagacagatggacctatgggggtgggaggtggtgtccctttcacactgtggtgtctcttggggaaggatctccccgaatctcaataaaccgagtgaacagtg

SEQ ID NO: 83344 - DNA, 968 bp, Homo Sapiens
gtctatggaggagatacatgttcgtcatatttgacttggatttaattcaaactttttttaattgaacgactcccactatatgtgggttactcaccaaattcatacatcctgaatatcaccaatgcattaatgttcttattcattgacttaatcacatttatagtatataaagtttatataataaggaaatttataataatatgactttttatatagtggggtatagggtatgtgtgtatgcacacgtgtttaaaggttctgtaagattttccttgaaaaagtttttgctgctgaaatagtgtgaaaaccacaaataaagtctcagtttctaaagtaagaacacataaacaagagtaagagactttctcaaggtcacacaaccaccaagtgcattgccaggttgatatgatggaacccctggtactctgcttgcataaacctccatagggagtagttagctatttggtacttagctgtcccattatgaatgtcaatggattagtcttcagtatttttgggggcgaaatcaagctacccctggccagatgtttttccttgaaattgatttgaattttatttgctcgcctattaaaatcctactatccagaaattctgtcatcaataagtggcaacttaaattgtgtaccctggtttaggaaaatagtaatatttgcaacttatgaatgataagtcagaaaagttacatggaatgttaaattttaaaggagataggcccttgttttattacatgccgaaatgttaatgttagaaattttagttcataagcaaaaaaaatggttgaggtgcaactgaagatcacaattccattattactatattgtttcagaatattttaatggaaagagtatttcaatggaagtacagtgaaacagtaggaatgccaaattatcttctaattttcataagtattttatgtatatacggtaaaaaagcctcactctattttc

SEQ ID NO: 83345 - DNA, 414 bp, Homo Sapiens
tttttttaaaatatacacatcttttattgtggtcataaatataatgtgtcttggaagcatgggacaaagtacttagtacattatgggttagttaacagtctctcaataaatagtgacaaaaataattttttataaacttttgcaaaattttaacaatgttttgtgtgtgtttattcaatttaggcttcttagtgttgaagaaaagaagaaaatagggcatctttgtaaattgctgattgaccaaggtcgaatccagtatttgcagcagaagggattcagtcctgctttgcagtactatacagaccctctggtgtctttggaaaatgttttgttaactgctttaccaaatcattcttcatcaccagaaacaactgcttaatggaaaagaaatttgagcatcatctgtcttccacc

SEQ ID NO: 83346 - DNA, 492 bp, Homo Sapiens
ggaatgtagtggccaccaggcaggaactaggactccagccagttctttcctggtggcccacgtgtaactgtgtgcccttgggcgagacatttcacttttctgtgcctgagtttatccagtaaactggagatggggggattcctcaccctgagttgtgaggattgaatgacagaaggcactagtgacagtgatgctggaggaaggagtgttgccaagtgcctcggtcactttgcctaatttcagaaagtcactctgagttggtatgttttgtgtttttaaaaaagctaggattcataaaattaaatagaaatcagtgaaataaaatatttgatatttaaaatacatttagaaatacaaagtgtcaagcaaaacgtgaatttggaaatctatggaacattagataaggtatttaaaagtaattgccatgtaaaaatgacacgaacttgaagtaagattatttgatttttctaaaaatacaagaaagcttggtgc

SEQ ID NO: 83347 - DNA, 616 bp, Homo Sapiens
cgcacaaacacacacacgcacgcacacagtggcagaagggatttatattaatattctttcccctctggccttcttacagtctgttggtccctttgcttctgttgtcagtgtgttgaattgcaaaccgagtactgctgtaaatactatgtttacttcatgctgaatgtttgcaaagacttgatataagtattaatagtaatgaatcaatgaataaataatgagctagggtttgtgaggctttctacaaataggtcagctccacctggagtgcgaattgccagagacaccttggtagtgcccatcggcaaatcgcaatggcagcatgtgagtggaccattcagaaacttctgcttggtggaaagtaaacagagaggatggaggtttggggcgaatgtcctgaggcagagatggtctttattgtgtgtggtggtggttgtggtatttataataatgcaagcataccctcccttgagtctcaattgaagataaaagaatgtactgagcaagcaaagccaatggagagtatttcacaaaaatactttgtaaatgagatgccagtagtgttcaaagttgtatttttaaaagataaatattcctttttatacctcaaaaaaaa

SEQ ID NO: 83348 - DNA, 1375 bp, Homo Sapiens
  misc_feature (673)..(673): n is a, c, g, or t
ctattttgcatgtataaatatcaagacaccaaaattatttatagctgggcattaaaaatatctgacatttttctccccgcaaagatacttttcttaagctcacactttaattatttgtagactgctgttaagctaaatagccccaaaggaaacttttaattcatttagagactgtcaagtttccaattgcattttaactagaaagccactttcaatagcgtgattgtcacgacaggctatgacggggaaaggtcgcacaatcttgtgggatgaggccagtgaaatagaagctttctctacatcaaaaacagggaagctgaaggctaaatgacccactgtctcacaaaaggcactgagtactatggtctcataaagtgtttttaaaacattttgataacttattttaaaaagaaaaagaggaaactgtggattatgtgagtttttgcagcaatctagtgattccttccagcaggcccctgcttcccaggtctatgagcaactactgctggccaggccctggctctcaagggccgagtctcagtttaaggccagattaagggggaaaattcgtccgagtagacctggacgaggaaaatttggtatctgtagcttttaagggcacacatatccatattaaaatgcaattcttatctgaaaatttaaaatcataacnttatagaaaggagttaaagtcatttacatgcttacagttagagaagtaacttgagatctgtagcttatatgccgcagaagttagccatcaacatccatgcttagttttaaagaataatacttggtaggttgtttatttttaactggcgatagaaagatgggaattactatttattcagtcataggacagtgccccacatcttgctgactgagcacagcgcaagcctgggaaattgctaccatctttgggagtcaggcctcactgacacagaccgttctgaatctctgaccgtgacgcctgtctctgggctactcaacagagctgaatagctgggaaggctgatggctcaacccaactgccaagttccttccaggtagggccatgaataggtgcatgaaaaggttaaaaattcccacttagttttggatattaagataaactgtcttccagcttcctggctcttgtccgaacctagagaatatacggaaatgtcaccctgtcagaacctcttctgcctggaattcttccttttgcagagtggagattctgacttcatggcccttcccaggcaggctcacccaaaggaaaatggagtgaagaaaatcaccagcaaatcttccctgccgagggaccttggaacacccatatcagtttacattagcaactttatgaaaaactctctttaaaggaaagtttggatcc

SEQ ID NO: 83349 - DNA, 483 bp, Homo Sapiens
  misc_feature (25)..(25): n is a, c, g, or t
  misc_feature (45)..(45): n is a, c, g, or t
  misc_feature (234)..(275): n is a, c, g, or t
  misc_feature (473)..(473): n is a, c, g, or t
cagagccaacattaactgtcaggancgtaggcgtcacatccagcnaaaggcagagatggctagaaagatgggaaccggctacgtgttaccctggaaagtttgttttcttaagtcatattccaaaaacataactccaaggcatacgcatgataaaatgcaagaataaacttttggccactttgtggaactcttaaaagaacctttccagccgggcgcagtgctcatgcctgtggnnnnnnnnnnnnnnnnnnnnnnnnnnnnnnnnnnnnnnnnnnctacacaccagctttctattcacctacacacaactgatgctcttttggagtggagagttttagtaaaatatgatggggtcttcaggcacctgagttgctacttactactatgagaagatagaaaatgttttttcctctaaacagcttttgaaagaatgaatgcacaacaaggcaaaaaataaaaactttcttttcccnctctacgaaa

SEQ ID NO: 83350 - DNA, 1370 bp, Homo Sapiens
  misc_feature (780)..(797): n is a, c, g, or t
gcggccgcggcgagggcccttgccagcccgcctgagatgatgtgggactgcgggttgtaggtccggagtggggttgacctgctcctgcaggaactcataggtgatgaagtggatggactggaaggggatgttcatggtcagctgcgtggtgtagctccggtagaaggcccccaacccctcggtcctccacaccgtccggatgcagctgattgctgaccggtgctgcgagttgtacatctgcaagcgctgcttcaccacttctgctggattcattaccgcatcgtggagcagggtggccatactcccagctatccctgcaaaacaaactccagaaaattaccctctgcgatcgggtgttctcaggaagttcctggaacctaaaatcagacggaacccaggacttagctttctaagaagcaaaatgtactaccagctccgcccaggtgagcactgactcttaaaaccctgaagtgatggtggaaatatgataaaaatggggatggttaatttaggcacactcaaccacattttaatcttgcaaaaacatggttttctttcttgtagtcaaccctgggaaaaagctaaacctgcaagtgttggtggttcccagaaaccacacaccatggctttttccactgtctagatgttaactctctcttgtccctcgcctttgtctacacattaactcactttgcccttaagctggggccctgaaaggagatatcatatctacagctgagaagggggaaaaaagaaaatctggttacaatccaggctttnnnnnnnnnnnnnnnnnnctgggcaagagaagaggaaatcaggaaaatctgcattttgtagatttccagggtcagtctgcaaagcgacgggactgaccccatctgagagtcgggtcaggcctggcttcaagaaccaggaacctcaaaagccagaatcaggcctggaattttgctttcggctttgagtttcctccctttgcggtgacactgccccgtaattaaaatgaccacgggaaggtgggaggaatgaggaacaccaggatgactcttcagcaatgcatgtaatacccactcccccaccacacacacacttataatcattcccagcaagatcaccacagcatacaccacatattgcagaaacagtgcagggcagcacttggcataaaatggattccgtcaaatctctttcaaggagtaaaaccattacgtaaggcagtttcagcaaaagaagggccccaatgtcatagaatcaggggtaggtcagggcatagctctttagagatcatctcaataaatgcactaatggccaatttttacaaagcagaacaaatatctgcaaaccagccaggcacacttatgaccaaggtt

SEQ ID NO: 83351 - DNA, 778 bp, Homo Sapiens
  misc_feature (581)..(581): n is a, c, g, or t
  misc_feature (676)..(710): n is a, c, g, or t
  misc_feature (762)..(762): n is a, c, g, or t
tgccatacccgtcagccggcctctgatgttgccagcgagaggccacgtctcctgagtgttcagagggtcttacagacttccagagggtctggcggccacggcgaggccccgccagcccgcctgagatgatgtgggactgcgggttgtaggtccggtgggggttgacctgctcctgcaggaactcataggtgatgaagtggatggactggaaggggatgttcatggtcagctgcgtggtgtagctccggtagaaggcccccaacccctcggtcctccacaccgtccggatgcagctgattgctgaccggtgctgcgagttgtacatctgcaagcgctgcttcaccactgtggttggaaccgcggggcaggccagacggacagccagtgggcagtgggttggatgtggccccaccccaggtcggaatgaagccaagccataaagagaaacaagccagttagacaccggaaacaggcgagagccagcacacacagccctagtctgagcagccgcggagggccagctcccggcagtcctaggttaaaatccatttttatctccaggactcacgcctggaaggtgngctatttccgtctctcctgcctgaatcttgctgaaggcagcccccccggccgtaatggccgaattcccgggcatatgtccggtaccgtcgactgnnnnnnnnnnnnnnnnnnnnnnnnnnnnnnnnnnncggccgcttcctcgctcactacttcgctgcgctcgggttccggttttcccgngctttacctaggtcag

SEQ ID NO: 83352 - DNA, 416 bp, Homo Sapiens
aatgcagagtccactaatgggtcatggcccaccatgtaaaaaacactagttattaaagtgacactggggatgtgaggtgtgacctcacgaagaagcaaatttaatattataatgggaagcatccaccaggccgactttgcacttagaactgcaaaataagtagcatcaggttcagggttgaaagtgaccagcacagagctccacagtccacattaccttcaccgagtccaccgggtacatgaccgagtgctccaggatcccggccatcgctcctgctgtcatgtgggtggacacggaggcgctagtcggcaggttctcgtagtcctccgacccggtggcgtccttgccgccgccgccatctcggctgtccccatccatcctccgcgccaccgcctggctgcccacgctcccgctgc

SEQ ID NO: 83353 - DNA, 1557 bp, Homo Sapiens
  misc_feature (308)..(380): n is a, c, g, or t
  misc_feature (747)..(747): n is a, c, g, or t
  misc_feature (756)..(799): n is a, c, g, or t
  misc_feature (882)..(916): n is a, c, g, or t
  misc_feature (992)..(1005): n is a, c, g, or t
  misc_feature (1143)..(1143): n is a, c, g, or t
ctcctgcagcctcctgcgccccgccgagctggcggatggagctgcgcagcgggagcgtgggcagccaggcggtggcgcggaggatggatggggacagccgagatggcggcggcggcaaggacgccacctgggtcggaggactacgagaacctgccgactagcgcctccgtgtccacccacatgacagcaggagcgatggcctgggatcctggagcactcggtcatgtaccctggtggactcggtgaagacacgaatgcagagtcttgagtccagatcccaaagcccagtacacaagtatctacggagnnnnnnnnnnnnnnnnnnnnnnnnnnnnnnnnnnnnnnnnnnnnnnnnnnnnnnnnnnnnnnnnnnnnnnnnnacgaaatgcagagtttgagtccagatcccaaagcccagtacacaagtatctacggagccctcaagaaaatcatgcggaccgaaggcttctggaggcccttgcgaggcgtcaacgtcatgatcatgggtgcagggccagcccatgccatgtattttgcctgctatgaaaacatgaaaaggactttaaatgacgttttccaccaccaaggaaacagccacctagccaacggtattttgaaagcgtttgtctgcgagttagaaagttctcttcttcaagcaacgtccctccccaggggtggtcctccctgttgacccagaccgcctcgacttcggcccgcttgctcacgaataaagaactcagagttgtngtgcaatgnnnnnnnnnnnnnnnnnnnnnnnnnnnnnnnnnnnnnnnnnnnntgcttttttctgttcccctccgctttctgaagcctggggagaaatcagtgacagaggtgttttggttttattgttatgtgggnnnnnnnnnnnnnnnnnnnnnnnnnnnnnnnnnnnaaacattcaaaagcaattaatgatcagacataggagaaaccctgaatagaaacaaaacttttgaatgctggattcnnnnnnnnnnnnnngttatctggacagttctttgagactatttaaaaacgggtacaacaggtctctacaacgccaagatctaactaagctttaaaaggtcaagaagttatatggctgacaaaaggactcgcgcaacgcagaaggcctttccncaccttaagcttccggggatctgggaattttacccccagttctcttctgtaggtctgagtctacatctctctgcaagcaagggctgaaatcattttgtttgggatagctgggagtatggccaccctgctccacgatgcggtaatgaatccagcagaagtggtgaagcagcgcttgcagatgtacaactcgcagcaccggtcagcaatcagctgcatccggacggtgtggaggaccgaggggttgggggccttctaccggagctacaccacgcagctgaccatgaacatccccttccagtccatccacttcatcacctatgagttcctgcaggagcaggtcaacccccaccggacctacaacccgcagtcccacatcatctcaggcgggctagccggggccctcgccgcggccgc

SEQ ID NO: 83354 - DNA, 406 bp, Homo Sapiens
gcggccgcggcgagggccccggccagcccgcctgagatgatgtgggactgcgggttgtaggtccggtgggggttgacctgctcctgcaggaactcataggtgatgaagtggatggactggaaggggatgttcatggtcagctgcgtggtgtagctccggtagaaggcccccaacccctcggtcctccacaccgtccggatgcagctgattgctgaccggtgctgcgagttgtacatctgcaagcgctgcttcaccacttctgctggattcattaccgcatcgtggagcagggtggccatactcccagctatcccgttggctaggtggctgtttccttggtggtggaaaacgtcatttaaagtccttttcatgttttcatagcaggcaaaatacatggcatgggccg

SEQ ID NO: 83355 - DNA, 584 bp, Homo Sapiens
  misc_feature (43)..(66): n is a, c, g, or t
tgcacctgcacccgaactattggggcataattacagtaagttnnnnnnnnnnnnnnnnnnnnnnnncggtcaatttgaatccttgaagatagaaaggcgaattattaactttcccaaatttggtttcttcaaacttttggaaatggcaattttacagggctaacatatttggtgaaacagattgttttaataaacagttacctcttaaaaaagagcttttcaaaaatagcatgtacctggcataaagtctagccatgtgtcagaaaataagtgtgttttcagaagaaccaaacagcctcacttgatactataaaccccattttgaagacttaggcacataaactcagttaaaacattggggaatatccagttcttcaaaccacaatctaacctgttctgtgatgttttaataggtgcctaacctgtttcagctccaactaccccataaagatttcttgtctcgaccagcagggttgaagacatttttgaataagttgacttaaaccacagtctatcagtcagctttgaccacagcaaaaacaggctctgcaattgctagaaaagaaattcatacttgagaattt

SEQ ID NO: 83356 - DNA, 795 bp, Homo Sapiens
  misc_feature (678)..(678): n is a, c, g, or t
cagtcgacggtaccggacatatgcccgggaattcggccattacggccggggatgggaagaattactgtggcctaccaggtgaatattggcttggaaatgataaaattagccagcttaccaggatgggacccacagaacttttgatagaaatggaggactggaaaggagacaaagtaaaggctcactatggaggattcactgtacagaatgaagccaacaaataccagatctcagtgaacaaatatagaggaacagccggtaatgccctcatggatggagcatctcagctgatgggagaaaacaggaccatgaccattcacaacggcatgttcttcagcacgtatgacagagacaatgacggctggttaacatcagatcccagaaaacagtgttctaaagaagacggtggtggatggtggtataatagatgtcatgcagccaatccaaacggcagatactactggggtggacagtacacctgggacatggcaaagcatggcacagatgatggtgtagtatggatgaattggaaggggtcatggtactcaatgaagaagatgagtatgaagatcaggcccttcttcccacagcaatagtccccaatacgtagatttttgctcttctgtatgtgacaacatttttgtacattatgttattggaatttttctttcatacatntatattcctctaaaactctcaagcagacgtgagtgtgactttttgaaaaaagtataggataaattacattaaaatagcacatgattttctttggttttcttcatttctctgggtcac

SEQ ID NO: 83357 - DNA, 859 bp, Homo Sapiens
  misc_feature (65)..(86): n is a, c, g, or t
  misc_feature (202)..(212): n is a, c, g, or t
  misc_feature (228)..(249): n is a, c, g, or t
aaatactcatgcaattttatttctagttgatacaattttaaaggccatgtacaaatgttatacannnnnnnnnnnnnnnnnnnnnnaggaaaaaatacacaaaaggcaaaacatcctcaaatggtccttttatacagtgcagaaggaaatttcaaatttcaaatacgtgtcacaaatgctgcactctagcagccaaaatacnnnnnnnnnnnggagggtagtccttcnnnnnnnnnnnnnnnnnnnnnnaaacatatggaaatttgtttttacacagatcggtctgtgtttcaaatttacaatggatatctaaaaaaaattctacacggcaaatattgccaacaaagttacaccattaatactgataaacggaggagcctacgcggtgttttgattattagggaaagaaagtagaataaataaacaggagccttgctatagtttttaaaagtgccttaacctttctgcgtccccgcaatcctgaatccgcgcggtcaccgggccgtcctagtccctgcgtcgcgctgtgttcggctcgttctcggaccagaaagtttacagtagaggttggaagacagaaaaatacccactgaaaaagtctaaataaaattcaagacaaaacataacagaagaggctgaagcgaaggaagaggaggaacatggaaggggacggaggcggacgcccggacggccgcttgcttcgtggctccttcgactttctgtttaaagacggacagtggcttccgaaatgcaagttgttcgcacaaagatccacctgtggtccacggaggagacttcggaggtggggagggagatcgggagggagatctgagctcttgtcatcccgggaattccggac

SEQ ID NO: 83358 - DNA, 775 bp, Homo Sapiens
catgcacctgtttcactgtgaatagtgaatgtaaaggaaagaaaggaaaaactgaaagcttgttctatcacaggtatgagctgctatgatacatgaagaacattccatgaagtatgttttaaaaccttgttatatctgagaggctttaaaagcctattaactgtttcagggcaaccgcggtacagacgtggtctctgtgagacttccacctgaccccagttttaagtggtacgaatgttgtgcatttaatgttaaaggacagtctgcaataataaagtaagtagccaacctgggtgcccagcagtgctgagacctggctgctctattgtaagctttggaaacacaatttatgcaacagatgtccagatatgattctatttatggaaaaaagtttatatgtgttttacaaatggttttaccatcttatattaaaatgaccttttgacaggtgtgcactgttttgtctccagtgagcacataccatgcggattttatatgtacatcagtagtgtgaatccactggcacagtgtgtgtaaatgccagatgtggtgagattttatcttataaatgtgatcagataaaataactcctgacagaaactgtaaggaaaccagctgaatgtttgacctgatgactgatgttgtatggtttatgttaaatgtatattcttttaatcaatgaataaagcattaaaaatgatcattgtaatatattttattgtatatgaagcatgactacttttagtgttaaataaactgcaataatccttaaaaa

SEQ ID NO: 83359 - DNA, 459 bp, Homo Sapiens
tccttcctcaagaccagcccctgataattgaatagatagtttttggagaaaatgacttagagcctgtcagtacagtcagcaacctccttgtccctgcatatttgaactttccaaaaataacagaatgctccaaggtacttgtctgcagctcctgacaaatctccaggcagtcccagcagattttactctgcctgctgctttgtattcaccttctcacagatccaaaggtaggaagggccctgtggaaggaagcacatccatgtcccttcctgatgctccctgggggagaactggtggcttcgtgcttggaaaaaataggggcttcctgcagctagggacataagctaagctgctttccttctccctcatgggagaagagacaggtaagatggcaatcccctggaagtctcagtccttagaagaaaagagttctaatacattcccataaaacatttcaag

SEQ ID NO: 83360 - DNA, 1313 bp, Homo Sapiens
tgtatcttctccaggtgtaaagcctttcccgggggggccattcgttttttccaaagggtgagggaaaacccatattttgttaccatttaaaaacccccatttccaaagggtggggtggcattttgtaccttggcaaaaggtgagggtccagggggatgcccaccctccaaggggggcgatattccagggggggcacaagtttctgccccccggggagcccccgaatcgtttcttctgggggcgacaaggtgtgggtgaacgggggccgtccatggtacccgccccagtgttgatggaaacgcagcgaggagcctgtgattgtctcacttgcccggaagcttgcaggacgtccagttctgtcccccgcggcttctccccaatgataaactctctcaaagagaaatgccaaacgtgcctggtgtgccgggcggcctcactgagtgctgccagcttccccggccactcctgcacagtggatccaccctcccgaaagtggcagatgacaagcacactcttcctggaaaccgcctcgaacgtgctggctactgcattgttaacacaacttcaaccaagaaggtgaacgggtgctttaagaaaaagtattttttttaagcaagtgaaaattgatgaaccgattcccctccacccgtaactggatttttccacaaatctctctttattattgtttgattaaacaaaaatacacttttaactgctaaactgcgctgactacgggagagctaagggccctattactatgcagttataatagaagacacacaattaaagtcagatcatgattcctgacaacatccgtggggtgggggctcccctgaggcccctgaggctgccgctcactggggaagggccttgaggatggcgttcacctcctcagccacggctgtcagcgcgaactcaaactgctccttcgtctggaccatgccgggtctctggtccctcaagtgctccagggtcgctgcgatatcaatctctttagcacctttggccatcttgttgagaaccatgtcgatcaggacgtaggtgccggctccggcctgcaccgtcagggggccggcgagaggaaaggatggcggatgtgagagggggaggaaggacgcgggctgggagaatccaatgtgaggggagaagtggaggcccctgggggcttcgagcctctgagcagcttgtagcttgtgggatgagctgctgtgctcagatgtgactccctcttgcttgttcccccctctttggccaaagatgtggtaaattttgccagaacacaatgaactaagcgtttgactgtgtcagagttg

SEQ ID NO: 83361 - DNA, 744 bp, Homo Sapiens
tgcggccgcgtggtgatcgtcatgctgacacccctcgcggagaacggcgtccggcagtgctaccactactggccggatgaaggctccaatctctaccacatctatgaggtgaacctggtctccgagcacatctggtgtgaggacttcctggtgaggagcttctatctgaagaacctgcagaccaacgagacgcgcaccgtgacgcagttccacttcctgagttggtatgaccgaggagtcccttcctcctcaaggtccctcctggacttccgcagaaaagtaaacaagtgctacaggggccgttcttgtccaataattgttcattgcagtgacggtgcaggccggagcggcacctacgtcctgatcgacatggttctcaacaagatggccaaaggtgctaaagagattgatatcgcagcgaccctggagcacttgagggaccagagacccggcatggtccagacgaaggagcagtttgagttcgcgctgacagccgtggctgaggaggtgaacgccatcctcaaggcccttccccagtgagcggcagcctcaggggcctcaggggagcccccaccccacggatgttgtcaggaatcatgatctgactttaattgtgtgtcttctattataactgcatagtaatagggcccttagctctcccgtagtcagcgcagtttagcagttaaaagtgtatttttgtttaatcaaacaataataaagagagatttgtggaaaaatccaaaa

SEQ ID NO: 83362 - DNA, 727 bp, Homo Sapiens
agtcagagcctccatccaagcttcatctgcagtaccagcgtgcatgtgaggccagcagtgcaggtatgtgtaggtcagggtggctactagcaggagggggaccacaagaccagccaggagcacctgcaccaagaacatctgcctccagccacagacagcggcacagcgctctgcacagctccacagggtgctcgtgagccaggacacgcagccatcgccatgttcatagaagccaggcaggcaggtcccacagtcagtatctctgcgggaacagagtagccgtgtgtggcggtgcagggccccgcagtctaggcatggttggcagtagaagggtgaactgctgacacattggctgacctggcactccacaaaccagcctggcttacagccacagcgggtgtcggccactgctgaacagttctccagcgccacctgggaggcctgctcatcacaggcctggcagcgggcacattcagaattatggtggttctcccaggccaagaaggtgtcttggggacacacaaggcaggtggagttgccgcagggctccgtgcaaggggccttcaggtagtgccccgctgggcagcctctgcaacaaaacagaccaatcttcttgtggaagtcaccggcacagtcacacctggggctacgagtgccgccctgggcccgggcccccagcagcaccaggaggagcgccgccgccaccgccgcgcagccccgcggccgc

SEQ ID NO: 83363 - DNA, 461 bp, Homo Sapiens
  misc_feature (63)..(64): n is a, c, g, or t
  misc_feature (151)..(151): n is a, c, g, or t
  misc_feature (164)..(164): n is a, c, g, or t
  misc_feature (174)..(174): n is a, c, g, or t
  misc_feature (176)..(176): n is a, c, g, or t
  misc_feature (178)..(178): n is a, c, g, or t
  misc_feature (180)..(180): n is a, c, g, or t
  misc_feature (426)..(426): n is a, c, g, or t
ttcctgccctatcacaccgtgcacttctccctttccttaaagaaccaccatcaactttaggannagggaaaggggtggctctggcaggaaaagccagaatcccctctagccagcagagagagagagtcaagggtctgtttgggtggcaggnatagccacttctnaaggtagaantnantntaagccaccaaattggtatctttctgtgaaatggacatcgtgcttagagtctccattttccccacaacctggaggaataagtattgtcatctgcattttatagctgaggaatctgactcaacaaaattaaattactcacctaagcaattagcaattaaccaagtctttctgattcagaaacccagctgttgcctgttcatatccagcccctgtattgggatcaagattgccctattctcagtgcanaagatcaggcagatcacactggactccagcactga

SEQ ID NO: 83364 - DNA, 582 bp, Homo Sapiens
tcagctataaaatgcagatgacagtacttattcctccaggttgtggggaaaatggagattctgagcacgatgtccatttcacagaaaggtaccaatttggtggcttattttcctttctaccttcagaagtagctaaccctgccacccaaacagacccttgactctcaagtggacggggtcccatttgcacagggggagaccttacagcctacattgagtctatacttaccacttagtgagcatggtatccgctcaggggcctctgtgggcatccgtctcctctgcagcatctttcctccccaccgctgggcctgcacatgaccccctccttgggttaggcctctgatcagtgatgaccttggtatggtggtaatggtcagtcttggcaccaaatgagccagtttatatcatcagctattcaataaaacactaatctaggtgtcacctgcccaagaaacaccgagtgaggccatagcaactcccctacatcaaatgctcaagccctgagttgccgccgagaagcccacaagatgtgagtgaaatgagcaaaagtcacctgcccaataaagcttgacaagacaa

SEQ ID NO: 83365 - DNA, 1228 bp, Homo Sapiens
  misc_feature (130)..(138): n is a, c, g, or t
  misc_feature (1131)..(1166): n is a, c, g, or t
aatgaaatgcatcagacaaacatctacaaacaaacatgaatacatgggcatacaaaagcacgtggacaagttttctgtacagtttatgtctcagatacttctatgtatacataagaaccactcagggggnnnnnnnnngatttccctctccagctccctgaatttctgaaagttgtctgacccataaaatgttaaaatatttcatttttatataaaatatctacaaaaatagataacatttacaaaaaccagacagtatttccagttttccttagtaaccgttaacgcagtccccttcctcttttttttcttctcagaacgttgccatctccagcaaagagcgcttgaacagctgggcatttctagaaaggtctgtcacttggtgcaccatttcctgcagggccgtggtgctggggtaatggagggcggccatcttggttgccatgactatggtcttgagctgctgcagagctggttgctggagttcatgactttgttgcgaatgtcctgggcagtcacctgccgtgtcagcgtgtctccaatgaacaccagtttgtgtgcactgaggatgacaaacttgctgtgtgccacgaagattcgcgggggctgggctgagctgacacaactgaagagtgcgtcaatggcgttgagaagggaaatgaaatgggtctcacattggtcatagtagaagcacagcaactgccgatcctgagcactcacgccactgtttgtggtgggtaggctctgagagggcttccacttcgagatgtcattctccacgggctttgtaatctcttgttccacagctggaactggctcagctgatgatgttccagctgcatcttgttctgtttcatgatattctctttttccatagctctttctgttgcctcccaactcctccttaccctgtaggtggacgtaatcgtagtcatccatccagctcctctcagaaccatcactgctgcctacagtcaggggcctgctccttgctcaggcctgggggcagtgccttgttgtgggcctgggccttgtggtcaccaggatgcagcagctgtccctgggagccaccgtgtgggtcccggccgtaatggccgaattcccgggcatatgtccgctaccgtcgactgnnnnnnnnnnnnnnnnnnnnnnnnnnnnnnnnnnnnccgcttcctcgctcactacttcctgcgctcgtcttcgctcgaactagcccctagtgatcata

SEQ ID NO: 83366 - DNA, 674 bp, Homo Sapiens
  misc_feature (562)..(601): n is a, c, g, or t
atcactcacaccttgcatttcacccctgcatcccagtcgccctgcagcctcacacagatcctgcacacacccagacagctggcgctcacacattcaccgttggcctgcctctgttcaccctccatggccctgctactggccctcagcctgctggttctctggacttccccagccccaactctgagtggcaccaatgatgctgaagactgctgcctgtctgtgacccagaaacccatccctgggtacatcgtgaggaacttccactaccttctcatcaaggatggctgcagggtgcctgctgtagtgttcaccacactgaggggccgccagctctgtgcacccccagaccagccctgggtagaacgcatcatccagagactgcagaggacctcagccaagatgaagcgccgcagcagttaacctatgaccgtgcagagggagcccggagtccgagtcaagcattgtgaattattacctaacctggggaaccgaggaccagaaggaaggaccaggcttccagctcctctgcaccagacctgaccagccaggacagggcctgggnnnnnnnnnnnnnnnnnnnnnnnnnnnnnnnnnnnnnnnntcagagtaaagctgctccacccccagattgcaatgctaccaataaagccgcctggtgtttacaactaaaaaaa

SEQ ID NO: 83367 - DNA, 452 bp, Homo Sapiens
  misc_feature (280)..(302): n is a, c, g, or t
  misc_feature (391)..(391): n is a, c, g, or t
gaatccctaaatggagccctctactgccctccccctgctcctggaagcctggggctccctctgatccccaattgcagctaccagcccctctacatggcattcaagaacctgcgcacccatttgatcttcaattgtacatctctgtgtgcctgctctaagtccagccctatcctgggtaatgttgggaacatggtggtaacagatggacctcataggtgggaattgaacaatgagaacacatggacacaggaaggggaacatcacacttgggactgttgtnnnnnnnnnnnnnnnnnnnnnnntagcattaggagatatacctaagctaaatgatgagttaatgggtgcagcacaccagcatggcacatgtatacatatgtaactaacgctnacattgtgcacatgtaccctagaacttaaagtataataacaataaaataaaaataagaata

SEQ ID NO: 83368 - DNA, 759 bp, Homo Sapiens
  misc_feature (50)..(50): n is a, c, g, or t
  misc_feature (109)..(109): n is a, c, g, or t
  misc_feature (227)..(227): n is a, c, g, or t
cctcgctatacatgggcccagcaggccatatgaggggtcaggcctgcagnactcacacttggcacctgctccaaaaccctttcaggtctttgaggatctgagccctggnctgggtctcccgccggctcggaaaagctggcctgccgggcagacgagagaaccacacgattcagaaaagcagtgcccttcagcagcctctccaccgtctgggctccccaaaggcagancgggacctgcgaaatgtgtgcgcgctgtggtatgggtgtgcaagtgtgcgaaggcggcgtgttgtgtgagcgagagggtagcggatgtgtgtgtgcgtgtgcgcgcgtggctccgggtgtgcgccgctgcgatagcgggtcctttcccggggcgggcgacgggcgggctgggaaggtctcctcccctcaccacattgagaaatctcagtgagtcaccgagtggttctgcatattaatgagctcgctcgctgcgagggcaggagcggatttaaaagaggccagggcgggcggagggaggctgtggagagagcgcggagaaaacgcagagcgcagcgcacggccacagacagccctgggcatccaccgacggcgcagccggagccagcagagccggaaggcgcgccccgggcagagaaagccgagcagagctgggtggcgtctccgggccgccgctccggacggccagcgccctccccatgtccctgctcccacgccgcgcccctccggtcagcatgaggctcctggcggccgc

SEQ ID NO: 83369 - DNA, 658 bp, Homo Sapiens
  misc_feature (224)..(224): n is a, c, g, or t
  misc_feature (276)..(336): n is a, c, g, or t
  misc_feature (377)..(386): n is a, c, g, or t
  misc_feature (388)..(488): n is a, c, g, or t
ggcacgagggagatagccaaagcttgtaggctgtagatctccaaaagaagggtgtctgtggcgccgtcagtgaagatgatcactaattgggcaccctgtccctcccgctgctctagcccagatctcagaccgcctggtaaagcggaggaagattacctagacgcatgctttccagacagggcgttttgtctgcatcacagccactggttggtcctattcattcncatttttatgtatgttttgaaaagaaaaggtccggggatggtggctcacacnnnnnnnnnnnnnnnnnnnnnnnnnnnnnnnnnnnnnnnnnnnnnnnnnnnnnnnnnnnnnccattctggacaacataggagaccccatctctaccggaggnnnnnnnnnngnnnnnnnnnnnnnnnnnnnnnnnnnnnnnnnnnnnnnnnnnnnnnnnnnnnnnnnnnnnnnnnnnnnnnnnnnnnnnnnnnnnnnnnnnnnnnnnnnnnnntgtgtggccacactccatcctgggtcacagagtgagaccttgtctcaaaaaagtaacataaggaaaaaagaagccttgctttagcacaggtatgaagccagaagccagcatctcaactgtgcttgtcttatgcagaaatataaagcgatggccaggttggacttcaaaaa

SEQ ID NO: 83370 - DNA, 1247 bp, Homo Sapiens
  misc_feature (13)..(13): n is a, c, g, or t
  misc_feature (24)..(24): n is a, c, g, or t
  misc_feature (54)..(54): n is a, c, g, or t
  misc_feature (74)..(74): n is a, c, g, or t
  misc_feature (131)..(131): n is a, c, g, or t
  misc_feature (165)..(165): n is a, c, g, or t
  misc_feature (202)..(202): n is a, c, g, or t
  misc_feature (208)..(208): n is a, c, g, or t
  misc_feature (214)..(214): n is a, c, g, or t
  misc_feature (228)..(228): n is a, c, g, or t
  misc_feature (279)..(279): n is a, c, g, or t
  misc_feature (290)..(290): n is a, c, g, or t
  misc_feature (308)..(308): n is a, c, g, or t
  misc_feature (527)..(578): n is a, c, g, or t
gtttcagccaagnggggatgtagngatgtcccggcccaaggcactggataatcnggcccttcttccttttatantcatcatcacatcggaaaaggctactgtttaattatatcccctcccaaatccgctcnggaaccatgcggtaactgccccaaacttattttngtacccaaatacccatggccaactttggaatatattngatatnccattnggatttttctaaanggggaaataaactatatatatatatgtatcttccccccaattcttccaacngaatttctatnggaagccatggatgatgncatggcataagtttgccacatattacatgattttaaataatcctcaaaatacccaaggaactcttaaagagttttggtatgagtatactactttggtttaattttagcttcatggatgttctgcatggaaggatttttgttttccacattttcccattgctagcagagtgaaatccaagagaccaaacatttgcaagcattgtatttgagcactttgtnnnnnnnnnnnnnnnnnnnnnnnnnnnnnnnnnnnnnnnnnnnnnnnnnnnngtatctagaaggctacctcagaatgagactctctaacctacatcagaaccagagaagaatgtgcactatgtgggtctgttatcattattttcttttagtctgtatctttttggagatttatccaagtgccagattactcagtgctataattttcttttagttaaacaaagggggtcagacagacattgcatcatccagacatgccttgttggacatgtacgaatccgatggagcactgcacaccagaatgattggccaatgagcagcttctctccctgaaacaataactgcccatttggcaaagggaaagatgacaataatcagaagaagaaaatgaactgggatgcataccatagacgaacgaggcggagactattgcgggaatcttactgtcaggagctgttcctagaactaactcccttactgtcattgatgtgccattccactctgtgcttttctgtacaaccattcaagttttaatctcccaggtgaaccatctttatctgccattaacacaagcttccaagttcccagttattttcactcatcataacaagtacggtgctattaattacctatgttacgtgtagctcctgtctcactctcgtatttcagttaccacggctaacacaatccacatttctaccagtgacttgtacagaacttcac

SEQ ID NO: 83371 - DNA, 554 bp, Homo Sapiens
  misc_feature (65)..(65): n is a, c, g, or t
ctccagcctgggggtagatcaaggcttgtttcattggaaaaaaaggaaggaaggaaggaaggaangaaatcctactacgagcgatcacaccatctggcctgaaaccacttccccagcttaggtccctctgttatcctgttggcctcctatgtattggtcaaggcaggcatctctgttctctgaacattcattgcactttcccacctctataccttgcctgtgccttagtgtcctcttttttccagttcacctgtgcgaatccgacccacctcccagagcctggctgaaacgtcactccctgcatccaacatctgatctgctgagatatgtctgatctatctctgctcgctgttctcccgttgtttttgcctctgccatagagctcacctcattttgccttgtatttttgttacctgtgagtgtgtctctccctattagactgtaagcctctcgagggtgaggcctagccttcttgtctttgtaacccacagcagctggtactgtgccttgcctattgtaggtgcccaataaacatttgctgaactgaaaaaaaa

SEQ ID NO: 83372 - DNA, 942 bp, Homo Sapiens
  misc_feature (217)..(217): n is a, c, g, or t
gtggccccgttattcgtccggtgcccagggaggaggacccgcctgcagcatgaacctgtggctcctggcctgcctggtggccggcttcctgggagcctgggcccccgctgtccacacccaaggtgtctttgaggactgctgcctggcctaccactaccccattgggtgggctgtgctccggcgcgcctggacttaccggatccaggaggtgagcggnagctgcaatctgcctgctgcgatattctacctccccaagagacacaggaaggtgtgtgggaacccaaaagcagggaggtgcagagagccatgaagctcctggatgctcgaaataaggtttttgcaaagctccaccacaacacgcagaccttccaagcaggccctcatgctgtaaagaagttgagttctggaaactccaagttatcatcatccaagtttagcaatcccatcagcagcagcaagaggaatgtctccctcctgataacacgctaattcaggactgtgacccggctcatttctgggctacatcggcacaggaggggccggatctttctccgataaaaccgtcgccctacagacccagctgtccccacgcctctgtcttttgggtcaagtcttaatccctgcacctgagttggtcctccctctgcacccccaccacctcctgcccgtctggcaactggaaagagggagttggcctgattttaagccttttgccgctccggggaccagcagcaatcctgggcagccagtggctcttgtagagaagacttaggatacctctctcactttctgtttcttgccgtccaccccgggccatgccagtgtgtccctctgggtccctccaaaactctggtcagttcaaggatgcccctcccaggctatgcttttctataacttttaaataaaccttggggggtgatggagtcattcctgcctgttaaa

SEQ ID NO: 83373 - DNA, 773 bp, Homo Sapiens
gcattccgtgctatgattcaggcctaattaagtgattgcgtctgggcacggctataaaccactagctgcttcaactggtaatccagtcagtaggcaactgcaggggctcgccactgactgaaggcagtggaaggttggcagaaggaggctgttcaaggctgtttttgccttcactatggcaaaaatcattttgaggcacctcatagagattccagtgcgttaccaggaagagtttgaagctcgaggtctagaagactgcaggctggatcatgctttatatgcactgcctgggccaaccatcgtggacctgaggaaaaccagggcagcgcagtctcctccagtggactcagcggcagagacgccaccccgagaaggcaaatcccactttcagatcctgctggacgtggtccagttcctccctgaagacatcatcattcagaccttcgaaggctggctgctgataaaagcacaacacggaaccagaatggatgagcacggttttatctcaagaagcttcacccgacagtacaaactaccagatggtgtggaaatcaaagatttgtctgcagtcctctgtcatgatggaattttggtggtggaagtaaaggatccagttgggactaagtgacatcgtatcggttcctgttcagatgacatggggaagatgatggttcagccactggtactacgagaatgtttgtattacccacatttgaaatgatttgctatgatttttatgaagattaaaaatatatacacagttcctggtaaaa

SEQ ID NO: 83374 - DNA, 314 bp, Homo Sapiens
aagtaataagactaatttgacatgtggtttgggaagtggtttcattactatagtcacatttgaggcttacaatatttctccagtatctacgcactgccttgaatgtagttcaatgcatgttctctgaaggaatttgtacatccaacctgtagagtaaaaaggaataagagaacacttcgtaggaccctaaaatgaatttttatattcaatttgtacagaagaatggtgaaagaatggagaaaaaatgaaactgagagaccctaactgtcccatttccatctctcacacttataataaaattcctctttgagtca

SEQ ID NO: 83375 - DNA, 526 bp, Homo Sapiens
  misc_feature (460)..(468): n is a, c, g, or t
gtccctcaattaaatgccttaagacctgacattccaagagaaaacaaaaaccatactttggtttctaaggatgtatgactgggtcctggccttcagaggatggcagacagatgggaacacaagtataagtagactagagtatcccataattgtcaactctggcaaggtaaagatgaagctgcttatgtggacgactcgtggggtacctaagtaaatctgggagccaggtacgtgcaaagtggtcagtggtagaagccctcatgaaggcaggaatgctgcaaacctccacttactgccttccaggaccacttaagtcatagtggtaagagctgctagaagtagtccgttaccaacttgatttaccagcaatacacaattgatgtcaagaagacatttccacatccttctgtcatcactagctctcatttcaaccactaaaatagggtaacagctatagacnnnnnnnnngggagacatgaaacattcatggctgttcaagttagaaaactatggcagcggctatatt

SEQ ID NO: 83376 - DNA, 480 bp, Homo Sapiens
cgggagctggcagaggagccactgccaaactcaaggctcctctggcccagcttggatggctgagggtggtcacacccctgagccttcagcactgtgctggccaccccggcctctgagtaagactcgtgcctccccctgctgccctgggctcaggctgctaccctctggggcccaaagctgtcccttctcagtgcttgtcagcgctgggtctggggcctctgtatgccctaggcctgtgccaaagtggccagagattgggctgcctgtgatacccatcagcccactgccccggccggcccagataggtctgcctctgccttccagctcccacagcctggtccctgatactgggctctgtcctgcagacacctctttcagaaacgcccaagcccagcccctaggagggggtggggcatccctggtcaaccctcaaacattccggactcccctcataacaatagacacatgtgcccagcaaaa

SEQ ID NO: 83377 - DNA, 582 bp, Homo Sapiens
gcggccgcctgctctgcaccatggccgtcgtcctcctcgagctcctctgagtcgtcctcatccgagtccatctccaggctctccccattcacgtgcaggctgctggcgcccaggtccttctcccccttggaacccacagtggaatgagttatgctcttaaacatctcaatcaccgtcctctgttttaatactttggtctttttcttaggaaccaggctataggttcccattcttcgttttttcttccgagatactgcagctgctaaaacaaaaggcaagcaagctgtctgtgattttgtggtggccatgtagcactggttctgaggtagcgactgatgaagggatgggaaggggggtaaaagctgctgtcgtccaaagtcagaaatgttttggtcgatctcctctttgggttccttatgatctctagcttctcgaacttctctgggatcttaactggctgcatgcaggcccacgacggacttcggcatggtcttgcgtgccctgtggaccttgacgtcggcgccagggaccgggagcttcctgtcctctgtgtcagcactcccctccccaaggatggctgat

SEQ ID NO: 83378 - DNA, 1103 bp, Homo Sapiens
cggggagagagaggaacaacaaagaccgttgcagaaacaggctggtaccggtccggtattcccgggatatcgtcgacccacgcgtccgggcgcgcgggaggggcggggccacgctgcgggcccgggccatggccgccgccgatgccgaggcagttccggcgaggggggagcctcagcaggattgctgtgtgaaaaccgagctgctgggagaagagacacctatggctgccgatgaaggctcagcagagaaacaggcaggagaggcccacatggctgcggacggtgagaccaatgggtcttgtgaaaacagcgatgccagcagtcatgcaaatgctgcaaagcacactcaggacagcgcaagggtcaacccccaggatggcaccaacacactaactcggatagcggaaaatggggtttcagaaagagactcagaagcggcgaagcaaaaccacgtcactgccgacgactttgttgcagacttctgtcatcggcagcaacggatacatcttaaataagccggccctacaggcacagcccttgaggactaccagcactctggcctcttcgctgcctggccatgctgcaaaaaccctttcctggaggggctggcaaaggcaggactccaagccgctttttccccagacgccagccgccccaccagccacccttggggaggggagtgctgacacagaggacaggaagctcccggcccctggcgccgacgtcaaggtccacagggcacgcaagaccatgccgaagtccgtcgtgggcctgcatgcagccagtaaagatcccagagaagttcgagaagctagagatcataagggaaccaaaagaggagatcaacaaaaacatttctgactttggacgacagcagcttttaccccccttcccatcccttcatcagtcgctacctcagaaccagtgctacatggccaccaccaaatcacagacagcagctgcagtatctcggaagaaaaacgaagaatgggaacctatagcctggttcctaagaaaaagacccaagtaatttaaacagaggacggtgattgagatgtttagagcatactcattccccttgcaaccatgggagccggatctta

SEQ ID NO: 83379 - DNA, 518 bp, Homo Sapiens
  misc_feature (499)..(499): n is a, c, g, or t
tgcggccgcctgctctgcaccatggccgtcgtcctcctcgagctcctctgagtcgtcctcatccgagtccatctccaggctctccccattcacgtgcaggctgctggcgcccaggtccttctcccccttggaacccacagtggaatgagttatgctcttaaacatctcaatcaccgtcctctgttttaatactttggtctttttcttaggaaccaggctataggttcccattcttcgttttttcttccgagatactgcagctgctgtctgtgattttgtggtggccatgtagcactggttctgaggtagcgactgatgaagggatgggaaggggggtaaaagctgctgtcgtccaaagtcagaaatgtttttgttgatctcctcttttggttccttatgatctctagcttctcgaacttctctgggatctttactggctgcatgcaggcccacgacggacttcggcatggtcttgcgtgccctgtggaccttgacgtcngcgccaggggccgggagct

SEQ ID NO: 83380 - DNA, 460 bp, Homo Sapiens
gcgaccgccgctatcacctacccctcactgctggtcagccacaggcgcatgcactcgggggagcggcctttcccctgccccgagtgtggcatgcgcttcaagaggaagttcgcagtggaagcgcaccagtggatccaccgctcctgctccggggggcggcggggccggaggcctgggatccgggctgtgcctcgggcccccgtccgaggtgaccgggacccgcctgtgctcttccggcactacccagacatcttcgaggagtgcggctgagcggcaccgcaggctggagttgagcctgaccttggcacgaaggactgacggatccctgaggtgggccactgagtcggggactccggaactgaaattcatgccctgggctttcctcaaggatccctcaagtttccaacttgtaaaaagaaaagtgcctgtaaagattcgaatagattagacttgccaccca

SEQ ID NO: 83381 - DNA, 377 bp, Homo Sapiens
  misc_feature (25)..(25): n is a, c, g, or t
  misc_feature (49)..(49): n is a, c, g, or t
  misc_feature (188)..(188): n is a, c, g, or t
  misc_feature (209)..(209): n is a, c, g, or t
tggaggaacccaaccaagcccccgntaggagcccaccttagactggatncaagagcatggttcagcgagttctcccaaacccagccctcccaggaatgccattcacccatggctgtgaggagaataaagaagagagcctgactccttctcctgaggccccttccccaccctgagccagcaggatccancggagcagaggtcatctgtgnccccagcttggcccactgaggccagcatggctgggcccaggatgcttgtctctcagctcccatcctgtgtacttccacattggtttaaccagaggaaaaccgaaatctacaattgtcgataaacacatttaaatgtgcgtagaatcagccatacaaattgtgaaacat

SEQ ID NO: 83382 - DNA, 811 bp, Homo Sapiens
ggtccggaattcccgggatatcgtcgacccacgcgtccgcaaattttaactttgtatatttgttatctatcaggctaatttttttatgaaaagaattttactctcctgcttcatttctttgtcttatagtcctccctctttgcaccttcttctcttccctcagtgcctggagctggtactgggcccctggccccatgagcagtttgccttcttgagtcactgcctgtgtagtacatacctgaccgggagtccaaaccaccttggtgctctgaagtccactgactcatcacacctttcttagcctggctcctctcaagggcattctgggcttgtaaacagacataggaagcctctgtttaccctgaagcaccactgtccagcccattggttcccactggcagcatggtagagctgagagaaacaggctctcagggtacctgacttgaggggaatcgtttcatgaagctgaacttcaagcatatttccagtacattctttcagagtctgtttttccatccaaatataagccccaggccattccacttagtgtcttttcaatgataggcaagaatgatatctgagttgaacttcggtgcttctgttgtttgagtttactgtgcctggtggtatattgggcattctttggattgagtgttctgaggtgagagagtcttcccgaggcatcctgtctgtgcttccaaccctgaacaagaccttacatgagagatggactgatggactgcggcaatcctgggctgtcaagtggatagatagttaaaaagcattatactgtgggtaatgaaaagggagg

SEQ ID NO: 83383 - DNA, 1240 bp, Homo Sapiens
tgtcgccgttgaggcgtgccagggccccttttcgccgtccgggttcccgccgttgcgtggctccttggtgcggctttgctcctctcgtgcttggctacgctggctcaggccgtccagcctccatgcccgcgcggcctcagtgctctgtagtctatgctgttcctccctgtcgggccgttccggctcccccagtcgcgtgctttcagttgaactcacattcggaggtgttttgcaactctacggtcgtgcttgctggagcatggatgcttacgactttgtaatccttagactgtagaaccccctcctcagtcatggtcgtcggctggttgagtaaagggaggtaaagagagctgggactcaagaccagcaactcatcaactgtgagtattgtgtgtgctttgcttaggggggtggagtcccctgggtccccggtggcattcaggggaagactgtactgcaggacctaaggaaggatgacaggagctgggcgtccacagggcaagggaaatctcaaaagttgttggtttccagagtaaatagctatcttatgcaaatatgttctaatgattattttttgtttcaagttgttgtttctgagttccagctgacaaattccaccatacagaccaggcgtaggtgcagatcaggaaaggaatcttagaactcagtggatgtaagccctgcccagcagaccagccccttctaccactgacttccatttcagacccttctccacaggaaggaactgatggcctcctaaacaagcagccatcagcttggccttgctacccttgagagaaggacccagtaaccattatcaaacacaatgaaaagcagaggagggttctgaccaagaactgctcgctttgtatctccaaacgatgcagtgcaaatccagtggcaaatgcaggagaggcaaccacaagcacatggccagccagagtcctaaaatcagaacaacaaagtaaaagggtagaaggggaaatatgctggctaaaaaaagagcctttttctttgggacaggtccctgtatggtaaagcaaagagctagacttttggcatataatgacatctacttctgaaaaggaagacttaaccacaaaaagcttaagggcccagaagaacaaagttactgttttacttctcaagcaggtgagaaccaaagaggacaaaaccatcatccttcaggcctgccggacgcgtgggtcgacgatatcccgggaattccggaccggtacca

SEQ ID NO: 83384 - DNA, 414 bp, Homo Sapiens
  misc_feature (12)..(12): n is a, c, g, or t
  misc_feature (28)..(28): n is a, c, g, or t
  misc_feature (39)..(39): n is a, c, g, or t
  misc_feature (45)..(45): n is a, c, g, or t
  misc_feature (68)..(68): n is a, c, g, or t
  misc_feature (72)..(72): n is a, c, g, or t
  misc_feature (197)..(197): n is a, c, g, or t
  misc_feature (251)..(251): n is a, c, g, or t
ggtctgcgtacncatctgagtccttccncgctgtgctantcatgngaccctatccggagcttctgcgngaantgcggtctctggccagcacgctggactgcgagacggcccggctgcagcgagcgctggacagcctaggaaagcgcttttatcaaaatacaactcaaacctagctactccaatagcaattaaagctnagtgccacccagtaaaaggtaccttaaacatggacagaacatccgagatgtcangcaacaaagaaaactgaaattccagtggatctatccaacacagaaactgaacaaaatgagatgaaagccgagctggaccgattttaacattcacattgccctgcctcttgtccccctttaaacgttgaccccattttaaagacaaacatggaacattaacatc

SEQ ID NO: 83385 - DNA, 645 bp, Homo Sapiens
gaagtgggtacctgcctcctgtacactggtagcaaggaccaagcaggaaatggcatcttcagaggattactgtgggccatttccctttcgcagttctttcaataggcccagttcttccaaatggaaaaagaaaggtctggaagaggcccacagagttgcacaggcgtgggggtaggatgggggctcccagctgcttgtggaggatgtaatatatacagacacacacatgtttttccacacagggccttggcccacgcatcgacatgtgtgaatttgcacaccactgcctgaattggagccccccagagtgtccctctacccagagtttttatttctttaattagtctgagtgttcccagccatctgctccttaatccctggagaggaacagagccaactggacacagcgttggtctctgtttggaatcactgtgaggtctccagaaggacctggccgccagccccttcatcaccatctccatcattcagctggtcatctggtggcccaaaggtcacccaaagagtcagcaatcagcatgtccctagaagccaaatgcactgcctttctctgtccccatgactgtcccccactctgcaccccaaatgggaagcatacggtctgaataaatccaagttttattctct

SEQ ID NO: 83386 - DNA, 1022 bp, Homo Sapiens
ctggtaccggtccggaattcccgggatatcgtcgacccacgcgtccggtcatatcttactgggtgtttaaatatgtaatgtgtttctttattaacatcactagatgaaaccatatcttaaaatgcagaaatgattggaaggtagatcttatctagcctttggatttcaagaatatcatagtccttttgattttcaaagtttatatgtgaagttcaccatgtatgtggtgaatttcgtaaggtacttggtatacatatctgcctatgtttcttttcaactcataattggaagaattatgatggattatagggtttggttaaaaatccagttactgaaggaattaatgaaaacgtaaaagaaagtactaaaaggaatatcataagggctgtagctcaaacttcataatacataaatcactggggtctttttggatttggttgtttgattcgccttccttttttgacatatgtatgccttaattcttaaatctgagggaccatgctttgaaatagactgaaaattaagggtcaccacctaattttactttgtattcagtatcgtaagtgaggttaataaagtcaatactttctaccatatattacggttttgttaattaaaaaactcattggccactagtgaagttagccataaaagacttgtttttctgattttacatagaaaatggcggctaagtaattgaggaattctttactaattttaaaaactaaaaggggggattttcgactttgataggggaaaactcttaatctaaaaggctaaaccccgggtatttttcaaaattgaaatttttccccgtgtaggctttccggggaaaaatttccttggacaattgggtttggttcctggccttttgaacttttttaaaaaaagagtgagagcggctaccatctgcccccaaaagaattttatctttttagtaaaccaggagggaatttttcctcccgaggggttgcccacgccccatttatttcgaaagcgggggcagaatgccggcaaaaagg

SEQ ID NO: 83387 - DNA, 685 bp, Homo Sapiens
ggggtagctgatcggcccggaagtgctcacacgtgtgctccctgccctgctcctggccccttggccggccgggctgtttctggccatgggtcgctcccgccggacaggcgcgcaccgagcgcactctctagcccggcagatgaaggcgaagcggcggcggccggacttggatgagattcaccgcgagctgcggcctcagggatccgcacgaccccagcccgacccaaacgccgagttcgaccccgacctgccagggggcggtctgcaccgctgtctggcctgcgcgaggtacttcatcgattccaccaacctgaagacccacttccgatccaaagaccacaagaaaaggctgaagcagctgagcgtcgagccctacagtcaggaagaggcggagagggcagcgggtatgggatcctatgtgccccccaggcggctggcagtgcccacggaagtgtccactgaggtccctgagatggatacctctacctgacatggcctgaagatgcagggcagaggaattgcccatggacagtgacgcaaggactaggctgggagggagcgtgccaaccccttttgcctctgggtttggggagcggagggcctcttcttggtgccctgcccccaataaaggaactggacaagacacgaacagataacgtaatcataaataatcgagcacgagggg

SEQ ID NO: 83388 - DNA, 798 bp, Homo Sapiens
  misc_feature (268)..(268): n is a, c, g, or t
taaataagaggtggtccgtcacttcttcagatgagcaactacaggcttttcaaaagataattgctaatcaacccctttgtgcctgggttttcttatttgtaaaaatagatactactacctaactccaaagtgtgtggtgaagacaaacaactggggtgatgtatactaaagtaaccgaaagtgtttgaccacacactacgggctggttagtgttagattcccttgtttttccctcagtatcaaaaacagatctaatttaggtttacantaaacgacaaagtaatgaagataaggtgacttacagttggtactactaacaaaatgggctaagatttgcattattgcatgaaaacaacaaaacatatcaataaataacaaaaagcttggaattcagacaacagatcaagtctgggcttgatctcaagctagtgttttgatgttgaaaaaatgttatttggtctttctaaccccatttccttatgtaaaattggggatgatgataaattcactgataataagagttaaatgagattcttgaggactcagaatggttctaacgtgtaagtattagcagtcatactgtagcataagaaaataccgtctgctgaaagaggaacaataaagattatctacatggtcatcatttaaaagctaccagatataggaagaaggggccataaaatgataacgttatgatgattaattttgatgcttaggtcagagtccattctaggatatctgctgcccaaaaacagcagagactcatttctttggaatcacaggacgctgagtgagagg

SEQ ID NO: 83389 - DNA, 818 bp, Homo Sapiens
  misc_feature (46)..(46): n is a, c, g, or t
  misc_feature (127)..(127): n is a, c, g, or t
  misc_feature (314)..(314): n is a, c, g, or t
ccagaatttaagcttgttgtcagcatcggccaaagaagtctcactnggatcctaatacacatcgaaagtcagcccggaaagcacttatgtgtttacgtgaaggcaggaaaggtcacggcctctatgnacagtggggcaggtgggacctcaacgtcggtcacaccaaagcagtctctgtgtgatggacagtggcactcggtggcagtcaccataaaacaacacatcctgcacctggaactggacacagacagtagctacacagctggacagatccccttcccacctgcaggcactcaagagccactacaccttgnaggtgctcagcccaatttgacgacactgaggatccctgtgtggaaatcattctttggctgtctgaggaatattcatgtcaatcacatccctgtccctgtcactgaagccttggaagtccaggggcctgtcagtctgaatggttgtcctgaccagtaacccaagcctatttcacagcaaggaaattcaccttcaaaagcactgattacccaatgcacctccctccccagctcgagatcattcttcactcaggacacaaaccagacaggtttaatagcgaatctaattttgaattctgaccatggatacccatcactttggcattcagtgctacatgtgtattttatataaaaatcccatttcttgaagataaaaaaattgttattcaaattgttatgcacagaatgtttttggtaatattaatttccactaaaaaattaaatgtcttttaagaaacattcttttccacttgttaaaaaaattaaatatattttaaaacactttaa

SEQ ID NO: 83390 - DNA, 577 bp, Homo Sapiens
actatattggcaagccaccccattccgagcagttgcagaacctggcattcagctcaaggctgtgaagtctaagacaggtccaggggagcatctccggaactccctgtggcacacgggggacaccagtgaccaggtcaggctgctgtggaaggactcccaggaatgtgggctggaaggacaaggtgtcctaccgctggttcctacagcacaaggccccaaggtgggctacatcagggtacgattttatgaaggctctgagttggtggctgactctggcgtcaccatagacaccacaatgcgtggaggccgacttggcgttttctgcttctctcaagaaaacatcatctggtccaacctcaagtatcgctgcaatgacaccatccctgaggacttccaagagtttcaaacccagaatttcgaccgcttcgataattaaaccaaggaagcaatctgtaactgcttttcggaacactaaaaccatatatattttaacttcaattttctttagcttttaccaacccaaatatatcaaaacgttttatgtgaatgtggcaataaaggagaagagatcattttt

SEQ ID NO: 83391 - DNA, 545 bp, Homo Sapiens
gtctctggcaccgccacacagacagatgacgcagcaccgacggatggccagccccagacacaaccttctgaaaacacgaaaaacaagtctcagcccaagcggctgcatgtctccaatatccccttcaggttccgggatccggacctcagacaaatgtttggtcaatttggtaaaatcttagatgttgaaattatttttaatgagcgaggctcaaagggatttggtttcgtaactttcgaaaatagtgccgatgcggacagggcgagggagaaattacacggcaccgtggtagagggccgtaaaatcgaggtaaataatgccacagcacgtgtaatgacaaataaaaagaccgtcaacccttatacaaatggctggaaattgaatccagttgtgggtgcagtctacagtcccgaattctatgcaggcacggtcctgttgtgccaggccaaccaggagggatcttccatgtacagtgcccccagttcacttgtatatacttctgcaatgccaggcttcccgtatccagcagccaccgccgcggccgc

SEQ ID NO: 83392 - DNA, 910 bp, Homo Sapiens
gtctggagcgccgggtatacctggtggaagagcatggttccgtccacaacctcagccttcctgagagcacactgctgcaggctgtcaccaacactcaggtcattgatggcttttttgtgaagcgcacagcagacattaaggagtcagccgcctacctggccctcttgactcggggcctgcagagactctaccagggccacaccctacgcagccgcccctggggaacccctgggaaccctgaatcaggggccatgacctctccaaaccctctctgctcactcctcaccttcagtgacttcaacgcaggagccatcaagaataaggcccagtcggtgcgagaagtgtttgcccggcagctgatgcaggtgcgcggagtgagtggggagaaggcagcagccctggtggatcgatacagcacccctgccagcctcctggccgcctatgatgcctgtgccacccccaaggaacaagagacactgctgagcaccattaagtgtgggcgtctacagaggaatctggggcctgctctgagcaggaccttatcccagctctactgcagctacggccccttgacctgagcttatgccgtgaaacagcccccagcccccgtctgtcccccaacccaggctagccagccttttaacaacatcttttggggtacaattagaatctaagtgtttgcagccatatgtgtcatgtagaagatgcctagccctggggaccttgtgaaatacgcaggaaccagggataccatctggtccagtggtttttaaacaaagctgcttagcacctggaattccctggtcagggagatggagtcagtggggcattgcagcttggaatctattttatgtcaccagttggtcctcatcaaataaaatttccttaggagtgcagagggctcattggg

SEQ ID NO: 83393 - DNA, 808 bp, Homo Sapiens
  misc_feature (316)..(316): n is a, c, g, or t
gtgaaaaagacctttagccagagctcccatctaactcagcatcaacgaattcacactggggagaagccctataagtgcaatgaatgtgacaaagcctttagccggagcactcatctgactgaacatcagaatactcatactggagagaaaccttataactgtaatgaatgcagaaagacttttagccagagcacatatctcattcagcacccagagaattcattcaggagagaagccttttggatgtaatgattgtggaaaatccttcagatatcgctctgctctcaacaaacatcagagactgcatcctggcaanatgacaattctaggaacatcataaatttaggggagatatttactttagtttgtccttttgttaagtactgaagaatcagagtggatttagaaactgccttgaaatcttttaaattttcactatcatgttatggaatggaaagtacattgggctgaactaatccaattgttattaagccactctgtgacattagaaaactctactgttttaagctttagtttcctttatggaatgaaggatttggagtagattatttcaaaggtagtttggagttttataatcagttttgtatatttacaatattttcttgaatgggtttactatacatcagcattttgctgtgttgcatctagaatgtgtatgtttatgcatgttttgccaatagaatttgtgcttcagtaactagatcggggatctagtatgctcctggtctaatgcatttacattgtttaggtaactggttcctaataaaaagaattataaaataccaaa

SEQ ID NO: 83394 - DNA, 1389 bp, Homo Sapiens
  misc_feature (61)..(94): n is a, c, g, or t
gtgccaagctaaaattaaccctcactgaaagggaataagcttgcggccgcatacgcggccnnnnnnnnnnnnnnnnnnnnnnnnnnnnnnnnnngggggttcactcaagacctaggctacagccaggtcaagtgcctgctttattcaacaggaagcgctcaagtgggactcaccccccacctttcacagtgtaaagtgaatagggagcaaggcaggaagctagaaaaataatgcatggatctagacaattcagaaaaacccttctaagtcagcttaaggccaagactggtcagtgtgagagaacaaaagaggtgacagaaaagccttgggcagcctgagccatgatgggcctagcggaagtagttgggacattcgtgagcaaccaaatgccaggcttgattaaaggcatccacgacagccggctccaggggcccttcctctgttgctgccaagttctgctccagctgctccaggctggacatgcccaggatgaccgcgtccccgtgggcaccctgcagctgtgagtggtggtacatccaccggagggcagccgaggtcacactgggggcgctggcgccatatgcggcctgcagggccttctccaccaacgcaatggcctcgaagtggtgctccttccagaagcgattcctgtaggtctcagcccagctattcccaaagaagcggcccacaggctgtttcccgtccttgtcctcatacttgtacttgccagtcagcaggcccccagccagagggttgtaggcatagaacctcagtccaaagtgcctgaggcaggggaagagctccgtttccacctgccgggtggtggcgttgtacatgccctggtacacagtgggcaggatccagccattgctcttgcagagggtacagatctcggccacttcccagctagcatagttggagaggccaagctccacgaacttgccctcctggtgcagccgctggcaggcatgcagcgtctcttccaccggggtgccgtggtcaggtgcgtgtaggtagaagaggtccacttggggacactgcagcctcttcaatgacgtctccagctgggaccggacactgtcaggctttagtgattttccatcccaagggttggccttggtggcaattttcactctgcagtcgccaccgcccagcccgagccccaggccgcccaggatggtctcggactggccgtcgctgtacatgaaggccgtgtccagttcggtgtggccgcgctccagaaaggcgcgcacggccgcggcgctggcgggcgcgtccatgcggcgccccatctccatggtgcccagcaccgaggcgacccgcggtggcggtggccgggacatggcgagcgcgcgggcctcgggcggcggagagcgaagcgcgcagtgg

SEQ ID NO: 83395 - DNA, 506 bp, Homo Sapiens
  misc_feature (426)..(451): n is a, c, g, or t
ctggactatatcacagctgaaatgtgagtttttattccaccaccgtgtgctgcaccctgtgatgcaagtgaaccattggagtagaggtgttgaaccattgcagaacagctctccatagtggcccctagtcctcagttcctcaaccctttccttcccttttaaccccccttcttctccctcccctggatctcaagttttccacctatctctttcttgcgtttagcactctccatagtgagtcctactaatttctccctttctgcttgtctcccttgtctctccttagtaagcgatacgaatcccagcttcgggatcttgagcggcagtcagagcaacagagggagacccttgctcagctgcagcaggagttccagcgggcccaggcagcaaaggcaggggctcctggcaaggcctgaccccatggtnnnnnnnnnnnnnnnnnnnnnnnnnnatgaggcagctctaggatctatactgtagctaataaaatgtaaaaacacctggaa

SEQ ID NO: 83396 - DNA, 888 bp, Homo Sapiens
  misc_feature (809)..(833): n is a, c, g, or t
gggatcttgagtgagggcacgctctccttagaggggcggaacagtttttggcaccttatcgcgagcggcagcttatgcaagagtgacttaaaaaagaaaggcaggtccggggccaggggctaagtagcggtgcggtttctttttctggattagtttccccatcttgcctaaaaatgtcctagtctagtctttttagcagaactccactccctaaacatgtcagaactacacttcccatcaagggtcagaaagaaacttccggcacagtcttttcccagcattccttgtttacttccgggtttattactactgaaggaagaacgccagatcagaaaagggagctcaggtaccttccagagagtgagacccagcgcccttgtctcgcacccagtaggctttcatccccgccatggcggagctgatccagaagaagctacagggagaagtggagaaatatcaacagctacagaaggacttaagtaaatccatgtcggggaggcagaaacttgaagcacaactaacagaaaataatatcgtgaaagaggaactggccctgctggatgggtccaacgtggtctttaaacttctgggtccggtgctagtcaaacaggagctgggggaggctcgggccacagtagggaagaggctggactatatcacagctgaaattaagcgatacgaatcccagcttcgggatcttgagcggcagtcagagcaacagagggagacccttgctcagctgcagcaggagttccagcgggcccaggcagcaaaggcaggggctcctggcaaggcctgaccccatggtnnnnnnnnnnnnnnnnnnnnnnnnnaatgaggcagctctaggatctatactgtagctaataaaatgtaaaaacacctggc

SEQ ID NO: 83397 - DNA, 308 bp, Homo Sapiens
  misc_feature (296)..(296): n is a, c, g, or t
tttttttcactaagaaagccagtaactttactgaattgtctgcaaaatacaaattataccttatttccagcaggagaaacttttgaaaatttcccacttttattcactacagacagctgaattaagtcccttgagatacacagatgtggtttaacttagttataacatcttgtcatctagtggcgacaaagtccagcttatgccgctgtgagcctctatttgaatatttgttgcaaatgcttgtatgccctcatttacaagcgattttaattactctcatttaatggaaacaaagncccccgggaaag

SEQ ID NO: 83398 - DNA, 424 bp, Homo Sapiens
  misc_feature (63)..(63): n is a, c, g, or t
  misc_feature (83)..(83): n is a, c, g, or t
  misc_feature (90)..(90): n is a, c, g, or t
  misc_feature (130)..(130): n is a, c, g, or t
  misc_feature (168)..(168): n is a, c, g, or t
  misc_feature (176)..(176): n is a, c, g, or t
gtgaggaagttagtttttggtttgatgaaatgctttcggtttttaaaatcttaaatctgctgnccacatcctccccaaagtgngcctacntcatttggttaatttaaatgaactttcccccttggaaggnatgaggtgaccttggtgggtggggtgggtggtttttgnttttgggntttttccttcctagggcagggcatctgtaggcctcaaaggacctttcctttaggtcatattcctcagaaagtcttcaatcttcccttgtttttgtttgtttgtttttcttaaagaatattttcaaagcttaaatttgtatattaatttaggactatttagaagtataggctgtcgttggcggcagcagtatattctgaaatgtctcatagatatatatttttgaataaagatggtgttgttgaacaac

SEQ ID NO: 83399 - DNA, 382 bp, Homo Sapiens
tgatctcctggcctcgcacacgatcagtgttctaatcacactatttccaggccgaagccaaatggtgactcagctaacatgacactctttatggggctggagtgatgtgcagacaccacgggggatgactgtagttgttctgactccatcctgacttcctggaaagatgggcagcagataaggagaaggctcgtcctccagaacagaggcagcagctccagcagccccaggggctctagccacagccagcagcagcggtttttcatttaaaaaattataaggtttgtgccctctgcctcccagcctgagcagagcctgggtgagcctgggagaggaaaccagagctgagccgcaaggggggtgctacaaggagggagcccca

SEQ ID NO: 83400 - DNA, 576 bp, Homo Sapiens
cagtcgacggtagcggacatatgcccgggaattcggccattacggccgggtccgaattttgttgagagtttggtttataattgtctcttttgtcttgttagtaaacattcatttgcaacagttttgaaggtgctgagtggaaaaccgaaacacatggttattgcgtattggacctagaatgaaataattgcctcaatatttaacaacaagccattcttatctcaaagatttaaattcccgaatgtcccattcgccaaatcatatgcaattgaagtgagcagcatgagcatctgggtcatgagggccttcatttacgtaaatttgtcactaaaacccagtagtagctctacaaaatcttaaactgctgcagtgctcaaggagatggaatatctttgtcattggtgctgaggagagcatttcggtagaagacagttgcgcctgaagattgagtgtaaatcattcaaaccagtggttctcagtgttggctgtatacactttgtagtcactttggaatgttggaagacacatcgatgcttgggttccgtatgccaagattctgatgttggtctggaatat

SEQ ID NO: 83401 - DNA, 406 bp, Homo Sapiens
  misc_feature (195)..(204): n is a, c, g, or t
gcccaagatgatcctcctgcctcagcccattgactagccaggactacacgcacaggccattatgtccggctaattttttttaattggattcctaatgtaaaatctcagtcctctaattataaagttatgtgaaggcaattttcaaatttactgtatctgtcacaaataatgatatctgtcaatttttattaagannnnnnnnnncgactttgtctcttatagtaagagctgtcaatttaacagaaaacccccaaagcaccagtgatgcaaacagtaactacaaaagcttaacactgggcaagggaccacaaatgcgtagataccaactctaccaagaaaaaatctattcgaattactgattcaattatcaaaactgattaaagaaaactttacccttcgtttattt

SEQ ID NO: 83402 - DNA, 201 bp, Homo Sapiens
gcggccgcctactactactactatacggctgcgagaagacgacagaaggggatatatattatgaaatggtcatttttctgaagagaatattttgcttgaaatgcaaaggactgaaagagatttgtaggttgttgattttgttacttcatactggaacttttaaaaagatttcatcaaataaagttttgttttctacttctc

SEQ ID NO: 83403 - DNA, 270 bp, Homo Sapiens
tactcctggagagccctggctgcctacaccagtggaaaagagtctccagttctgctctggcctactaactgttaccactgagagaacaacatgttcatttgacatgattgaagctggcatccgtatatgaagatccttgtcaagctttcttctgtggtctgattagtgttgataccggggcacctcctctggtacttttaagtgttttgttaattatgtttactttttggaatggtgtaagcctaaccacaaataaaagatctttgccta

SEQ ID NO: 83404 - DNA, 249 bp, Homo Sapiens
  misc_feature (239)..(239): n is a, c, g, or t
ggtggtaatcttaaagaacaagggaaataacatttgtaccctccagatttagctcctgttcagcccttctcagtggccagggtaggcaggggaagggtcagggaagaaacacctccagcctggacatcaggaactcagcctggagacttgcctgctcaaccttcctggacttcggtttctaatctgtaataacaggggtagacaggagatttctttagggttctttccagttcaaagtnctctaccaat

SEQ ID NO: 83405 - DNA, 506 bp, Homo Sapiens
taagtgatgagatctgtgtggcatttctagcgctctctaaattatgtctctggcatattttaatcactggaaactcaaagagtggaagagtggaagtgcgaaggaatctcaggtagctcttaactaattcgccagcagtgaagaaacttcaaccaatcatgttttccttgaattttgcaaagaaagaaaatccaaagcattgcttggatgttcttttaaggcattttatatcagttgaaccttaaactgaaatatgaagacaagctttataaactagttttttgatatgaagtatatcaattatgtttgccttttgtgaagaagtaaatgagttgaatttgtatttcacttactagattatactaatgagctaatggggtcattgccatcctccctactcatgactttgatgagttattgctgtaacatcacttcttgatttaatttgatatggaatcagaattgggagaaggtatttttaaataaacaactttttaatggaaaaa

SEQ ID NO: 83406 - DNA, 928 bp, Homo Sapiens
tagggctagtacgaggcgggtgttgaatcggcacgaggcgatggcgccggccgcgtccaggctgcgggccgaagccgggctcggggcgctgccgcggcgggcgctcgcccagtacctgctcttcctgcggctctacccggtgctcaccaaggcggccaccagtggcatttgtcagcacttgggaacttcctggcccagatgattgagaagaagcggaaaaaagaaaactctagaagtctggatgtcggtgggcctctgagatatgccgtttacgggttctttcttcacagggccgctgagtcacttcttctacttcttcatggaacattggatccctcctgaggtccccctggcagggctcaggaggcttctcctggaccgcctcgtctttgcaccggccttcctcatgttgttcttcctcatcatgaactttctggaggggaaagacgcctcagccttcgccgccaagatgagggggggcttctggccggcgctgaggatgaactggcgggtgtggacgccactacagttcatcaacatcaactacgtccctctgaagttccgggtgctcttcgccaacctggcagctctgttctggtatgcctacctggcctccttggggaagtgacgaccgctgggagaacatcaggtgcactgtggacgtgggtctgggggtctcacccgcccagcgagagcagaaccaatccagtcaggatgtcactgactctaaatcaggtgattcaagatgcccaaaaatgatggatagagaaacagaaatctctgaatgtcagaaccctgtcttttaaaaaggcagtcgctgccttcaggtggtgctgccccagaaacttaaaatttagtcgaggcagtttcaattgttactgtggaccgaattaggatcacaataaacgataatgcaggtttttcaaaa

SEQ ID NO: 83407 - DNA, 217 bp, Homo Sapiens
gcatgtaagttattgcatttcaaaagaccccccctttttttacagaggactttttttgcgcaactgtggacactttcaatggtgccttgaaatctatgacctcaacttttcaaaagacttttttcaatgttattttagccatgtaaataagtgtagatagaggaattaaactgtatattctggataaataaaattatttcgaccatgaaaagcggaa

SEQ ID NO: 83408 - DNA, 567 bp, Homo Sapiens
  misc_feature (173)..(189): n is a, c, g, or t
gggccagaccttcagttcaacatgcttccttagcttttcatagttgtctgacatttccatgaaaacaaaggaaccaactttgttttaaccaaactttgtttggttacagttttcaggggagtgtttcttccacgacacacagcaacatcccaaagaaataaacaagtgtgacnnnnnnnnnnnnnnnnncctaaatgctactgttccaaagagcaacttgatggttttttttaatactgagtgcaaaaggtcacccaaattcctatgatgaaattttaaattaatgggcacctttcaacatcatttgcttccttatctacagttgattcagaaatctgcattttttattcttttatatgacttttaagtaaaagatttatatggaaccccccaaccagcaccaaacaaaaacccatgtccggcccgccctcggcccctcaaaaaatttttcaaaaccatttccttttggcgccccgggccccccagtagggtaagaggaaacatgggcccttaacctggtttccctaaggaaaatcctggggcactgaaaataggggtttgggaatt

SEQ ID NO: 83409 - DNA, 1229 bp, Homo Sapiens
  misc_feature (537)..(546): n is a, c, g, or t
  misc_feature (1076)..(1076): n is a, c, g, or t
ctcgcagtagtgatagtgtatctagttgttctgctggtgtccttccttggctaagtcttggccttcagttatcttcaaatgtaccagaacctgagccaacgcctccctgtgaaactgttgctgatctgtagtacagtaccaggaagaaacctcgttttgttctctttagacatcttctacttgctcttggccttgagatcgtgtaacaaaatgaaggagggctctcttctttcttcctcatcctactcaaaaacttcccgagagcagtggtggttttgagggttttgacttctattacttttggcagcctggaaagttgtgtcttctgggaaagagacccggggaggccaggagtagctgagggtcctttctgtgcccttaaaccgcccagaggagccctattccactctggttttaggctgatctgagagggtctccctttgtttcctttctgggagcatttctctaaacgtttatttacaattagggagggggaccccacatctgtgagattctgtttcatttgaggtttacagnnnnnnnnnngtggccagatgtgttccccccatgggtgagaggcctgggcaactgcctggtgaatgtgtcttgcggcagctgcagcaagtggaggggctgaactactggccagctcactggatgatgggttaatacaacaactgcactgtaaggactcagagccacacagaacttctgagaggggctgttagcattgcgcagcatcttcagttctccagtaaatgatattgcgttcgtgcctcagctttaagcacaagtagcagcagctcctgcttgagttctgagggcatcatggccctatgattaaccagagtgatctaacctagactaaaattgggaacttatttgcaatttttgaccctgaccactaactagtgattcttctccaaaattgagaaagacagcacccattgaaacagatatgtgtgtgaaagtatatttttcaattccagatttttaattttaaggctccaggaaagaaaggagagtagaacatttttcctcattttatcaaatcctctcttgccctcccctcattncccctgtaacattcctgaaagctgttcccactccccagatggtttttatcaatagccctagaggtaaaagaactggtcttttttctctgatttctttaaataaattatcctttatagaatatggcccaagtttttttctaaccctcaggtggc

SEQ ID NO: 83410 - DNA, 495 bp, Homo Sapiens
  misc_feature (18)..(18): n is a, c, g, or t
  misc_feature (29)..(29): n is a, c, g, or t
ccagggccccccaggatnacccccagagnggaccctacccctagacctaaaatggggggaacctatttgggcaaatttttggacccccctgaccccacctaacctaggggatccctccctccccaaaattggaggaaaggacaggcaccccattggaaggcaggatatggggtggtgaaagtatatttttcaaattccccagatttttaaattttaaaggcccccaggaaagaaaggagagtagaacattttcccctcattttatcaaatcctctcttgccctccctcaattcccctgtaacattcctgaagctgttcccactcccagatggttttatcaatagcctagaggtaaagaactgtctttttctctgattctttaataaattatctttatagaatatgcacaagtttttctacactcagtgttaaagtatttattaatgggaagtcaacttaatgttttgaaataaatatatgactctgtttaatgca

SEQ ID NO: 83411 - DNA, 1042 bp, Homo Sapiens
  misc_feature (26)..(26): n is a, c, g, or t
  misc_feature (35)..(35): n is a, c, g, or t
  misc_feature (483)..(487): n is a, c, g, or t
  misc_feature (491)..(491): n is a, c, g, or t
  misc_feature (493)..(493): n is a, c, g, or t
  misc_feature (495)..(495): n is a, c, g, or t
  misc_feature (700)..(725): n is a, c, g, or t
  misc_feature (1032)..(1032): n is a, c, g, or t
agggcaccatgggcccctaggattanccccagagngatcctaaccctagacctaaaattggggaaccttatttggcaatttttggacccctgacccacctaacctaggtgattccttcccccaaaattggagaaagacagcaccccattgaaagcagatatgtgtgtgaaagtatatttttcaattcccagatttttaattttaaggctcccaggaaagaaaggagagtagaacattttccctcattttatcaaatcctctcttgccctccctcaattcccctgtaacattcctgaagctgttcccactcccagatggttttatcaatagcctagaggtaaagaactgtctttttctctgattctttaataaattatctttatagaatatgcacaagtttttctacactcagtgttaaagtatttattaatgggaagtcaacttaatgttttgaaataaatatatgactctgtttaatgcacnnnnnccanananatagaaaaaacaaacaaacacgaaaaccccgaggcgcgaggcatgcatagcatgcaccatcctggttgtgcttgggcggggccgcccaaaaacctcgcctgaccaaatcgttatatacccccctgcccccgtgagcgcagggccccaaagggccgcaagggtcttcccacgaagtccctgggaaacgcccgacgcgggggggaannnnnnnnnnnnnnnnnnnnnnnnnnaagtgcgaccgcgctcgacgtgcgaacaaccctccattcggaccgctgcgagggcctccacatcggccttttacgccgcggcgccgcgctatgggagccgaaaggatacacggggaaaaccgcaatgggagtgtcagtgccttcgcccagcaataagcactctccgtgcgtggatgcgccttaagccggctataggaaaaccacccgcccatacccgggctcgatatacgcttcgcgatgtccccttactgaccacctcccccaagtctgccccctcgacgaaataccaatcctcccctctgggtgntacgcggcgg

SEQ ID NO: 83412 - DNA, 1274 bp, Homo Sapiens
taaagcgaataggaggctgggtggtgaattcggcacgaggccacatcctgcatgtggctgtggatgtcatcaggagtctcgggagatgcggctgcagcccttcaatgagtaccgcaagaggtttggcatgaaaccctacacctccttccaggagctcgtaggagagaaggagatggcagcagagttggaggaattgtatggagacattgatgcgttggagttctaccccggactgcttcttgaaaagtgccatccaaactctatctttggggagagtatgatagagattggggctcccttttccctcaagggtctcctagggaatcccatctgttctccggagtactggaagccgagcacatttggcggcgaggtgggctttaacattgtcaagacggccacactgaagaagctggtctgcctcaacaccaagacctgtccctacgtttccttccgtgtgccggatgccagtcaggatgatgggcctgctgtggagcgaccatccacagagctctgaggggcaggaaagcagcattctggaggggagagctttgtgcttgtcattccagagtgctgaggccagggctgatggtcttaaatgctcattttctggtttggcatggtgagtgttggggttgacatttagaactttaagtctcacccattatctggaatattgtgattctgtttattcttccagaatgctgaactccctgttagcccttcagatagttaggagtggttctcatttggtctgccagaatactgggttcttagttgacaacctagaatgtcagatttctggttgatttgtaacacagtcattctaggatgtggagctactgatgaaatctgctagaaagttagggggttcttattttgcattccagaatcttgactttctgattggtgattcaaagtgttgtgttcctggctgatgatccagaacagtggctcgtatcccaaatctgtcagcatctggctgtctagaatgtggatttgattcattttcctgttcagtgagatatcatagagacggagatcctaaggtccaacaagaatgcattccctgaatctgtgcctgcactgagagggcaaggaggtggggtgttcttcttgggacccccactaagaccctggtctgaggatgtagagagaacaggtgggctgtattcacgccattggttggaagctaccagagctctatccccatccaggtcttgactcatggcagctgtttctcatgaagctaataaaattcgctttctaaagtt

SEQ ID NO: 83413 - DNA, 1739 bp, Homo Sapiens
  misc_feature (91)..(91): n is a, c, g, or t
  misc_feature (135)..(564): n is a, c, g, or t
  misc_feature (582)..(599): n is a, c, g, or t
gggaagcgcagttcgtacgcagtgaacaggacgacgagactccagggacgctgttctttgtctgtcggttcccactctgactgactcgatnttgatctgtcaggggcgacctatgaaaaacccagcacgcgcccnnnnnnnnnnnnnnnnnnnnnnnnnnnnnnnnnnnnnnnnnnnnnnnnnnnnnnnnnnnnnnnnnnnnnnnnnnnnnnnnnnnnnnnnnnnnnnnnnnnnnnnnnnnnnnnnnnnnnnnnnnnnnnnnnnnnnnnnnnnnnnnnnnnnnnnnnnnnnnnnnnnnnnnnnnnnnnnnnnnnnnnnnnnnnnnnnnnnnnnnnnnnnnnnnnnnnnnnnnnnnnnnnnnnnnnnnnnnnnnnnnnnnnnnnnnnnnnnnnnnnnnnnnnnnnnnnnnnnnnnnnnnnnnnnnnnnnnnnnnnnnnnnnnnnnnnnnnnnnnnnnnnnnnnnnnnnnnnnnnnnnnnnnnnnnnnnnnnnnnnnnnnnnnnnnnnnnnnnnnnnnnnnnnnnnnnnnnnnnnnnnnnnnnnnnnnnnnnnnnnnnnnnnnnnnaagaattcggcacgaggnnnnnnnnnnnnnnnnnnggttgtggctgagaatgctggagatgctcagttctctccctcacaaggtaggccacaaattcttggtggtgccctcacatctggggtcttcaggcaccagccatgcctgccgaggagtgctgtcaggacagaccatgtccgtgctaggcccaggcacagcccaaccactcctcatccaagtctctcccaggtttctggtcccgatgggcaaggatgacccctccagtggctggtaccccaccatcccactacccctcacatgctctcactctccatcaggtccccaatcctggcttccctcttcacgaactctcaaagaaaaggaaggataaaacctaaataaaccagacagaagcagctctggaacaaaaagtacaaaaagacagccagaggtgtgcggagagggtgaggtggccgcgtggacgtgggtagataatcgcatgcagcactggaactcctgatgaggggtggggtccccacttctcctcaaggtttgagggattgcggggagggggtcagctgactcagagaagtaggatctctgcactggaacttgaggcttcctgtctcctccatgggccccaccagtcacagggacatgaaatccgtggcctggaggagggagagggagagcaggagcagcagcagccacgaggtgttctgagccagcaggctgatgccctcacacttgaccagtttgtctctgagcactgtgacgttctgggaggagatgggtggggaatggccagagtggtggagtgcacacgtgtaggtgccctcgtccttgctagtgaaggcggataagtagaggaccttcatgttgtatttgctggtgaagttggttcgggagcggtatgtgtgctcaggcacccccacagtgccaaagagcacgtgcttctttgtctcacgggtcaggctgaactcgtactggatgggtgaactgctggtattctcatggcggcagtccagacgaaggctctggtccactaggcaggccgttaggctggtcaccttctgccctcgggagacctgcaagactgttagcaggagagcgatgctgatggccaggttcatggttctgggatctcagtcctggatctggactggggtcttccgctgctgcagcctcctccagacgcg

SEQ ID NO: 83414 - DNA, 324 bp, Homo Sapiens
gggagttttgctttttttatgccttgaatattttatttcaaaaagtatctgaagcaaattctcagactgaactacttcttagacctcactgtaagaatattttattcaatgtctcatttatgatagatttgcaagctgctcatttttgaacagctttttgcatgggataggagcatgtctattctaacacatcagcttattcaaaagcaagaattttaaaaataagataaatgtaaagttgttttataaacgatcctgttaattaaaccacagacaccatatatccttctgcatcctttggccaataaaagttgctggagaacc

SEQ ID NO: 83415 - DNA, 486 bp, Homo Sapiens
agctactctcaagttatatccaggggacaggcccctttggctccaacccacacgcctgaactttaaggatcattggactatcttctctgtggccagcgcagctctcttctgtgttcacagaatggccactgataggcatgcctcttttcccacccactggaaggctcacaggcaaggtgagagaggacacagaaggtgccaacactgtcgctacagtaaggacctgaagtgactttgagaaattcaccctcacaaaccttccttcaggagcaggcattggtagtgcagaggcacagattccgtcctttaccagctgcagaatcttgggcaagttacatagcctctgtgagcctcatcggtaaacagtgggggttatgaaacccacctcacagggttgttgtgaggatccaatgagttgatttaggtaagcacctagcacatgccgtggcaccaagtaagcactcaataaatcactcaactcctttc

SEQ ID NO: 83416 - DNA, 660 bp, Homo Sapiens
  misc_feature (55)..(55): n is a, c, g, or t
  misc_feature (156)..(156): n is a, c, g, or t
  misc_feature (295)..(295): n is a, c, g, or t
  misc_feature (463)..(463): n is a, c, g, or t
  misc_feature (629)..(629): n is a, c, g, or t
ggggccgcggctccggcgacaggccagatgggaagctgctgtccaagcagcaatngcgctgctgagggaaagggagcctctgcatcaccaaatggcaggattttcataatatatgtagtatgagttccacatcttggcctcttaccccagcttcanaagtctcagctccaccagttagagaataaatgggatttgcatgaactccactctgagctgaaatacagactgcggtgttaatatccttttcttctgattgttattaacaggtccttatgtcgtcagaagatccgagaangctcaggaggatgaattgctggccctggcaagtatttaccgatggagatgaatttagaaaagcagagtctgtccaaggtggagaaaccaggatctatttggatttgccacagaatttcaagatatttgtgagccggcaattcaaatgagtgtctccagaatagtggcnttgaatacaccatttgctttctgcctccacttgtgctgaactttgaactgccaccagattatccatcctcttccccaccttcatttcacacttagtggcaatggctgtcaccactcagctatctgcccaagcaagcacttagacacctatgggaagaaaccgtggnacgtggtccggttgcctgatgcaattcctaa

SEQ ID NO: 83417 - DNA, 1053 bp, Homo Sapiens
  misc_feature (15)..(15): n is a, c, g, or t
  misc_feature (38)..(38): n is a, c, g, or t
  misc_feature (45)..(45): n is a, c, g, or t
  misc_feature (94)..(94): n is a, c, g, or t
  misc_feature (102)..(102): n is a, c, g, or t
  misc_feature (104)..(104): n is a, c, g, or t
  misc_feature (108)..(108): n is a, c, g, or t
  misc_feature (166)..(166): n is a, c, g, or t
  misc_feature (172)..(172): n is a, c, g, or t
caaatacccatggtncagccaggttcctgcatcacagncagctgncagcacgaccggggccagtacaccacatctgccatcaggtccaagaagnactgaagnanaagncggtcataacgggcaaataactctgcttccactaactctttgacctgaccaggagtgnccaccnaagggcactttggttctgggcagttaaggcattgaacctggccatctcgaatctgaatttcaaagtagtccttcagacaggctttggcagtacacatgcctgcactccaaggaagtacatgcattcactacccagcttctcacagaaacagatactgcacaggaacaatttactattaaagcattttatctgctgagcttgatcaaagtccaagatttcctggatcagatttgacagtgattccacatcctgcactgctctctcatccacaatttcctcttggtctacatcagatccagcagctcctccaaaatctagctctgtgttgggagaagcttgagctgtccttctctgcacttttttctgagaaccaatcttgagctcaaaaggagagacaatattcaagtatgctagggtctcttccttaagaaattgcatccaggcaaacaggaccacgctgccacggtgttcttcccataggttgtctaagtgcttgcatagagcagatagcgctcacaaatatcttgaaattctgtggcaaatccaaatagatcctggtttctccaccttggacagactctgcttttctaaattcatctccatcgtaaatacttgccagggccagcaattcatcctcctgagcttctcgatcttctgacgacataaggacctgttaataacaatcagaagaaaaggatattaacaccgcagtctgtatttcagctcagagtggagttcatgcaaatcccatttattctctaactggtggagctgagactgctgaagctgggtaagaggccaagatgtggaactcatactacatatattatgaaaatcctgccatcgccgccagccgaccagatcccgggaattccggaccg

SEQ ID NO: 83418 - DNA, 1442 bp, Homo Sapiens
gaggctggaccggtccggaattcccgggatgcctggtcggctggcggcgatggcaggattttcataatatatgtagtatgagttccacatcttggcctcttacccagcttcagcagtctcagctccaccagttagagaataaatgggatttgcatgaactccactctgagctgaaatacagactgcggtgttaatatccttttcttctgattgttattaacaggtcaaagagttagtggaagcagagttatttgcccgttatgaccgccttctcctccagtcctccttggacctgatggcagatgtggtgtactgcccccggccgtgctgccagctgcctgtgatgcaggaacctggctgcaccatgggtatctgctccagctgcaattttgccttctgtactttgtgcaggttgacctaccatggggtctccccatgtaaggtgactgcagagaaattaatggacttacgaaatgaatacctgcaagcggatgaggctaataaaagacttttggatcaaaggtatggtaagagagtgattcagaaggcactggaagagatggaaagtaaggagtggctagagaagaactcaaagagctgcccatgttgtggaactcccatagagaaattagacggatgtaacaagatgacatgtactggctgtatgcaatatttctgttggatttgcatgggttctctctctagagcaaacccttacaaacatttcaatgaccctggttcaccatgttttaaccggctgttttatgctgtggatgttgacgacgatatttgggaagatgaggtagaagactagttaactactgctcaagatatggaagtggattgtttttccctaatcttccgtcaagtacacaaagtaactttgcgggatatttagggtactattcattcactcttcctgcgtagaagatatggaagaacgaggtttatattttcatgtggtactactgaagaaggtgcattgatacatttttaaatgtaagttgagaaaaatttataagccaaaggttcagaaaattaaactacagaatattaaatattataatgtgcccaaagctctgaatagttaaaaattaaatatttattttcttccccaagctttaggtaaggagaagaggggtcaagagttaaacttagagaccctttgtctctgagaagcatccttctaagacattctgttggagttccctcagtactattccttacaactggagtgggtagaagccttatgaaaattatactgagaacctgatctcgtttactccatgttaatcacattcctaccaacctaaatttctgccaagtcagttctctttggaggaagcccattactccataactgactggatggtccagtgtcattttgatctgcttttcagaatggaaatttataatataaatatatgttttaataccacaaa

SEQ ID NO: 83419 - DNA, 1045 bp, Homo Sapiens
  misc_feature (1022)..(1022): n is a, c, g, or t
  misc_feature (1032)..(1032): n is a, c, g, or t
tccggaattcccgggatcgccggttgagcagggcgtttctaggcctggtcggctggcggcgatggcaggattttcataatatatgtagtatgagttccacatcttggcctcttacccagcttcagcagtctcagctccaccagttagagaataaatgggatttgcatgaactccactctgagctgaaatacagactgcggtgttaatatccttttcttctgattgttattaacaggtccttatgtcgtcagaagatcgagaagctcaggaggatgaattgctggccctggcaagtatttacgatggagatgaatttagaaaagcagagtctgtccaaggtggagaaaccaggatctatttggatttgccacagaatttcaagatatttgtgagcggcaattcaaatgagtgtctccagaatagtggctttgaatacaccatttgctttctgcctccacttgtgctgaactttgaactgccaccagattatccatcctcttccccaccttcattcacacttagtggcaaatggctgtcaccaactcagctatctgctctatgcaagcacttagacaacctatgggaagaacaccgtggcagcgtggtcctgtttgcctggatgcaatttcttaaggaagagaccctagcatacttgaatattgtctctccttttgagctcaagattggttctcagaaaaaagtgcagagaaggacagctccaggcttctcccaacacagagctagattttggaggagctgctggatctgatgtagaccaagaaggaaattgtggatgaaagagaacgccagatgtgggaatccctggccaatctgatccaggaatcttggactttgatcaacctccgccaaataaatgctttattaccaattggtttctgtgccacaatttggtttctggtgaaaagctggggcagcggaatgcatgtactttcttggaagtggcagcctgtgtaattgcaaaaccttggctctaagggattacttttggaaatcccaaatcncagaaggggncaggtttcaatgg

SEQ ID NO: 83420 - DNA, 1363 bp, Homo Sapiens
  misc_feature (590)..(672): n is a, c, g, or t
ccccggtgtagatgataaagtggttggtggtcctaggatatacagataacgcaccgcgggtgtcgtgggcgaagtatattcatattctgctagttcacgctagctcgcaatcgcgtataatagtattcaaggggttgggtttgtgtgtctgtcattcacctcatagattatgactcatcctattatgctagataggatttgttattgtttgatgtctccagctctccagaggtgggaggcggctttaattaatatctctccttgtgtgttagtagggggttgttttgttctcccaacgattcgtgatttgcacctcccccgcccataaagaagtagggttgtggttctattgaacaaaaagggagtccacctgagatcggcgcatagttgtgctctacctgtcacacgacagcagttattgttgtataacatcacgccggcgccgctgcggcgctgtgtgatataatatattacccgctcctccttgtggggccccctctttctatctaaactaacggggtggtgctgcgataatagtgcggccccccgcaggggaaagattttttccgctgcgccgcctcctcttctcnnnnnnnnnnnnnnnnnnnnnnnnnnnnnnnnnnnnnnnnnnnnnnnnnnnnnnnnnnnnnnnnnnnnnnnnnnnnnnnnnnnggaagaaaagtttaagagtttaattaaaaattaaatatattgtattaggtatattttttaaaagggcaaagtaaaaaatattaatacaatctggttgtagaaaatacactgcaagaaaaggagcaggtgcttcaaaaatgtaaccctggcaactctgccaacaggtcctgggctcgggcttcctggaaaagccccgggacacgtgggaactccaggcaccctcgcaggggccccccgagggcaggtggcccagaagcccaggaagggtggcctgggaggtggaacgggcgcaaggccgagcatcactggctcctagggggctgtgacatggaaccaaacatacacgcgtatgagagagcagagcggcagcgacgcggtcggatcggtcgcgggggctgcgggaggaagcgctgcagggacccgggcggcgccggcggcctagccggagatgcacgcgctgtaatagaccgcgctgctggcgtccgacagcgcggagatcaggctgctctcctctgggcaggacatggcgcgcgggcccagtttggccagtgccacgtggtacgggagcccgggggcgtcgggccgagtccggctgcagttgaggtactggtcgaactcggtgaggtccacgtcggcccacagatcggcggcgggccccagcggctcggcgctctccagcggcgggcctcgg

SEQ ID NO: 83421 - DNA, 736 bp, Homo Sapiens
  misc_feature (311)..(311): n is a, c, g, or t
agtttacaatctttctttataactgttataaatttttaaacaacccaaaatgcgttccatataaagaaatggcaagttatttagctatcaagattttacatgtagttttcttataacttttttgtacaattgcatagacgtgtaaaacctgccattgttaacaaaacaataacagacttagaaactactgaaatctacagtataataccactacccttcacaaaaatatacgatttatttctggtaaactcttactgtctaatcctctttgttgtatgaatattataaaaaccatgcgggaatcaggagtngtaaaacatttattctgctccttcttcatctgtcatgactgatacttaaggacttccatcgctctgcccaaatcatctgcccatgtggaaaaagacttcctacattgtgtcctcttgaactagggaaggagttgttgagttgctccatcacctcctctaaccctgtgcttgtgtcctggggaggactgagaagatcttcctcacccatggagtccgaagtttgactgccaaccactcggagcagcataggctgactgctgtcggacctctgtagagaggtagaaggagaggacaccgttgtgccattcactttggcctctgcctggggttgctccagcagctgccttagcctgtgtaactgtgactccagctgtttattgtggtctttccaggatttgcatcctggcttccaggcggcctttgtg

SEQ ID NO: 83422 - DNA, 349 bp, Homo Sapiens
tccattattgtatataaagaacattgtgacttttaatattagcatttttgctttcaacagcaattagcaatctcttggtttgctgtttggtaaagcatcggttaatgaggtcatctagtttaaaatcccagctacttgaaaataacagggaggaggtcaaatctatcatttcatgttatattctctgctctcttttcagttctctaaagaaaagatatctttgttatccacaataagtcattacgacccgttactggccctctgtgttttactaccacctcaagatacagttaggttctctcttgctgaagtactgaaataggataattcatctaataaacaaacaaac

SEQ ID NO: 83423 - DNA, 492 bp, Homo Sapiens
  misc_feature (15)..(15): n is a, c, g, or t
  misc_feature (53)..(53): n is a, c, g, or t
  misc_feature (79)..(79): n is a, c, g, or t
  misc_feature (85)..(85): n is a, c, g, or t
  misc_feature (90)..(90): n is a, c, g, or t
  misc_feature (110)..(110): n is a, c, g, or t
  misc_feature (115)..(115): n is a, c, g, or t
  misc_feature (120)..(120): n is a, c, g, or t
  misc_feature (133)..(133): n is a, c, g, or t
gggaccccatatatngtgggtagggcggaaaccgggaattccaaccacttttnccccttaacccctctaccccaaaaantggttnaattnggcaccccaaaggtttttanccttngtaanattttttaaaaanccttttctcctcatcattgccttttttgtggttgtaaatagacttacttgcactttgaagatgagttactccttgtcatcttacaaatatgtgatatggtaattttcataacagatgtcagttttgaaccaagaattggtgatttgtttataagaaaaaaactggcttcatttctgtgaaattgctctttgaaaatttctttttacacgtgtaagccaactgagataccgtgatggtgttgatttctttcaatgatgcttaccatctattttagccactgagccttttattatttgtctatttgtaaagtttatttgtcttaactcatttaataaatatactgtttatctgtttctgaa

SEQ ID NO: 83424 - DNA, 964 bp, Homo Sapiens
  misc_feature (689)..(689): n is a, c, g, or t
tgcggccgcggcgtaggcgcacgtccggcgggctcctggagcctggaggaggccgaggggaccatgtccgggaggcgcttccacctctccaccaccgaccgcgtcatcaaagctgtcccctttcctccaacccaacggcttactttcaaggaagtatttgagaatgggaaacctaaagttgatgttttaaaaaaccatttggtaaaggaaggacgactggaagaggaagtagccttaaagataatcaatgatggggctgccatcctgaggcaagagaagactatgatagaagtagatgctccaatcacagtatgtggtgatattcatggacaattctttgacctaatgaagttatttgaagttggaggatcacctagtaacacacgctacctctttctgggtgactatgtggacagaggctatttcagtatagagtgtgtgctgtatttatggagtttaaagattaatcatcccaaaacattgtttctgcttcggggaaatcatgaatgcaggcatcttacagactatgtcaccttcaaacaggaatgtcgaatcaaatattcggaacaggtgtatgatgcctgtatggagacatttgactgtcttcctcttgctgccctcttaaaccagcagtttctctgtgtacatggaggaatgtctcctgaaattacttgtttagaggacattangaaattagataggttttctgagcctcctgcttttgggccagtgtgtgaactgctgtgggctgattccttagaggactaccgcagcgaaaagacccctggagccactataccccccaacacttgtccgaaggctgctcccaactttcttcagtttaccctggccagtttgttgaaatcctttaccgaacgcacacgttttattaatccattccctcccgagcccccttgcacgcccccagaattgccgggggcccccccaacgtgtatagggaaag

SEQ ID NO: 83425 - DNA, 527 bp, Homo Sapiens
cccaactgggcatggccgtgatgcgggtgcagacggagatggagctacgcatgttccgccagaacgaattcatgtactacaagatgcgcgaggctgccctgaacaaccagcccatgcaggtcatggccgagcccagcaatgagccatccccagctctgttccacaagaagcaatgaggactgcccagtggaggaggggcgatgtggctggggagctagggagagactctggaggtggtgggtctctggggagacccctaatgaggaagttgaggtaatgcttaacattgttgcttgtgagaatttactgccctgtgtttcccgagagccattttggctcaattcaagtctattcaattcaagttaactctagcccagcccgagatcaactcctcctacaaatattattggatgataggccctagaacccaataaaggagctccaaatgtcgttgggtggggaagcaaaatgtagagaaacatttaaagcacactgtaataataaatgcaattataaactataaaaaa

SEQ ID NO: 83426 - DNA, 502 bp, Homo Sapiens
gccttctgagagcaaagtttaatcctgacccagaattataataatttctgaaagttctattaatttcagcacactgtgtaggaattactcaggcttttcccatcctatagctcctaaaaaaccaaagtggctaaccatatctggcataacagaggaagtaaggtgcatttcctgatcttccaccatcacagaaaagcacacttaatttgcatctcaagtcgtctggagtaaagtctatgttgctggcaacagttgtgttatcctgacttctcttccccaggtcctgttgtctgtaacagagatgtgttgtgaaatgctgtcacttgcttctccctttctttcctttgggagcacccggccaatggaagcctcgcagatgcaggcagtcagcgacgttgtgggcgatgtagtagaggttcagcatggccgcggggctgagaatgtccacttctggtttcttctgtttcttcccatgagacttgccctggccttttcctttttt

SEQ ID NO: 83427 - DNA, 738 bp, Homo Sapiens
tgcggccgctttagccctgagcgggatctgcggctgcctgcgagtctctgctgtgccgacccttctcttcgcggaccccacgccaagcagcgaccctgagccgacagccggagcgcccggcaatggcggcctcgacggcctcgcaccggcccatcaaggggatcttgaagaacaagacctctacgacttcctctatggtggcgtcggccgaacagccccgcgggaatgtcgacgaggagctgagcaaaaaatcccagaagtgggatgaaatgaacatcttggcgacgtatcatccagcagacaaagactatggtttaatgaaaatagatgaaccaagcactccttaccatagtatgatgggggatgatgaagatgcctgtagtgacaccgaggccactgaagccatggcgccagacatcttagccaggaaattagctgcagctgaaggcttggagccaaagtatcggattcaggaacaagaaagcagtggagaggaggatagtgacctctcacctgaagaacgagaaaaaaagcgacaatttgaaatgaaaaggaagcttcactacaatgaaggactcaatatcaaactagccagacgattaatgtcaaaagacctacatgatgatgatgaagatgaagaaaatgtgagagactgcagatggagaaagcatgaataccgaagaataaaatcaatgatctactccaagagagcgacagcgaaccaaatgacgaagtgca

SEQ ID NO: 83428 - DNA, 415 bp, Homo Sapiens
  misc_feature (225)..(234): n is a, c, g, or t
gtacacagagagagggaatttcagaatttttacatacattttagcaaacaagttttgatctattggcttcttggtgcagtaatgcaacggcaatccattctggtgccaaaggctcatactattacaaggaagttgtgaacactaatttcttaggaggtgaggccagccccacatgaacttctcttgcatccctctggtccaccatgacacataaatacttagacnnnnnnnnnncctctaatgaatcattagacattaaaaacggaataacagagtcacaaagggccacatgcttttcggtataaagcattctccttctctaggttgctatcacagtgcagacctgactgcctgaatatgctcaggagatttagtcaatattgtctgtatttggttatggaaaaggctctccttt

SEQ ID NO: 83429 - DNA, 847 bp, Homo Sapiens
  misc_feature (631)..(655): n is a, c, g, or t
gggggaagtaacccacgtgcttccgctggagcctctcgggaggcgggtaacgttatagtatttgtcagaagttggggtctccgtgggcattgtgatccgtcccaggcagtggattaggaggccagaaggagatcccttccacggtgctaggctgagatggatcctctcagggcccaacagctggctgcggagctggaggtggagatgatggccgatatgtacaacagaatgaccagtgcctgccaccggaagtgtgtgcctcctcactacaaggaagcagagctctccaagggcgagtctgtgtgcctggaccgatgtgtctctaagtacctggacatccatgagcggatgggcaaaaagttgacagagttgtctatgcaggatgaagagctgatgaagagggtgcagcagagctctgggcctgcatgaggtccctgtcagtatacaccctggggtgtaccccaccccttcccactttaataaacgtgctccctgttgggtgtcatctgtgaagactgccaggcctaggctctctgtagagagtcttcaagatcccggagtggtagcgctgtctcctggtgaaggagtatttgtcacactggaatgggactgcgtgtgtatggcatgtgcnnnnnnnnnnnnnnnnnnnnnnnnncacaagtttgttgacacctacgcaccccccatattggcaccgcacccaaaaaacattgtcgggcgcctttggcccttgaaaaaaccttttctaaaccttttccttttgggccccccgggtgctctttagggcaacatgggacaccgggggtcattaccctgggtttctcctatggcaaaaaaccccccgggt

SEQ ID NO: 83430 - DNA, 528 bp, Homo Sapiens
cagtaacattacactcactcactccttgaccatctgcctttactcctctcctcatttccctgttaccaaaactatgtgccctacccagggacttctgggcagctcttttctcagatcatttctcaccctctctcctctactaacttagcctttcatactgaatcacattttccttaaaaaacagctgctgacagaagatgctacattttgtttcagggcctggtaaccatcaaggatgtgtcactgtgcttctctcaggaggagtggcggagcctggacccctctcagacagacttttatggagaatatgtcatgcaggaaaactgtgggatagtagtctctctgagtaagcatgaccttctccagccactagaagattggactctgggaggacggagccatctgcttcagggctattggatagtgtctgtctaggactctttatgtggcagggaatctgtctatgcttccgctggagaaagaacactagggccaatcccaagagaatgagagtaaatatcattaaaa

SEQ ID NO: 83431 - DNA, 467 bp, Homo Sapiens
tgcggccgccaaccactgggcggtggggcacttaatggggaaaaagagcacaggggagtcttcttctgtttctgagagagggagcctgaagcagcagctgagagagtacatcaggtgggaagaagctgcaaggaatttgctgggtctcatagaagcaaaggagaacagaaaccaccagccacctcaacccaaggccctgggcaatcagcagccttcgtgggattcagaggatagcagcaacttcaaagatgtaggttcaaaaggcaaaggttctcaacgtgaaggaaggaacccccagctgaaccagcaatgataatgatggcctctctcaaaagagaaaaacaaaacccctaagagactgcgttctgcaagcatcagttctacggatcatcaacaagatttccttgtgcaaaatatttgactattctgtatctttcatccttgactaaattcgtgattttcaagca

SEQ ID NO: 83432 - DNA, 891 bp, Homo Sapiens
acggctaggtacgaggcctggggtgtgaatcggcacgaggacagcggctgcggcggcggagctcctccgaggtccgggtcaccagtctctgctcttcccagcctctccggcgcgctccaagggcttcccgtcgggaccatgcgcggccgtgagctcccgctggtcctgctggcgctggtcctctgcctggcgccccgggggcgagcggtcccgctgcctgcgggcggagggaccgtgctgaccaagatgtacccgcgcggcaaccactgggcggtggggcacttaatggggaaaaagagcacaggggagtcttcttctgtttctgagagagggagcctgaagcagcagctgagagagtacatcaggtgggaagaagctgcaaggaatttgctgggtctcatagaagcaaaggagaacagaaaccaccagccacctcaacccaaggccctgggcaatcagcagccttcgtgggattcagaggatagcagcaacttcaaagatgtaggttcaaaaggcaaagttggtagactctctgctccaggttctcaacgtgaaggaaggaacccccagctgaaccagcaatgataatgatggcctctctcaaaagagaaaaacaaaacccctaagagactgcgttctgcaagcatcagttctacggatcatcaacaagatttccttgtgcaaaatatttgactattctgtatctttcatccttgactaaattcgtgattttcaagcagcatcttctggtttaaacttgtttgctgtgaacaattgtcgaaaagagtcttccaattaatgcttttttatatctaggctacctgttggttagattcaaggccccgagctgttaccattcacaataaaagcttaaacacattgtccaaaggg

SEQ ID NO: 83433 - DNA, 1284 bp, Homo Sapiens
  misc_feature (1236)..(1236): n is a, c, g, or t
gcttcggaacgagcgatagggagcatcaccaactccagactggctcctgtgggtatggtgtttccgctgggctgggtcctcaacattgccaaggtgctagtgggtccctaagagggcccatgttgggggtgaagtcatgaggtcctgaaggcttaggccctgtcattcccaccctcactcttgctgcacagttgtgtttactttttctgggtagaggatgctgaactgactcagcaccctcctgcaggacggggttagggaatttggtgctcaattgctctcccttgctcttccccaaactgaaaatacctactgcaggatccctcggggcacactgaagcttggctgccaaccctcttacttcctttgttacagggaggggttggcttggggtgaaaagttctgccctccgcagggagcagctccagctgcctggcagtgctcccagtttgtagggaagccacaccagatctgggtgccttgggagaaccagtccttccttttgacccaccccaggaagatggagtgctcttttctaggcccatgttctgccagcaaccgggatgcgtgggcaactggactctgcacgggggtctacaggttgagggaggttggtcacaatgagaacctcggggtttgaggtggccatgggcagacagccgaaagggagggagggtgtgggtgtgcgtgtgtgcatgtgctggtgtgtaagggggaaagggtctttcctggttttatttaaataaagtagtttatgtaaccaaacaacaaaccccatccaaacatccccaccaagctctggttgctgaacaaaactcaaccataagggggggcccgctcctaaagaattccccccggggggcccaaagtttaacccgtaccccgtgtttttttgaaaaaaaggggccccaaatagggggagccggattaaaaaacctaggggccggggccggccgtttttataaaagctccggaacttggaaaaaaatctgcgaccctttgggaaccttctttggaaagggaaccttacccttcccggggggggcggccacaactgtggaaacaactatccctcacctaaactattttaaacccgccaccagggacaaaacataacaactgttttttaagcggcgtcaaaaagaggcttaagacagtccacccccacctaattggctgcacgcgtcttagacggatatttacaccttcacccgacgaaccggctctattgtgggnacaaagttgcacacgctcgccgtccgccctagtattcacccttcccct

SEQ ID NO: 83434 - DNA, 265 bp, Homo Sapiens
gaaaaaatccacagtcaagaacaggggaggttccacattgaaaacacagatgacctgacaaccctgatcatcatggacgtacagaaacaagatggtggactttataccctgagtttagggaatgaatttggatctgactctgccactgtgaatatacatattcgatccatttaagagggcctgtgcccttatactctacactcattcttaacttttcgcaaacgtttcacacggactaatctttctgaactgtaaatatttaaag

SEQ ID NO: 83435 - DNA, 888 bp, Homo Sapiens
cagtcgacggtaccggacatatgcccgggaattcggccattacggccgggatttcccagaatacacaggaccgaaacaggatgtcagagctgccagagactttatcctgaagctttaccaagatcagaatcctgacaaagagaaagtcatctactctcacttcacatgtgctacagatacagacaatattcgctttgtgtttgctgctgtcaaagacacaattctacagctaaacctaagggaattcaaccttgtctaaaagctgctgcccactcctcccctataacagaagatgtgatttgcaaactccttgttttatttgcaagtgcttctgacatcaccagagccagccccatgccaggaactaaggatgtcatgtagatcgtggggacagagatgggtgatggaacttggaagatatttgagtttaccaacatactttaaaagtccttacatcccaaattgtgtttataattattttcttgacttttggctataagattttgtgtaatttttgaatttggtgttttctagaatttttaaaagccactttgatttagttttaaatatgtttaaaaatagcgattaaaattatgtaagcaaggagcctgttagtttatagatcatgccttcaaacctctagagttaatttgggtgacttttttaaaaataagaatgttaatgggtttgaagctttttattaaaccttgtaatttagagacatttttaatttgtgtttctcacctcatgctgaagggtgactccttttaacatgccaacaaagattttttttaaacacttggttctttggtgtgtaactttctaagccaaattacgggtattttagtatattctattagcttgccaaagtttgatcaccaagaagct

SEQ ID NO: 83436 - DNA, 610 bp, Homo Sapiens
  misc_feature (96)..(114): n is a, c, g, or t
ggggccgcctgtatcccgcagaggaaggtcgcggccgtggagcgatgacccgcggcggtccgggcgggcgcggactgccacagccgccgccgcttnnnnnnnnnnnnnnnnnnncgctgttgttagtcaccgcggagcgccgaaacctgcaggagtctactatgcaactgcatactggatgcctgctgaaaagacagtacaagtcaaaaatgtaatggacaagaatggggacgcctatggcttttacaataactctgtgaaaaccacaggctggggcatcctggagatcagagctggctatggctctcaaaccctgagcaatgagatcatcatgtttgtggctggctttttggagggttacctcactgccccacacatgaatgaccactacacaaacctctacccacagctgatcacgaaaccttccatcatggataaagtgcaggattttatggagaagcaagataagtggacccggaaaaatatcaaagaatacaagactgattcattttggagacatacaggctatgtgatggcacaaatagatggcctcctatgtagggagccaagaagagggctatatttagaagggacaaagcccatgacccct

SEQ ID NO: 83437 - DNA, 640 bp, Homo Sapiens
  misc_feature (37)..(37): n is a, c, g, or t
  misc_feature (40)..(40): n is a, c, g, or t
gaaaaacatctgcatagttttcaactggaaaaagaantgncttaaaaatgggatgtcctaaaatgaaagctgctcaaagtcacagaacaaccgagggacaaaggagattggatgactgggaagcgctggcccggaacagcccctgcaactgtggggcctgcacacagcccttccacagttggcactgcaggtgcaggccaaccctttaaagaataaacaaggaagtcagctctttcactttttacaagttggcaaaaacagacttccggggaattttgatgttttcccgtgttgtagagcttccagggtttaataaaactggttaaaaattgagtctttccctgaagtaagtgctctttccagatgaaaactactcttttggttttgtttgaaagtaagaaagggaggggaaactttgctcttttaataattatgttcagcctatgatgaagtatttgattattagacagcaatgtcactaataagttttaagttgtccaaagttaattgtaaacatcatcagtacagtactcttagttacagtaaagcaattgttgcaagatgaatggctaatattttggtgcagtgtttgatgttcaaaacaaaatgttacaacaataaacgaacataacataaaccc

SEQ ID NO: 83438 - DNA, 500 bp, Homo Sapiens
acctgccttgttccaggaaggatttaatgtggtttatattccagtcctttaatgctggaagggctgagatgagactgaaagatgggcaggaagtatatcatcacaagctttgtgtttgatgttaatgtgtatgatttttatattatgggaaataagctcttagaggagtgatataatcaggtttgtgttttagaaatctgtgtaatgaatgaatgaagaaagaaattgaagaatcatgtaacatatgtgatcgcatttttgtaaaagaaccatgtgtgtttatatgtgtttatatatatacttgtgtatgcaaaggtaaaagtctgaaaggatatatgctaactgttcacaatgataaccccccaggaatgggattggaggggagggggcttctgtgtttgttatgtatgctgggtgggatattgtgcttttatttctatattgtttgaatttttttacagtatgtattatttttgtaataaaaattttaaaaaattcca

SEQ ID NO: 83439 - DNA, 648 bp, Homo Sapiens
ccatggactaaacaaggggtacaaaaagcaggctggtacggtccggaatcccgggatatcgtcgaccacgcgtcgcttgggttagttcctgttaggccccggcgggggagtaggttgaagtctcctaagatgcccggtgggctggggcaccgggagctgtgaagggaacgtgagggggcggcgtagtggagacccacggcaggcctgaagaagagcggcggccgagcccgccttccctgcaccatgctcatagaggatgtggatgccctcaagtcctggctggccaagttactggagccgatatgtgatgctgatccttcagccttagccaactatgttgtagcactggtcaagaaggacaaacctgagaaagaattaaaagccttttgtgctgatcaacttgatgtctttttacaaaaagaaacttcaggttttgtggacaaactatttgaaagtctctatactaagaactaccttccacttttggaaccagtaaagcctgagccaaaaccactagtccaagaaaaagaagaaattaaagaagaggtatttcaggagccagcagaggaagaacgagatggcagaaaaaagaaatatcctagtccccagaagactcgttcagaatctagtgaacgaaggacacgtgag

SEQ ID NO: 83440 - DNA, 302 bp, Homo Sapiens
  misc_feature (72)..(244): n is a, c, g, or t
aatctcagttgcttgaaagtaggatttaggtatttgtgtctgtattcatgaccaaaaatcttatctgaattnnnnnnnnnnnnnnnnnnnnnnnnnnnnnnnnnnnnnnnnnnnnnnnnnnnnnnnnnnnnnnnnnnnnnnnnnnnnnnnnnnnnnnnnnnnnnnnnnnnnnnnnnnnnnnnnnnnnnnnnnnnnnnnnnnnnnnnnnnnnnnnnnnnnnnnnnnnnnnnnnnnnnnnnnnnnnagtgtgaatgtaatatttctcaataaatgctgactgaaataaatttgttgttagatca

SEQ ID NO: 83441 - DNA, 469 bp, Homo Sapiens
  misc_feature (176)..(176): n is a, c, g, or t
gaccctgccggggatatttaaacctcaatccaccatggctgatataacctctaccccttaaaatattcccctgtataggaaatgtggaaattgtccctttgtagccaactataacattgttctttatgaatattacctttgatacatatgatcccacaatataaaaaccaaaaacntactgtgtgcaaattataccttggaccatataggcattgattaacttctttaagtacatgtgataactatggaaatcaagattatgtgactgaaaaacataaaggaagagacccatctagataacagcaatcaacctgcttaattctgaatgacaattatatccacaaatttttaaaacttctacatgtatttttcacatgaagatctccttaacaggttgccaaccttttcttttataaaactattacatttaaaatatggacgtctgaaaaataaaatattcatcattttt

SEQ ID NO: 83442 - DNA, 159 bp, Homo Sapiens
ggtaaaccaagtgatctgcctttcagcaactgtcttattttggttctttgaaactgtgatttttatttcatttgtacccaacccattgtaagtattttgttttgtttcctggaaattctgttttgaaacagaaaataaaggctgtgttaaatgaaaaaa

SEQ ID NO: 83443 - DNA, 727 bp, Homo Sapiens
  misc_feature (699)..(699): n is a, c, g, or t
tttgtagttctcaaaaatttcctgcaactgtttaagggcagccttagcctctatagcctctgttgattcaataacaggtactggagcaggagtggaaacagtctgtgatgtacttggacgttttggagttgatgcaagagaaacatcatctaagcttgaagcatgtaatggaatggcaactcctgttgtttgtgacaataaaatacggtacatatcacgctgacgaactatggaatcaacaagctgcatttgatgctgtcgtgatttgcggagttgttctagttcagtaagggcactctcaagtttgagctgaagctcagtgattttggatgaagttgtttcttgttcttctctttctctggtttccccaagctctctaagggccactaagagacgttgattttgttgttgaagctcttcaatatttctgtaagatactagatgctgtgatattacctcagatgaactacttatatcagcagagcttacttcctcatcacgaattacgtggttaccccttgcttcttcaattccatcaaagcactctaatctgttgtgacagatcttttacttgtatttccattcttcgattatctctctcaagtacagatgattgcttgtgggcttatcagtgtcctcctgcatcggctgatcttcctcatagctagttcaagctgaaccgatatactggtacagctntctgtgcacgttcatattcctcacgctg

SEQ ID NO: 83444 - DNA, 503 bp, Homo Sapiens
  misc_feature (101)..(101): n is a, c, g, or t
  misc_feature (288)..(302): n is a, c, g, or t
tgcaagacgctcacgcgcacgctgctcaccttcttcgacctggcctggcggctgcgcaagaactttcttttacttctatattctggcctcggtgattctcnaacgtcccacctgcaggtatatatttagagccactaactttgtggcatttgggggctcctcgtcaggatggctgacttccacccacctgctcacccaccctagagcaaagcgaccaactccgctcctgcatgcagacttgccactcattctttccattgcctcatcttttagtataaatgggtggcnnnnnnnnnnnnnnncagcatttgtggaaagcctgaaatataacccaaatcgtctaagatagaatgaaaaattgactctcaaggaaatatttgaaggaacagaatacagcttaaaaatttgaaaatccttaaaaatatctgagaagtttttgcatccgtaaaacagaaaacagcacgaactttaggaaatgacaatgggcacagaatgcaataaaa

SEQ ID NO: 83445 - DNA, 522 bp, Homo Sapiens
  misc_feature (35)..(35): n is a, c, g, or t
  misc_feature (47)..(47): n is a, c, g, or t
  misc_feature (54)..(54): n is a, c, g, or t
  misc_feature (108)..(108): n is a, c, g, or t
  misc_feature (285)..(305): n is a, c, g, or t
ccctgacccgcggttcttcacacacccccattcgngtatacccagangctcaantgtgtggcagtttcggatggaagcttcgagagcccttaagttctgagaaaattngaagccccaggggtggggtggaacgtgccgcccagtcgacgtcagcgtggtctgtcatcctgctagtttgtgatgttttctgacagtagcctccaagaagccgttgtgcgaagacagagtcctgcagagtccttccagcctaggcctgcagcgccattttatttatattttttaatnnnnnnnnnnnnnnnnnnnnnagacccacattggaacagtgaatcagtcccatagagagggcccgtggaccatcgctgtcatgagtgatgccctggcccttctgaaaccagccaacctaattacctgtattgtggaaatgcgcatgagtccccaaccccttgtttctatacattctatgttgtcttttaaaaagtgtgcttaacattgacacaataaatgttggagctttaaaaaaaa

SEQ ID NO: 83446 - DNA, 515 bp, Homo Sapiens
acacgctcccacttcagattggtactggcatcttcacaaatacaaaggaatccagttctcatcaccctgggatagctgaattcccttcccgtggtaaatcttcaagttacagcaaacaatttactagtagcacgagttacaacagaggagactccacatttgaaagcaagagctataaaatggcagatgaggccggaagtgaagccgatcatgaaggaacacatagcaccaagagaggccatgctaaatctcgccctgtcagaggtatccacacttctcctttggggaagccttccctgtccccctagactaagttaaatatttctgcacagtgttcccatggccccttgcatttccttcttaactctctgttacacgtcattgaaactacacttttttggtctgtttttgtgctagactgtaagttccttggggggcagggccttggtctggtctcatctctgtattcccaaatgcctaacagtacagagccatgactcaataaatacatgtta

SEQ ID NO: 83447 - DNA, 358 bp, Homo Sapiens
  misc_feature (24)..(24): n is a, c, g, or t
  misc_feature (176)..(176): n is a, c, g, or t
ttcggcatgaggacagcccagagnccaagctccccagtataagccatacaggccagggacccacaggagagtggattagagcacaagtctggcctcactgagtggacaagagctgatgggcctcatcagggtgacattcaccccagggcagcctgaccactcttggcccctcaggncattatcccctttggaatgtgaatgtggttgccaaaagtgggcagaggaccccacctgggaacctttttccctcagttagtggggagactagcacctaggtacccacatgggtatttatatctgaaccagacagacgcttgaatcaggcactatgttaagaaatatatttatttgctaatat

SEQ ID NO: 83448 - DNA, 119 bp, Homo Sapiens
cccatacatatgcatgttaaagtttataagttaggcagagtaagatatgaacaataactaataatgaaatagaaacgtaacgatgtgctgtaataaaagttatgtgactgacaaaaaaa

SEQ ID NO: 83449 - DNA, 450 bp, Homo Sapiens
gcggccgctggcttggcctgcccgcccgactacagcctggtggtgcgggcggccgagcgcgctcgggcgcatgaccagaacctggcaaacctggccctgcaggcgctgcgcgacggggcagcggctggggaccgcgaccgggacagttcgccgtgcgtcggcctccctgcggcctcccgggggccccccagagcaggcgcccccgcgtcccggacgggcagtgctacctctgcgggcactgtcggggagcagggccggcccggcacccacgagcggccaggagccaagcccagggctggctccgagaagggcagtgccagcagcagggacgggaagaccaccgtgtggatctgagggcgctggcttgcgagctgggccagggaggaggagggttggggggctccggtggaaacctgcgaccccttctcctcagccttctccttagccggt

SEQ ID NO: 83450 - DNA, 466 bp, Homo Sapiens
  misc_feature (28)..(28): n is a, c, g, or t
  misc_feature (42)..(42): n is a, c, g, or t
  misc_feature (217)..(217): n is a, c, g, or t
  misc_feature (243)..(244): n is a, c, g, or t
  misc_feature (316)..(316): n is a, c, g, or t
  misc_feature (422)..(422): n is a, c, g, or t
tgggggtggagggtatggaggcccaaangtaaatttaaaaangaaatttttgaagggaaacagctttatccaggggaagttaaatatacccctccgtttttttcttctttctaataatgatatggatcaacaaatgcaatttgaactttttaagataaccctaaatgggttttgtttcttaaatgcacaattgattcttctatactgtaatgcttcntttgtgacgctggaaaatggtcagannctgctgactttgtgcctttaaaatgcattctgctttgacagtggcagactttttggtgctggagaagattcnactagcagtcttatatgtgcttttcaggaaatatctttctacttaaggccttgagagattcaaagtggcatgacttaggcttggaccaaatataagatcttttacnattgcaaacaaaatgttgtattgaataaaagggttaaaaaaatc

SEQ ID NO: 83451 - DNA, 963 bp, Homo Sapiens
  misc_feature (151)..(403): n is a, c, g, or t
  misc_feature (633)..(633): n is a, c, g, or t
gatttttctttaatcgtgggttggtttgggaagttattttatgtgtgtgtatactttttcatttagatggtaaatgcttctctatcttctccttcatgtacttcttttcccggttctaaactgaattttattttattttttggagatagannnnnnnnnnnnnnnnnnnnnnnnnnnnnnnnnnnnnnnnnnnnnnnnnnnnnnnnnnnnnnnnnnnnnnnnnnnnnnnnnnnnnnnnnnnnnnnnnnnnnnnnnnnnnnnnnnnnnnnnnnnnnnnnnnnnnnnnnnnnnnnnnnnnnnnnnnnnnnnnnnnnnnnnnnnnnnnnnnnnnnnnnnnnnnnnnnnnnnnnnnnnnnnnnnnnnnnnnnnnnnnnnnnnnnnnnnnnnnnnnnnnnnnnnnnnngtgtgagccaccatgcccggccaattcaggtgacttctgaattctcattctgattctggtaagttacatgggaatgctaatctacctaaatttagcccaaaagaaaagaaaatgcccctccaaaaagagctgctaataactctaggagaatggagtatcataagggcaagctaatctacccagcagccccagaacaaaaagcaagggatgtccaccaagcctggttttancctgcttgcggtcatcaaagggctgaaccgcaaacacgtgccctcagcttccagagtccatgactgtgaggcccgcttgcaggcaccagctgcttcagctgttctcccagctgtgaggaggacacaatgaacaccctcctgtaacaagggactcagacgtcttcaggacccaccctcatcccctcggccccagaccaaagagcctcctggagagctgattcctgctcttttgactgtctgattacttagagcagctttttaaaaacagtaaattttatggttttttcttattaatacaagttcattgtagaaaaatttaggaaatacaag

SEQ ID NO: 83452 - DNA, 1682 bp, Homo Sapiens
  misc_feature (492)..(501): n is a, c, g, or t
  misc_feature (1617)..(1617): n is a, c, g, or t
accatgcccagcctaaacttggcaagataataaataacctttttaagtgtcgttgggcacttgtctggttgtttttctttaggttaccatgccagcaatgattccttttgagtttctgacagaagatagtggttttcatccaaataagtcaacctactctaccccatccctaagccacttgtatggaaagaaaaagaggaagaagccagtactgtgactgcgtaagcttcccccagcatcacccgctatgagatgtgtggcagctgagacccgggaactgctcaagggcaccaggccccatctgtctgcactcactcaccttcctcaggtactcgcatgggcatgtcactgactttacatgctgctgcagctccttggtgagctggccctggtcatgggacaggaactgtggggtcaggacaatagagagcttcaccatttgcagaatgagaacaggggctcatgatgagtgccaacctattagataatttnnnnnnnnnngtgttgaatgagtggaaaaacaaggtgatgtttgagtctatagtggtcaagggcttcagaaaaggacagaaccaagttcaaattcctgtactttgaatttctacttcatgccatgcaaaattactttaccccttttaacctcagttttcttctgtgtgaaacagaaacaatagtttcattcgtcattcagtttctctcaagatttcacgagatcatacctataaaacatccaagtcatttaaatgtatcatcatttctgtcataattagtgggatccatttcactattattggatatacagttctgtgcctgaaacctacaaaaaaacaaaatgttaagtctaaaaagcattagtgatttctcatttttatattactaattataaccctatttaatcacacaaggccttgtccgcggcaggtgctcaataaacacttgtcgaatcaatgcatgtgggctccggagccacactgtttagattctattctgcctccaccacttatcagctgtgtgatctgggtaagataattcacctctttatgtctgcacttccctctccataaactatatataatgagaatccttagctcattcggttgtggtgaggggtgaatgatttggcacacaggaggggcttgttaacattagctgtgatgatctccttccaaatcttcattttcagagccacagatgaggccatagtgcaaccaggtgaccttagagtgtaagtacacatgatcgccagctatgctctatctccaccataggtccaagactgggtagttctggcctggaggtttctgctgcatctgccttctcagtgttcacctaaggacctttgtattttcctcctcgcatccccacagatggggttcaggctgccggacacagctgggtgatgccagggcagtggtcacctgtgccagccccgtgaggtagctggaggatcattgttccttccttctcgggctctgggcagatgccagggctggggtgacccatgccctcaagtttcttgctttggtgggccacattttcccttggcaaagagggtaaaggtcacaggatgccggagagctgtgacttctctgtgccctgtgcccaaactatgaaganctgacacactatgctaaaagtccaacgctgggtgctccccagctgaggaccatcgttgggggatc

SEQ ID NO: 83453 - DNA, 910 bp, Homo Sapiens
ggaattccttgaagactagaaaaatcagttaaacaagattaaaggtaaaaactgtacatatgcaggaacatttctttgattttaaacatttacatttaaatgaaatgttctcttaactctcctaaaacagccatgaatgtatctctactattactcactgatgtacctgaactagaaaataaaactaccttgacaaaagaaataaaaaactctaaaatccatcccttccttttccttctggaatcattaaggagagatttatcacctgcatgtctgaaattaagcagaactcaattccacgatgacaatgaagaacctcattttcaaaatctgcccattcataaatccaggcaacagtgctaactcattaaaagtaggagcttcagaagaaatttctggtgcttaattgagctgccatgtttctacttaaagcaggcgatacagtaattacaagactccttaaaagccaggtgctcctgacctatataccaaccaaccttcatggacattcacatattaacagaagcatatattacacaatgcaagggtccaagcaatacatcagtaagttactaattatctggaggccagcaaaaagaacttcacttgaaaggcagtttccaaacacaatcccacatgattttacaaaccaaaagtagaactcaccatctgatgctgggatccaaacatagtgttacagggtacacggcacaagcaggggaagggcaagccgagctgcaggaagaaacatacgacttgacaagaaagctctctgcaccattcacttcagattgtgaaaggctgtggctctaagacaagccacgattattcttctaagaaatctctctccttaggaactcttaatattataaattgatgttaaagtacatttagaaagccaagccgaaaa

SEQ ID NO: 83454 - DNA, 981 bp, Homo Sapiens
ggcaggacgaggccgggggttaagtcggcacgaggagctcggcttgcccttcccctgcttgtgccgtgtaccctgtaacactgtgtttggatcccagcatcagatggatgttgccttcctggagaaactgattaaagatgatatagagcgaggaagactgcccctgttgcttgtcgcaaatgcaggaacggcagcagtaggacacacagacaagattgggagattgaaagaactctgtgagcagtatggcatatggcttcatgtggagggtgtgaatctggcaacattggctctgggttatgtctcctcatcagtgctggctgcagccaaatgtgatagcatgacgatgactcctggcccgtggctgggtttgccagctgttcctgcggtgacactgtataaacacgatgaccctgccttgactttagttgctggtcttacatcaaataagcccacagacaaactccgtgccctgcctctgtggttatctttacaatacttgggacttgatgggtttgtggagaggatcaagcatgcctgtcaactgagtcaacggttgcaggaaagtttgaagaaagtgaattacatcaaaatcttggtggaagatgagctcagctccccagtggtggtgttcagatttttccaggaattaccaggctcagatccggtgtttaaagccgtcccagtgcccaacatgacaccttcagcagtcggccgggagaggcactcgtgtgatgcgctgaatcgctggctgggagaacagctgaagcagctggtgcctgcgagcggcctcacagtcatggatctggaagctgagggcacgtgtttgcggttcagccctttgatgaccgcagcaggtatgatctcgtgaaaccttgagagaaactgaatgaggaatgaaactattgttcctgtttcacacagaagaaaactgaggttggcactcatgatgagcccctgttctcatcctgcaaatgttgg

SEQ ID NO: 83455 - DNA, 1331 bp, Homo Sapiens
cagcgtggaaggagctgcggggcgcgggaggaggaagtagagcccgggaccgccaggccaccaccggccgcctcagccatggacgcgtccctggagaagatagcagaccccacgttagctgaaatgggaaaaaacttgaaggaggcagtgaagatgctggaggacagtcagagaagaacagaagaggaaaatggaaagaagctcatatccggagatattccaggcccactccagggcagtgggcaagatatggtgagcatcctccagttagttcagaatctcatgcatggagatgaagatgaggagccccagagccccagaatccaaaatattggagaacaaggtcatatggctttgttgggacatagtctgggagcttatatttcaactctggacaaagagaagctgagaaaacttacaactaggatactttcagataccaccttatggctatgcagaattttcagatatgaaaatgggtgtgcttatttccacgaagaggaaagagaaggacttgcaaagatatgtaggcttgccattcattctcgatatgaagacttcgtagtggatggcttcaatgtgttatataacaagaagcctgtcatatatcttagtgctgctgctagacctggcctgggccaatacctttgtaatcagctcggcttgcccttcccctgcttgtgccgtgtaccctgtaacactgtgtttggatcccagcatcagatggatgttgccttcctggagaaactgattaaagatgatatagagcgaggaagactgcccctgttgcttgtcgcaaatgcaggaacggcagcagtaggacacacagacaagattggggagattgaaagaactctgtgagcagtatggcatatggcttcatgtggagggtgtgaatctggcaacattggctctgggttatgtctcctcatcagtgctggctgcagccaaatgtgatagcatgacgaatgactcctggcccgtggctgggtttgccagctggttcctgcggtgacactgtataaacacgatgaccctgcctttgactttagttgctggtcttacatcaaataaagcccacagacaaactccgtgccctgcctctgtggttatctttacaatacttgggacttgatgggtttgtggagaggattcagcatgcctggccactgagtcaacggttgcaagaaagtttgaagaaagggaattacatccaaatcttggtggaagattaactccgcctccccagtggggggtggttcaaaatttttccaggaaattacaaggcttcgaatccgggggttttaagcccttccccatggccccaaatg

SEQ ID NO: 83456 - DNA, 1423 bp, Homo Sapiens
  misc_feature (1302)..(1336): n is a, c, g, or t
  misc_feature (1340)..(1382): n is a, c, g, or t
taaagcataagcaatagagtaaatgcatgagtaaatatcttgagtatcccataaaccttaatgttaaagtcatattgtaaatctctgacttcttattaccaaggacactctatctgttgcctcttactcttgacagatcttggtctcaacaataaattcgttggggaagtgtctaatcttccagcatttatcaatggcacgtttgttgaaacccagcaagaggtctctgcgacgaaggcggaaggactttctgttattgcaaagttggtaaataaagatgccaaggttactaacatcacgaatttcctccacagcaactaggtcttctcgaaccacataagtttgaggcagatatctgccactcgccagtttgccaaagagctctaccagattttttggaggcataacaatagaagtattgaggggcatcagatagcagttccccagcaacaagtccaggtaagcagtcattcccttttcaaagtcatgaataattgctgcagggtcactatcagagaaactggggacaggcacatcaatgattgcaatgttgtcatcctcacgaatgtcagcctcctcagtcacaggcaggaagttaggctctcctccacgaagggaatttgcaggatcctcagaatcaaaaaagcacatctctccacggtaaatggtgctcttgggcatgaagtacttgtaaatgcaggctccaccaacaataagtcctgccaagatgaatgaaaggcctaagagagtaagcatacatctcccagaggagccctctttttcctgggtggcaactcggagctccttgccggtcagtatctgagttctgaccgtgcggctcaggagggcctccacgtcttgccgcgcctcctccttttgcacggcggtaggggtattgaaggcgattttcaccatagtgaatcttcgggctgcgcggtaaggcgctgctggaatcagcgtcctgggctgcagactgcaagaggagatcctgttagcccaaacagcacttactttatcttcagtctaacactactgcaagccgaggtctgggatacttatgacgcagtcccaaactggggggagaccgtgggcgggcccagggaggtgcctaaagggaggagcgagagggggcccaaaaggggcccaagtgcctgagttgggggtttgcgaggtggcgcggatttgccactgggggaagagcaggggaagtggagtccgtggccggctcaggctaaacgtgcctcacctgcccccggccgtaatggccgaattcccgggcatatgtccggtaccgtcgactgnnnnnnnnnnnnnnnnnnnnnnnnnnnnnnnnnnncggnnnnnnnnnnnnnnnnnnnnnnnnnnnnnnnnnnnnnnnnnnnattaacgccctagcgccctatagtgatcgtatacaggtctt

SEQ ID NO: 83457 - DNA, 856 bp, Homo Sapiens
  misc_feature (296)..(296): n is a, c, g, or t
atttcggcatgaggtttgaaaacggtaacatcgcagtgctgctcgcgggtctggctagtcaggcgaagtttgcagaatggaatctaattttaatcaagagggagtacctcgaccatcttatgtttttagtgctgacccaattgcaaggccttcagaaataaatttcgatggcattaagcttgatctgtctcatgaattttccttagttgctccaaatactgaggcaaacagtttcgaatctaaagattatctccaggtttgtcttcgaataagaccatttacacagtcagaaaaangaacttgagtctgagggctgtgtgcatattctggattcacagactgttgtgcttgaaagagcctcaatgcatccttggtcggttaagtgaaaaaagctcagggcagatggcacagaaattcagtttttccaaggttttttgggcccagcaactacacagaaggaattccttcagggttgcattatgcaaccagtaaaagacctcttgaaaggacagagtcgtctgatttttacttacgggctaaccaattcaggaaaaacatatacatttcaagggacagaagaaaatagcggcattctgcctcgaactttgaatgtattatttgatagtcttcaagaaagactgtatacaaagatgaaccttaaaccacatagatccagagaatacttaaggttatcatcagaaccagagaaagaaggaaattgtaggcaaagtggattggtttcgggcaattaaagagggtacggtggctaatgagagtgaggagaaccttatggaaagttgaaaaaacttgggttttccaggttgggggatcctaaagtttgtaagcctggttttgt

SEQ ID NO: 83458 - DNA, 483 bp, Homo Sapiens
aggcatggtccatcagtattggagagctgaacccaatggtttttggatggttgccgtaaccagaagatctgtgaagaggatggtggtttgcacctgttcctgaagtcaaactggaaaaggttgcaggtatttcaattttctcaatcattttgcataaatgtattaatattttgagtagtaatagttctaaacctgcaggaaggcatcattgtatactgtggtatgtagagaatactactcttacactgctctttatcttaaaatgttttggtatactgtgaatattttcctctaagtatttggtgtattttgacagttattaaaggagaatataaaattaaagattctggtctaaactaagaataatggaaagttgcttcgtcctgccttagaggagttttcagttcatcctcttcttgagaaactatgtgttgctgttactaaataaacatttactcaataaacgttttatttcctcaaaaa

SEQ ID NO: 83459 - DNA, 143 bp, Homo Sapiens
caacttcatagcaaaatctgtattaaatttgccttatgaaaaaatagaactttttctatacttttctaacaatttcctattgttgtgagaaaaggaagatgaacatgttttgtgctagttggtagctcacaaatgtaaaacca

SEQ ID NO: 83460 - DNA, 2032 bp, Homo Sapiens
acgcgcataagactaatttacaaaatcactctatacagtcattaggtgtaacatccttccctgagtagaaagtaatgcatgtgtttggagattattttctgtaatgctgggaacaaacctgttttaaaagcacactgctaaaagtaggtgatataagaccatttgctgtttttattaaagtatgtgtgtgtatcagtgtctcaatgtgaagattgtaacctcaagattaggaatcttaaaagagccacttagcctgaatgggaaacgtgagactatttttaaacacacacctctaaggaagaagcctcccatatagacttgatctcaaagaagcagataagaagacagaaaagtgttttaagtgtaagatctcctatggagtactttaaattcatttatacaaatgaataagtgtatctttgtataatgcataaatacatagataaaaacatgtttgctgccaaagttcccaataagatgcttcctgtgttttttggcctttacttagctgaatgatcaaagttcagaaaatggtctgcaaaagttactccatatacaaccccaaatctactactttaaatgtaacatcaactcagttgtatgaatctggagtgtaatatttatattagaatgtatatgtcatttaaaatattttgaaagccctcataaatatttatatttactaaactaatagcatagacactatataaatccgcagtgatgcttatatatcttaaattagtaataatgggtgctatataattattttcagttactatccctgacactctggaatcttctccatttctccctatcactcaatttcattttaatcattggacacctttgcgttttgctgctaacagtgtgtgtatgtcaccctctttatatctggttttcccacttgtctgaagctctcctgatcttagaacctggagctgcagattcctccatgtcagctcccatcacggccccaaagacagagtcacttggttgctgagtcacttggttgctggaaaaatctttggggaaagctggtataagctacacactgacctgtccccagtgtttccaggtaatgacttggcactccagagaaagtttcatgctgttgcgtgtggtggctccaagccaagcacctggcatgcaggtcagcccttcccagcgggcgtggcgtcgtcctcttcacagatgccacgttgcagccccaaggcctcaccattttgcgttttttaagaaacccattttcttggtcatttataaagctgctttatagatatctttgatcctggcatgccttggtttcctctcccttccctctttccaatcctggtttcctaacctcctcttgtagtaattctcaacgtcaactgcaaagtccgcaagaatattggaatggtaggatgctgtgcggggagctcgaggctgaggcataatcactgcttcggttctgctcatcaggggacacgctcccttactcatggcagccatgtttgattgtcacagagccccccgaatactctgtctatagtgacacactgtaggtgtcataaattttaagaaacctgcttttaagtactatttataggtttttctgttatacttgcaacctagttttaaaatacatgaggattttatgaaagctttatacagacatttataggaaactcattctttgattttaggtgccatttaaattgataacacttactttataaaaagatgctttttgtctggatagagccttatagtttaaaatatcttcatatattgccatttgatcaaataaatttcttacttttacaccgcgagatcattccgccataccggatacaccctccccttctctccctcgcccttcgggcctttacggaaaagttcttttagacacccttccgcttctggaccactaccgggacaccgcatagggtctgtctgaaaatcttggtccagacagcgatgcttcccttatgcactatttcccgggttcttcgaccccccgcggtttgtgcgatttctctccccccgcagt

SEQ ID NO: 83461 - DNA, 732 bp, Homo Sapiens
cctagaggacttcagttacagcgtagggatacagtggccttgtgacccccttgccaatctgtgcctctcccagctctctgtgctgtgatcttttcccctattccctaccgtttctcagtgctttatcagaccctgctcctccttagcttaagctttaccttttccaccagtttggtgagatcagcccaccccagccagaactgtttttctactgttatttttgccctcctagccagttactagtcctcaatagaccatttctaagacctcttttgaagccctccccatcctcacccctaccttagtgtagtgctaggcacatagtgggctcttggtgagtcctgggtggtcaggtgatggataacatttttctcctcttctccctaggttgatctgttccagctgcaggtgaacaccctacgacgttataaacgacactacaagttgcagaccagaccaggcttcaataaggcccagttagcagaaactgtgagtcgacacttcaggaacatacctgtgaatgaaaaagagacccttgcctacttcatctacatggtgaagagtaacaagagtagactggaccagaaatcggagggtggcaagcagcttgagtgaggatgaagcacatcttaaaggaatgaagtgtaatgcttgatgcacaggtgatatctactacatttaagcccataaagactgttaaatattattgtaaataaaaaagtttgaatgatg

SEQ ID NO: 83462 - DNA, 596 bp, Homo Sapiens
  misc_feature (566)..(566): n is a, c, g, or t
gcggccgcggagtggcctaccggggaccctcccccagagggaccggcccggggcggggagatgaacggcttcagcacggaggaggacagccgcgaagggccccccgccgccccagctgccgccgccccgggctacggccagagctgctgcctcatcgaggacggcgagcgctgcgtccggcccgcgggcaacgcctccttcagcaagagggtccagaagagcatctcgcagaagaaactcaagctggacatcgacaagagcgtaaggcacctatatatctgtgattttcacaaaaatttcatccagagtgtccgaaataaaaggaagaggaagacaagtgacgatggcggagattctcccgagcacgacactgacattcctgagtgctctccacctgcctgaagcaagaacagctcttttagaggcaggttgatctgttccagctgcaggtgaacaccctacgacgttataaacgacactacaagttgcagaccagaccaggcttcaataaggcccagttagcagaaactgtgagtcgacacttcaggaacatacctgtgaatganaaagagacccttgcctacttcatctacatg

SEQ ID NO: 83463 - DNA, 1170 bp, Homo Sapiens
aggctggtaccggtccggaattcccgggatggagcgttcggcgggcggcggccgggcggcccaggggctgccgcgggactcggggcgcagccgagtggctgcaggggtggagtgggccggacgagccgcggggcccgggtgccgcgggttcgaggccgggccccgcgcgaggaggccgcgccaccccgggggagctgcccggcagcgagtttgccccgctgccgaaagaaggcgggagccggcaggggccttcgaaaccccctggcaacccaggcccggagtccttggggagcggctgtttcctgggacgccctcccggacacccccgctgcagggttacggttctgggcccccggcagaaggctcctccgggtgacccccggcggggccctgcgagccgcgggagccgaccccggggcctcgagccgggaggaagggggcttccggaggcggagggccaggggcccagggagccggacctcgcggacgcagggcagggaaccggcccgggctggagacggactctgggacccatcggcttgcggggggtctcagcgaccttgccccgcggcaagcgcggcctgcggagtggcctaccggggaccctcccccagagggaccggcccggggcggggagatgaacggcttcagcacggaggaggacagccgcgaagggccccccgccgccccagctgccgccgccccgggctacggccagagctgctgcctcatcgaggacggcgagcgctgcgtccggcccgcgggcaacgcctccttcagcaagagggtccagaagagcatctcgcagaagaaactcaagctggacatcgacaagagcgtaaggcacctatatatctgtgattttcacaaaaatttcatccagagtgtccgaaataaaaggaagaggaagacaagtgacgatggcggagattctcccgagcacgacactgacattcctgaggttgatctgttccagctgcaggtgaacaccctacgacgttataaacgacactacaagttgcagaccagaccaggcttcaataaggcccagttagcagaaactgtgagtcgacacttcaggaacatacctgtgaatgaaaaagagacccttgcctacttcatctacatggtgaagagtaacaagagtagactggaccagaaatcggaggg

SEQ ID NO: 83464 - DNA, 538 bp, Homo Sapiens
  misc_feature (485)..(485): n is a, c, g, or t
tgcggccgcggcgggtgctgggagccagcgcctgcctcgccgccgccctcgctgcctgccactccgtcttggcccgttctccgcaccgtgcagaggcggcgggctggggagggagcggcgccagcacgaggttcccagccgctgggaagcccctagacgcgccgaggggccgggctacgagcggctgagaaaatgatgcatcctgttgccagcagtaatccagctttctgtgggcctggcaagccttcctgcctcaatgaagatgccatgagagctgctgatcagtttgacatatattcctcccagcaaagcaaatacagccacacagtcaaccacaaaccaatggtttgtcagaggcaagacccattaaatgaaacacacttgcagactacaagtggcagaagcatagaaataaaagatgaactaaagaaaaagaagaatctcaaccgatctggtaagcgtggccggccttcgggaaccaccanatcagcaggataccggaccagcacaggcagacccctggggaaccaccaaagca

SEQ ID NO: 83465 - DNA, 644 bp, Homo Sapiens
  misc_feature (128)..(128): n is a, c, g, or t
  misc_feature (131)..(131): n is a, c, g, or t
  misc_feature (495)..(495): n is a, c, g, or t
  misc_feature (587)..(587): n is a, c, g, or t
ctacagcagcctcctcgtcgtccgcctcgtcttcgtcttcgtcatcgtcctcagcctcttcagggccggccctgcttccgggtgggcccggcatctcgacgcggcgctgcaggtctcggccgccatcnacncaatctgcgccggttccgggccgtgtttggggagagcggcgggggaggcggcaggacgaggatgagcaattcttaggttttggctcagatgaagaagtcagagtgcgaagtcccacaaggtctccttcagttaaaactagtcctcgaaaacctcgtgggagacctagaagtggctctgaccgaaattcagctaaataaatcagagaccaaatctggagataagatcaagaagaaagattctaaaagtatagaaaagaagagaggaagacctcccaccttccctggagtaaaaatcaaaataacacatggaaaggacatttcagagttaccaaagggaaacaaagaagatagcctgaaaaaaatnaaaaggacaccttctgctacgtttcagcaagccacaaagattaaaaaattaagagcaggtaaactctctcctctcaagtctaagtttaaganagggaagcttcaaataggaaggaagggggtacaaattgaagcttccctgtcttaaac

SEQ ID NO: 83466 - DNA, 538 bp, Homo Sapiens
gcggccgccgcctcagcagcctcctcgtcgtccgcctcgtcttcgtcttcgtcatcgtcctcagcctcttcagggccggccctgctccgggtgggcccgggcttcgacgcggcgctgcaggtctcggccgccatcggcaccaacctgcgccggttccgggccgtgtttggggagagcggcgggggaggcggcagcggagaggatgagcaattcttaggttttggctcagatgaagaagtcagagtgcgaagtcccacaaggtctccttcagttaaaactagtcctcgaaaacctcgtgggagacctagaaatggctctgaccgaaattcagctaacccctcagatccaacctgtgtttttcccccctaaataaatcaggagaccaaatctcgagataagatcaagaaggaaagattctaaaagtatagaaaagaagagaggaagacctcccaccttccctggagtaaaaatcgagaatacacatgggaaagggctttccgggtttcccaaggggaacaaagaagataaccgtggaaaa

SEQ ID NO: 83467 - DNA, 895 bp, Homo Sapiens
gcggccgccgcctcagcagcctcctcgtcgtccgcctcgtcttcgtcttcgtcatcgtcctcagcctcttcagggccggccctgctccgggtgggcccgggcttcgacgcggcgctgcaggtctcggccgccatcggcaccaacctgcgccggttccgggccgtgtttggggagagcggcgggggaggcggcacggagaggatgagcaattcttaggttttggctcagatgaagaagtcagagtgcgaagtcccacaaggtctccttcaggctccatgttggctcaggcagacaagcttccaatgactgacaagagggttgccagcctcctaaaaaaggccaaagctcagctctgcaagattgagaagagtaagagtcttaaacaaaccgaccagcccaaagcacagggtcaagaaagtgactcatcagagacctctgtgcgaggaccccggattaaacatgtctgcagaagagcagctgttgcccttggccgaaaacgagctgtgtttcctgatgacatgcccaccctgagtgccttaccatgggaagaacgagaaaagattttgtcttccatggggaatgatgacaagtcatcaattgctggctcagaagatgctgaacctcttgctccacccatcaaaccaattaaacctgtcactagaaacaaggcaccccaggaacctccagtaaagaaaggacgtcgatcgaggcggtgtgggcagtgtcccggctgccaggtgcctgaggactgtggtgtttgtactaattgcttagataagcccaagtttggtggtcgcaatataaagaagcagtgctgcaagatgagaaaatgtcagaatctacaatggatgccttccaaagcctacctgcagaagcaagctaaagctgtgaaaaa

SEQ ID NO: 83468 - DNA, 383 bp, Homo Sapiens
ttgcattggccaacttggaggcttcagtgttattttgccaagaagaatgttcacttttgtcatctaattttacactgctccttcagcaaactgactttatggagagataaccctgtttacctttagaaagaaggaagttgtggattcctcagtcttactcccattactattggtcattcaacagcccatcttcccagaaggaaagatgtaacctgacttttgcgccagaataagaacaacaaacggaagaaaaaaactgagttttatagtagaagtttgtagttgaatgagcatgtagctcaaaatgaagttaaccacttaaacttgtcatatgggggaccaaaatttcttataataaaaagaactatatctgaaaataaaaa

SEQ ID NO: 83469 - DNA, 1414 bp, Homo Sapiens
gacatgtggcctgcgagttcagggctcctgtcgctctccaggagcaacctctactccggacgcacaggcattccccgcgcccctccagccctcgccgccctcgccaccgctcccggccgccgcgctccggtacacacaggatccctgctgggcaccaacagctccaccatggggctggcctggggactaggcgtcctgttcctgatgcatgtgtgtggcaccaaccgcattccagagtctggcggagacaacagcgtgtttgacatctttgaactcaccggggccgcccgcaaggggtctgggcgccgactggtgaagggccccgacccttccagcccagctttccgcatcgaggatgccaacctgatcccccctgtgcctgatgacaagttccaagacctggtggatgctgtgcgggcagaaaagggtttcctccttctggcatccctgaggcagatgaagaagacccggggcacgctgctggccctggagcggaaagaccactctggccaggtcttcagcgtggtgtccaatggcaaggcgggcaccctggacctcagcctgaccgtccaaggaaagcagcacgtggtgtctgtgggaagaagctctcctggcaaccggccagtggaagagcatcaccctgtttgtgcaggaagacagggcccagctgtacatcgactgtgaaaagatggagaatgctgagttggacgtccccatccaaagcgtcttcaccagagacctggccagcatcgccagactccgcatcgcaaaggggggcgtcaatgacaatttccagggggtgctgcagaatgtgaggtttgtctttggaaccacaccagaagacatcctcaggaacaaaggctgctccagctctaccagtgtcctcctcacccttgacaacaacgtggtgaatggttccagccctgccatccgcactaactacattggccacaagacaaaggacttgcaagccatctgcggcatctcctgtgatgagctgtccagcatggtcctggaactcaggggcctgcgcaccattgtgaccacgctgcaggacagcatccgcaaagtgactgaagagaacaaagagttggccaatgagctgaggcggcctcccctatgctatcacaacggagttcagtacagaaataacgaggaatggactgttgatagctgcactgagtgtcactgtcagaactcagttaccatctgcaaaaaggtgtcctgccccatcatgccctgctccaatgccacagttcctgatggagaatgctgtcctcgctgttggcccagcgactctgcggacgatggctggtctccaatgtccgagtggacctcctgttctacgagctgtggcaatgaaatcagcaacgcgaccgctccgcgatacctcaacaccgatgtgaggctcctc

SEQ ID NO: 83470 - DNA, 1421 bp, Homo Sapiens
  misc_feature (483)..(529): n is a, c, g, or t
  misc_feature (626)..(659): n is a, c, g, or t
ggccgtgactgtctcgaggcagcccagcctcaacgcctacaactcactgacaaggtcggggctgaagcgtacgccctcgctaaagccggacgtaccccccaaaccatcctttgctcccctttccacatccatgaagcccaatgatgcgtgtacataatcccagggggagggggtcaggtgtcgaaccagcaggcaaggcgaggtgcccgctcagctcagcaaggttctcaactgcctcgagtacccaccagaccaagaaacgcttggcagagccgaggacgctgggtcctcctctctgggacacaggggtactcacgaaaactgggccgcgtggtttggtgaaggtttgcaacggcggggactcaccttcattctcttccttcactttcccccacaccctacaacaggtcggacccacaaaagacttcagttatcatcacaaacatgagccaaaagcacatacctaccccatcccccaccccnnnnnnnnnnnnnnnnnnnnnnnnnnnnnnnnnnnnnnnnnnnnnnngaggtgaacagaaactgaaacattttgtccacaacttcacgggacgtggccagactgggtttgcgttccaacctgcaaaacacaaatacattttttnnnnnnnnnnnnnnnnnnnnnnnnnnnnnnnnnngaattcattgataattctaactcagactttaacaatggcagaagtttactatgcgcaaatactgtgaaatgccggccagtgttacagctttctgttgcagcagataaatgccatgttgggcaactatgtcatagatttctgctcctcctctcttttaatgaaataacgtgaccgttaacgcaagtaactctttatttattgttcaccctttttttccttaaggaaaggactcttccaaatatcatcctatgaacagctcttcagaaagcccattgaaagttaaactatttaacgtgaaatccattaactggaacaattgagtttctttatttttacaataaattcactgagtaaataagttggagctggaattctgagctttgtgtttggactgtctggtctgtagctaaaggaaaaagttaggaggggaatatttatttaaatctatcagttcattgcctggtcaggtctctggcctataaacatgccaaaaaactaattcatgttaaagtccttccagatcctaatttctaaagccatcaggagagaaagcttttagaatggcacatcatatctcattgatgcccacatggttttgtccatggttctgactttctgtgaaggcaccagcttgcaatatgccatcccatttcaccttgcatgtgagacagcaaaccaaatccaccaatggtgtgaactaatatgctggctgctaccttgcataaattaatgatttgatcaccgggttatctgcatcagtct

SEQ ID NO: 83471 - DNA, 1579 bp, Homo Sapiens
  misc_feature (466)..(466): n is a, c, g, or t
  misc_feature (1215)..(1293): n is a, c, g, or t
  misc_feature (1510)..(1519): n is a, c, g, or t
cacatcacatttgtggacaatgccaagatctcctactccaatcctgtgaggcagcctctctatgagtttgaagattgcctagggggtggtaagcccaaggctctggcagcagcggaccggctccagaaaatattccccggtgtgaatgccagaggattcaacatgagcatacctatgcctgggcatccagtgaacttctccagtgtcactctggagcaagcccgcagagatgtggagcaactggagcagctcatcgaaagccatgatgtcgtcttcctattgatggacaccagggagagccggtggcttcctgccgtcattgctgcaagcaagagaaagctggtcatcaatgctgctttgggatttgacacatttgttgtcatgagacatggtctgaagaaaccaaagcagcaaggagctggggacttgtgtccaaaccaccctgtggcatctgctgacctcctgngctcatcgctttttgccaacatccctggttacaagcttggctgctacttctgcaatgatgtggtggccccaagagattcaaccagagaccggaccttggaccagcagtgcactgtgagtcgtccaggactggccgtgattgcaggagccctggccgtggaattgatggtatctgttttgcagcatccagaagggggctatgccattgccagcagcagtgacgatcggatgaatgagcctccaacctctcttgggcttgtgcctcaccagatccggggatttctttcacggtttgataatgtccttcccgtcagcctggcatttgacaaatgtacagcttgttcttccaaagttcttgatcaatatgaacgagaaggatttaacttcctagccaaggtgtttaattcttcacattccttcttagaagacttgactggtcttacattgctgcatcaagaaacccaagctgctgagatctgggacatgagcgatgatgagaccatctgagatggccccgctgtggggctgacttctccccggccgcctgctgaggagctctccatcgccagagcaggactgctgaccccaggcctggtgattctgggcccctcctccataccccgaggtctgggattcccccctctgctgcccaggagtggccagtgttcggcgttgctcgggattcaagataccaccagttcagagctaaataataaccgtggccttggccttgctattgacctgggaaannnnnnnnnnnnnnnnnnnnnnnnnnnnnnnnnnnnnnnnnnnnnnnnnnnnnnnnnnnnnnnnnnnnnnnnnnnnnnnaaaagggggcgccgcctcaaaaatatcccttccagggggcccaagctttaccggaccccattttttttggtaacaaaggggggcccctataggggagggcgcatttttaaagccaagggacctggccccccccttttaacaaaccccccgggattggggaaaaactggctaaacttggggggatattttggtgagagagaaaccctttactcttctnnnnnnnnnnaacaattaatggggaacaaaattcacccttccaaaaagatttaaagcgcctccccagggg

SEQ ID NO: 83472 - DNA, 588 bp, Homo Sapiens
tctgtgtgctcataaatcgtaaatctgtattcagacttctggactcgagacacgtagatccacctgggtggttcttcagtcattttaagcccaaaactcaaaatctcccgaaatcaaaatgtttaaacttataatctccagggtgtgactcacgggggatgaggggagcaattctctccctccccgcataaagctggttctcctgtctgctcattgaacggttccactgcgcatcacagcatctacatgcctaaaccaacaccccagcattggcaacagatatcttcctctcccttggctgcttcaggacagggaagaaacatgcttgcccttttctgactctttagtaactctggccgaatctatcacattattttacatctctttacatcttactactcccccatcttggctgtgtgttccctactggcagtgatttttgtttattcatttttgtaaactgacacttagttcagtgtccaatataagctcaacaatagtttataaaaggaaaagttcctgcctttgattgcttttaaacactattagaaaagacataaccaaattgcaacatgataaaacaaccgc

SEQ ID NO: 83473 - DNA, 439 bp, Homo Sapiens
accgatctggctcctccagggattcggcggcggggctgcaggctgaggctcggcgtcgcggtcctcgggagggcccctctctgctccaggtgcactcatttcatccgtcgagcctttcagtttgttgctaagcctgaaggtctctaagattttgtcttctgggagagacagcaaaggagcaggcatcaactttccaggaagaccgtttgccttagcaaagggattttctgagtgcagggcaggctggccttggagctggcaccatcaggcgctaggccgtctttctttcgggtcactgtcgctgtctgcactattagcaccgtttagggtcatgggttcttgaaagctcgtgcggagtgggcctcctcatcttcggcatcttgggccgggaagagtgggagctcacaatcgtaaccaatcccattctccttgccaagcc

SEQ ID NO: 83474 - DNA, 431 bp, Homo Sapiens
tttaaaaggaaaatgatttccgtatttatgtttgtcagcaatatagttatttacaaataacccatatgaaaatgtaaaaaagcatattacatcttcacatgccatctgtattgactgaataaagcttagtgacattatttgcaaatctgtagttaattgtacatagacattttgtgcgttaaaaaggaaatgtacataatgtaaaataaattacattacgcaatttacaaagtaatattaacaaaaattcttagacagctgcctccttatttaaacaaaataaatattcaggtagttaaattaacataaaatacacatttagggaataataatttatagaaagacagattgcaaattttaataaagttatattttacaatgatagatactgatctcttcaaatctgtgtgatagaaatggagaaaaaaagt

SEQ ID NO: 83475 - DNA, 703 bp, Homo Sapiens
  misc_feature (683)..(683): n is a, c, g, or t
cacaggatctgccaggatcttctgcagggatagcaggatatgctgatagaggccacttacaaggtccccatgagtcctgtgggagcaccattcagttagggaggggaatgaggcatggtgccacccaacagggcacaagacaacacaaagagaatagcatctgtacagcacactcgggagtgctggggttaagtgaagaaggctgccaggggtgactggcctaggacctgagggctgaagaaccaataccttggcgtatttgtaatccattttcagaatcccagtgtgtcacagcacaccagctaggacgctcctagggaaaaggttccccatcttctcatagactctcaaagccagaggcttcagcccccattttccttaaccccaacccaacttgggctctggcagcaattcccacccgcaggttttaaggcccagtggctaccagaagatgtgggctgagcaggaaggcagccccatcccgcagagtccagtggtcattcagggggttgatggaggcagccagtggctccaggacacagtagaggacactgcccaccagacagcggacatagggccccaagcacaggtgcggattacgaaataggctccgtgccacctgcagcagccggtgcagttgctccaggtcatggcttacagatttcaccccactgaccacatanacaaagtaaggcaggagtgc

SEQ ID NO: 83476 - DNA, 975 bp, Homo Sapiens
cagggatagcaggatatgctgatagaggccacttacaaggtccccatgagtccagaagatgtggctgagcaggagggcagccccatcccgcagagtccagtggtcattcagggggttgatggaggcagccagtggctccaggacacagtagaggacactgcccaccagacagcggacatagggccccaagcacaggtgcggattacgaaataggctccgtgccacctgcagcagccggtgcagttgctccaggtcatggcttacagatttcaccccactgaccacataaacaaagtaaggcaggagtgccccaatcttggagttcgtctgcaagtcctggagtgcaaccttcatcagttgcggatcatcccctagcacagcacgagtcacctggtgatagtacttgagaaggtcatctgtcagtgaagacacagcactgggcacccgatccttgaggtgccaggttccctttgccatccaggtaggagacatgaactctgacagctgtctcagcacagcctttggggatgttggtagccagggccagctccaccaggttcacctctcgatcctcaggaaagtagagttcaccctcctggcggggcgcatgggcaatgcctcctgggatccgtaaccacaacacagcctccacgctgctccatctgagggcccctgtggaagtcctcaaccgtcagcttccggcgtttggtgtgctcaatgaactgagagctattctgcgtggcctctctcagacgatagcacacgtcctctgcgagcagcgccgccacctcatcgctcagctccaggcccgtgctctccgccatgagccggacagactcccgagggatctccacaaaccgccgctcttctcgctctgacatggccccagtggagctgaagaccccggcgtggcgaaggctgctaccgagacgacggcggcgggggcggtgcagcggcgcccactcacgagctcac

SEQ ID NO: 83477 - DNA, 561 bp, Homo Sapiens
ggaggctcgccctaccctgcctcgccgctgctgggccgccccctctactacacgtcgcccttctacggcaactacacaaactacgggaacttgaacgcggcgctgcagggccagggtctcctgcggtacaactctgcggccgcggcccccggcgaggccctgcacaccgcgccaaaggcggccagcgacgcgggcaaggcgggcgcgcacccgctcgagtcccactaccggtccccgggcggcggctacgagcccaagaaagatgccagcgagggctgcaccgtggttggcgggggcgtccagccctacctatagaagggccgagcacagcaatgcaagtaagtgggcaccctggtgcttcccagaccctgtggagcctcccagcaccaacttgcttaatgtgtttttcttgcttctggtcatggggttagaagacagagcatttcaatcttgtccagcttttctttccttaagggggaaactatattttctgttttatagattccctctttttggcacaagttctatcactcctttacctagggaaggaaaaaaatatat

SEQ ID NO: 83478 - DNA, 1755 bp, Homo Sapiens
ggcccgggtggcgaattccgcacgagggagaaaccaggaagggagtcgcgagcatcatacggggctccggctgtactgtacagttactgtaggggcagtgacgccgccgccgccgcgcgagggagcgaccagggcagcgcgacgcgggcagagcgagcgccgcggaccccggaggcgagcggccgagggagcccagtcccaacttcgggccccggccccgcgcgccccggcccggccccgcgaggtctcggcgcggaagatggccggcggcgtggacggccccatcgggatcccgttccccgaccacagcagcgacatcctgagtgggctgaacgagcagcggacgcagggcctgctgtgcgacgtggtgatcctggtggagggccgcgagttccccacgcaccgctcggtgctggccgcctgcagccagtacttcaagaagctgttcacgtcgggcgccgtggtggaccagcagaacgtgtacgagatcgacttcgtcagcgccgaggcgctcaccgcgctcatggacttcgcctacacggccacgctcaccgtcagcacagccaacgtgggtgacatcctcagcgccgcccgcctgctggagatccccgccgtgagccacgtgtgcgccgacctcctggaccggcagatcctggcggccgacgcgggcgccgacgccgggcagctggaccttgtagatcaaattgatcagcgcaacctcctccgcgccaaggagtacctcgagttcttccagagcaaccccatgaacagcctgccccccgcggccgccgccgccgctgccagcttcccgtggtccgcctttggggcgtccgatgatgacctggatgccaccaaggaggccgtggccgccgctgtggccgccgtggccgcgggcgactgcaacggcttagacttctatgggccgggccccccggccgagcggcccccgacgggggacggggacgagggcgacagcaacccgggtctgtggccagagcgggatgaggacgcccccaccgggggtctctttccgccgccggtggccccgccggccgccacgcagaacggccactacggccgcggcggagaggaggaggccgcctcgctgtcggaggcggccccgagccgggcgactctccgggcttcctgtcgggagcggcgagggcgaggacggggacgggcccgacgtggacgggctggcggccagcacgctgctgcagcagatgatgtcatcggtgggccgggcgggggccgcgccgggggacagcgacgaggagtcgcgggccgacgacaagggcgtcatggactactacctgaagtacttcagcggcgcccacgacggcgacgtctacccggcctggtcgcagaaggtggagaagaagatccgagccaaggccttccagaagtgccccatctgcgagaaggtcatccagggcgccggcaagctgccgcgacacatccgcacccacacgggcgagaagccctacgagtgcaacatctgcaaggtccgcttcaccaggcaggacaagctgaaggtgcacatgcggaagcacacgggcgagaagccgtacctgtgccagcagtgcggcgccgcctttgcccacaactacgacctgaagaaccacatgcgcgtgcacacgggcctgcgcccctaccagtgcgacagctgctgcaagaccttcgtccgctccgaccacctgcacagacacctcaagaaagacggctgcaacggcgtcccctcgcgccgcggccgca

SEQ ID NO: 83479 - DNA, 484 bp, Homo Sapiens
  misc_feature (29)..(30): n is a, c, g, or t
  misc_feature (356)..(356): n is a, c, g, or t
acgcaccctcaagagtgtgggtgagacanntacagcctgttagacctgaaggcagatggctcttcttaaggccaataaggatctcatttccgcaggattgaaggagttcagcgttctgctgaatcagcaggtcttcaatgatcctctcgtctctgaagaagacatggtgactgtggtggaggactggatgaacttctacatcaactattacaggcagcaggtgacaggggagccccaagagcgagacaaggctctgcaggagcttcggcaagagctgaacactcttgccaaccctttcctggccaagtacagggacttcctgaagtctcatgagctcccgagtcacccaccgcccntcctcctagctcagggacccagcccctcctctctgagaaactctgaccttcatgtccttaggctgtgctcctgccaatctaccctgacacctcaataaagaccagtgctggttttgttggaaaaaaaa

SEQ ID NO: 83480 - DNA, 1246 bp, Homo Sapiens
  misc_feature (1141)..(1141): n is a, c, g, or t
gcggccgcgggcactgccgagctgctgccatccccgagtggatccctcaactggaccatgggcctgcccaccgacaatggccacgacagcgaccaggtgtttgagttcaacggcacccaggcagtgaggatcccggatggcgtcgtgtcggtcagccccaaagagccgttcaccatctcggtgtggatgagacatgggccattcggcaggaagaaggagacaattctttgcagttctgataaaacagatatgaatcggcaccactactccctctatgtccacgggtgccggctgatcttcctcttccgtcaggatccttctgaggagaagaaatacagacctgcagagttccactggaagttgaatcaggtctgtgatgaggaatggcaccactacgtcctcaatgtagaattcccgagtgtgactctctatgtggatggcacgtcccacgagcccttctctgtgactgaggattacccgctccatccatccaagatagaaactcagctcgtggtgggggcttgctggcaagagttttcaggagttgaaaatgacaatgaaactgagcctgtgactgtggcctctgcaggtggcgacctgcacatgacccagtttttccgaggcaatctggctggcttaactctccgttccgggaaactcgcggataagaaggtgatcgactgtctgtatacctgcaaggaggggctggacctgcaggtcctcgaagacagtggcagaggcgtgcagatccaagcacaccccagccagttggtattgaccttggagggagaagacctcggggaattggataaggccatgcagcacatctcgtacctgaactcccggcagttccccacgcccggaaatcgcagactcaaaatcaccagcacaatcagtgttttaacgaagccacctgcatttcggtcccccggtaaatggctacgtgatggttttacagcccgagaagcccaagatcagcctgagtggcgtccaccattttgcccgagcagcttctgaatttgaagctcagaagggtgttccttttcctgagctcgcatcatcagcccatccgagagagtggagctgaagggacgggctgagacccacattcagatcactgtgtcgagagtctgccgactgnatctggagtccgtgaggaagactgacacacagaactgagtgatgcgctgccaagctgatacatctatgctactcagtgactgcaccagagtccgtctgacggcgc

SEQ ID NO: 83481 - DNA, 775 bp, Homo Sapiens
catgttgcgttcagggtgccgtggatcatcactccctaaatcgtgcgagagcgccatcagtctagcagagagttaactcgggtcagcaagactgcatgccagtcgatagcgcagcagtgcaaacctctcgtagctggcatgtgtccacgccgtgaagtcatgccagttcagagctgctcacttcatatgcccttctgctgcaggcgggccatgtccacctccaggctctcctgctcgtggttcagctcctctccctccaccgtgacctcacaggtatccaggtcgtgcacgatctcctcggacaccagtgattcttgaactgtggggtcctcagccccgtccccttcaggctccacttctctcgtgatggtgctgatgatgcgaagctcagggaaaaggaacaccccttctgagctttcaaattcagaagctgctcgggcaaaatggtggacgccactcaggctgatcttgggctcctcgggctgtaaaaccatcacgtagccatctaccggggggaccgaaatgcaggtggcctcgttaaaacacttgattgtgctggtgattttgagtctgcgaattccgggcgtggggaactgccgggagttcaggtacgagatgtgctgcatggccttatccaattccccgaggtcttctccctccaaggtcaataccaactggctggggtgtgcttggatctgcacgcctctgccactgtccttcgaggacctgcacggtccagccccccctgaacgcttaaacttaaaatcctgctaga

SEQ ID NO: 83482 - DNA, 872 bp, Homo Sapiens
  misc_feature (773)..(774): n is a, c, g, or t
  misc_feature (776)..(776): n is a, c, g, or t
  misc_feature (778)..(781): n is a, c, g, or t
  misc_feature (783)..(790): n is a, c, g, or t
  misc_feature (792)..(792): n is a, c, g, or t
  misc_feature (795)..(797): n is a, c, g, or t
  misc_feature (799)..(799): n is a, c, g, or t
cagtcgacggtaccggacatatgcccgggaattcggccattacggccgggggcggcagtcgtgcgacagccgtcacttacggccggagctgtttgtgctgggagctggtggcgcggtgcagggctcttaagaacgaacggcttgggcgcggactggtatccggggactgtgacttgcagggtccgccatggagccagagcagatgctggagggacaaacgcaggttgcagaaaatcctcactctgagtacggtctcacagacaacgttgagagaatagtagaaaatgagaagattaatgcagaaaagtcatcaaagcagaaggtagatctccagtctttgccaactcgtgcctacctggatcagacagttgtgcctatcttattacagggacttgctgtgcttgcaaaggaaagaccaccaaatcccattgaatttctagcatcttatcttttaaaaaacaaggcacagtttgaagatcgaaactgacttaatgggaagaacagaaaaatttagttgctactgtagatttacatgattaagaggcagctttaattgccatgatcattccctctttttggatgtataagaaccttccggacaacagaacctatttctggaattgcagaagataacatatttcccttattttgatttaatcaccataaaccatacctatttaatgagtgtattctgtgcaatttttttctcagattgtctttaactttgtttttaaaatgaccttcaaaataaactgtcaaaacacccgaaaaannanannnnannnnnnnnanaannnancattgtcgggcccgcctcgggcccctcgaaaaagcttttctaagaccatttcgttttgggcgcgcggggcccc

SEQ ID NO: 83483 - DNA, 570 bp, Homo Sapiens
gctcttggcctggtgagcccctccaccttccaggcttactcaaagaattctttctgcccctccctgtgtcccgggacctgtttcatatcgcttctgtggtcgtgaccccatggtcttgtaattgtgaacttctttgctgccccttcgaagctggggagtgcttgttgcagatgcatccaagaggggtaattgcgtatcaacagtggatttgctggttgtttctacagggttctgaagcatgcaacatagaacagatacctttaaatttaggggcgctaaggaaagcaggaaccagtaatcctctttctgtggtgggatgggagggtgggggagaggggtggaatggagaggaaacaggctattgttggccagccctgggtggaggtgggtgcaagcaggacagatagtgcctgggggtgggggcggagggttcgcctctaggaaggggctagaagggatgaggaaatagttcatagcttcgtgcaggtgatccctattctgcgtgtatgtgtttgcacatgagtgtttgtagaccatagaccattaaaaaatacggaattcaaaagttac

SEQ ID NO: 83484 - DNA, 849 bp, Homo Sapiens
  misc_feature (409)..(421): n is a, c, g, or t
tgccttttttatcaaacaccatgtattgaatacttttaaatgattgtatatctgaacattaaactactacttttcacccgctcctctctaataaagaagctagttgcttattaactggcatttgggatgtggctaccttagatttctcatgctttttgttccaccttctgccctattacttgccttcagagaagggaaaggccctcacttgattgtcgtaagaagtctgtatgggagagttattctgcattgtctaggcaagtcttggtttaaccatggcttggttcatagcctggagtgtccctgtgtctggactagctcgcttgtctgtggcaacttccagatgttcaagtttcttaaaaatctggccacgggaaaaacacaccacttcttttattaatgttgctgnnnnnnnnnnnnnaaaaaaatacccaacttaacataaaatgcatatttcagaaatctaaacctcgggtctgaggctgtttgtgttaagcagcccccttgggtgagcaattaggaccttcagtcccatagttgactggagcccatgtatggttgcatttctctccttgcaggtcactttcgtccttcccgagagcagcattagagagagagtcacagcctaaataaactacagcatgagaagtatatttcaagtcctctaagggccttgtccagtatgattggttggtgtcaaatgttgtccagctccaaatggtattaggaagacaggcatgtcccagatggctgtacatgtcattgctgtctcttggtggcagcaggaatacgtgaggcaaagcccagttgccctacttcaggatgtctgccaacttctcctcgtagtat

SEQ ID NO: 83485 - DNA, 455 bp, Homo Sapiens
  misc_feature (32)..(32): n is a, c, g, or t
ataaggacaagccccaggtaaacgtctaaacngttactcacattgtcctactccagccccttcaattatttcccatctccacaaatagtcgggggaaaaaattaaaattttcctttatgattcttactgttcttcgcagctcatcttttcctgcttagaattaaccattgcgtaatttaaaagggagcagctagctgcttttctgtcagtctgaagcgtagtagtggaagaggtagtaagcaccagctgcctctttgctgctttgttttcctcctgattctcttaaatttgggttgcaaagctatcccgccccccaccctgccccatgaaacttgagcattcaaatgaagattcagcagtgtctgttcttcatttctatagccaaagctgttagttaaaatcccgaaatctatagcatttaaagataccaaatagaaacaccttccagctttaaa

SEQ ID NO: 83486 - DNA, 683 bp, Homo Sapiens
ctttccttaactcagtgtgctatctccccacgactaggtcactactgctttataatcacctttgtagccaccagtggattttgctcatcagtatttttcaggcaattgatactttagatattcagctgcaagacgtatgcagttttcattgacatcttttggagaaactgacaaacctggacttgacttaatgcctttggaaccttccaagatgttatataactctagatagaaggctgggcctccatgatgtcaggaatgttgcattcttatttccccatagataaacccatttgtccacaaagtcaaggagtcaggcagaggcccttgccatggggctttttaggataaagcaacaagcctggactttgctctacaacagggttttgcatagggagtggtatgaccagatccctcaagaaagaaagcttagagaccaggccagagtccactgcagtagcccagtcaagagaggatggtgacttggacttgtagtagagccagttagaatgaaagaaattgacacattcagaaatggttttagagatagagtcaaactggacctgataaagaactagagaagcggagtgaggataaagagaagagccatgactgactcggaagattttgtcttgaaaaacttgagaactcaagacagagtgaaataaaatcacatgtgggaa

SEQ ID NO: 83487 - DNA, 1320 bp, Homo Sapiens
taaggtagaaccaagtttattaatgacagcctttattacaatcactctcaagtgtaaaaaataaagggtgattaattaatatttaaaactcactcggacttgctgtttggcctttcagtggatgtgccaaagggcagggatcttgcctgattctgaatcaattggccagatggagttcactggagaatgaggcaatccacaaaaaagacaaatgatgccaactggagagagctcgtgtcttctccatgttggaaggacattacaaaatggcaactgtggtgggggcagagatgaagtaagacaaccttacagtcggagtaagatgtgaatacctctacctatacagagacaaaaacacacacatgcagagccatacacacacccaaacagtgaacacagttttgaaaataatttcctttttgtcctttctctgagcagactgacacattcatcggccaccaccatgcaccatggggctgaaatggaaaacctcgcttaatttccacaaagtattctagctggctgcccagttatgtgctggcaaatctgtccgcaccgaaaaatgtgcctgtggttttcccagagttccacagactgatatctgctccccaggagggcaacatccggtggacaccagctggattaaaatctagagggcaaaactcgtccctcccacctaaagtgggggcaggagcggcagcaccaggaagtggtttcccactttgtgttacagagtacttgccccagttcaacgcattcccctccaaagtatttgtgctttgataccatcctgatggttagtctgcaataagagaactgaaggagctatggccatgcactattttctttttttaataaaagcaaactaaaactggaggaagaaaaagaaaccattagaagcttttgactgggtcaatgttgtttccaaattgggtttaattccattcaaagagaaagaaggggagggtgcagaaaaggccactcagatcgactctggaagagatcatcaagaccagggaagcatttggatggtacagctggtctcttcccagccagactgggaggacatgccacaacctcccaaggctgtgaacctaggaaataagtgctgaccaaataacatatttcaatgtttgtagaaaagctggcaggaaagggagatgatggattcagattcacaggtcatgcagattaagacttaatcaaaaattaatgcttgagctgagtaagaaaacactaaaatttaagtggaactgtatcatagctttcacctttggaagacgaaaaacaacaaacatacgaaacaaaatgaaccaagtg

SEQ ID NO: 83488 - DNA, 670 bp, Homo Sapiens
tgcggccgccgcggggctgcaccgctacctgcgcgacttctgtggctgccacgtggcctggtccggctctcagctgcgcctgccgcggccactgccagccgtgccgggggagctgaccgaggccacgcccaacaggtaccgctattaccagaatgtgtgcacgcaaagctactccttcgtgtggtgggactgggcccgctgggagcgagagatagactggatggcgctgaatggcatcaacctggcactggcctggagcggccaggaggccatctggcagcgggtgtacctggccttgggcctgacccaggcagagatcaatgagttctttactggtcctgccttcctggcctgggggcgaatgggcaacctgcacacctgggatggccccctgcccccctcctggcacatcaagcagctttacctgcagcaccgggtcctggaccagatgcgctccttcggcatgaccccagtgctgcctgcattcgcggggcatgttcccgaggctgtcaccagggtgttccctcaggtcaatgtcacgaagatgggcagttggggccactttaactgttcctactcctgctccctacttctggctccggaagaccccatattccccatcatcgggagccctctcctgcgagaacctgatcaagagtttgcaccgaac

SEQ ID NO: 83489 - DNA, 691 bp, Homo Sapiens
ttgaaatagccttttaaatgttcacctcagcttgcctcacagtggtaaataataagcattttgtttgttttgtaggatcagggagcttccaaggcatattgataccttctttgatgggaagaagggctctgaggagctccaagataccccaacctccaggccgcttcattagggggtagttgggtttctgtttggcctttcccctgggccccataggcttaaactacccccacccccacctccgcctcctacctcagctgggagcactgtcttccatggggcttccacttctctcctcaacctggggaagaccacagggcagtgcctgcctcaggacctgccttccccaaaagctggcttcttgctccaaggagagagcattgacccacctgccagagtcttgccttttgcccaaaggagcctggtcttcagggctgcataggatgcaagtgccttctctgcttctcaccgtgggtggcactaatttcctccttaaccagaactttgttccagccactgacccattctaactcttccccctctgactctcctgcgcagggtctgttcctggtttcccagatgcataaaggaagacatatccctcccctgggcagcaaggctacaatgggagggagggagaacatgggagcatgtgaataaaatggcattaaatactgaaccagggagtccg

SEQ ID NO: 83490 - DNA, 749 bp, Homo Sapiens
  misc_feature (336)..(344): n is a, c, g, or t
ctagtgtggcccatgttgctctggctgtattcctaggcccatgttgctcttgccagcttcttgtccatcctccatgcccatgccttccagctttcacctctggcatctatcatttgctcttctcttaactcctacctgaaaaccccattcctaaattattcactatatttcagacttcttcactcttctccaaaaacctgaatcagcttgtgctgattttttcctatctgctatccctaaaaggactagaccttctttctatccttactcccctcaatgtatccatcttacctcttgattttccctcccattccctcacagttcctgaaacagtgnnnnnnnnngaccctaagcgacccctttctgcccctggccttgaggtcccttgacgtgctgctcctgtcttctgctcctctagtgaaccattcctctcccttggaattcatcagagtcatccctgtagagcccccttcctgcctctcaattcctcctgcctcacttcccaggctactgctgcttcaagacagtgacgtttctctccggtcagctgtcaggagcgcatggtgagcttccaacagtgccacaaggtgcgggtgcatggaagacacagctgagaacggaaatgagagtgggcatcgccgtggtcatcatgactcctctgcggcgtggtcaccatgttggttcactgtgttggctcttattgacggtctcctgctagcctgacatggtgccgagcctgctgcttctga

SEQ ID NO: 83491 - DNA, 1019 bp, Homo Sapiens
ccccaacacacacgccctgtaccctttctccaccctgcaagcgtagttgcatttagctcacagagcctgggactgcgacttgaaagagtttaggcagcaacagagtgaccctgggggtgctcttgaccgacagccgcacccccggcgtctaggacctccgagcagggatgcatctggaggtctagggaagcacattccaccccctcctctcctcaatcctggcaggatgtgcccgaaatgccagctcctccttggtgttctcctttcaggatttgaattcaaatcccattggcagccctgatacctgctgggggaagggtgagctggtgtcttactggggatctggccatgccttgtggggcccttggagccctgtgcccagtggaagctacgtgcctgaggaacatggaggccactgctaatgagttacttccagagtcttcaagagtgccaactgggaccaggaccccagaccacagccccccacaccgtcctggacctggattctgactgtggttccactgtacccctcaccttaatctctggttctaaccagacctgagcctagacttccactttttcccttacccctgtgagggcctgggaacactaggtgggcagggtttgagcccacaggacctgcacacaaacttccccacctcttggacttggggacaggatctgtgcctcaacccagaccagctttgtagggatatgttccaagaacagagaagagtcttatggggaagggggaggaagggaagtatgaatatttacctctgaccaataatagaggtgccctggtccccaaagaaattgactcccgaattccctccaagccttacccatatagcttttgtttgtttgtttgttttcagacaaggtcttgttctgtccagtgccgtggcgtgaccacagctcatgacaactttgatttccccggcccaagcgagcctctcattcagcctcctgagtggctgggaccacagacgcccaacatcagcctcgtgccgaattct

SEQ ID NO: 83492 - DNA, 549 bp, Homo Sapiens
cggtgcggagggtccccagacttccaagcagattgaggagaggagctccgagagtcaaccctccagcctgtaaggaccttgatatccaaaggacagctgaagaaagtaatgtgcctgcatttttgccacttcattcccacagtgcccgaaatgccagctcctccttggtgttctcctttcaggatttgaattcaaatcccattggcagccctgataccgctgggggaagggtgaggctactgctgcttcaagacagtgacgtttctctccggtcagctgtcaggagcgctggtgagcttcctactgtgccacaaggatcagggagcttccaaggcatttgatacctttttgatgggaagaagggctctgaggagctccaagataccccaacctccaggcccttcattaggggactctcctgcgcagggtctgttcctggtttcccagatgcataaaggaagacatatccctcccctgggcagcaaggctacaatgggagggaggaaaaacatgggagcatgtgaataaaatggcattaaaaactgaaaa

SEQ ID NO: 83493 - DNA, 471 bp, Homo Sapiens
gagcgtaaacggcggaaggaggaggaggtgcaacagcaaaagttggcagaggagagacggcggcagaatttacaggaggaaaaggaaaggaagttggaatgcctgccccctgaaccttcccctgatgaccctgaaagtgtcaagatcatcttcaaattacctaatgattctcgagtagagagacgattccacttttcacagtctctaacagtaatccacgacttcttattctccttgaaggaaagcccagaaaagtttcagattgaagccaattttcccaggcgagtgctgccctgcatcccttcagaggagtggcccaatccccctacgctacaggaggccggactcagccacacagaagttctttttgttcaggacctaactgacgaatgacatttttttcttcctgtcccctcctaccccagtccctaaaagaaatggggaaaaaagaaaacaacagcaagtcagaaa

SEQ ID NO: 83494 - DNA, 609 bp, Homo Sapiens
  misc_feature (26)..(26): n is a, c, g, or t
  misc_feature (33)..(33): n is a, c, g, or t
ggaattaatttggccttgatattcantatttgnaaatgtcttaaagaaaaccattttcattgtagaaaatccttttttaaatacttgttatatcccagggagattagtttataccttccacctcaggcagtcatcagctgctttagagaatggaatccaccctgcccctccattttttggttcctggggctcaattcaagtctggtcaagtctccctggctggggattctgtcctgggaacagatactcagttgtagtctcatgtgtctgcactcacccaagactctatatacttgcttgctcagagcatagttagggcagctcctaaaaatgcattcagcagaagactgaaaaacttcaattgcttcatttgtatgcaaatagaaaatggtagataattatatattatacgcctttgtgtaagttcatttaatacttgaagcagtctttgtctcaaaagagtatgcccttactgagaaaggatatgtgaacggtacatttattgttggggagagtggattgtttacatcatgtctggacttttgtctagttgggtagacagttctacaccagcagcccccttaataaagaagtctacacagacaaaaa

SEQ ID NO: 83495 - DNA, 506 bp, Homo Sapiens
gcctaacacactgcctaaatcaaaattgctattcacttcaagggtattcattacctgactagcttttttgggtgcatatgaacataatgtaaattttatggctgatcaaatgtcattactatgaagatactccctatgagctcacagagtcaggacatcaacaatatttaaactctcactgtaaacatgacacagtggtaggcactgtggaaatatatttggtcctattttccctacctgagcatgtaaaagagcagactattccaacagtgtgatgactctgcagtgaagaaaagaatccactctcccggcacactgatggagcatgtacctgggcatagtattcctcaaaggagaatggtcataaaaatgatactgcagaattcaaatagcattcaagaggtctccactaaatggggacatgtaggctatctgaagttattatagatttccttatttcaggaatcttcaaggcaaaatatacgatgtgatacatgaaatcatga

SEQ ID NO: 83496 - DNA, 1069 bp, Homo Sapiens
  misc_feature (685)..(685): n is a, c, g, or t
acattttgctcctaagctgaagggaatgcacagctatttagtaagtgataagtttcttattttgaggacttgactcccatttgctctcagtgaccccagggcagagcagacgaagtgttccgtacccactgctgatggtttcccagagcccacactgagttgaagaacctattgttcttcttggcatccttcttatgctacttctcccatcgctcaaaggggttgcctatggctgcggtgtgccctgccctaaatgcagcaccactttcaagcttagtaggaccattccaagaaaaccaggtttcttctccccataccacgttgtgcctgaagaacaagccttcccgtccttgcctgcatgtgagtcacttcttggctgtgcagcaggtccccccctccccgcgatatgctggagggtaggattctgcagcctgtgttgctctctacctggcagcagactgtgcaggagccccaacctgtcctccaattccagcattcacagctgatgagcagtgcaggagcagggcgagaggaacagagccaatgatgtgtgggttacactgaggagccaaggacagggcctcaggtctcccccttacaaggcgtggctcatggcctgcattccagagaccaacatgatagcttttaattcagctgcatgacctgtgccttttaagccataaangatacctcaagcctagcacctcttgaaatccagatgttcatattagactcggaaaaaataggctccaggcctaggtgcccaggctatgatgagtctgcttttgaaggaggtagggaatgacatcttccttggacccaaagcttaaaagtaatgtatgctttgctgaccactgtttgttaggccttaaacaacattcactgtgggtggtatcaggcacactgctatgtgcgatcaattatttttttgctttccaaacagaatctctggggcacaagttttacactcaagctaagtataactttgtcatttcaggtaaatatgacaagtggtggagcatgaagttttctaatttgacttaatcctaataaatttttgttacaaagt

SEQ ID NO: 83497 - DNA, 782 bp, Homo Sapiens
aaaataaattccgtgaactcataaagctctcatctgcaatcaaatgcaaaagcagagcatcctactcagaggctctgaaacacacatatcagcctcaaagcaaatcagccttccagtctcaggtaagactggttcagtccagaaatgcaagggagatgcttctcctgaatccttagaggcaagaagggatcccttcaaatgggcttgtatagcagagtagtaacatacttcttcttgtagcgatgggttgcgctaaggaccatcacactgtccttaatggacaatgcatagagatggttcagcataacatggttgggctcagggagtaaggctgggtcacaagaaatattagtgtctttgttaagaataacttgaagtagatgaggaggaaggatgggtggggatttgaatctttcctcagatcgaaacgcatacatttcttgaccataaggccctgggggtgagctggaaaggtctctacaagatgtctcagaactttccatagaatctaactttaaagcatcgaacacctcaaaatcagatttcttgacatggatcaaattgttaattgtgccaagctgactggtaaccacaggctctgatggatcatgaacccactgtccatccacaaagaacttgtattggtgctctccctcagggaggtccaggatggcaacaaagtcattatggctcttaatcagtggaatcttggtgctccaattgttgaaggacccagagatgaagacctccttgcctccttcagaccagcggataacgagtgg

SEQ ID NO: 83498 - DNA, 944 bp, Homo Sapiens
atacgaaagaaaataatcataaatcatatttgattaacatttcatttaagcttttaaaatatcaattttttaaatagctcccatttacccaaaataactagttatgggtctatttcttccatgattagaggagagagaacttgattcaagatactgaaaaatagagctgggactgagcctgtgaatgacaggaatgatctattaccaggtgactagtcggaaactacacagaccgtgcactggtctgcatttgggggctaaagtgtatatattccatttaaaatggaatttgtttgtatttggggcagtcttcagtaaagcctttctcctttcttttctccattgaggacagttctgctcagcaaaattgttgagtacctgttctgggccaggtcccacgctatatgcaccaaagttaagaaaaacttgggtcttaagcccttgggagcttgaccagcccatgggcattaaggcaaagtagttccagtgatttaaaatacggttccaaatacgctaaaaccaacttgtgccaaccagatttacagattggaaatactgcagatgatgtgaagttatcagttggaggagctgtgattaagctggataataagagaacgtgccatctgtaaagcactcagaaggcagccatccctagatgttggtttcgatgtatattacactatctactactatccataaatgcaataatatgcatgttaacaacattaaaaacagcaaacagcaatctaagtacagaaaagctttttgtgtgtttaaaaaaattgaagaaaattcaggaagaaacgtgttaataaacattgtactgttcttttgcttctcaaaggaattattcacttgccactttggttatttttgagttttcgtacataggaagttttatattgccagccttcctgtgataaagatattaaatgtaacttgag

SEQ ID NO: 83499 - DNA, 815 bp, Homo Sapiens
  misc_feature (384)..(434): n is a, c, g, or t
  misc_feature (490)..(490): n is a, c, g, or t
  misc_feature (621)..(621): n is a, c, g, or t
gggcttcccaacaccatgccgtccgccttctctgtcagctctttccccgtcagcatcccagccgtactcacgcagacggactggactgagccctggctcatggggctggccaccttccacgcgctctgcgtgctcctcacctgcttgtcctcccgaagctacagactacagatcgggcactttctgtgtctagtcatcttagtctactgtgctgaatacatcaatgaggcggctgcgatgaactggagattattttcgaaataccagtatttcgactccagggggatgttcatttctatagtattttcagccccactgctggtgaatgccatgatcattgtggttatgtgggtatggaagactttgaatgtgatgactgacctnnnnnnnnnnnnnnnnnnnnnnnnnnnnnnnnnnnnnnnnnnnnnnnnnnnctgaggggcagcagctgcttggagtttgcgtccttcccgtccaccccagtgcagcntccccagtgctgccagtgtgcgtggcgtgggcatccttcccagctgactcatggtttgaaaaaccgttgttttatttaaatatccacagtggtagggcacacactgaaattggcttttcagccagccactngaatgtatccatcaggacatgcgtcttcaggtgcctgatctttgtagtcaggctgtgggaacggtctctgcagagcttcataactgggaatttgatttgaagaagtccatgtcatatgtgtaactagtactaattatataatataaaatacacaatataaaatatgaaactcaataataaacagtgccacctgt

SEQ ID NO: 83500 - DNA, 396 bp, Homo Sapiens
  misc_feature (268)..(268): n is a, c, g, or t
  misc_feature (363)..(363): n is a, c, g, or t
taccagaatgataaaaataaaactgcattatgtcaagatatttgtacacactcagaattttaaaaacttaaggaacatactgaattttaggcaaaatttaggggaatcgggacatagatggaaaacacattttggcgaaaggtccttgagaatgctggattaccatgtcccttagaaattttccatccaaattagtgatagaaactcagatcaaatatcttttttgtgggttggaggtagaagttaacaaatcaagcaaatctctccnttctactctccccaaatccaaacattcctgcatatttgaaacaaattttcctttcctagaccagttgcttaattcattatctacttctccaatantgagtaaaatgtgtctttaggggcacacatgta

SEQ ID NO: 83501 - DNA, 464 bp, Homo Sapiens
ttcaacacttcccaaagtctcctgcccccaaagaggcttagttaagtcctgtggctggatgtgactcccaacttccttttttgtaccatcacatctttcatatctttctggcatctgccatacatcataagaggctttgaccactgtcctccactgaatagcccattacagctagcacctaataggtactccaggaaataaattacatgtttaacaggccaggtcgtagagattatttttctttctctgccttttcatgtgctgctttcagaacagagggctggattggatagattagtatgatctatcctggagattcatttcttgcattaagagcttattttgtgtgatattatttataatccctgactatgtcaattataaacttttaaattatgtcttatatttgaagttcttacctacatatcagaggaaaatataatgtttatttctaggtggtaaaa

SEQ ID NO: 83502 - DNA, 462 bp, Homo Sapiens
  misc_feature (16)..(16): n is a, c, g, or t
  misc_feature (30)..(30): n is a, c, g, or t
  misc_feature (66)..(66): n is a, c, g, or t
agtatacctggggggnaccacaccccgggngattggaaataatacatatgggctagcacataattnggacaccttataaaaccaggaatctgtactatcttttccttccctccccaatatttcttcatttctatgctcaattttctaatactttttcacatgcttaatcatttactctttcatcgccttccctcaaaaaaaacctgctccgttgaagtaaactaagtaactcaatattctttattttggtttggaacctgtctcaattttttgtatccatattaagaagtcaccctataatctaaaactttgtaattctaatttttttgtcccattatcatacaaagtgcttttaaacttgtttttaaaaaatgacagataatgccacatgaataggaagatgattcattctaaaacttgtatttacataattaaaaataaatttataatcattctacatac

SEQ ID NO: 83503 - DNA, 1275 bp, Homo Sapiens
  misc_feature (72)..(72): n is a, c, g, or t
  misc_feature (313)..(369): n is a, c, g, or t
  misc_feature (1243)..(1243): n is a, c, g, or t
  misc_feature (1249)..(1249): n is a, c, g, or t
cggtagcgtaagtgacgtcggcaatcacgaacgagtgtcgctctgagagtatcgcacgccataaagcggtcncatgccagggctcactacatgtataaaaagcggcggaggggtgggggagggtagagaaggggtgcacatgaggttgtgacgagtgccggtccgatgtgtgggagagggcaagcattaagtgaggcgaatggcggatggcagtgaagcgaggagtagagagcggggaggggtggcgcgggacaagaatgggaggaagatggctcacaaagagggggatggggcgcgcagaacggaaagaatnnnnnnnnnnnnnnnnnnnnnnnnnnnnnnnnnnnnnnnnnnnnnnnnnnnnnnnnnaagagaggagggagaaatgaaagatagatggaaaaatcgggtaaaggggacatagctatgtaagggaggtgaggggaaaaggaaggcgagcgggatgcgcccaggggggtggacgggtggcagcgaatcacggatcagaggggcgaggatgaaggtgaacaggggatgggtgggaaggacgcaaaaactgtgggagacgtggttacttgtaaggggtgtgagatacaggtgccgacaggaagaatcgggggtcggaagggttttcatgggggtggagagagaaggggaaaggtggggaggggggacaaacggacgagtggaacagggcatggcgggagtggaaaagaggggtgaaagggtgggtaggtttgttagaggtggttacgtgattatagaaaggcaaaacggaagcgataggagtggttttgggtttttaacatgattgccttttatttattatgcaggttgttgatttacatagggagttggagatgctaaccaagcatggagttttcacatggtctatttctgctgagttcagggacttggagacagcctttaacttctggcaaaaagacaatttcacaaaggtgtttaaaaccatcctttggtttttgatcctgagtcagagacggacatgtgcttatgaaagaaggtagagtttcaacccttaggtaaccttaaaagagcaggaactatgttgtgtgtaagtcatgtgcagtatacaaacttgatattaaatgacaaattggaacaatctttctctaggaatgcctctctttcatagaggcatcacagtgagtctcttaaagccttgatctaggtgtgttacagatgggcctacagagtatgaatgcacgataagaaggaattnggatanggagtgaggatatgaaatttaaaaga

SEQ ID NO: 83504 - DNA, 1475 bp, Homo Sapiens
agacattcttgcctgaaacacgaataatgacatcggtcacattcactaaatgtctatatgcacaattggtgcaacaaaggtttgtgccagaccggcggagtggatacaggctgcctcctccatctgatccccagtaccgagcccatgaattgggcatgaaattggctcatggatttgagatcttatgctccaaatgtagcccacatttttctgactgcaagaaatcccttgtgactgcctcaccactctgggccagtttccttgaaagtctgaaaaagaatgattactttaagggactgatagaaggttctgctcagtaccgggaaaggctagaaatggcagagaattacttccagctctcagtagactggccagaaagttctcttgctatgagccctggtgaagaaatcttaaccttattacagacaataccatttgatatagaagaccttaagaaagaagcagctaatcttcccccagaggatgatgaccagtggttagatctctcaccagatcagctggaccagctgctgcaggaagctgttggcaaaaaagaatccgagtctgtttccaaggaggagaaggagcagaactatgacttaactgaagtctcagagagcatgaaagctttcatatccaaagtctcaacccacaagggagcagagctgcctcgagaaccttctgaggctccaatcacttttgatgcagattcttttcttaattattttgataagattttagggccaaggcctaatgagtcagattctgatgatctggatgatgaagactttgaatgtttagatagtgatgatgacttggactttgaaacacacgaacctggcgaagaggcttccctgaaaggaacacttgataatctcaagtcatacatggcccagatggaccaggaactagcacacacctgcatcagcaaaagtttcaccactaggaaccaagtggaacctgtatcccagactaccgataacaattcagatgaggaagattctggtacgggagaatctgttatggcaccagtagatgtagacctgaacctggtttcaaatatattggaatcctatagctcccaagctggactggcaggacctgcttccaatcttttacaaagcatgggagtgcagctgcctgacaacaccgatcacagaccaacaagtaagccaacaaaaaattaaccagcacatttagcttctcttttttctttttaaataaatattgaatatgattctgttcatttctagtttagattactcatttagtaaaaatgtttcttcattacaagttttacagattgacttctccatgagccccaaatgtggccctctgggcacaagtctttgtgatctcagctgtgggttatacacaggttttgaactcggcagggtagaatctagcccctagacaaccttgagatgaaattcacacacttcatgctaaagacataccctacccacaacacctgc

SEQ ID NO: 83505 - DNA, 655 bp, Homo Sapiens
ctcccatccaatcaacatcatcaaattacatgtgtaatcaaggctctgtgccatgggggaaatgaatcatttagctaggccaggatctagtgaaagccacagagtttaaacccatgaaagaagttgaaggcagcattcctcagctctgtgacttgtgaccctatgtgaagtttcaggatttgggtgtcacaaaggattgtccctaatccttggccctggggtcttccgagtgagctggtttaatactctgagaatgagcagggagatccagagaatgaatccctgaccgcatcacctaaactgtcttccaaacatgagacaaagctgactgttcacactgattgcccagcacataccgtcttgccagtttcttcttttctcccagtctcctgttcatccattctgttctcccttggggtgggaatctatgatggaggttactggggaaacagctcagcagatttttggagaccaaaccaaaggtctcactaggaaatttatctgttttaaaacattgcttccttcctggctctgctaaattgaatgctcattgtttgttgttgttgttttttaattctaatgttcaaatcactgcgtgctgtatgaatctagaaagccttaatttactaccaagaaataaagcaatatgttcgta

SEQ ID NO: 83506 - DNA, 529 bp, Homo Sapiens
  misc_feature (134)..(134): n is a, c, g, or t
  misc_feature (143)..(143): n is a, c, g, or t
aagctgaaattggaagaagagaagaagaagacacttgaaagatttaacagtaccagatttaatctggataacctggctgacttggaaaacttggttcaaagacggaaaaagcgactgagacacagagtcccccncaggaaacntgagcccctggttaagccgcagtcccaggcccaggtggagcctgtgggcctggagatgttcctgaaggcagctgctgagaaccaggagtacctgattgacaagtacttgacagacggaggggaccccaatgcccagaacaaggctgttgttactatgtggaaaagctgaccagtgctgcacactaggggcacacacctttccatgagcagctcctgccctgtggcgacagccagcgtgcacccagacgctggtgccatggcgaagcaggcgttcaagaccatggagaagacaactcctcatctagaaaatgaggacacctcagtgacaaacacacctttttataccaatcagtatcctctgttcattaaaactggctatccattac

SEQ ID NO: 83507 - DNA, 460 bp, Homo Sapiens
  misc_feature (52)..(52): n is a, c, g, or t
tctccctctttgccaggctggagtcagtggtgcaattcggctcatgcaactntgctcccagattaagcgatctccacctcagcccttaatagcggattacagaaagacagctcttgattcctctcttaatttctgtagtaagacttcatcttcagcaggcagctgaaaatacaaggtctttagacaaactcagccaagtgtcaaccagaaaacatttgaatttacctgtagcctggaagccccacttcaaattgtcccacctttctggatcaaaccaatgtatttctcaaatgtatttgattgatgtctcatgcctccctaaaatgtatgaaaccaagctgcacccaaaccacctttggtacatgttctcaggatctcttgaaggctgtgtcgacaggccatggccactcatatttggctcagaataaatctcttcaaatattttacagagttcaaaaaa

SEQ ID NO: 83508 - DNA, 454 bp, Homo Sapiens
  misc_feature (17)..(17): n is a, c, g, or t
aaggaggaaaaccaaanaaatcctgtataaaactgtaaccccttggtattccatgtttacagtgctattactataattcaaaattatgtatgtgacttagagttatataaccataatttatgtttatttcaaatatctaagtttattgcttggatttctagtgagagctgttgaatttggtgatgtcaaatgtttctagggtttttttagtttgtttttattgaaaaatttaattatttatgctataggtgatattctctttgaataaacctataatagaaaatagcagacaacataaacatctttgtaaatatcaaacctaatacatttcttgtccagtgataaaacaactggtagaattatttaaacactttagatttttaaataatatacatggctttaatttttactgtgtgtatagctacatgatgaaattaattaaatattaagaggt

SEQ ID NO: 83509 - DNA, 767 bp, Homo Sapiens
gagaagcaaggcggctaaaaactcatgaatgactcagcaggacttagttaaaaaatgcttctttcaggtttctcgttgcttacacaaagaaagccccccagctgacctcgtcggagctgatggccatcaccagaaaaatggcagccacagcagccacttgttgccaactcagtgaggacaaactattggcctgtggcgagggagcggctgacattattatcggacacttatgtatcagacatgaaatgactccagtaaaccctggtgttggccagtgctgcacttcttcatatgccaacaggaggccatgcttcagcagcttggtggtggatgaaacatatgtccctcctgcattctctgatgacaagttcattttccataaggatctgtgccaagctcagggtgtagcgctgcaaacgatgaagcaagagtttctcattaaccttgtgaagcaaaagccacaaataacagaggaacaacttgaggctgtcattgcagatttctcaggcctgttggagaaatgctgccaaggccaggaacaggaagtctgctttgctgaagagggacaaaaactgatttcaaaaactcgtgctgctttgggagtttaaattacttcaggggaagagaagacaaaacgagtctttcattcggtgtgaacttttctctttaattttaactgatttaacactttttgtgaattaatgaaatgataaagacttttatgtgagatttccttatcacagaaataaaatatctccaaatgttaa

SEQ ID NO: 83510 - DNA, 760 bp, Homo Sapiens
aattcggcactaggcgagaaggtcagcggggactacgggcacccggtgtacatcgtccaggagatgcccccgcagagcccggcgaacatttactacaaggtctgagagggaccctggtggtacctgtgctttcccagaggacacctaatgtcccgatgcctcccttgagggtttgagagcccgcgtgctggagaattgactgaagcacagcaccgggggagagggacactcctcctcgaagccatgtgctgcggtcactcaggcctctgcagaagccaagggaagacagtggtttgtggacgagagggctgtgagcatcctggcaggtgccccagtatgccacgcctggaagggccggcttctgcctggggtgcatttcccccgcagtgcataccggacttgtcacacggacctcgggctagttaaggtgtgcaaagatctctagagtttagtccttactgtctcactcgttctgttacccagggctctgcagcacctcacctgagacctccactccacatctgcatcactcatggaacactcatgtctggagtcccctcctccagccgctggcaacaacagcttcagtccatgggtaatccgttcatagaaattgtgtttgctaacaaggtgccctttagccagatgctaggctgtctgcgaagaaggctaggagttcatagaagggagtggggctggggaaagggctggtgcaattgcagctcactgctgctgcctctgaaacagaaagttggaaagg

SEQ ID NO: 83511 - DNA, 488 bp, Homo Sapiens
gggcagatccatggaaagcttcctgggaaacgtatgctagcagagcttctccccgtgaatcatatttttaaagaccccactcttagctggtaaatgaatttgaatcggacatagtagccccataagcatcagccctgtagagtgaggagccatctctagcgggcccttcattcctctccatgctgcaatcactgtcctgggcttatggtgctatggactaggggtcctttgtgaaagagcaagatggagcaatggagagaagacctcttcctgaatcactggactccagaaatgtgcatgcgagatcagctgttgccttcaagatccagataaactttcctgtcatgtgttagaactttattattattaatattgttaaacttctgtgctgttcctgtgaatctccaaattttgtaccttgttctaagctaatatatagcaattaaaaagcgacaactagggatcgacacggataataaaaacatggt

SEQ ID NO: 83512 - DNA, 570 bp, Homo Sapiens
  misc_feature (289)..(289): n is a, c, g, or t
gaagtccaaggtttgtgaggtttcaggacaagatgatacagcctagtttgagtcccatctgagacacggtagtggcattcaccatgggcttcagaagtccactaatgggaagacctgctgagggcactagtacagcaacgaaatttcctggagattctgggtttagtggctcggggcagaggcaggagagggtgttctgtctcctcctcactcaggggctcttcgaggtcagcactcagactggaaggccagggcccctgcaaaggaagcagagaactgctaagtcatnggaggcaacggcggctctaacggccacacatttcagggaggatctgtggcactcagaagggagggaaactcccaggagaagggtctggtgacctcctcccacgctatgccggcaaagatgtttgttgaatgaataaacacatgaatgtctttcttcttattctttgccctgggcttttctgcagcataaaagaagctatgaatctttgtgaaattaattcagacttactgtccaattcataagtaaagaatgaagagaaaaggcatctggtcacagtgaac

SEQ ID NO: 83513 - DNA, 647 bp, Homo Sapiens
tttggaagtccaaggtttgtgaggtttcaggacaagatgatacagcctagtttgagtcccatctgagacacggtagtgggattcaccatgggcttcagaagtccactaatgggaagacctgctgagggcactagtacagcaacgaaatttcctggagattctgggtttagtggctcggggcagaggcaggagagggtgttctgtctcctcctcactcaggggctcttcgaggtcagcactcagactggaggccagggccccttgctcaaatattgaaatgagacctttacgtgttttaatccgttccgctgagggagtagctgggagagggagaaaagacttgggctgcgaaatcctcgaatgtcattacttcgcggtggttctgaattattgcttcgagatacagagctcgctcttcatagaagctctggtagagtgggatgaggcacttcacagccctgctggcgttgatgcacgtggcacatacaaggcttggcagcaacttcccactcactatggctccatcaaacagaggcccaaaaaatggaacctcaggtttcttcgttatcacgatgaagaacatgtgattcttcaatgggtaaattaatgattgaaacatcttcaaaggcagtggggattattaccct

SEQ ID NO: 83514 - DNA, 591 bp, Homo Sapiens
ttttttactataagcatgtattactcataataatgggaggtagatccaaattttcaaggaataatctgaacttttataacagaaactgtacttaagaacactaatagaggttggctgacaccctgaaaaactggtctgttacgtttaactgtgggccagtcagcttcaaactcaggaaaacctctcacctcagttgcaggggaaatgggcaacaataatagtagctactgctgacaggctgggccctgtgcttaactccatctatcatctccaccaactatcccacatggcatgtgctaccactattttacagatcagaccgtttacataactgagaccgaggatgcacatacgcccctcccctgaaacgcaagtctcactgaaggtagactaagatgccaccttggtgtaaataacaaattacaataaactctgactcagatactgaagaacagtctaaaaatattcattgataaaaggtaggtgttcaaagatgacccaacttctattttcgccttcaataattgttacacagttaaaatacagtgacaagctgcttccacatggctataggtagggatttgttatcca

SEQ ID NO: 83515 - DNA, 433 bp, Homo Sapiens
aggttcttaaaattttaatacaaaagttattcacaaattggttaaaaagtttccatttcctttttgaaaaaccttattgaaggtgagggggaaaacacactgcatgtaaacaccattcttacacaaaatcctgctccaaaaaacccatgggtttgtatattaaaaagcaaagaatgctccctcctttacattcacaacaaacttccattaggaaattctgcttgtgtggtgatgaacagaaaggtagtcccatccagctcggtgtcttctgaaacgtcacctgccccctccacaagagaaccgctggctgcataataatggcaccaggagagcgcggtgctgggtcttgttggtttgaacaagcaaaatgtctgcatggtatcgtcggccgcaaagaacctgtcaatgcattctccacaccaggcggacaatg

SEQ ID NO: 83516 - DNA, 484 bp, Homo Sapiens
gccaccccagaactgggcagcagcctcaagaagaagaagcggctctcccagtcagatgaggatgtcattaggctaataggacagcacttgaatggcttagggctcaaccagactgttgatctcctcatgcaagagtcaggatgtcgtttagaacatccttctgctaccaaattccgaaatcatgtcatggaaggagactgggataaggcagaaaatgacctgaatgaactaaagcctttagtgcattctcctcatgctattgtgaggatgaagtttttgctgctgcagcagaagtacctagaatacctggaggatggcaaggtcctggaggcacttcaagttctacgctgtgaattgacgccgctgaaatacaatacagagcgcattcatgttcttagtgggtatctgatgtgtagccatgcagaagacctacgtgcaaaagcagaatgggaaggcaaagggacagcttcccgatctaaactat

SEQ ID NO: 83517 - DNA, 433 bp, Homo Sapiens
gccaccccagaactgggcagcagcctcaagaagaagaagcggctctcccagtcagatgaggatgtcattaggctaataggacagcacttgaatggcttagggctcaaccagactgttgatctcctcatgcaagagtcaggatgtcgtttagaacatccttctgctaccaaattccgaaatcatgtcatggaaggagactgggataaggcagaaaatgacctgaatgaactaaagcctttagtgcattctcctcatgctattgtggtaagaggcgcacttgaaatctctcaaacgttgttgggaataattgtgaggatgaagtttttgctgctgcagcagaagtacctagaatacctggaggatggcaaggtcctggaggcacttcaagttctacgctgtgaattgacgccgctgaaatacaatacagagcgca

SEQ ID NO: 83518 - DNA, 1065 bp, Homo Sapiens
  misc_feature (326)..(326): n is a, c, g, or t
ttttttcccacattagcctccaatgacctagtattttatttttagtgcctaggcaaggtctgagaaacaaatacattggacaaaacttgttggtcttcttcatccaaaaattaagggactcagctcaggaacctctcctggagttgtggctctccccattcggttgacattagatattgaattcatgtcatttcctaaacaactgtggtgagggatggagttggggggctggagaggaagataatagcacaaattccagtattaggctggattcttctgaaggtgcctggcggttgagaatttagccatgggacccagtggtttcntttcctgaaaggatcccagtagtctcaaccaagaagcaggacgtaggtgggagagaatgctgtagatttgctccttgccataaattctagggcagtgagtggggagctcaggttttctgcttcagagaagtctggatgagtgtcccaaggggttatagcaccatgaggaggctcagccttctgcagttgccatataactgtgattccttcatgagaatgatcaatccccacagtgaggggcccagatgtgcaactgtaaacagggtcccaggctccagagggaaagccgaggcttcaatactacctcactagacgggaacacactttctggaggaaagcaattggagacctggcctaaatgcagcagtcagctgagagtagagggtggtggatcccaggaagagaaataaaaagtcatagcatgaggcctccagaatcaacctgctgaggatccaaataaaattcattggtggtatccatggttaccagagagccaagaatccctttggggtcggaggcagttggaatgaaagaaggggttctcccctctcctttttctcaagtagccagtaacatccatggcagaaggcactggctgggcagcaccagaaaatagagtgaagcgctcaaccatcagattaagatggcattaaaagtctgagccttgccatggaactggagcttaggataggggttagaagagcctagatcccaagcagcccatccagtttctctccga

SEQ ID NO: 83519 - DNA, 556 bp, Homo Sapiens
agaagatcccggacatggccccgcccagcaagccaagcccaagctcatccccgcgtctgcctcagcggcaggccagtgaaggcgttttcctagcctggagatgggaaaatatgcttggcagagacaggaatgctgtgtgcttgttccaaatgagcagctggcatccgagtggtgtccccgtgttgggctgatagttgatcacacattgtgcttttgatttttgcatttggtgatgaatattttatacccgtctaagggagaaagctaatgttttccacaagactgaacaacgtgtatttacacgagggtaggacggcagatgcctgacagagagtgggttggcagacaacacactagcattttcacgggtgtgggcacatgggtgtggcacctggacgtgtgcagcatgtggcggtctgtgtgaagccaccgtgcttctctttggggggccgcgagatctagcatctctgaaatcctggctgtcgaggctttgaagcatgtgttacctggttaagcttgttttctcttgctttaggcaaataaaagtttaaaaatc

SEQ ID NO: 83520 - DNA, 670 bp, Homo Sapiens
aaggagatgttgaggtgggtggccgactcgtagtactcgatcatgtcgaagagggccgaggcaccatcttcatccaggtttgtctgctccaggtccacgaccttgaactgcagcctcttgaagacctcttccagggcctcacaggtcttgtagtcaagcttctcacctttcaggtccagacagtcgaggcggtgcccgaggtctgtgaattcctgcagctgcctgaggagcttggggatctgcctgcagttcagcttctggcaggcctgcttgtaggcgccgatgacctcgtccacggtcacattctgggcatgtctccaggggtctttgggctccactgctccagacacgatatcctcgtcggacgggaatgtgacgcgcttggctgcagccttgaggcgcccatcggcggggggcgacgcggggctgggagacccggcctcagctggggcctcttcaatgtcgccgtccgcgcccggcacgggcgcgcctcctgcggcgcgatctccatagccgccgccgcctccttcacagggcccggggacatgccccgggccccgaatttgtctctccgggtccgcccgccgtcccggggccattggttccgccgccgcttcaggcgccgcctccgtccgctctcctagtggtcgtagtcgtcgccgccgggagc

SEQ ID NO: 83521 - DNA, 702 bp, Homo Sapiens
  misc_feature (33)..(33): n is a, c, g, or t
  misc_feature (96)..(96): n is a, c, g, or t
  misc_feature (127)..(127): n is a, c, g, or t
  misc_feature (143)..(143): n is a, c, g, or t
ctgggacagacatccaggtcatctgcctttggnaggccttcacccactgggagctgcacgactgggcccaatatggcatcatctagcacgaggccntgctgaagtcagaccctccccctcctgccanctatgctctaaacctngctcaggattcctgttgaggagatgcctccctagcccagatggcacctggacaccaggatgggactgcaacctcaggtctccccctacatattaataccagtcaccagaagcccaccacctccctctaggatgccccctcaggggctggccaggccctgctcaacatctggagacacaggcccacccctcagtcctgcccacagagaggcttggtcggtctccactcccagggagaacgggaagtggaccccagcccgggagcctgctggaccccagatcgtcccctcctcccagctggaaagctagggcaggtctccccagagtgcttctgcaccccagccccctgtcctgcctgtaaggggatacagagaagctccccgtctctgcatcccttcccaggggggtgcccttagtttggacatgctgggtagcaggactccagggcgtgcacggtgagcagatgaggccccaagctcatcacaccagggggccatccttctcaatacagcccgcccttgcagtccctatttcaaaataaaattagtgtgtccttgccaa

SEQ ID NO: 83522 - DNA, 817 bp, Homo Sapiens
  misc_feature (535)..(535): n is a, c, g, or t
  misc_feature (570)..(570): n is a, c, g, or t
  misc_feature (650)..(650): n is a, c, g, or t
  misc_feature (736)..(736): n is a, c, g, or t
  misc_feature (742)..(742): n is a, c, g, or t
gcggccgccgccgttgctgcccctgctgctgctgctctgcgtcctcggggcgccgcgagccggatcaggagcccacacagctgtgatcagtccccaggatcccacgcttctcatcggctcctccctgctggccacctgctcagtgcacggagacccaccaggagccaccgccgagggcctctactggaccctcaacgggcgccgcctgccccctgagctctcccgtgtactcaacgcctccaccttggctctggccctggccaacctcaatgggtccaggcagcggtcgggggacaacctcgtgtgccacgcccgtgacggcagcatcctggctggctcctgcctctatgttggcctgcccccagagaaacccgtcaacatcagctgctggtccaagaacatgaaggacttgacctgccgctggacgccaggggcccacggggagaccttcctccacaccaactactccctcaagtacaagcttaggtggtatggccaggacaacacatgtgaggagtaccacacagtggggccncactcctgccacatccccaaggacctggctctctntacgccctatgagatctgggtggagggccaccaccgcctgggctctgcccgctccgatgtactcacgctggatatgctgnatgtggtgaccacggaccccccgcccgacgtgcacgtgagccgcgtcgggggcctggaggaccagctgagcgtgcgctgggtgtcngcaccngccctcaaggattacctctttcaagccaaataccagatccggtaccgagtgtatgacaatgtggactggaaggtg

SEQ ID NO: 83523 - DNA, 854 bp, Homo Sapiens
  misc_feature (75)..(109): n is a, c, g, or t
tctatcactcatatagggcctcgcgcgtctagccgaacgacgagcgcagcgagtatttgagcgaggaagcggcgnnnnnnnnnnnnnnnnnnnnnnnnnnnnnnnnnnncagtcgacggtaccggacatatgcccgggaattcggccattacggccggggagtgtgactcatccacaatgatttctccagtgctcatcttgttctcgagttttctctgccatgttgctattgcaggacggacctgtcccaagccagatgatttaccattttccacagtggtcccgttaaaaacattctatgagccaggagaagagattacgtattcctgcaagccgggctatgtgtcccgaggagggatgagaaagtttatctgccctctcacaggactgtggcccatcaacactctgaaatgtacacccagagtatgtccttttgctggaatcttagaaaatggagccgtacgctatacgacttttgaatatcccaacacgatcagtttttcttgtaacactgggttttatctgaatggcgctgattctgccaagtgcactgaggaaggaaaatggagcccggagcttcctgtctgtgctcccatcatctgccctccaccatccatacctacgtttgcaacacttcgtgtttataagccatcagctggaaacaattccctctatcgggacacagcagtttttgaatgtttgccacaacatgcgatgtttggaaatgatacaattacctgcacgacacatggaaattggactaaattaccagaatgcaggaaagtaaaatgcccattcccatcagaccagacaatggattgtgaactatcctgaaaaaccaacactttattaca

SEQ ID NO: 83524 - DNA, 1380 bp, Homo Sapiens
  misc_feature (81)..(115): n is a, c, g, or t
atcgtatagatcactatagggcgctagctcgtcgcagacgaacgacgagcgcagcggagtagtgagcgaggaagcggccgnnnnnnnnnnnnnnnnnnnnnnnnnnnnnnnnnnncagtcgacggtaccggacatatgcccgggaattcggccattacggccggggaactttggtagtgccagtgtgactcatccacaatgatttctccagtgctcatcttgttctcgagttttctctgccatgttgctattgcaggacggacctgtcccaagccagatgatttaccattttccacagtggtcccgttaaaaacattctatgagccaggagaagagattacgtattcctgcaagccgggctatgtgtcccgaggagggatgagaaagtttatctgccctctcacaggactgtggcccatcaacactctgaaatgtacacccagagtatgtccttttgctggaatcttagaaaatggagccgtacgctatacgacttttgaatatcccaacacgatcagtttttcttgtaacactgggttttatctgaatggcgctgattctgccaagtgcactgaggaaggaaaatggagcccggagcttcctgtctgtgctcccatcatctgccctccaccatccatacctacgtttgcaacacttcgtgtttataagccatcagctggaaacaattccctctatcgggacacagcagtttttgaatgtttgccacaacatgcgatgtttggaaatgatacaattacctgcacgacacatggaaattggactaaattaccagaatgcagggaaagtaaaatgcccattcccatcaagaccagacaatggatttgtgaactatcctgcaaaaccaacactttattacaaggataaagccacatttggctgccatgatggatattctctggatggcccggaagaaatagaatgtaccaaactgggaaactggtctgccatgccaagttgtaaagcatcttgtaaagtacctgtgaaaaaagccactgtggtgtaccaaggagagagagtaaagattcaggaaaaatttaagaatggaatgctacatggtgataaagtttctttcttctgcaaaaataaggaaaagaagtgtagctatacagaggatgctcagtgtatagatggcactatcgaagtccccaaatgcttcaaggaacacagttctctggctttttggaaaactgatgcatccgatgtaaagccatgctaaggtggttttcagattccacacaaaatgtcacacttgtttcttgttcatccaaggaacctaattgaaatttaaaaataaagctactgaatttattgccgggaaaaccaaaacacaggaagaaagaaaaaaacattgtgggcggc

SEQ ID NO: 83525 - DNA, 607 bp, Homo Sapiens
  misc_feature (111)..(121): n is a, c, g, or t
  misc_feature (431)..(431): n is a, c, g, or t
gaaaacaacacattcgccaaggttatatggagcccctgatttccatcaaaaaggtttctataagtatattatttacatttttatacatgataactcttgcctttgtgttgnnnnnnnnnnngtctcttttttttcccccactcagcagttattggaaatagactgttcccatctgaaacccgtatcgtaatttgcatcaggaaacccaactgctgacattgaggacctgggtgtgttcaattatgattttgctggaggctgtccctcattttaatgctgcagctattgaaccaccttcctgaaacctagctgatacggaatagcagagacatgcctctcaacaccattagctttgcaaatgggcttcatttcagtcaacgtcgacttctgctttggccaattgaaaaatgaaaattaaaggagagaagaanaaaaacacagatgcacttaaaacatgaaaagaattatttatatgataaaaatatatttagcttttcaaagcacaagactgaatagaagtgctccttttatgccttctggagatgttaccggtaaatggccttccacatcaggcttaataaatccgtaatgacatttgatggaaaaa

SEQ ID NO: 83526 - DNA, 499 bp, Homo Sapiens
tttaaagatgaggatgcggactccaacaaaggcattaagaaagtactagatgaaaatgagaaatatgtgaaggataacatgtgaaatgtacactcaggtctaacaaatacctattatttctctggttaagaaggtttagcaggagcctccaatgagcactgtatgtagagaaaagggaaggagcaggaggaggaacagatctgcacagaatttttttcttaaaaaccacaaagggtgacttttttcttctaagcaagcaagcctgagaggcattacatgggctggctcctaatatcaaaacaaaatatttctttgccacaaaggaacttgactatgtagcaacacatttacaaaactactgcaaaacactcccagagggcagtgacctactctgctccccagaggctccaagaagcaaggcctcaagtgcctcatgttccatggggctgtgcagtgcaatgcagaaggcggaaatcctgctgtgacgccaccctcgaga

SEQ ID NO: 83527 - DNA, 568 bp, Homo Sapiens
gctgtcccaaagaacctcggctgggccccccatcaattgttttacatcaagatcacctctcccaaggtacttcaaaggctcatcaagtcccgaggaaagtctcagtccaaacacctcaatgtccaaatagcggccttcggaaaaagctggcacagtgcccccccttgaaatgtttgacatcatcctggatgagaaccaattggaggatgcctgcgagcatctggcggagtacttggaagcctattggaaggccacacacccgcccagcagcacgccacccaattcgctgctgaaccgcaccatggctaccgcagccctggctgccagccctgcccctgtctccaacctccaggtacaggtgctcacctcgctcaggagaaacctcggcttctggggcgggctggagtcctcacagcggggcagtgtggtgccccaggagcaggaacatgccatgtagtgggcgccctgcccgtcttccctcctgctctggggtcggaactggagtgcagggaacatggaggaggaagggaagagctttattttgtaaaaaaataagatgagcggcaaa

SEQ ID NO: 83528 - DNA, 573 bp, Homo Sapiens
  misc_feature (19)..(19): n is a, c, g, or t
  misc_feature (37)..(37): n is a, c, g, or t
  misc_feature (42)..(42): n is a, c, g, or t
  misc_feature (73)..(73): n is a, c, g, or t
  misc_feature (81)..(81): n is a, c, g, or t
  misc_feature (89)..(89): n is a, c, g, or t
  misc_feature (110)..(110): n is a, c, g, or t
  misc_feature (126)..(126): n is a, c, g, or t
atccggcttggccggttgngggattttggggataagnctatnaagggccaatattttttggctaaccgtttcnggtttttnacggtccnctggggcaataaaattttatnctcacccatataatancattttttaactacttaaggggagtagtttttattttaaagtcttagcaatttctattacaacttttcttagacttaacacttatgataaatgactaacatagtaacagaatctttatgaaatatgaccttttctgaaaatacatacttttacatttctactttattgagacctattagatgtaagtgctagtagaatataagataaaagaggctgagaattaccatacaagggtattacaactgtaaaacaatttatctttgtttcattgttctgtcaataattgttaccaaagagataaaaataaaagcagaatgtatatcatcccatctgaaaaacactaattattgacatgtgcatctgtgcaataaacttaaaatgattattaaataatcaaatatatctacattgtttatattattgaataaagtatattttccaaatgta

SEQ ID NO: 83529 - DNA, 851 bp, Homo Sapiens
  misc_feature (211)..(211): n is a, c, g, or t
  misc_feature (746)..(784): n is a, c, g, or t
gagggcggccaggccgccgccgagcccgagtagacggcgtgcggctccatgaccccaccggcgccggtgggcagcagcggggaggcgggcaccgagctgtcgtggtgcgggtactcgccggccgccgcgccgccgcagccgcccatgtacgagtggccgccgttggaaggcaggtggggcaccgagtggctgggcagggccatgccgtccnacgttgcccggcaagtggccgttcatcatgcccaggccgccctccagcgccaggctgttgggcgggcacgagaggccgccggccgagccctggaagccgtaggtgtccgggaggtggttgaagccgagcccgttcatcatgctgtacatgggcttgagcgcctggcatttccttcggaagccgcgcggccgccgccgaaaggagccctcctcgaacatgaactcgctggccgggtcgatggtccagtagtggcccttgccgggccgcccaaggcccttgggtagcttgatgaagcactcgttgagcgagaggttgtggcgcacggagttcttccagccctggtaggagccccggaagaaggggaagcggctctgcaggaactggtagatctcgctcagcgtcaggcgcttggtgggtgaactctggatggccatgacgatgagcgcgatgtaggaatagggcggcttctccgggcgccggatgccggcgttggtcttcttggccttggacgggccggacgacgcggggtccatgnnnnnnnnnnnnnnnnnnnnnnnnnnnnnnnnnnnnnnntgcggtggctgctgcttctcgggcgccgaagacatcgggtggctgctgccgccgccgccgctgccgc

SEQ ID NO: 83530 - DNA, 466 bp, Homo Sapiens
  misc_feature (236)..(256): n is a, c, g, or t
  misc_feature (380)..(388): n is a, c, g, or t
ttcccccaccagcccaattcccccctaagcctcaaatgcctagcactttttggccagttggataggaaatgagacattctttggcagccaaaataagagaggccgatggtgaaactttttgagacacccctatggccttcttgtcaaaaccttcactggagctcaagaaaagcatttctgttgtgttatttgcagtgcagatgatgtctgtgtaacaacataatggttattcaccnnnnnnnnnnnnnnnnnnnnnctgtgttatcaaaaacttgaatactgtgagaagaagtgaattttcagttgacgaatcagcatcttgttcccatggtgataacactaattgaatatatctatgagggcatgtattagttaatggnnnnnnnnntacaacactaacaatacatagctgcaatgtgtacaatggctgatttaattaaataaaatgtacaagtgttaaatgtga

SEQ ID NO: 83531 - DNA, 949 bp, Homo Sapiens
  misc_feature (315)..(346): n is a, c, g, or t
ggggcgcgtcgctccctgagcgtttctaagggggccgcccggccttgtctttcggcagtggccgagccaccgccgcctgccgcgcgttccagagctgggcgctgcagctgcactgccgatcgccgtgtttggtcgatagaatccccagtgtgcccagagagtgcgacccctcgcccggcccggcgagccccgggcgtgaaccgagctgagggaggatggcagcctctggggtggagaagagcagcaagaagaagaccgagaagaaacttgctgctcgggaagaagctaaattgttggcgggtttcatgggcgtcnnnnnnnnnnnnnnnnnnnnnnnnnnnnnnnntgacgtgatcctcatggtccaggaaagaaagatacctgctcatcgtgttgttcttgctgcagccagtcatttttttaacttaatgttcacaactaacatgcttgaatcaaagtcctttgaagtagaactcaaagatgctgaacctgatattattgaacaactggtggaatttgcttatactgctagaatttccgtgaatagcaacaatgttcagtctttgttggatgcagcaaaccaatatcagattgaacctgtgaagaaaatgtgtgttgattttttgaaagaacaagttgatgcttcaaattgtcttggagaagcagaaaaagttgatcagagccttccagagtgtggtatgcttttcactgtgtgatgatccttagtggcacatgaatgaacgtccagatgtttgtgcagtagcccacccttatctgcaggatacgttccaagacccccagtgaatgcctgaaactgcagatagtactgaatcctatatatactgtgttttttatgatacatacatgcctatgatgaagtttaatttctaaattagacagtaaaagattaacaacaataataataaaatagaacaactttaacaataaa

SEQ ID NO: 83532 - DNA, 1319 bp, Homo Sapiens
  misc_feature (41)..(75): n is a, c, g, or t
taaacgacgagcgcacgagttttgagcgaggaagcggccgnnnnnnnnnnnnnnnnnnnnnnnnnnnnnnnnnnncagtcgacggtaccggacatatgcccgggaattcggccattacggccggggagtgtctcgtttgcagtcggcgctttaggggaactgtcttcctccgcaggcgcgaggctgggtacagggtctattgtctgtggttgactccgtactttggtctgaggccttcgggagctttcccgaggcagttagcagaagccgcagcggccgcccccgcccgtctcctctgtccctgggcccgggagggaccaacttggcgtcacgcccctcagcggtcgccactctcttctctgttgttgggtccgcatcgtattcccggaatcagacggtgccccatagatggccagctttcccccgagggtcaacgagaaagagatcgtgagattacgtactataggtgaacttttagctcctgcagctccttttgacaagaaatgtggtcgtgaaaattggactgttgcttttgctccagatggttcatactttgcttggtcacaaggacatcgcacagtaaagcttgttccgtggtcccagtgccttcagaactttctcttgcatggcaccaagaatgttaccaattcaagcagtttaagattgccaagacaaaatagtgatggtggtcagaaaaataagcctcgtgaacatattatagactgtggagatatagtctggagtcttgcttttgggtcatcagttccagaaaaacagagtcgctgtgtaaatatagaatggcatcgcttcagatttggacaagatcagctacttcttgctacagggttgaacaatgggcgtatcaaaatatgggatgtatatacaggaaaactcctccttaacttggtagatcatactgaagtggtcagagatttaacttttgctccagatggaagcttgatcctggtgtcagcttcaagagacaaaactctcagagtatgggacctgaaagatgatggaaacatgatgaaagtattgagggggcatcagaattgggtgtacagctgtgcattctctcctgactcttctatgctgtgttcagtcggagccagtaaagcagtggtggcagcaatattggtgtgattgaggttatgctggcaccactcgcacacaggcgcacaatggtgttagctgggcagaaagagtggcatctctggctaccgggctgggggcgacctttaccataggatgaagtaaccttgcattcggctgcaaggtgtactgtacgtacacaggtgctggtcgatgtccactttctg

SEQ ID NO: 83533 - DNA, 347 bp, Homo Sapiens
tgagcaccacgcctggcctagttagcattttaaagaaacacaaagccataacaaaaaccatcattgtttgtattccacactgttaatgaatgtaaagaggttagaaatgtagtgtttgattaatgatgtttatttttactgtatttaatatgagtaatttttcatcatctttcaagaggaataatgtttattgattaaaggtgagaaatgatagttaagacaccaattccatgtccagatctttgactgtatcatgcattgtacaattgatttcatattttatgaaatgccttaattttcctactataacataaagacaatgatgaataaagtttatgtgtatgatt

SEQ ID NO: 83534 - DNA, 1673 bp, Homo Sapiens
ggcctgagtggcgaattcggcacgaggcctacctggcttagccccacagcgccggccactgaggcccccagcccgccctccactgccccaccgactgtagggcctgtcccccagccccaggactgcccaccgtccacctgcctcaatgtggggcacatgccacctggggacacggcaccacctggcgtgcttgtgccccgaaggcttcacgggcctgtactgtgagagccagatggggcaggggacacggcccagccctacaccagtcacgccgaggccaccacggtccctgaccctgggcatcgagccggtgagccccacctccctgcgcgtggggctgcagcgctacctccaggggagctccgtgcagctcaggagcctccgtctcacctatcgcaacctatcgggccctgataagcggctggtgacgctgcgactgcctgcctcgctcgctgagtacacggtcacccagctgcggcccaacgccacttactccgtctgtgtcatgcctttggggcccgggcgggtgccggagggcgaggaggcctgcggggaggcccatacacccccagccgtccactccaaccacgccccagtcacccaggcccgcgagggcaacctgccgctcctcattgcgcccgccctggccgcggtgctcctggccgcgctggctgcggtgggggcagcctactgtgtgcggcgggggcgggccatggcagcagcggctcaggacaaagggcaggtgggggccaggggctgggcccctggaactggagggagtgaaggtccccttggagccaggcccgaaggcaacagagggcgggggagaggccctgcccagcgggtctgaatgtggaggggccactcatgggctttcccagggcctgggcctccagtcacccctccacgcaaagccctacatctaagccagagagagacagggcagctggggccgggctctcagccagtgagatggccagccccctccggctgccacaccacgtaagttctcagtcccaacctcggggatgtgtgcagacagggctgtgtggaaccacagctgggccctgttccctctggaccgatcggtctcgctcatctgtgagtatgctgtggcccagctgacgagccctaacgtccccagaaccgagtgcctatgaggacagtgtccgccctgccctccgcaacgtgcagtccctgggcacggcgggccctgccatgtgctggtaacgcatgcctgggccctgctgggctctcccactccaggcggaccctgggggccagtgaaggaagctcccggaaagagcagagggagagcgggtaggcggctgtgtgactctagtcttggccccaggaagcgaaggaacaaaagaaactggaaaggaagatgctttaggaacatgttttgcttttttaaaatatatatatatttataagagatcctttcccatttattctgggaagatgtttttcaaactcagagacaaggactttggtttttgtaagacaaacgatgatatgaaggccttttgtaagaaaaaataaaagatgaagtgtgtttcttgggctcagccccagggtagaagggctgggtggagggagataaaagaaaagtggccctcgctctggggagccagggccctcagcagcccctgggcttgggcagccctcca

SEQ ID NO: 83535 - DNA, 551 bp, Homo Sapiens
gcaggttagaatgtatttcactctgcatgaaaagcagcaacagaaacttcaaggaggtttcaattagaaataagggccaagggaattctctagtatgaacaggaacattttttaaggttatgggaatgccagagccagatgaagcaaaaatagatctaaagatcaagttgccaggactataattatggaagtgacttttgtccttggaacttcttaaaagatggtttcatagtcctgtgagaggagtgtctttggaatttggaattctcccctcaagttggcatgaaatcagtccttctaagccagttatgggttcacgtgctccccgtactggccaggtctgaggctgttcatcagtggctggttttcatcgacggtgtgttttcagtcccttatctcaaggatatagtatgtaattctacatccattatcttcagctttctcccactgtattgaatttttactcccttctagtaatttgggaatgcctggtttatttgggactccagcttttgtcttaaagctttctggaagtgaggtgctattttctc

SEQ ID NO: 83536 - DNA, 410 bp, Homo Sapiens
agcccccgggccacaaacgggtaccagcccatggcctgttaggaaccgggctacacagcaagaagtgaatctctggcaagccagggaagcttaatctgtatttacagctgctccccatggttcacattatcgtctgagctccacctcctgtcagatcagctgtggcatgagattctcataggagctggaactactgtgaactaggcatgagagggatctaggttatgctccttatgagaatctaatgcctgatgatctgtcactgtctcccatcacccccagatgggaccatctagttgcaggaaaacaagctcagggctcccactgattctacattatggtgagttgtgtaattatttcattatatattacaatgaaataataatagaaataaagggcccaataaatat

SEQ ID NO: 83537 - DNA, 847 bp, Homo Sapiens
  misc_feature (56)..(56): n is a, c, g, or t
  misc_feature (602)..(602): n is a, c, g, or t
  misc_feature (659)..(659): n is a, c, g, or t
  misc_feature (816)..(816): n is a, c, g, or t
gcggccgctgctccgcgggattaaattggccgcccggaggcgacagcgcggccgtnggcggggcgcgaaggcgcggcatggaaagtgttggcggcggcgcgggaggcggtggcggcggctgccggggccaacatgaccaggctctgaaagtgttccagctgaaatttcagatcggacagactcgctgcggctccggaggcagtgattccaagctgctcgcgcacgctgctgccaagctgcaggatggtgcacgtagccaggctgctgctgctgctcctcactttcttcctccgcacggatgctgagacacctccaaggtttacacgaacacccgttgatcagacaggggtctctggcggagttgcctctttcatctgccaagctacgggagacccaagacctaaaattgtctggaacaaaaaaggaaagaaagtcagcaatcagagatttgaggtaatagagtttgacgatgggtctggatcagttctcagaatacaacccttacggactccgagggatgaggccatgtatgaatgtgtggcctcaaataatgtgggagaaataagtgtatccaccagactcacagttttgcgggaagatcnaaattcccaggggctgacctaccattgacatgggcccacagttgaaggtggttgagngtactcgcacggccaccatgctttgtgcagccagtggtaatccggatccagaaatcacttggtttaaagatttcttacctgtggacacaagcaacaacaatggtcgtattaagcagttacgatcaggagcccttcagattgagcagagtgaagagtntgaccaaggaaaatatgagtgtgttgccacc

SEQ ID NO: 83538 - DNA, 1065 bp, Homo Sapiens
ggagcgaggcctgggtggcgaattcggcacgagggcggggtgggcggcgagcggagccggccggagcgggccgggcagcggccgccgccgtcccggggcggacgggcgcgggcgggaggatggagctgaactccctgctgatcctgctggaggcggccgagtacctggagcgcagggatcgagaggccgagcacggctacgcctcggtgctgcccttcgacggcgacttcgccagggagaaaacaaaggcggccggcctggtgcgcaaggccccgaacaacaggtcttcacacaacgagctagaaaagcacagacgagccaaactcaggctgtaccttgagcagctcaagcaactggtgcccctgggccccgacagcacccgccacaccacgctgagcctcctgaagcgggccaaggtgcacatcaagaaactggaggagcaggaccgccgggcactgagcatcaaggagcagctgcagcaggagcatcgtttcctgaagcggcgcctggagcagctgtcggtgcagagcgtggagcgcgtgcgcacagatagcacgggctctgctgtctccacggacgactcagagcaagaagtggacatagagggcatggagtttggccctggtgagctggacagtgttggcagcagcagtgacgcggacgaccactacagcctgcagagtggcaccggcggcgacagtggcttcaggccccactgccggcggttgggccgccccgccctctcgtaggcccgggccctatgctccttggcctgcctgcccaccagccacgcgtgtcagccctccagttctccttcaattgacgccagcctcttcaacaggcccactgctgtgccattctggaagctccagctgctgctgggctgcctggcactgcccgcttgccggtcagggcctgccgagctgcctgccccttccagctgggcagagtcccctgcaaggaggcagggcccagcttccacatccggagccctggtcagcatagccgcccacggtctgttctcagattcctaatcattccagaagtattaaacgtcattgctgc

SEQ ID NO: 83539 - DNA, 1085 bp, Homo Sapiens
  misc_feature (745)..(745): n is a, c, g, or t
aaggaagcgaggcctgggtggcgaattcggcacgagggaggagggggcaggctgcagggcaggggccccatgaagtcgttactacgggtgccagctgcgccctccataccttgacctcgtgttcaggcagcagaagccctgaagctggggtgcgtacaggtcccccgcgtggggagtggggaccctgggccggggctccccggggatttccaccctcctggctgctgtgaggaccatagcacacctggtcctgtctgggcccaccttggcccagcccttttgtgtgagcaggctgggagctgcgtttgtagggggcttcagagccccagggcatggctcattcctgtggtccacctgttctagggaatccgaaaggctggtgtagggacccatttctgtggcatcctgagccaggcgaggaattggttgagtctccagctgccctggctgggacccgtccctgagtcccagcccctggtcccctactggggacagtttggggaaggacaggagtgtgacgagggaaccattgcctcaggcctcctcagtgagcaagcccggcccccgctgccgcttctctccaaaccaagtccctgacccgtggagaactctggggcgtgagctggggctcccccagcatggagaatccaaagctgacaaccagcgtcctggccaaggctgcccgaacactgccctctatgctgagccgtttcacacatgcagccagttcatcttcaccccaggnctcagagaaggtcttcacaccaacgagctagaaaaagcacagacgagccaaaactcagggctgtaaccttggagcagctcaagcaaactgggtgccccctgtgggccccggaaaggaaccccgcccaaacccaaggttggaggcctccctgtaaaggggggcccaagggtggccccttccaagaaaaacttgggaagggagccaaggaaccccccccgggggcaccctggaagcatcctcagggagagcccaacccttgccgcacaagggggaaccaattccctttttttccttggaaaaaacgggggcgggcccctggggtaagacaagatcctggttt

SEQ ID NO: 83540 - DNA, 969 bp, Homo Sapiens
aaggaagcgaggcctgggtggcgaattcggcacgagggaggagggggcaggctgcagggcaggggccccatgaagtcgttactacgggtgccagctgcgccctccataccttgacctcgtgttcaggcagcagaagccctgaagctggggtgcgtacaggtcccccgcgtggggagtggggaccctgggccggggctccccggggatttccaccctcctggctgctgtgaggaccatagcacacctggtcctgtctgggcccaccttggcccagcccttttgtgtgagcaggctgggagctgcgtttgtagggggcttcagagccccagggcatggctcattcctgtggtccacctgttctagggaatccgaaaggctggtgtagggacccatttctgtggcatcctgagccaggcgaggaattggttgagtctccagctgccctggctgggacccgtccctgagtcccagcccctggtcccctactggggacagtttggggaaggacaggagtgtgacgagggaaccattgcctcaggcctcctcagtgagcaagcccggcccccgctgccgcttctctccaaaccaagtccctgacccgtggagaactctggggcgtgagctggggctcccccagcatggagaatccaaagctgacaaccagcgtcctggccaaggctgcccgaacactgcctctatgctgagcgtttcacacatgcagccagttcatcttcaccccaggctcagagaggtcttcacacaacgagctagaaaagcacagacgagccaaactcaggctgtaccttgagcagctcaagcaactgggtgcccctgggcccccgacagcacccgccacaccaagcttgagcctcctgaagcgggccaaggtgcacatcaaggaaactggaaggagcagggaccgccggggaactggaccatcaagggagccagcttgcagcagggaccatt

SEQ ID NO: 83541 - DNA, 361 bp, Homo Sapiens
tgaaagatcaagtgaggaaatggagaacaaggtcccctccttatccaagtctcatcggcaatgttagtgcccgcggggagcagtggaggatgtggctcagcctctgagtgcctgggatgcggtctctgtgcttttctagctcgttgtgtgaagacctcttgttcggggccttgcgcaccaggccggccgcctttgttttctccctggcgaagtcgccgtcgaagggcagcaccgaggcgtagccgtgctcggcctctcgatccctgcgctccaggtactcggccgcctccagcaggatcagcagggagttcagctccatcctccagcccgcgcccgtccgccccgggacggcggcggccgc

SEQ ID NO: 83542 - DNA, 491 bp, Homo Sapiens
agtcgagtcacccccaacctcatgggccacctctgtggaaaccaaagagttctcaccaagcataaacatattcctgggctgatccacaacatgactgcccgctgctgtgacctgccatttccagaacaggcctgctgtgcagaggaggagaaattaaccttcatcaatgatctgtgtggtccccgacgtaacatctggcgagaccctgccctctgctgttacctgagtcctggggatgaacaggtcaactgcttcaacatcaattatctgaggaacgtggctctagtgtctggagacactgagaacgccaagggccagggggagcagggctcaactggaggaacaaatatcagctccacctctgagcccaaggaagaatgagtcaccccagagccctagagggtcagatggggggaaccccaccctgccccacccatctgaacactcattacactaaacacctcttggatttggtgaaaaataataaatag

SEQ ID NO: 83543 - DNA, 680 bp, Homo Sapiens
  misc_feature (429)..(429): n is a, c, g, or t
ggggctgcccggcgctccggaagcgattcatcgggccgcgagcgccctccccgtcgttttccgtgagagacgtagagctgagcgacccagcccgcgagcgaggtgagatgccggtggccgtgggtccctacggacagtcccagccaagctgcttcgaccgtgtcaaaatgggcttcgtgatgggttgcgccgtgggcatggcggccggggcgctcttcggcaccttttcctgtctcaggatcggaatgcggggtcgagagctgatgggcggcattgggaaaaccatgatgcagagtggcggcacctttggcacattcatggccattgggatgggcatccgatgctaaccatggttgccaactacatctgtcccttcccatcaatcccagcccatgtactaataaaagaaagtctttgagtagtcaaaanacacccagtactctacacaatttccgttacccccgtaccttggaaaaactcggaaaaaaggaacgcccattctccttgtcggccgccctcggcccctcgaaaagcttttctaaacccatttcgttttggcgccgccggggcccccgggaggttaagggggacctgtgggccattacgcttgtttccccctagggaaaacccccgggtcacaggccactaaggggcctttgggatttcccccccaccaatat

SEQ ID NO: 83544 - DNA, 465 bp, Homo Sapiens
gggcgaagagggtggtggagtcgggctacccactgattttccttcccttacttcccctgagcccttgggcccacttcccagcctaccgcttccgtccccgcccgactcttgggccagcgcctgggcccacactttcctatcccccgcagatgccggtggccgtgggtccctacggacagtcccagccaagctgcttcgaccgtgtcaaaatgggcttcgtgatgggttgcgccgtgggcatggcggccggggcgctcttcggcaccttttcctgtctcaggatcggaatgcggggtcgagagctgatgggcggcattgggaaaaccatgatgcagagtggcggcacctttggcacattcatggccattgggatgggcatccgatgctaaccatggttgccaactacatctgtcccttcccatcaatcccagcccatgtactaataaaagaaagtctttgagcaaa

SEQ ID NO: 83545 - DNA, 134 bp, Homo Sapiens
aaaacactaatgatcattgaagagtatttatgtaaacatacaacgtataatgggtgggggatccgatcatggtgatgtacggggtgaattctcttgccgtgttgcaaatgtgtaaaataaagattatctggcag

SEQ ID NO: 83546 - DNA, 694 bp, Homo Sapiens
tgcggccgccggcgacctgaccagtgaggaggaggaaggccagagcctatggtcctccattctgagcgaagtgtccacccgcgccaggtccaagctgccgtccggcaagaacatcctggtcttcggtgaagatggttctggtaaaacaaccctcatgactaaactacaaggagctgagcatggcaaaaaaggaagaggcctagaatatctctacctcagtgtccatgatgaggaccgagatgatcacacgcgctgcaacgtgtggattctggatggagacttgtaccacaaaggcctgctgaaatttgcagtttctgctgaatccttgccagagaccctcgtcatttttgttgcagacatgtctagaccttggactgtgatggaatctctgcagaaatgggctagtgttttacgtgagcacattgataaaatgaaaattccaccagaaaaaatgagggagctggaacggaagtttgtgaaagattttcaagactatatggaacctgaagaaggttgtcaaggttccccacagagaagaggccctctgacctcaggctccgatgaagaaaatgttgccctgcctctgggtgacaatgtgctgactcataacctgtggatcccggtgttggtggtgtgcacaaagtgtgattccgagagtgatctggagattgagcacaattacgaggatgagcat

SEQ ID NO: 83547 - DNA, 956 bp, Homo Sapiens
cagtcgacggtaccggacatatgcccgggaattcggccattacggccgggagtctactgtgaaatcgatgggtctggaaatggatggactgtgtttcagaagagacttgatggcagtgtagatttcaagaaaaactggattcaatataaagaaggatttggacatctgtctcctactgacacaacagaattttggctgggaaatgagaagattcatttgataagcacacagtctgccatcccatatgcattaagagtggaactggaagactggaatggcagaaccagtactgcagactatgccatgttcaaggtgggacctgaagctgacaagtaccgcctaacatatgcctacttcgctggtggggatgctggagatgcctttgatggctttgattttggcgatgatcctagtgacaagtttttcacatcccataatggcatgcagttcagtacctgggacaatgacaatgataagtttgaaggcaactgtgctgaacaggatggatctggttggtggatgaacaagtgtcacgctggccatctcaatggagtttattaccaaggtggcacttactcaaaagcatctactcctaatggttatgataatggcattatttgggccacttggaaaacccggtggtattccatgaagaaaaccactatgaagataatcccattcaacagactcacaattggagaaggacagcaacaccacctggggggagccaaacaggctggagacgtttaaaagaccgtttcaaaagagatttacttttttaaaggactttatctgaacagagagatataatatttttcctattggacaatggacttgcaaagcttcacttcattttaagagcaaaagaccccatgttgaaaactccataacagttttatgctgatgataatttatctacatgcatttcaataaaccttttgtttcctaagactaga

SEQ ID NO: 83548 - DNA, 1389 bp, Homo Sapiens
  misc_feature (46)..(84): n is a, c, g, or t
  misc_feature (88)..(122): n is a, c, g, or t
aaaaagacgtatagactcactatagggcgctccgccgtcatcagannnnnnnnnnnnnnnnnnnnnnnnnnnnnnnnnnnnnnnccgnnnnnnnnnnnnnnnnnnnnnnnnnnnnnnnnnnncagtcgacggtaccggacatatgcccgggaattcggccattacggccgggggacagtgctgacactacaaggctcggagctccgggcactcagacatcatgagttggtccttgcacccccggaatttaattctctacttctatgctcttttatttctctcttcaacatgtgtagcatatgttgctaccagagacaactgctgcatcttagatgaaagattcggtagttattgtccaactacctgtggcattgcagatttcctgtctacttatcaaaccaaagtagacaaggatctacagtctttggaagacatcttacatcaagttgaaaacaaaacatcagaagtcaaacagctgataaaagcaatccaactcacttataatcctgatgaatcatcaaaaccaaatatgatagacgctgctactttgaagtccaggaaaatgttagaagaaattatgaaatatgaagcatcgattttaacacatgactcaagtattcgatatttgcaggaaatatataattcaaataatcaaaagattgttaacctgaaagagaaggtagcccagcttgaagcacagtgccaggaaccttgcaaagacacggtgcaaatccatgatatcactgggaaagattgtcaagacattgccaataagggagctaaacagagcgggctttactttattaaacctctgaaagctaaccagcaattcttagtctactgtgaaatcgatgggtctggaaatggatggactgtgtttcagaagagacttgatggcagtgtagatttcaagaaaaactggattcaatataaagaaggatttggacatctgtctcctactggcacaacagaattttggctgggaaatgagaagattcatttgataagcacacagtctgccatcccatatgcattaagagtggaactggaagactggaatggcagaaccagtactgcagactatgccatgttcaaggtgggacctgaagctgacaagtaccgcctaacatatgccgtcttcgctggtggggatgctggagatgccttttgatggcttcgattttggcgatgatccttagtgacaagtgttttcacattcccataatggcatgcagttcagtacctgggacaatgacaatgataagtttgaaggcaactgtgctgaacaggatggatcttggttggtggatgaacaagtgtcacgctggcatctcaatggagtttattaaccaaggtgggcattacttaaaaagcatctaatctaaaggt

SEQ ID NO: 83549 - DNA, 767 bp, Homo Sapiens
cagtcgacggtaccggacatatgcccgggaattcggccattacggccgggcagagcgggctttactttattaaacctctgaaagctaaccagcaattcttagtctactgtgaaatcgatgggtctggaaatggatggactgtgtttcagaagagacttgatggcagtgtagatttcaagaaaaactggattcaatataaagaaggatttggacatctgtctcctactggcacaacagaattttggctgggaaatgagaagattcatttgataagcacacagtctgccatcccatatgcattaagagtggaactggaagactggaatggcagaaccagtactgcagactatgccatgttcaaggtgggacctgaagctgacaagtaccgcctaacatatgcctacttcgctggtggggatgctggagatgcctttgatggctttgattttggcgatgatcctagtgacaagtttttcacatcccataatggcatgcagttcagtacctgggacaatgacaatgataagtttgaaggcaactgtgctgaacaggatggatctggttggtggatgaacaagtgtcacgctggccatctcaatggagtttattaccaaggtggcacttactcaaaagcatctactcctaatggttatgataatggcattattgggccacttggaaaacccggtggtattccatcaagaaaaccactatgaagataatcccattcaacagactcacaattggagaaggacagcacaccacct

SEQ ID NO: 83550 - DNA, 929 bp, Homo Sapiens
  misc_feature (86)..(120): n is a, c, g, or t
  misc_feature (203)..(212): n is a, c, g, or t
gaagatgtatagactcactatagggcgctagctcgttagcagcgaacgaccgagcgcagcgaagtagtgagcgaggaagcggccgnnnnnnnnnnnnnnnnnnnnnnnnnnnnnnnnnnncagtcgacggtaccggacatatgcccgggaattcggccattacggccgggatcttcttgctgaaatcttgaattttgtcagcnnnnnnnnnnactgtggacagtaaagctggaaagatctaaataacccaacaggaaatgcggatgaaagtgcaagagttggtttgtggtcatctggagtccatgtctccaagactgctggaccttcaaattctgcaacttgttagatcatctggatgatagcacaactgttagaagacctagaagaatacagcgttgctatgactcagtggtgttgaatgcagaccatctaccagctggggaaagaatcaattataaacaggaataaagggattcattcctcattttaactgatgttacagtgaagatgggttcttgaactcttggaagcctggatgagccacctaatctgaagataaaaacaaagaccaatgcgtattggggaaaagaatgcttagtactgcaagactgttgaatacctgttgaatattcctattgaggttttttcctaaacatacttcagtaacatcttaggacaattcactggagaaatgttgatccctggctggaatgtcataccattgacccatttgaagagttaaagctggatttgactgctctattctaccaggaatattgttagggtagccttttaccagtttctaaacaattgtaatcatttattgactcagcaattcctcagataacaggtcaaaagatgtacagatacattctgaagttttcttgctattaaaggcacaagagtttccttgtattttgactgacaaa

SEQ ID NO: 83551 - DNA, 410 bp, Homo Sapiens
  misc_feature (45)..(45): n is a, c, g, or t
  misc_feature (304)..(317): n is a, c, g, or t
tcccttggggcttaccccaggtgcttcgtaactgcatcggaagtncaggagctggtcagagcccaatgagaaggaaacctcatctttgcatagcccatgcctcatggagaggtgacatcatacattcacatgcttctcacctaagtccccagggtccaagggagaagccccagacccccttctcttgcagagtgtgggggtggtggtgctgcaggggcagggctgggtgggggtcaccagactttttctgcccttagggtagtacagctggcatttgttttatagactcttgtctttggaattnnnnnnnnnnnnnnagtgtttcaatctgttatatgttctgtgtttaatgaagaaaacctatttattaatgaaaaatataatacatataaagaatttggctccgtaaa

SEQ ID NO: 83552 - DNA, 816 bp, Homo Sapiens
tgcggccgccaacttagcgtgcaggtcaccggagtgggtggagggtcagaggtcgggtcttcggccctgagaagtagaaatgcaggggccgtgctgtccctggtcccccagggaacagcaaggaaggaactgagccttctccagcagggcttcctgtcccgatgcttctgtctccactcggctttcccaaaaggcggcacccagctcctcaatcgaagcatctgccgccaacccctcggccccctcaagcccaccaactgcttctgagtgtcgcactaggattttcattgcttattttaaagtgtcttaatcctttgttcccagacacacaacccctctagctctcggaggggcgatcatgagaaaccttccagggaaactgagcacaggatgaactgttagttgtttttaaaagtctatataaatatttcaacagatcgtaaagaaaaaatttatctctttggtccttgcaagagaagtcaaaggaacttttgtttctcctcaagagcctggacatctctgtctgtcatgactggaaagggcccgttgtgctgaaatcctatcatcatggtggatttgatcttcagtggccaaacacgaattaaagtataattcttaactgaactggtgggtgggttgagctttagggaagtatatggcggtcattcctggtgcgcctatcggtgtgacatgagccctggagtgtgtcgtccctctcagccttcttcttcttgcttcctggggtcttgtaactgggaccttactttggaacttttacatccaaattccctatcttaaaggattctcctgcatctc

SEQ ID NO: 83553 - DNA, 331 bp, Homo Sapiens
aaccacagataattgccaaagtttccacctgaggacggtgtttggaggttgccttttggacctaccactttgctcattcttgctaacctagtctaggtgacctacagtgccgtgcatttaagtcaatggttgttaaaagaagtttcccgtgttgtaaatcatgtttcccttatcagatcatttgcaaatacatttaaatgatctcatggtaaatgttgatgtattttttggtttattttgtgtactaacataatagagagagactcagctccttttatttattttgttgatttatggatcaaattctaaaataaagttgcctgttgtgaaa

SEQ ID NO: 83554 - DNA, 899 bp, Homo Sapiens
caggggataattataactgcaatcgatgggcagaagacaaatggtgtccacaaaatacacagtactgtttgacagttcatcacttcaccagccacggaagaagcacatccatcaccaaaaagtgtgcctccagaagtgaatgtcattttgtcggttgccaccacagccgagattctgaacatacggagtgtaggtcttgctgtgaaggaatgatctgcaatgtagaattacccaccaatcacactaatgcagtgtttgccgtaatgcacgctcagagaacatctggcagcagtgcccccacactctacctaccagtgcttgcctgggtctttgtgcttccattgctgtgatgccaccattcctaggagaggcagagaccagcctctaaagcacaagccaaaaactgtgtgaacggtgaactttggagtgaagatcaatcttgcacttggtgaagagtgcacattggacctcaaggcgaaagccagtggtttgcttggataaaatgttcccgcatgaggccacaggactgaggatgggaatttggcagggcctgagaagatggtctgacttccaggcttcctggtcaaagagagctacgtttgggcagttctgcagagaggatcctggcaactagtcccacctgactaggcctttagctgaaaggatttcttgacctccttgactgcctcagaggctgccaggtcaaaccctcttgtttatgtgattagctcagagcatctctatgaaatctaacccttcccctcatgagaaagcagatttccccaccaacagcatagtcaatgagaaaggcaactgtacgaaaaaaacttccagtggaactaatatgaaatctatttgcaaaattatggggggaaataaagcttttaaattatacaatg

SEQ ID NO: 83555 - DNA, 692 bp, Homo Sapiens
  misc_feature (670)..(670): n is a, c, g, or t
aaccctcctttaggaataagcttgcggccgcgggcagcagagccggccgctcgttctccagccgtcttcaggacagccgcagcctggacgggctgagcgaggcgtgcggtggcgccgggtcctcagggagtgccgagtccggcgcgggcggcggacgccgcgccaccatctccagtcccctggagctcgaaggcacagtgagccgccacggcgaccttacccactttgtcgccaacaacctgcaactcaagatccgtctgagcggcgcgcctccacccccgccttctgcccctgcgcggccctgcccagcgcctgcacccacacccacaccggccattccccccatcgaccccgaggtgctgcgggatctggagcggttgagtcgggagctgggaggccgggtggaccgtctgcttcgcggtctgggtggcgcggtgcaggagctgacggcgctgagcgtgggttgcatccagacctaccgcgatgctgtggactccttaggtgaagccgtggacatgagcatcaagggcatgtacaccctgctggcgcgctgcgaggagctggagcgggctctgcagccggttcaggggctggcgcgccaagtccgggatatccgacgtactctggaggtgtttggaggccctgtgcaagtgaccaggaggacaggagnaggccggtcctggccagggcag

SEQ ID NO: 83556 - DNA, 596 bp, Homo Sapiens
ggaccgcggtgcacccggccacagcggccatgcccgatgggctcgcccagctctacctgctcgaaggggatgtcccactcctgcaggtacacgctggtctggctggccttgcgagagatggggccccgccagggccggcgagagctcggcaagtcgtccacctcgtcctcatcgtcttctgcctctgacttgccagcctctggctcctcagcctccgcttcgtgagcttccaacacatctgctttcggctggtcatcgagccgggtaccgtcggcagcttcagggagcggggctgcgtgtgcaaaggctgaaatgtctggaaagataaactgctgtctatgatgaatgaagtaggcagctgggaagttgaacctgctgtcccgctggccaggtgaggggttggggggcgtggtggcgctggatgggttggatgatgtcgggaagggcgccggtgaggagggtgtggaggaggtggtggaggaagggttgctgctggagtccaggtgattcattgccggaaggtgctccttctttgtcagtgctttggggagggttcaaaaatggggtccgctgcactgtcccaccggtttgttaat

SEQ ID NO: 83557 - DNA, 565 bp, Homo Sapiens
ccatgtcatacatagttcatcctaatttctaccaacttcactgggcaacaatcaatcgttttatttccctcaatgactcttgttatcttcagacctgaaactgattcggagaccatggggcccacaaacctaatcagagtaacatgtgttcattgagtacacatgtagacatgagaatctccactttccccttttttctcttggtaaaatgttcacaaatgttcaggtaacacctgctactccagccattcaggccttaaatctgcagctctacattttgtatccaggtcttgagatttgggaaatagaaaatttttatctaaaaaatgaaagtacttttggttatcaaactcagacattgaaatgaacgtgcagttatgtcgttctccccctttaaattatgtattcatcgcttgaaactgttcactattgccacaagtagatatatattaaactaataataccacattggacactatatctcataccctaaaccataatgatatatatctaatcaataaccaatgttatttctttaaataaataaaaatttctgacaaacaaa

SEQ ID NO: 83558 - DNA, 592 bp, Homo Sapiens
gaattttaaagcattaagtgcattttattttattgtattagcacataaattgatgaagccacatggtgaaaatctgtgagaaactgaaggttttcatttgttttctgtgccccactgtatatcacctttcaaaataatgctttctgctgggtccaaacttcacttggagcaaagaaaggtagttaaaaggtttcacttaaagctacttcgttatggtgctactgaaagtaagtaaaagcaaacagcagtaacatgggacttaaatgagcaagagaaggattcaggtgaaatagaagctgcatttggggataactgaagattgactttctgatgaaaggcacaaaaaaggattaattggcttattccaaacagagggcagttctttaggaagtatgcttgaggatatacttggcaataaatttgacagctagcatggtctctctgcacgttggctttatccgggattctggaaggagaaaaccaaatttgcctttatctcggagctcaaaggcaaatgtgtgtttgatgcccaggtcataagcccagtctaaagaagaacctgatatcgggtctgtaaaacacaagcagtaaa

SEQ ID NO: 83559 - DNA, 471 bp, Homo Sapiens
cccccagccccccagcctgtcgaactgggctctcccagaaggtccccgctccagcccaagcagggagccaggttgggggtgtgggaaggcagaagtcccagggatcctgggggaggctcaggttgtacctgcaggccacagtctcctcgacagacctcggacgaggttgtaagtgttttaaagaaactagagcagcagagaagagagactcagaagcccgtggcacggctttctcggcgtcccctccagcgagggggtctccattgctgcagttgccggttttgtccaaccaggtcaggaggctgcccggccccctccccactctcaaagttgcttgttaaacacagagtcgtaatttgtggctaaatataactagtgtgttctcacggaaagtataattcagggtgctcattgtatgaggttatcaacaagacccatctgggttaaattaaagtgattttcataaagggc

SEQ ID NO: 83560 - DNA, 898 bp, Homo Sapiens
  misc_feature (715)..(715): n is a, c, g, or t
aattcggaacgaggggaattccttaaaagtatggatgctgactctagcaagtcattcactttttagaagtaagatggttaagtcaaggcaaaatgtaaagattttatgctttgtgatgtgaaatcaagctgtttatggtatcaaacaaaattggtgccagaacttgacaatgaaaactggcttacagatttagcatttttagtgggtttgacggcccatttaagtgagttaaacctgtgtcttcaagttgaaaaccaacttaacaatacaatgtttcaaaccataacagcattccatatgaaactgaaattatggcaagctcaaattaaggcaaacaattttatgcatttcgacatgttggctaaacatggtcctgtgaacagccaaaaatacgcagccttgcttttcaatttgatccaggaatttgaaaacaggtatttcaagatttctgaaaaaatcatcaatattttggtatatttgcaactcccattttcagtcgacatatatatgttacctggccaattttgaaatggaatgcctagagctgcaatctgatgttcaacttatagaaaaatttgattttgcctctttactggactttttgtaaggacctgtcttccccaatgacaaatatcccttgcttcacaatcacaccttgttcatgtcattgctttttggcagcacttacatttgggagctactattttcaaggatngaagaacacgaagagtaaaattagaaccaaaatatctgatgagcaccttgagaactcactgagaattgcaactacttccatcaagccagatactgatggattagtttctcaaaaacaatgtcaagtaccccactagttttatgttgttctcttttcttttataataaaaaatatcaaaaaagt

SEQ ID NO: 83561 - DNA, 181 bp, Homo Sapiens
tttttgtagaacaaaatatatggtatttattaaacacatgtgacataggttataatatcaaagtagagcatgcatgaacagatgattcattcgtttaacaaaaacaccaattgatactgagaacactaaattattaaatttccaagacatataaaattctctttaagttaaagtgagaaag

SEQ ID NO: 83562 - DNA, 570 bp, Homo Sapiens
  misc_feature (494)..(494): n is a, c, g, or t
gcggccgcctgagacctgagctgctgtgaaagcccctgcacaatcagccagggagaactgggcgggtttagtggccccaggcccactcctcatgcagcagtgtgctggggcgacagctcgtctcccctctcttaagcacccgcttcctcaccacccccactgttgggcctatagtagcaggttagtgagtacctagggcggctcaactcctcccacagcaccaacccagcatggtcccactgaagtcctactacgccctcccctccccagccttttccagaaaccatactgggctcagatcagagctccgaagcggtcaaagtgagctgagcaggacaggcccagcctttctccactgccacgtccctcatgcacatcactcatctcctgctgcaggccaaggccaaaattgggctagtcctggccagggaaatcagaagctcttcttgggtgagattgagcctcctgttgctccctggagttccggaggctgngctgcagcccactcagcttgcgggcaaaatacgtgctctcctctctccttgtcagctgagcaaacccagggaatag

SEQ ID NO: 83563 - DNA, 604 bp, Homo Sapiens
  misc_feature (92)..(115): n is a, c, g, or t
ggcgtgaaccccagaaggcggagctttgcagtgagctgagatccatgccactggcactcccacttgggggacaccagcaagactccgtctcnnnnnnnnnnnnnnnnnnnnnnnnttgcaaaagttcctctaaagttaaatcaaaggtggtttgtctagcagagagccagaatcttctaatagtgggcagagcccagagacaaggggaagaaagatgaccttctccccagtccttcccagcaccatttttgtttcacaccaggcttgtggcattttggtgctcacaggggttttgccttctgacctctccttggagtaggccattctcatgcagggctcaccctgaggcaggaggaccaagggctccctgcgtccacggaccacgtatgccttggtggtcactcccatcggggctatcagttctgcactgtgccctggtgcggattttaatgcatatttttatatataaatgttcccaaaggccaaatttgttgccaggttttatacgcaggtcaccataatttgtattatgttccctgagtcaatgaaggttttctttagacttcttaattaaaaagagaagaaagaaaatgttccaaaaaaa

SEQ ID NO: 83564 - DNA, 840 bp, Homo Sapiens
  misc_feature (12)..(12): n is a, c, g, or t
caggccggacanaacagatggtgaccagatttggcccctgggctgtagtttgctgacccctcatctaaaaaataggctatactacaattgcacttccagcactttgagaacgagttgaataccaagaattattcaatggttcctccagtaacttctgctagaaacacagaatttggtctgtatctgacactagaacaaaacttgagggtaaataaacattgaattagaatgaatcatagaaaactgattagaagaatacttgatgtttatgatgattgtggtacgagatagttttaagtatgttctaaatatttgtctgctgtagtctatttgctgtatatgctgaaatttttgtatgccatttagtatttttatagtttaggaaaatattttctaagaccagttttagatgactcttattcctgtagtaatattcaatttgctgtacctgcttggtggttagaaggaggctagaagatgaattcaggcactttcttccaataaaactaattatggctcattccctttgacaagctgtagaactggattcatttttaaaccattttcatcagtttcaaatggtaaattctgattgatttttaaatgcgtttttggaagaactttgctattagatagtttacagatctttataaggtgttttatatattagaagcaattataattacatctgtgatttctgaactaatggtgctaattcagagaaatggaaagtgaaagtgagattctctgttgtcatcggcattccaactttttctctttgtttttgtccagtgttgcatttgaatatgtctgtttctataaataaatttattaagaata

SEQ ID NO: 83565 - DNA, 357 bp, Homo Sapiens
  misc_feature (165)..(174): n is a, c, g, or t
ttttgttatccagttgtaatacaggtctcatacctcagtttcagatgttatagatggttacctctttgagctgccctgtcaccccagcaaccctaaaagagaattttgtacattctgtatcccacagatttggtcagccatttcaaaattccctccagtttggtnnnnnnnnnntctgtcttcggtttcagctggatgatgaatccttgtttttcaggtggctccaaaaagaatgttgcatgtgttcagaccatcctgagcagagccaccaaatttagtgacagtgtctagccatgttagcaataatgttaacagaagcttttgtttaaattacaaaatacatttatactatttact

SEQ ID NO: 83566 - DNA, 440 bp, Homo Sapiens
tgcctcaggagcggaacaacgtcggcgagcgggatgatgatgtgcctgcagatatggttgcagaagaatcaggtcctggtgcacaaaatagtccataccaacttcgtagaaaaactcttttgccgaaaagaacagcgtgtcccacaaagaacagtatggagggcgcctcaacttcaactacagaaaactttcggtcatcgtgcaaaacgtgcaagagtgtctggaaaatcacaagatctatcagcagcacctgctgaaacagtatcttcaggagaaactggccagatgaagtggttctaaaaatcttctcttacttgctggaacaggatctttgtagagcagcttgtgtatgtaaacgcttcagtgaacttgctaatgatcccaatttgtggaaacgattatatatggaagtatttgaatatactcgccctatgatgcat

SEQ ID NO: 83567 - DNA, 497 bp, Homo Sapiens
tggctcagaggcagttccaggctgtactccaggcagctgactcccagagctgatgactccccacctgtgcctccagcatccagatggtccaccactgcaccatccacgggaacacagaggagctgcggcagatggcggccagccgcgaggtgccccggccactctccaccctgcccatgttcaatgtgcacacaggtgagcggctgcctccccgcgtggacagcgcccaggtgcccctcattctggaccagcactgacagcccagccagtggttccaggtccagccctgacttcatcctcccttctctgtccacaccacgagtggcacatcccacctgctgattccagctcctggccctcctggaacccaggctctaaacaagcagggagagggggtggggtggggtgagagtgtgtggagtaaggacattcagaataaatatctgctgctctgctcaccgaattgctgctggcagcctctcccgtcaacaaagaac

SEQ ID NO: 83568 - DNA, 655 bp, Homo Sapiens
  misc_feature (129)..(138): n is a, c, g, or t
taagtaaataatttaatgatagaacactgaaatttctttagacacagtattttcaagttatatttctgcctggagtacagatatgaaatagcacaaactgtactctgaattaagcaaacagaatgaatnnnnnnnnnntattctcccaacctaagtttccgttcctcatttccacttgcctcagactctttctattgaacatatctagttaaatctctaatggacggcctgtgggaagatttactgccacagggatgactgacttctttccggacactgagcaggggactgtgggctctgaagcagtttacttcctgtggaaagccagtcccatttctattttacttcgatccaggcctattcagataaagcaccactcagtagctactgaccatttaagtatggagagaaaagcaaagtagaaaaatggttttcacttaaagaaaaagcaatggaagaccagccataatagctccatggcacaagagacatgacagggatctcctcccctcatttccacttgcctcagactctttctattgaacatatctagttaaatctctaatggacggcctgtcggacgcgtgggtcgacgatatcccgggattccgaccgttaccagcctgctttttgtaaccactggtcatagccacca

SEQ ID NO: 83569 - DNA, 949 bp, Homo Sapiens
  misc_feature (12)..(12): n is a, c, g, or t
  misc_feature (341)..(341): n is a, c, g, or t
  misc_feature (643)..(643): n is a, c, g, or t
gcattaatgctngttagtttaatgtggacagagacatcccacggcgtgactgttagttaggatgagtcagcttgggggagtttgtgcttcctgcttggtgtggccagccacatgccaaggtcccctgccttctagcccagaatgacgggactgggcagaacacccccaacttttagctgccacttggctcattacagcagtaccagtatgggggtgggaggggtgaggctgtggagtgaaggcggcgtatagggcagagactaagaggtcctgtgagattcttagaggagccatcctgctccaaggggcctgagctgagtgtggtctgtgagcatctgctngctcctctcagagagggagatctcactctctgccagtctgtctagccccaaagagcctggttttctcagtatcagtgtagctcctggggacttcataggcataaagtcagtccatttccatgaagataaggggattaggaaagaaggttctactagttggcatagcaaacacgaggccaacaccatgagaacagtaggggaggcggggggtgaggctcagcccccagcccctgactggcagtgatggcccatgctcaggaagtggggatcctctgacctcccctgaatccctcaccttcccnaagtttcaagagctgggccgagctgttgagtgaaatgaccgaaggcaagagtttgtatgttctccccgtgtcgccccatccatggaggagttgaagtttggaggaggggagagtggtactccctgtcgtcaactcctcagcagaactgatagttgttgggctgcagcaagggctgggcgatatccccttgctcgcagcaggtcaggtgctcactagagctctcctcctccagctcaactgctgctgtgccgctgccaccgcttctgctgctgctcggcagattggtatacgtcccgctctctctct

SEQ ID NO: 83570 - DNA, 605 bp, Homo Sapiens
  misc_feature (499)..(549): n is a, c, g, or t
aaatcattcagtttaaggtcactagactttagatgagtgaccctgcaggtttataaggcattctgctcagcagtcttgtaaatagtcctatatgaaagagccatgctactgttggacttggtcccactctggtcaaccttgataacgtcatacgtggcttatggactggatagcactggattccgccgcagccctggccatactgtgccacacgttggaagaactgtgggatgtagaatggagggactccttgtcagacagtgacagcatcatagcatatgcctggggtaaaaaggagagagactcagtaaatggcatttgaaaaacatcacttttagttcaaagaatattgttggtaaatggaaagggatgggaccctgagtaggggcatccttcatgggtgtgtttggcaaagaaggcatattttttgtagaaaccacatgggattactgctggcctttagtgcctaggggccccaaaagtgacacacgctacagannnnnnnnnnnnnnnnnnnnnnnnnnnnnnnnnnnnnnnnnnnnnnnnnnnaatgagtcagtctcctgttcaactataaatacagtcatccatccactacatatgtt

SEQ ID NO: 83571 - DNA, 1011 bp, Homo Sapiens
gggatcatttagcatatcttctaacttgcaaaggcacgttcgcaacatccacaataaagagaagccatttaagtgtcacttatgtgataggtgttttggtcaacaaaccaatttagacagacacctaaagaaacatgagaatgggaacatgtccggtacagcaacatcgtcgcctcattctgaactggaaagtacaggtgcgattctggatgacaaagaagacgcttacttcacagaaattcgaaatttcattgggaacagcaaccatggcagccaatctcccaggaatgtggaggagagaatgaatggcagtcattttaaagatgaaaaggctttggtgaccagtcaaaattcagacttgctggatgatgaagaagttgaagatgaggtgttgttagatgaggaggatgaagacaatgatattactggaaaaacaggaaaggaaccagtgacaagtaatttacatgaaggaaaccctgaggatgactatgaagaaaccagtgccctggagatgagttgcaagacatccccagtgaggtataaagaggaagaatataaaagtggactttctgctctagatcatataaggcacttcacagatagcctcaaaatgaggaaaatggaagataatcaatattctgaagctgagctgtcttcttttagtacttcccatgtgccagaggaacttaagcagccgttacacagaaagtccaaatcgcaggcatatgctatgatgctgtcactgtctgacaaggagtccctccattctacatcccacagttcttccaacgtgtggcacagtatggccagggctgcggcggaatccagtgctatccagtccataagccacgtatgacgttatcaaggttgaccagagtgggaccaagtccaacagtagcatggctctttcatataggactatttacaagactgctgagcagaatgccttataaacctgcagggtcactcatctaaagtctagtgaccttaaactgaatgatttaaaaaaga

SEQ ID NO: 83572 - DNA, 801 bp, Homo Sapiens
cagtcgacggtaccggacatatgcccgggaattcggccattacggccggggatactcagtgggttcgcggccgccggcccagtgaggctgggttcgaggagctggagcgggaaactggagcttaaattctggcggcgagatggacattctgaaatcagagatccttcggaagcggcagctggtggaggacaggaacctgctggtggaaaataaaaaatatttcaagcgtagtgagctcgccaaaaaaagaagaggaagcatattttgaaagatgtggctacaagatacagccaaaagaggaggaccagaaaccattaacttcatcgaatccagtgttagaacttgaactggcagaggaaaaattacctatgacgctttctaggcaagaggtcatcagaagattgagagaaagaggagaaccaatcagactatttggagagactgattatgatgcttttcaacgtttaaggaaaatagagatcctcacaccagaaagtaacaagggattgaggaatgaattgaaaagcagccttggataaaatggatcagcagtacctcaaatgaaaatcgtcgggcggtcagcgaggcctgcgagaagagcacgacaacacaggacatgattctcgacacaggtcctgagcgaaaaacacccaccaatggaagacgtcaccagagccgcttgggcagaagccctgagggaaaagggcgagactcatcacagaacctggggccctcatcaaccagatcctgagatgcatactggccgtgggctaaaagaatggaatgcagaacacgaaacgg

SEQ ID NO: 83573 - DNA, 470 bp, Homo Sapiens
gcgcccgtggcgctatggaggcggcgctgctgggggctgtgtaactggagcacgctgggcgtgtgcgccgcgctgaagctgccgcagatctccgctgtgctagcggcgcgcagcgcgcggggcctcagccttccgagtttacttctggagctggcaggattcctggtgtttctgcggtaccagtgttactatgggtatccgccgctgacctacctggagtaccccatcctcatcgcgcaagatgtcatcctcctgctctgtatctttcattttaacgggaacgtgaagcaggccactccttacatcgctgtgtatcctttctgaatctgagccagaagtgggaacggggatgttatttgcgaatgaatctatgtactttcatcagcgcggccagtaagtttgcacagctccagtgtctgtggaagacgagagactcaggaactgtgagtgcgctgacttggagcctctct

SEQ ID NO: 83574 - DNA, 610 bp, Homo Sapiens
  misc_feature (79)..(79): n is a, c, g, or t
ggcatgtactatgaacagtggtacaaaaagcagggctggtaccggtccggaattcccgggatatcgtcgacccacgcgntcgccaggtgcccgcgcccgtggcgctatggaggcggcgctgctggggctgtgtaactggagcacgctgggcgtgtgcgccgcgctgaagctgccgcagatctccgctgtgctagcggcgcgcagcgcgcggggcctcagccttccgagtttacttctggagctggcaggattcctggtgtttctgcggtaccagtgttactatgggtatccgccgctgacctacctggagtaccccatcctcatcgcgcaagatgtcatcctcctgctctgtatctttcattttaacgggaacgtgaagcaggccactccttacatcgctgtatgggtgtcttcttggttcatccttgccctgcagaagtggatcatagacctggccatgaatctatgtactttcatcagcgcggccagtaagtttgcacagctccagtgtctgtggaagacgagagactcaggaactgtgagtgcgctgacttggagcctctcttcctatacctgtgcaattcttctacgttttgtgatcatgctggct

SEQ ID NO: 83575 - DNA, 549 bp, Homo Sapiens
tgcggccgcccaggtgcccgcgcccgtggcgctatggaggcggcgctgctggggctgtgtaactggagcacgctgggcgtgtgcgccgcgctgaagctgccgcagatctccgctgtgctagcggcgcgcagcgcgcggggcctcagccttccgagtttacttctggagctggcaggatgccgggtggggctgcgggaccagtcttactatgggtatccgccgctgacctacctggagtaccccatcctcatcgcgcaagatgtcatcctcctgctctgtatctttcattttaacgggaacgtgaagcaggccactccttacatcgctgtattggtgtcttcttggttcatccttgccctgcagaagtggatcatagacctggccatgcaagaataatcacaaccttaatgaccaccaatgattttacaattcttctacgttttgtgatcatgctggctgtaaatatatgggtaacagtgacagtacttcgctaccggaagaccgctataaaggctgaatgatggatacattattccttcacacagtgga

SEQ ID NO: 83576 - DNA, 595 bp, Homo Sapiens
  misc_feature (486)..(486): n is a, c, g, or t
gcggccgcccaggtgcccgcgcccgtggcgctatggaggcggcgctgctggggctgtgtaactggagcacgctgggcgtgtgcgccgcgctgaagctgccgcagatctccgctgtgctagcggcgcgcagcgcgcggggcctcagccttccgagtttacttctggagctggcaggattcctggtgtttctgcggtaccagtgttactatgggtatccgccgctgacctacctggagtaccccatcctcatcgcgcaagatgtcatcctcctgctctgtatctttcattttaacgggaacgtgaagcaggccactccttacatcgctgtaatctatgtactttcatcagcgcggccagtaagtttgcacagctccagtgtctgtggaagacgagagactcaggaactgtgagtgcgctgacttggagcctctcttcctatacctgtgcaacaagaataatcacaaccttaatgaccaccaatgattntacaattcttctacgttttgtgatcatgctggctttaaatatatgggtaacagtgacagtacttcgctaccgggagaccgctataaaggctgaatgatggatacattat

SEQ ID NO: 83577 - DNA, 989 bp, Homo Sapiens
ctaggtgttagagagtatgaagtcgacggcgcgccgaattcggcacgaggctcgacagggctttcccatcatctttcacggcgtaatgggcaaagatgagcgtgaaggcaacagcccatccttcttcaaccctgaagaggctgccacagtgacttcctacctgaagctgctcctggccccctcctccaagaagggcaaagctcgcctgagccctcgaagtgtgggcgtcatctccccgtaccggaaacaggtggagaaaatccgttactgcatcaccaaacttgacagggagcttcgaggactggatgacatcaaggacttgaaggtgggttcagtagaagaattccaaggcccaagaacgaagcgtcatcctcatctccaccgtgcgaagcagccagagctttgtgcagctggatctggactttaatctgggtttccttaagaaccccaagaggttcaatgtagctgtgacccgggccaaggccctgctcatcatcgtggggaacccccttctcctgggccatgaccctgactggaaagtattcctggagttctgtaaagaaaacggagggtataccgggtgtcccttccctgccaaactggacctgcaacagggacagaatttactgcaaggtctgagcaagctcagcccctctacctcagggccccacagccatgactacctcccccaggagcgggagggtgaagggggcctgtctctgcaagtggagccagagtggaggaatgagctctgaagacacagcacccagccttctcgcaccagccaagccttaactgcctgcctgaccctgaaccagaacccagctgaactgcccctccaagggacaggaaggctgggggagggagtttacaacccaagccattccaccccctcccctgctggggagaatgacacatcaagctgctaacaattgggggaaggggaaggaagaaaactctgaaaacaaaatcttgttctatgccaaaaa

SEQ ID NO: 83578 - DNA, 1554 bp, Homo Sapiens
  misc_feature (1413)..(1445): n is a, c, g, or t
ggcctgggtggcgaattcggacgaggatacttcaccacatcttcatcgatgaggctggccactgcatggagcctgagagtctggtagctatagcagggctgatggaagtaaaggaaacaggtgatccaggagggcagctggtgctggcaggagaccctcggcagctggggcctgtgctgcgttccccactgacccagaagcatggactgggatactcactgctggagcggctgctcacctacaactccctgtacaagaagggccctgatggctatgacccccagttcataaccaagctgctccgcaactacaggtctcatcccaccatcctggacattcctaaccagctctattatgaaggggagctgcaggcctgtgctgatgtcgtggatcgagaacgcttctgccgctgggcgggcctacctcgacagggctttcccatcatctttcacggcgtaatgggcaaagatgagcgtgaaggcaacagcccatccttcttcaaccctgaagaggctgccacagtgacttcctacctgaagctgctcctggccccctcctccaagaagggcaaagcccgcctgagccctcgaagtgtgggcgtcatctccccgtaccggaaacaggtggagaaaatccgttactgcatcaccaaacttgacagggagcttcgaggactggatgacatcaaggacttgaaggtgggttcagtagaagaattccaaggccaagaacgaagcgtcatcctcatctccaccgtgcgaagcagccagagctttgtgcagctggatctggactttaatctgggtttccttaagaaccccagaggttcaatgtagctgtgacccgggccaaggccctgctcatcatcgtggggaaccccctcctcctgggccatggccctgactggaaagtgtgagcattcccaccccattctccctcttagtggccacagcccctgcctagggcaggtggatcttttttaagcgcttgcttatcgctcagttaatcctcagatgtgtccattttcacagcatcactattgtatttataagttaaatgacatccagaggttgagcaagtacagctcagatgggacaggaccgtggcttagcctccagtctctgctggcactcctctgtaccccacagattcctggagttctgtaaagaaaacggagggtataccgggtgtcccttccctgccaaactggacctgcaacaggcacagaatttactgcaaggtctgagcaagctcagcccctctacctcagggccccacagtcatgactacctcccccaggagcgggagggtgaagggggcctgtctctgcaagtggagccagagtggaggaatgagctctgaagacacagcacccagccttctcgcaccagccaagctttaactgcctgcctnnnnnnnnnnnnnnnnnnnnnnnnnnnnnnnnnccaagggacaggaaggctgggggagggagtttacaacccaagccattccaccccctcccctgctggggagaatgacacatcaagctgctaacaattgggggaaggggaa

SEQ ID NO: 83579 - DNA, 457 bp, Homo Sapiens
  misc_feature (195)..(195): n is a, c, g, or t
ttcttaaggaaacccagattaaagtccagatccagctgcacaaagctctggcatttcgcacggtggagatgaggatgacgcttcgttcttggccttggaattcttctactgaaaccacctagtggggaaagaggcaggccctgagaccagccaggggtgtcaaagggtgccctaccccaggaagcttgccttccnaaggagggtacagagaggtcactgggcaattgtagatcagtgagtgaaccagtgctgcgacacggcccagggaaaggggatgggaggtaggctgtggaagctgaaacatgaaggttgaatcctgctgagggctggggcctgcaaagtgttctaaggaaagaaaacagcattgcaaagaacacgggaactcagagcagtgactttcaaactttcctgaaaacaatcactaagtatctgttaagaatatacaaccctgggccct

SEQ ID NO: 83580 - DNA, 588 bp, Homo Sapiens
ggtagtggttggctgtgggaccccggcacccggctccgcacctgaggggaaatccgctggaaagcactagggccaagcggctccggtaggcgcgcggcagagaggtggtccgccgccggcagccggggctttggtggccgctgaaggtttgcggcaggaggcctttgtgaagtcagtcggctccaggtcgccctccggatgcggtccccacaccgcctgcgtcacctgggttgaggggctcatttgaaatacagacttcgctacccaccccagcctgctgaatcggaaatgcagcggtgagccataggtgattattatgcacccttaaatttaagaattagtcattcggaggtttctctcaatggcgaacttgaaaataagttcaggaaaccagacaattggagcggaccgacagccctgattccaatggtaagagcagtgcgctgggtgtgatctttctgccagcaccttaaggcctcacttaacctcgggaccttagttgcatcatctatagaatgaaatgattgctctccgacctaccttctcgtggtggtgatgtgataataaaaattgaatagtgagcaaccc

SEQ ID NO: 83581 - DNA, 448 bp, Homo Sapiens
cgccgccggcagccggggctttggtggccgctgaaggtttgcggcaggaggcctttgtgaagtcagtcggctccaggtcgccctccggatgcggtccccacaccgcctgcgtcacctgggttgaggggctcatttgaaatacagacttcgctacccaccccagcctgctgaatcggaaatgcagcgggtagctgtcaatggctttggaagaaaatcccagagataacagaacattcttgctgcattatggaattaaatgatcttcttggcacagaggacaatgctatgggatgaatgagttggggaaatgaatgcctatgatgctgattttaaaaattattcaaaagagctggattctaaaagttgaatgaatactttatataacttatattttcctttttatacttgcacaagagtaaaatagaataaaaatcatttataaataaaa

SEQ ID NO: 83582 - DNA, 519 bp, Homo Sapiens
  misc_feature (138)..(150): n is a, c, g, or t
acataaccagttttccctctagagttggaacagattatagtttagtagctcaccaaataaagtacgtagcttgtatttaccagctatggtatataaaaatatgaatcattaaatgctagtataaagcagttagtcttnnnnnnnnnnnnngatccacaaaagggatgagtgggagataagattgaagcaaaattatagaaagttgtataccaggctgagggctttctgtgtcacttcacaggaagtaggtaaacaccgaaatttagtcagtgtcattattagagttgtgctttcataaaaagaatctctcaagtgtgacaaggctaaattagaaagaagagactggaggtagaggccagttaggagatccttgtaataatccacagttgatggaatgaggatctatagtagccaggctggaggtaacaaagagggacaggagggcaggagtactctactttaaagtagaatgaataggaccaacaaatgacttaaagggatttaaagaaaggagacatt

SEQ ID NO: 83583 - DNA, 612 bp, Homo Sapiens
  misc_feature (356)..(356): n is a, c, g, or t
agtagttggacaaaaagcaagaagctgatcgatgttgctggctttggattctttgtgaacaaatgagacaaggctgcaaattcagaggatcctcccagaagataagatggagcaggtcaccaccttcttccctgcttcacaccctcaggccccgactcttgtctgctgagatcactctccaaaccaatcttcccttacaaagcccttgttgcaggctatgctttctgaggggaacccaggccaagacactaaaatgacacaccaacatgaagacatgaacacaattgcaaagggattggttggattgcatatctctgtgaatgggactcaagagaagttttgggaaaatgctgganccagatgacccttgcaatcatggtgcacagaattaaaaccgtcaagttccccatccatctctgagatggatgagaatctgagtcttccacaagatgcccaagacttgttaaacccgtggaatgtctttgggtatgtgtgacatcaacaagaagcagcagacaaaacaaaatattttcacaaacattcagaaatccctaaatcttgtgagttgtcgtatcatttgtagatataattataaaatggcacatgatgctg

SEQ ID NO: 83584 - DNA, 968 bp, Homo Sapiens
cgggagccctgaccctgcaccctacctccgtcattccctcgctcctccttcccgatacccgggccagcagggccagggcgatgtctggtgccggggaaccaagcggcggagcagcagctttgccagaagggatccttggcccaggagaactgggtttctcggcctcttttagccagagctgccgaagatggaggagtccccagggggactttctgaaccttacctccgggctgtttgctcggccaggacccagatcagatagtccacggcccagatgtacccaggagtggcgggtgggggaggagagagaaggggacacccagtctttagacacatctgtgtttctggagcaaagggaaaccacagaaggccaggagtttgggtgtgcactgggtgtctttcaactgggtggaaccaaactgagtccttgaagtctcgctcctgaggctgcagaagaatagatggcttttccctgcctcgagggtgggataagggaggcaaagctgggagaaagaaagggagagagagaaaacgaatggccggcacaggtgcctgggccccagccttcaagtgcggtcagagcagatccggtggcggagtagggcctagatgaccacggactgcaggaggcggaagcacatcatgaggtccagcgggatgggcggcttcaagtagtttccatccagccgcaggtagcgcaggtgtggcacgttctccaggtccgaggagaagtcatggaacgccactaggtcgttggggcaaatctgggttccgttgattttctcgatgctattgttgttgaggtacaggtgttccagcctgttgttgatggcgggcacactgctgatcctgttgtgggacaggtggagcacaagcaggttggagatattaaaggagttcttggggagtcccctgtctgtcagcttgttgtagttaagccggattgaagcaagattgggaaagcttct

SEQ ID NO: 83585 - DNA, 440 bp, Homo Sapiens
  misc_feature (23)..(23): n is a, c, g, or t
  misc_feature (123)..(139): n is a, c, g, or t
ctgcccgcccttcctaagttatncgcctgcgagccggagagacaatggagagaactgcagaggccgagtggcgaccaggccccaagcggaaggccattttccctgctcttcctcagttgtccnnnnnnnnnnnnnnnnntgctgcgaggaatggagaaaccaggccctttagaggatcccagagagggaagagaaccaggggcccttttctcttttagaattttcttttaatcagcccaccttttgactccccgcccgccccaatccattatttttttctgccttccgggtcccatccttagagctcgagtcgttccttcccctcctggattccgggtagcagaggcagcgcgcaggaggcgggtgcccgtttgtcccaggcctgggcgtggtggaggaaggggtgctggaacaataaacggcactatccaaatgtcaaa

SEQ ID NO: 83586 - DNA, 440 bp, Homo Sapiens
  misc_feature (224)..(224): n is a, c, g, or t
cctgacaaggttgattttgtgcacaagcgtgtaaaagaagccgactccctcttggtggtgggatcatccttgcaggtatactcggggttacaggtttatcctcactgcctgggagaagaagctcccgattgcaatactgaacattgggcccacacgggtcgggatgacttggcgtgtctgaaactgaattctcgttgtggagagttgctgccttttgattagancccatgctgaccacagcctgatattccagaacctggaacagggactttcacttgaatcttgctgctaaatgtaaatgccttctcaaatgacagattccagttcccattcaacagagtagggtgcactgacaaagtatagaaggttctaggtatcttaatgtgtggatattcttaattaaaactcattttttttaaataaaaaattgttcagcttta

SEQ ID NO: 83587 - DNA, 1240 bp, Homo Sapiens
aaggcttagtacgaggcctggtttgaattcggcacgaggctgcgagaccggcctggacctcaaggtcatccacttggtgcgtgatccccgcgcggtggcgagttcacggatccgctcgcgccacggcctcatccgtgagagcctacaggtggtgcgcagccgagacccgcgagctcaccgcatgcccttcttggaggccgcgggccacaagcttggcgccaagaaggagggcgtgggcggccccgcagactaccacgctctgggcgctatggaggtcatctgcaatagtatggctaagacgctgcagacagccctgcagccccctgactggctgcagggccactacctggtggtgcggtacgaggacctggtgggagaccccgtcaagacactacggagagtgtacgattttgtgggactgttggtgagccccgaaatggagcagtttgccctgaacatgaccagtggctcgggctcctcctccaagcctttcgtggtatctgcacgcaatgccacgcaggccgccaatgcctggcggaccgccctcaccttccagcagatcaaacaggtggaggagttttgctaccagcccatggccgtcctgggctatgagcgggtcaacagccctgaggaggtcaaagacctcagcaagaccctgcttcggaagccccgtctctaaaaggggttcccaggagacctgattccctgtggtgataccttataaagaggatcgtagtgttgtttaaataaacacagtccagactcaaacggaggaagcccacatattctattatagatatataaataatcacacacacacttgctgtcaatgttttgagtcagtgcatttcaaggaacagccacaaaatacacacccctaagaaaaggcaagacttgaacgttctgaccaggtgcccctcttcttctttgccttctcttgtcctctttctcctatttcttaccctgtcctccacctgccttccattttgaagtgggatgttaatgaaatcaagttccagtaacccaaatcttgtttacaaaatattcgtggtatctgtgaacatgttaagagtaatttggatgtgggggtgggggtggagaaaggggaagtggtccagaaacaaaaagccccattgggcatgataagccgaggaggcattcttctaaagcagacttttgtgtaaaaagcaaaggttacatgtgagtattaataaagaagataataaataatattcttttt

SEQ ID NO: 83588 - DNA, 1036 bp, Homo Sapiens
  misc_feature (617)..(635): n is a, c, g, or t
  misc_feature (771)..(779): n is a, c, g, or t
  misc_feature (890)..(900): n is a, c, g, or t
cctgagacttctataactaattgctacaagcatgctagcttaaattaacagatttattctgttggttcccaaagtcactaggaattgagtgtggataaactcacagggctggcctaattgtattttctttgaaggataaaaagcttctctaaaaggttcatattctttgactcagcaattccacttacaggaattttttaagagcaattacacaatgatagtctttatctcattgaacactcactgcaatttcgatggtctcattcgttcattgagcatatttattaggtgtgtcttccaagggtcatcccattcgggacttaatacagctggaaacagtggtggcccgccccaaccccagtgggagctcacctcccagtaggtctaaactgggtttgattgagttccatgggaaaacaacaaagtgggggtaagggggaaaagtagtggggagctgagggggtcagcatgacatggaagcagaaatcaagagacaaggctttgtggggtgtgggtgtgggtccaagtgccaagggccagggagctttgtagagtgtgtggctatgtttctcagtgtttcctcataggtggttaactaatacatttgttcatgcgtnnnnnnnnnnnnnnnnnnngtgaagaataaatcagtggaatctcacgacgaaagcagaagggtgtagaagaagggccaaagcatgtaaagctgaaaaaaaaggatatttgttagaagacccccctaaccctccgaagaaaattctttaaacccannnnnnnnnggcccccccggatcccccaccaggaaaaatgaaaccggggccttaattgtgttctcccaacgaaaaacccccgggcacagaacaaaagagggtgtggtttttttccccacnnnnnnnnnnnccgcccccgggggagaaattaaagagcgattttttgaacaaaaactcctcaaaggggggcctgctggaggggcccctcttcttgggggggttttttttcaacaccagggggggtttcgcacgcggcggagccccct

SEQ ID NO: 83589 - DNA, 1059 bp, Homo Sapiens
  misc_feature (182)..(182): n is a, c, g, or t
  misc_feature (426)..(427): n is a, c, g, or t
  misc_feature (441)..(452): n is a, c, g, or t
  misc_feature (583)..(606): n is a, c, g, or t
  misc_feature (726)..(738): n is a, c, g, or t
cagtcgacggtaccggacatatgcccgggaattcggccattacggccggggcttttctttgtgttaagagggacttgcctctgtaaatgaaaatgacaatgtgcttttcttgtagttgactttcatgtcactcactataaaataggtctcttaacctggcaccagtataactataaagcacntagctgagaaggaactgatacttacatttcatggacagcattaacaagaatgagataaatttgtactttttagatcaaaacaaattacctaattgcaaaagagaaactgaaatggaacatagtctcagattcttctaatgtgtatctcacaatgtcatgtaatgtaaaggaaacccttttggaattagaattcttgttctgatgctgaactatttggtaataaagtgcttatttgcagatcccnnccccaaacataccnnnnnnnnnnnntaaccttgccggccccctgggccttcaaaaagttttcaaaacctttctttgggcgcccggccccataaggaagggaaactgggccataccggttcccaaggaaacccgggccagaataaggggttggattnnnnnnnnnnnnnnnnnnnnnnnnggggggaacccgaacggtttcttgaaccaattccagaagggaatttcccgaagggtctttacccggggacccttatcaccggggaggccccaagcgaagcctcgaaattccaaaattatnnnnnnnnnnnnntgggcacttcatttcgaaagaactgggtgggaaatcccctttaagcaattcctggcccaacatggggaaaccccttccccaaaacggggacatgaatgaaaccccttgaactcccccagggcgggaattcaaacacaccctttgtccgccccttgggggaaataaaaatttttcgccccgtggtgtgagaaaaacggggggcggcggcaaaaaaacaccttcccccatttatggggccacccgttttatatattccaacaccctgtgggtgaaacctctccccccccgggacatcgcgctttgtaaaacacccacaccacc

SEQ ID NO: 83590 - DNA, 896 bp, Homo Sapiens
ggcacccgaggagcggcccgcggccctgggccggctgggcctctgcttcggcgtcggagtcatcctcggctccctgctgggcgggaccctggtctccgcgtacgggattcagtgcccggccatcctggctgccctggccaccctcctgggagctgtcctcagcttcacctgcatccccgccagcaccaaaggggccaaaactgacgcccaggctccactgccaggcggcccccgggccagtgtgttcgacctgaaggccatcgcctccctgctgcggctgccagacgtcccgaggatcttcctggtgaaggtggcctccaactgccccacagggctcttcatggtcatgttctccatcatctccatggacttcttccagctggaggccgcccaagctggctacctcatgtccttcttcgggctcctccagatggtgacccagggcctggtcatcgggcagctgagcagccacttctcggagaaggtgctgctccgggccagcgtgctggtcttcatcgtggtgggcctggccatggcctggatgtccagcgtcttccacttctgcctcctggtgcccggcctggtgttcagcctctgcaccctcaacgtggtcaccgacagcatgctgatcaaggctgtctccacctcggacacagggaccatgctgggcctctgcgcctctgtacaaccactgctccgaactctgggacccacggtcggcggcctcctgtaccgcagctttggcgtccccgtcttcggccacgtgcaggttgctatcaatacccttgtcctcctggtcctctggaggaaacctatgccccagaggaaggacaaagtccggtgaccgctgcccagacacagactggcaataaactcctactaaatccctccgaaaa

SEQ ID NO: 83591 - DNA, 489 bp, Homo Sapiens
ggtgcgccagctgctcagcgccttcgccgccctgctggaggacgcgctgcggcaccgaggcggtgctggccgcgctcttcggggaggaggtgctggaggagatgtctgagcagacgccgggaccgctgcccctgagctacgagcagatccgcgtggccctgcaggacgccgctagcgggctgcaggagcaggcgctcggctgggacgagctggccgcccgagtgacggccctggagcaggcctcggagcccccgcggccggcagaacacctggagcccagccacgacgcgggccgcaaggaagccgccaccaccgccctggccgggctggcgcgggagctccagagcctgagcaacgacgtcaagaatgtcgggcggtgctgcgaggctgaggccggggccggggccgcctccctcaacgcctcccttgacggcctccacaacgcactcttcgccactcagcgcagcttggagcagcaccagcggctct

SEQ ID NO: 83592 - DNA, 483 bp, Homo Sapiens
actgtaaaatcctgtttaatgtgtaacatttcaggcagagagaggccttggggactagaggcagaggtggccttgaccaacccctgctccaacttatctgcctgcttctctctccctaactccctcaccccagacacctcctccttttccttgtggccagcaagcactattcctcctttactagtgctggccaccctcccttctccacccacatgtccacagcacccctgccctctgctcctcttacccacatccctcctcactgatgtgactccagaaacagggtatctgacagcacagggttaagattagtttcataattggagacgctgtcggagcatcccatctcttgtacccagtggtcccagagatgagggagagggaagagggaagggtgcaggcaacaaggggcagcccaaacttccagtaaccttgagcactggcataggtggcctctagctccccacccctccagctcctcaa

SEQ ID NO: 83593 - DNA, 484 bp, Homo Sapiens
  misc_feature (25)..(25): n is a, c, g, or t
taacacactggaaataacttttaanagctgctacatttttattgctgagaaattattgtacttctttttaaatatatgctaaaggggagcgtaaacttaaattctctttaatttgctcaaccagaggatataatttaaagaaattggggtttaccaagattttccatttgtcctccaacacagccttggcttgataataagcatacagtatttggacgagtgactaaaggaatggaagttgtacagaggatctccaacgtcaaagtcaatcccaaaacagataagccctatgaggatgtcagcatcataaatattactgtcaagtaaaataagatttgttttaatgtacttgcaaataaaaatacaatattaaacagattattttacattaggaagcttaggacttgctgaatatacagatcatgtttcaaagatacagtatttttgtattttttattaaaggctattttttaaaaattaaaca

SEQ ID NO: 83594 - DNA, 937 bp, Homo Sapiens
  misc_feature (780)..(780): n is a, c, g, or t
  misc_feature (798)..(798): n is a, c, g, or t
cagtcgacggtaccggacatatgcccgggaattcggccattacggccggggaaaagtgcagattctgatcgagatgtttttaatgagaaaccttctaaagaagaagtcatggcagctactcaagctgaaggacctaaacgagtttcggacagtgccattatccacaccagcatgggagacattcacaccaaactttttcctgttgagtgccctaagacagtggaaaacttctgtgttcacagcagaaatggttattataatgggcatacatttcaccgtataattaagggctttatgattcagactggagatccaacaggtactggtatgggaggagaaagcatatggggaggagaatttgaagatgaatttcattcaacattacgacatgacaggccgtacacactcagcatggctaacgcgggatcaaatactaatggatcccagtttttcataacgggagtaaccaacgccttggcttgataataagcataccagtatttggacgagtgactaaaggaatggaagttggtacagaggatctccaacgcccaagtcaatccccaaacagataaatccccctatgaggatgccagcatcataaatatgactgtcaagtaaaataagatttggctctactggacttgcaaataaaaataccatattaaacagattattttttactttaggaagcttaggacttgctggatatacagatgctggttccaagaatacgaattttgggatttttttaataaaaggtattttctaatttcccgngaaacacagccaaatttncccctttgtggccccctccggcctcgaaaagtttttaaaaccttcccttgggcggcggggccccttaaggtaagggaaccggggccaaacttgtttcccagggaaaccctggcatgaacaaaggccttggagtcccacc

SEQ ID NO: 83595 - DNA, 960 bp, Homo Sapiens
  misc_feature (794)..(794): n is a, c, g, or t
  misc_feature (820)..(820): n is a, c, g, or t
  misc_feature (827)..(827): n is a, c, g, or t
  misc_feature (859)..(859): n is a, c, g, or t
  misc_feature (921)..(921): n is a, c, g, or t
gttaagggctttatgattcagactgggagatccaacaggtactggtatgggaggagaaagcatatggggaggagaatttgaagatgaatttcattcaacattacgacatgacaggccatacacactcagcatggctaacgcgggatcaaatactaatggatcccagtttttcataacggtagtaccaacggtaagtacagtatcattgtttataaactacagattgataggttatgatgtaagagagtgaactcagtagaagagctgcattattctgtattttctgcattatttatatcatctagcagaatacaaatatgaaaatgatcaagaatataaaattatgtgactaatcagtttagaattggtaaaacaatactgccactgtagtaagaaatacaatggactacgattcaagatacttgagtttcaatctcaactctgcctctactgatgatgtaacctaaaataaattatttcacttctgtgagcctatttccttgtctttagaatacaaagattagagtatatgaattcacaattttgagacaatttcccccacattttagtatctctgaaatcagaatacattagatttgatgaaatacagtataaggtaacctagctctattgctatgccataacacaaaattataaaaattacctagtttttgtttttggatcaagcactaagtgatgaagaaggaaaaatggtactacatctgccaggcacatagttttatgtagtatcacagtactctactatcagtatcccagtttttcatatagatgangaacagtgagacatgatacttgccanaggtcangtagcagcagcattgactccactgtctatgcnaagtagtgtgcaaacattcaactgctctgataatgtcagtagatctccaaactttaagctancacatcgtagcagtgatactacttaggagtctcatcctt

SEQ ID NO: 83596 - DNA, 599 bp, Homo Sapiens
gcggccgcagcctgagccagggccccctccctcgtcaggaccggggcagcaagcaggccgggggcaggtccgggcacccaccatgcgaggcgagctctggctcctggtgctggtgctcagggaggctgcccgggcgctgagcccccagcccggagcaggtcacgatgagggcccaggctctggatgggctgccaaagggaccgtgcggggctggaaccggagagcccgagagagccctgggcatgtgtcagagccggacaggacccagctgagccaggacctgggtggggcaccctggccatggacacgctgccagataacaggaccagggtggtgaggacaaccacagctattatgtgtcccgtctctatggccccagcgagccccacagccgggaactggggggtgatgtggccgaggccaaccggagccaagtgaagatccacacaatactctccaacacccaccggcaggctttgagagtggtcttgtcctttgatttccctttctacgggcatcctctgccggagatcaccatagcaactggaggctttatctttatgggggaactgatccctcggatgcttacaactactcaa

SEQ ID NO: 83597 - DNA, 585 bp, Homo Sapiens
  misc_feature (69)..(69): n is a, c, g, or t
  misc_feature (223)..(223): n is a, c, g, or t
  misc_feature (245)..(245): n is a, c, g, or t
  misc_feature (390)..(390): n is a, c, g, or t
agaattcggcacgaggctgacctctgtgcacattttccatggctgccacttcagccagcgcagcgaggntaaagaacgcagacacggcaggcatttctggagtactgctccgcgtctcccatgatggacagccaaaagaaatgccgcaggctcctgtacttatttcctgcgctgaccagtgaagcgccctttcattgtaaaacattgtgctttaccctactanccctagccttgtctttaaccgnagggatgctagtgaagtccaagtggtggaaaatattagactgcaaacaaagtgcttgttgccccacacggccccagattcactttgaagcagaagttagcatcctgggccagtttgttctctcagaacccagaatctttgagggntaaggttatctgtctgatactgagcagaaacagaatgatcctggagctttgctttctattgaaggcttttgacggtaataggtggtaacttggtaaaaggctgcctttactgtagctcacccagcatctcttttaccaaccagagagtgtgaaactagtttcatatattacctagttattctttcaaaacaaaac

SEQ ID NO: 83598 - DNA, 484 bp, Homo Sapiens
  misc_feature (423)..(423): n is a, c, g, or t
  misc_feature (472)..(472): n is a, c, g, or t
attcatggtactgttctaaactggaaggacaggccctgaaaggaaaacaacttggccaaagagatgaaggaatgaattgatacgggaaaagaacagaagacatgcgtatcttttaacttctagaccccatacccctcaaatagttcacctgaatagtccaaaaatcaagaatgggttagatatacttgttccaggagtgccaaataaatataatgcctgtaaacagatgatcccagtgcctgactgaatgtatagaaagaaaaacctaaaggtaaagggtatgaatgattaaaattttctacagagaaaactttttaaaaacaaactaagtatgaaatataactatatttagggattatatttagggattaaaataaaggagcagctgggcatggtggctccatgcctgtaatccccaacacntttggggaggcctgaagttgggccgatttccctgagcctcaggagttcngcgaccagcctg

SEQ ID NO: 83599 - DNA, 596 bp, Homo Sapiens
  misc_feature (71)..(71): n is a, c, g, or t
gttaggaatggtgcgccacaatgtaaagtgaccacgtttaaaatgtacaatggtggaaaaggccctttatncttggaatttcactaggcattcaattagactaggcccaagcctgcatgctcacagaaagcacactatattcagggcaattagcagttaatagggcttaaaacccatatggtaatggttagtggtatattacaatcattttatatttttttacatgttaacattcacttatggattcatggtggctgtataaagtgaatttgaaatttcaatggtttactgtcattgtgtttaaatctcaacgttccattattttaatacttgcaaaaacattactaagtataccaaaataattgactctattatctgaaatgaagaataaactgatgctatctcaacaataactgttacttttattttataatttgataatgaatatatttctgcatttatttacttctgttttgtaaattgggattttgttaatcaaatttattgtactatgactaaatgaaattatttcttacatctaatttgtagaaacagtataagttatattaaagtgttttcacatttttttgaaagac

SEQ ID NO: 83600 - DNA, 634 bp, Homo Sapiens
  misc_feature (44)..(44): n is a, c, g, or t
  misc_feature (386)..(386): n is a, c, g, or t
  misc_feature (560)..(588): n is a, c, g, or t
gcgcaatgaaggtgaaggccggcgcgctcgccggccgaggtggnatcccgaggcctctccagtccagagcctacctcagcagcctccgtaacagctgccctgcctacacctgcagagctggaggttctgtcctccctgctgctctcaggagtgttcaagggtggagggcagggaatggggcctgaggtattaaggctaagaagtgggggacagggcccatctaccagccttcatcaggaagggaaagggctttggggtcaggtggcaagctattccccacccaagagattcaagggtcacaaggtttttccccacacctctgaactcagggcctagccacccccaaacttccaaatcccacttttgtgatatgtgaagctaatcantttcttacccttggaaggctgtgtggggaatttccagcccttttatgcctgtgtgatcccaccccacccccatagttgtataaaggtcatagtgaagaagctgggggaagactgcttcagccagatcctggggtggggtctttaggttttctcactttgacaacccccgaatgnnnnnnnnnnnnnnnnnnnnnnnnnnnnngtaatgacagtattatgtaaaaaataaagtattttaaaaatatggc

SEQ ID NO: 83601 - DNA, 1910 bp, Homo Sapiens
  misc_feature (1075)..(1136): n is a, c, g, or t
  misc_feature (1330)..(1341): n is a, c, g, or t
  misc_feature (1345)..(1383): n is a, c, g, or t
  misc_feature (1430)..(1502): n is a, c, g, or t
  misc_feature (1555)..(1677): n is a, c, g, or t
  misc_feature (1685)..(1836): n is a, c, g, or t
taggtagcgaggcctgggtggcgaattcggcacgagggcagcgcgcgcagcctgcggagccagcggccgtgacgcgacaacgattcggctgtgacgcgacaacgattcggctgtgacgcgagcgcggccgctcccgatgcgctcgtgccgcccccgccgtgctcctcggcagccgttgctcggccggttttggtaggcccgggccgccgccaggcctccgcctgagcccgcacccgccatggacaactacgcagatctttcggataccgagctgaccaccttgctgcgccggtacaacatcccgcacgggcctgtagtaggatcaactcgtaggctttacgagaagaagatcttcgagtacgagacccagaggcggcggctctcgccccccagctcgtccgccgcctcctcttatagcttctctgacttgaattcgactagaggggatgcagatatgtatgatcttcccaagaaagaggacgctttactctaccagagcaagggctacaatgacgactactatgaagagagctacttcaccagcaggacttatggggagcccgagtctgccggcccgtccagggctgtccgccagtcagtgacttcattcccagatgctgacgctttccatcaacagggtgcatgatgacgatcttttgtcttcttctgaagaggagtgcaagaatagggaacgccccatgtacggccgggacagtgcctaccaaagcatcacgcactaccgccctgtttcagcctccaggagcctcccgggacctggcctattatcctactgcctcctccacctcttttatgtcctcctcatcatcttccttttcatggctcacccgccgtgccatccggcctgaaaaccgtgctcctggggctgggctgggccaggatcgccaggtcccgctctggggccagctgctgcttttcctggtctttgtgatcgtcctcttcttcatttaccacttcatgcaggctgaagaaggcaaccccttctagagggagccatgagggtctgggcttcagagctaggtctttggggaagtcctggctgactgccttagcagtnnnnnnnnnnnnnnnnnnnnnnnnnnnnnnnnnnnnnnnnnnnnnnnnnnnnnnnnnnnnnntagcccagagtagtgcttgctccccctgccttgtcccaccagggaggcagcagactcaggccctccatggtcctctttgtcattttgttgacatgcattcctccttttgtcatcttgttggggggaggggattaaccaaaggccaccctgactttgtttttgtggacacacaataaaagccccgtttatttgtnnnnnnnnnnnnggcnnnnnnnnnnnnnnnnnnnnnnnnnnnnnnnnnnnnnnncatggtcatagctgtttcctgacccagctttcttgtacaaagtggtnnnnnnnnnnnnnnnnnnnnnnnnnnnnnnnnnnnnnnnnnnnnnnnnnnnnnnnnnnnnnnnnnnnnnnnnntgcagtacccgggaatttaacccgcctaatgagcgggcttttttttgtgatcnnnnnnnnnnnnnnnnnnnnnnnnnnnnnnnnnnnnnnnnnnnnnnnnnnnnnnnnnnnnnnnnnnnnnnnnnnnnnnnnnnnnnnnnnnnnnnnnnnnnnnnnnnnnnnnnnnnnnnnnnnnaactggcnnnnnnnnnnnnnnnnnnnnnnnnnnnnnnnnnnnnnnnnnnnnnnnnnnnnnnnnnnnnnnnnnnnnnnnnnnnnnnnnnnnnnnnnnnnnnnnnnnnnnnnnnnnnnnnnnnnnnnnnnnnnnnnnnnnnnnnnnnnnnnnnnnnnnnnnggggttggactcaagaacgattagttacccggataaagcggcaacgggtcgggccttgaaaccgggggggtttc

SEQ ID NO: 83602 - DNA, 214 bp, Homo Sapiens
aattattctttaactttagatactgccaatctgatttaaaattctccaagcttaattctgtgcaacaaacagaaccacacaagcagccaggcactgtggctcactcctataatcccagcatttttgaggctagatgggaagatcacgtgatctcaggattttgagaaccatccggacaacatagggagacctcatcgctattttaaataatttt

SEQ ID NO: 83603 - DNA, 847 bp, Homo Sapiens
  misc_feature (122)..(163): n is a, c, g, or t
  misc_feature (751)..(751): n is a, c, g, or t
ttgtgttggagtctggctctgtcactgagtgcagtctgttaactcctgggttcaagcaatcctcctgcccccgtctccccagtagctaggactataggcatccatctccatgcccagctaannnnnnnnnnnnnnnnnnnnnnnnnnnnnnnnnnnnnnnnnnggtctcaagagctgcatcgttgtaaacctaacaatctctctttccattcactcaacaaacataatccactgtatgtctgtgtaccatcaatgatctctatagaatggataaaatatcaggatgttctagttttattagaaacaatgtttcaaggaaccacctgtactgaggacaaatgctgaagaaaaattcatagcagaaattcaaatagaaaaggtttattaaagtttagtaaaaaatactgataaactgtcctcttaacagtgtttaacactgcctctttccttacatccttttgaaaaatcttctttaatctggtaacatttttcatctttctcccttatgaattataattttaaataacacaacttatttgtaatgattctgaacagactctttaaagcttgtattatagttcttcctcagagcagttgctagacagcataaagaagaaatactcaagccagggaaacatcaatgcaaatgaatgtgtactaagtgttttgagaggaaagaacaagctgccatacctgctctaggaaactaccagataaataactgctcacatttccctacctcattcgcaancattggctctgttctgaagagagagctggtcagctcaactgaaagccgtttcttgtaatcttgtggcttgtcctcagacattcggaacaaaacagc

SEQ ID NO: 83604 - DNA, 639 bp, Homo Sapiens
  misc_feature (43)..(43): n is a, c, g, or t
tggtcttataggtcacaaataaccagtaagaaatgtatcagcntgatacctgtgaatgggcgaccaagaacaggactcaagacatctcagtgttcttcaccgtctcttacagcatcacaggcaagtcccacacgaccacagatacggcaaaagatagaggaataaaccccttcaagaacaactttctgttaaccaaattaaaactgaacctgtggattatgaattcaaacccatagtggttgcttcaggaatcaactgttcaacccctttacaaaatggggttttcactggtggtggcccattacaggcaaccagttctcctcagggcatggtgcaagctgttgttctgccaacagttggtttggtgtctcccataagtatcaatttaagtgatattcagaatgtacttaaagtggcggtagatggtaatgtaataaggcaagtgttggagaataatcaagccaatcttgcatccaaagaacaagaaacaatcaatgcttcacccatacaacaaggtggccattctgttatttcagccatcagtcttcctttggttgatcaagatggaacaaccaaaattatcatcaactacagtcttgagcagcctagccaacttcaagttgttcctcaaaatttaaa

SEQ ID NO: 83605 - DNA, 601 bp, Homo Sapiens
  misc_feature (357)..(357): n is a, c, g, or t
  misc_feature (463)..(463): n is a, c, g, or t
  misc_feature (470)..(470): n is a, c, g, or t
  misc_feature (472)..(472): n is a, c, g, or t
  misc_feature (495)..(496): n is a, c, g, or t
  misc_feature (500)..(500): n is a, c, g, or t
  misc_feature (544)..(544): n is a, c, g, or t
  misc_feature (571)..(573): n is a, c, g, or t
agacaaagaattactgtgatgcccactctgaaactcaaataaggaaaatgtgttgatttctgatatgcccctttcaaatcatgatccaaagaggtgcagtgaaaaacaacagacaaaaaccaacaacaaacaagacttcccacttatactcttctcgatgatggaatttgtggagaattctctccctctctgcgcttgagattccttgatggtaaaatgagggagtctggactagatgatcttcaaggtcccgtccagcttggtatgttctgggataaagttacctgacccaactaacaggtacccagtgaagtgtccttgctcagcttctctaagaccactttgactgggctgtangacattgggaagatcttcttcaccagaccggcgttacccatgtgcccgtatgaccggtctatgaaggccggcagaagccggcatctctcgctgctgctcatcaatntgcttgncntgtgtcctacagctggacatagnngggnccgttttcttttttccctgaatgcaagccttacaattatttaanagggttaatttctgagtcttcaggggnnntcagggcttctggttccatcaccaccaa

SEQ ID NO: 83606 - DNA, 313 bp, Homo Sapiens
  misc_feature (13)..(13): n is a, c, g, or t
  misc_feature (26)..(26): n is a, c, g, or t
  misc_feature (37)..(37): n is a, c, g, or t
  misc_feature (56)..(56): n is a, c, g, or t
  misc_feature (99)..(99): n is a, c, g, or t
attatatattaantttttaagccaantttaggtgggnatctttccctgaccaaatnttattttaatgaaaaaacttttctattaatagttcacgcaagngaaaacactttcaacatagtcgaaggcttcaagatctaagtgtatcagacttagggaaaaagtggcacaaccttcgatttaaaattctagtctttaaaatgagtttgtaaataattagctattacgttctattaagttgttttatattttaattttctggaagacaattttattttacaacgtgaacccaaataaagtaacttctgtatttaaa

SEQ ID NO: 83607 - DNA, 707 bp, Homo Sapiens
  misc_feature (358)..(375): n is a, c, g, or t
aaaatcttatttctgcaatttttacaaaagcctgttaccatatgaacacatatccatcgagccctctatattattagagcacaggaagagggccctgtaggtgaggaaccttgaagtctaagtttcagtagtgtcataagtccacccctggatgggactctcaatttccagaataaaatggtaaactagaagcagaataactgagttatgtgaggaaagtaaagcccaaggatcttgaaagaatctaccagggtagaggaagtatgaggcatacaaatgggatgactgcatcccaggagagaagatggcagagagttcgggtgcctagaaaagggagagtttgtaaaattacgtggcnnnnnnnnnnnnnnnnnngtagacagacacaacactgattcccttagggaataatggaggttgtctaggaagtacagaaaaggacctgtcttcttcccaccccatccctgagttgttcttcatcttctgataatgctgcctccaattttaagtcttttaccctaatatgtttccacccccagagctccccttctcaatttttcttagtagaatgtttgatttatttctgagtctttacaataaatcaattatataaggaatggtgagggatgaattctagaagagggtgatgcatggaaatttctaagtttagagaaagggaaaattggagtatttaaacctgaagaagg

SEQ ID NO: 83608 - DNA, 481 bp, Homo Sapiens
  misc_feature (371)..(371): n is a, c, g, or t
  misc_feature (426)..(426): n is a, c, g, or t
  misc_feature (443)..(443): n is a, c, g, or t
  misc_feature (456)..(456): n is a, c, g, or t
gtccgcagagctgcagccttcgagggccagccctctccgagtccggggctgggtcccaccagtgacaaggcggcacccagcgcacaccaaagagaaggcggctgtggcggcagcggcagcccaagccatgctgtgttatgtgacgaggccggacgcggtgctgatggaggtggaggtggaggcgaaaccaaccgcgacgcgactgcctcaaccaggtgtgcaggcgactgggaatcataagaagttgactattttggactgcagtttacgggtagcaaaggtgaaagtttaatggctaaaacctgagaaaccggatctcccagcagatgggatggggctaagcccctttacaaggctttaaactttagaantcaagttctttcgttggaaccttcatcttcatctttacaaggagcaagacttaangcataatcctttttccnttgcacattcaangaaggccccttttggaaaggccacc

SEQ ID NO: 83609 - DNA, 529 bp, Homo Sapiens
  misc_feature (30)..(30): n is a, c, g, or t
tgatggaggtggaggtggaggcgaacaacngggaggactgcctcaaccaggtgtgcaggcgactgggaatccatagaagttgactattttggactgccagtttacgggtagcaaaggtgaaagtttatggctaaacctgagaaaccggatctcccagcagatggatgggctagccccttacaggcttaaacttagagtcaagttcttcgtggagcctcatctcatcttacaggagcagactaggtaaagtgagctaaaataaaccaatgtcaaattgacctttggttccctttagaaggcccgctgcaccttcccagagatactcacaggcaagtttgttttgatgcggagttccatcttaacttaggttttccatgcaggtccttttgttgaggtggagggggagctacctacttggtccgagtgcattttccaatccttcttttagtttttcttgtctttataaacttgatgggtgagcagggttgaattcttacaaacacttgagataagtgctaccccaggaaaa

SEQ ID NO: 83610 - DNA, 1162 bp, Homo Sapiens
  misc_feature (1009)..(1009): n is a, c, g, or t
tgacgcaccgcacccggcccccttccttcgtcttagtcaatcctatcccacctcttcttccaccagtcccctcacctgatggtcccaacacttcatcatccaacacctcctggagggggtaccccaaggtgctccgctggggactctgctcattctggcggtgcggttgacggctggtcgtgatctttcccgtaatctgtcccctcttacggaacctagtctccgttctgtccatggccttccttctggacactgctaggatccagaagagtatgttatcaattctcaagcctaggagcaagtcaggagtagaagaacagctctgagaagatactgtcgtccaactgatctccaggcaccacggagtccggtccctccaatcaggaaggtcggaatctctgatgtcatcgctcatgccaacctggcaaccagtttgaaaaaaaacacatgtaactgccaggctgatctcttgtcctggagatcctgggtgaatggtatctcctgccactgtcccaacctcagaccattgtccaaaagcatcttcagggactccacatccctctgttccctgtcccagcagaggctgtgtcctctccactcaaagcctgaagcatgttggggtctcctcgtctctgtacatgcccatttcagagtccagtctggtgggagagggaacagaatgggaaagaaaactagggtaagcagaaacgatgaaaccttataagagtgagattatcatgtacaagagtgagattatcatgtacaagagtgagattaccatgtacaagagatcccaggaatactgacttgatgaaaaagtcacatcagagcactcagtttggcagagattttctgccgaatgtttactcacattcactgtccgagattctatactgggggtacacacgtcctctgccctaaggcaattttgagtccaagagacattttgaggcctaaaaatcataggaaactgcccctgagctcacacatatttccaatggtgtccccnaatttcagggaatccatggattacctaagccagcccctccagttcggctaagaaactctagtctatatatcaagttttgtatcatatgtattgctctgaactcagaaatttcccttccatttatggattctatgaataaaatatcacatgtac

SEQ ID NO: 83611 - DNA, 430 bp, Homo Sapiens
gagcaaaataggtctgataaataccccctttccctttcccctcccccaagagggaatgactaccagggaagaaggatggattgatgtggactcattcagggcctggagcagaccctggtggccaagacagaagagatggtttcctgccaaagatattgccacctccaggaaattgccagtgagctggaagttcccactattacaagccataaggccatgttgccatggacaccagaatatctgtagtcagagcacctatcagttgcaaaagccatgcctgcaaccgatggaaaatgtaagagggagttcttaaggttcttggtggcatcacccaaggcattctgggaaaacctaaggcctggccccaaaacttccctactctgtggctagtcctgctgccaacaaaatcgtagcgacctggcttttcaca

SEQ ID NO: 83612 - DNA, 883 bp, Homo Sapiens
  misc_feature (21)..(21): n is a, c, g, or t
  misc_feature (735)..(769): n is a, c, g, or t
gacttaatcgactcagctgcncaggtccttgagtcccggctgcagcggcccctgcctgaggacctggccgaggctctggcagtggggtcatcctgtgccagctggccaaccagctacggccgcgctccgtgcccttcatccatgtgccctcccctgctgtgccaaaactcagtgccctcaaggctcggaagaatgtggagagttttctagaagcctgtcgaaaaatgggggtgcctgaggatgacctgtgctcgccctcggatctcctccagggcactgcccgcgggctgcggaccgcgctggaggccatgaagcgggtggggggcaaggccctaccgcccctctggcccccctctggtctgggcggcttcgtcgtcttctacgtggtcctcatgctgctgctctatgtcacctacactcggctcctgggttcctaggccccaaaatcggccctccctcacccctttcccttcctctctatttataaggtccctgctccacccgaccccacctgcggtgccttcagccccaaccaaagacactagtgcacccccttcacagacactgacctcagaggccccactctggtgcccccagaccctgggcccccagcctttggcctccctccagtagcccacgagttccccacctttcagtgctgacggtgccttcatgtccccgccggccctgcccctgccctctgtaccccgtgaggggtggcaggagctggagtcnnnnnnnnnnnnnnnnnnnnnnnnnnnnnnnnnnnaacagctgctatgggggggctaaattatctctattttgtagagaggatctatatttgtaggggttcggggcccaggccgggtccctatctctgtgtataaactgtacagaccgt

SEQ ID NO: 83613 - DNA, 674 bp, Homo Sapiens
  misc_feature (660)..(660): n is a, c, g, or t
gcctcaagcaatcctcccacctcagcctcccaaagtggtgggattacaggcatgagcaccacaccaggctctcaagtattttcagtccacagttggttgaatctgggatgtggaacctgtggatacggagggctgattgtgctattcagtcatacaaaaggctgttcagaagattatgtttcacagatcctttcaaccgaaaaacagagtctgtaagaagcttaggtctcataaagaagatatttatgagtgtggcttttgtctaatggagtaaatcccaaggagaatcacaggaggcccacaaaatcttctgtatcagtagaaacactgccatcttggatcaaaaaggacagaaacagtacaaaatagagaccactagttcccctaaaattctactggaaagaagcagcctgagaaaagaactcaggtaaaaacacactctagctttgatgaaaaaggaagactcagaagacaaaaccaagagtctagagggtagagccaagaaccacggagaattattcttctgctttgaggcctgataaaagaaactccaacatttcctggattttggaacagcaaataaaatcaatgactcctttttgtgcctcccattctccccttttatgtacagaagatgtgtatattggttatctaatgccncctcgttccgaatc

SEQ ID NO: 83614 - DNA, 919 bp, Homo Sapiens
  misc_feature (99)..(133): n is a, c, g, or t
gcaaaacaaaagaaaaacacgatgatgactcatattaggggataggctgttttagccgaacgacgagcgcagcgaagtagtgagcgaggaagcgtgcgnnnnnnnnnnnnnnnnnnnnnnnnnnnnnnnnnnncagtcgacggtaccggacatatgcccgggaattcggccattacggccgggggtcgccgcgaagccggtcgcgcgcagctcgtcccggccctggcccgccgcaaacgaggatccgctgcgctcggggaacgcgacagcggcgctcgtggccccggacctgaagacccttccagcatgccagaggaaagttcccccaggcggaccccgcagagcattccctaccaggacctccctcacctggtcaatgcagacggacagtacctcttctgcaggtactggaaacccacaggcacacccaaggccctcatctttgtgtcccatggagccggagagcacagtggccgctatgaagagctggctcggatgctgatggggctggacctgctggtgttcgcccacgaccatgttggccacggacagagcgaaggggagaggatggtagtgtctgacttccacgttttcgtcagggatgtgttgcagcatgtggattccatgcagaaagactaccctgggcttcctgtcttccttctgggccactccatgggaggcgccatcgccatcctcacggccgcagagaggccgggcccacttcgccggcattggtactccattttcgcctctggttcttgccaaatcctgaaatcttgcaacaaactttcaaggtcctttgctgcgaaagtgctcaaaccttgtgctgccaaaaattgtcccttcgggccctttcgactccagcggtggtctcctcggaataagacagcaggtccgacatttataacttcagaacccc

SEQ ID NO: 83615 - DNA, 927 bp, Homo Sapiens
ggtagtcttcggcaagggaatcaacatgttgccaccacatccctgaccgaacgtggaagtcaggacactaccaatcctcgtccccttcgctctgtccgtggccaacatggtctgggcgaacaccagcaggtccagccccatcagcatccgagccagctcttcatagcggccaactgtgctctccggctccatgggacacaaagatgagggccttgggtgtgcctgtgggtttccagtacctgcagaagaggtactgtccgtctgcattgaccaggtgagggaggtcctggtagggaatgctctgcggggtccgcctgggggaactttcctctggcatgctggaagggtcttcaggtcctgtttccattatgtgctggcgtttgcattccacaaccacgacagcctggagaatcagaaccaggcaaatcgggctgttccctcatctgggcggccccaaggcagcaggaaggcagctccgagccctcttcccgcacccagaccctgcctttcgggctggggcgctcagccgggagcctgcttccagctcccaccggcaggctctccggggctcccctccctccccagggcggggagcggcgctgcgattctccactactagttcatgtcatcacttttcctaaacaaatcgctagaggggctcggagaagggaggggcccgggaaactgggaaactagctccgcgcacaccgaggcacctcgcagacgcacaaatgcgggtgcccaaggcaaagtcgcccccaaggcttctcacaaactttgcttcctgtgcgtctccgacagcacaggacacgtagccccgaagctgtcatcggaaatgccgctgggaaaaccgggtgggcttcgccgggtgatatgcaccggggaagcctcgtgccgattaacacccagcctcgactagccatagtg

SEQ ID NO: 83616 - DNA, 1168 bp, Homo Sapiens
cagtcgacggtaccggacatatgcccgggaattcggccattacggccgggggtcgccgcgaagccggtcgcgcgcagctcgtcccggccctggcccgcgcaaacgaggatccgctgcgctcggggaacgcgacagcggcgctcgtggccccggacctgaagacccttccagcatgccagaggaaagttcccccaggcggaccccgcagagcattccctaccaggacctccctcacctggtcaatgcagacggacagtacctcttctgcaggtactggaaacccacaggcacacccaaggccctcatctttgtgtcccatggagccggagagcacagtggccgctatgaagagctggctcggatgctgatggggctggacctgctggtgttcgcccacgaccatgttggccacggacagagcgaaggggagaggatggtagtgtctgacttccacgttttcgtcagggatgtgttgcagcatgtggattccatgcagaaagactaccctgggcttcctgtcttccttctgggccactccatgggaggcgccatcgccatcctcacggccgcagagaggccgggccacttcgccggcatggtactcatttcgcctctggttcttgccaatcctgaatctgcaacaactttcaaggtccttgctgcgaaagtgctcaaccttgtgctgccaaacttgtccctcgggcccatcgactccagcgtgctctctcggaataagacagaggtcgacatttataactcagaccccctgatctgccgggcagggctgaaggtgtgcttcggcatccaactgctgaatgccgtctcacgggtggagcgcgccctccccaagctgactgtgcccttcctgctgctccagggctctgccgatcgcctatgtgacagcaaaggggcctacctgctcatggagttagccaagagccaggacaagactctcaagatttatgaaggtgcctaccatgttctccacaaggagcttcctgaagtcaccaactccgtcttccatgaaataaacatgtgggtctctcaaaggacagccacggcaggaactgcgtccccaccctgaatgcattggccggtgcccggctcatggtctgggggatgcaggcaggggaagggcagagatggcttctcagatatggcttgcaaa

SEQ ID NO: 83617 - DNA, 946 bp, Homo Sapiens
ggatcttcccctggaaggatgcgagcaccaagagaatgccagaatttatacatttttctcctctgaaaccatacaaagggagggaatgggagaaggcggggagcgagcacgtgctggaaacccaccttttgccagttggccacggacagagcgaaggggagaggatggtagtgtctgacttccacgttttcgtcagggatgtgttgcagcatgtggattccatgcagaaagactaccctgggcttcctgtcttccttctgggccactccatgggaggcgccatcgcaatcctcacggccgcagagaggccgggccacttcgccggcatggtactcatttcgcctctggttcttgccaatcctgaatctgcaacaactttcaaggtccttgctgcgaaagtgctcaaccttgtgctgccaaacttgtccctcgggcccatcgactccagcgtgctctctcggaataagacagaggtcgacatttataactcagaccccctgatctgccgggcagggctgaagggtgtgcttcggaatccaactgctgaatgccgtctcacgggtggagcgcgccctccccaagctgactgtgcccttcctgctgctccagggctctgccgatcgcctatgtgacagcaaaggggcctacctgctcatggagttagccaagagccaggacaagactctcaagatttatgaaggtgcctaacatgttctccacaaggagctcctgaagtcaacaactccgtcttccatgaataaacatgtgggtcctctcaagggaccggcacggcaggaacctgggtcccaacctgaatgcattggtcgttgcccggctcatggtctggggggatggcagcaggcgaaaggccaagaatggttcccagaatttggttgccaaaaaatcaaacaacaatcaagaattggcgaaattcttacacaaatta

SEQ ID NO: 83618 - DNA, 769 bp, Homo Sapiens
ggggatgaatactgggagaataaaatgagaactctggagtgagctaaattgatcccaattaagtttttctgcttagcagacagaaggtataattttttgacaccctttcccacctggtgcctatgctaggcttgtcctgagaacatccctcagtaacttgatattcacatgacctacaggatgtcccatctgcagggctgagtcagttggggaacaccagaggctacacagtagctcttcctgctactcggttaatgagcttggcaggttctttgtctcactgaattcttatcatggaaacagcagcagcagccgctaggaaatcttcaagtgtagtgtctgtgctaacccagtggtaaatcccttagatcccctgctggtctctggcagtctccttgattttgggtaccatgtatattttccgctttgactttaacgctttctaggatagggtaagcacccttaattcaggcactgtccattagcttcctttgcaaaggctacttatggccggtcacaatccagcactcagacagagccaaggcaatatcctcttgcccatggctatgatgtcagacagtggatgggctccagcaacaagagacaaaataactaaaggcctttgctctcctctgacattgaggcctggggcttacagtttggaatacaacatgtgaaggtttttgttgttgtttgtattttttagatgtaaacttgattattttattgctaatttaaaaataaaaatgactttgtattgattgtgaaa

SEQ ID NO: 83619 - DNA, 751 bp, Homo Sapiens
  misc_feature (271)..(271): n is a, c, g, or t
gacacagtgacacgagaactttgctcagcccttctggaagaaataaccgaaatgagggaacgctggactcacgtcgaaccacaaccagacattctaagacgatggaggaattgaagctgccggagcacatggacagtagccattcccattcactgtctgcacctcacgaatctttttcttatggactgggctacaccagccccttttcttcccagcaacgtcctcataggcattctatgtatgtgacccgtgacaaagtgagagccaaggnttggatggaagcttgagcatagggcaagggatggcagctagagccaacagcctgcaactcttgtcaccccagcctggagaacagctccctccagagatgactgtggcaagatcttcggtcaaagagacctccagagaaggcacctcttccttcccataccacgcccagaagtctgagggtggagtgtatcatgacccacactctgatgatggcacagcccccaaagaaaatagacacctatacaatgatcctgtgccaaggagagttggtagcttttacagagtgccatctccacgtccagacaattctttccatgaaaataatgtgtcaactagagtttcttctctaccatcagagagcagttctggaaccaaccactcaaaaagacaaccagcattcgatccatggaaaagtcctgaaaatattagtcattcagagcaactcaaggaaaaagagaagcaaggatttttcaggtcaatg

SEQ ID NO: 83620 - DNA, 1527 bp, Homo Sapiens
  misc_feature (70)..(70): n is a, c, g, or t
  misc_feature (177)..(177): n is a, c, g, or t
ggtgggggtgggaggaaaaaaggggaatttcctcttggcgcgggcaaaggttgttccaggcaccccccgnttttctccaaacccactggtggcaccctcccaccgttcgttcgtcggattcagggacccacaatcctttctttgagggcccttgatggcaaaaagtactcctccttntggcccttcagctctctccaaggcagcacctttcccgaaaggctgcctttgcccaggaccttgtgaaagatgaagttgttgatgttgcacttgctgctgccctcccagatccttgccgtaggtcccactgtggtcttgcatgtcctccccagcaactccggtcttcttctcgaaaccctgatatatcccaacaggctctgaggaggctgagtctgatctccgggaggctctctgggtgacttggttcaaggcctcagccaaaagcttctggttgatgccgcagaggttggccaccttctcccggcatttatggtgcacattcatgccgcagtcttcacactttaatccctgcttcaccagtccccagagcaggctgccgcagtggtcacagaaggtggggctcatgtagttgtgaaccttgaagcggtgcggcatgtcgatgttgaagcgttctttctggaatatagtgtcccggctgttggccgcggtgccagtgcatctgccgatgatcttgtcgatgcatttcttgtggatggcagcgttacattgcctgcatttgtagccttgcttgttgaggccccagacaaagtctttgcacacagaacagaaggtgggttgcccaaagaaggtggcgataaactcatggttcttgatgtagtggattttggcctgtttgatggctccgcggcggttcatcgttgggaacttggcctcgtcctcactgcgcatagactgtttgcaatccacgtcctccaggaaatactgaacagacatcaacaccttggcctgaggctgcaggtccagccagaactcagccttgccattgttcttcttgcagcgctcggccagcaccgacacacccacggtcaacctcagacactggctccttctgctgcccgcaattagcacaatcgtggatgaacgcgcccccctttcaataagaatgtggggcaatcgaacgtcgacttccactcaggaacatggtcggcttcttctgcaccagtgttttcccacgctctgtgctgagcgcctcccttcatcttcacggcacagaagggctggttcgcctcgtcctcggcctgcagggagcccagctcataggagttgaaggcgatgcgcaggaacggcgccatggtggggcctgcagtggggctcccgttgcaggggcaggcccaagggtccgcaggcagcggcgggggcgccgctcccggcgcgcgcggacggggttcgcgcggcgctgactgggatgggccaagcggccagtgaggtgtgcccgggcctccgcgcgcggggcgggcgccggggtcgctcggagatgtgggctacaagccgcctcggtccggcgccgcg

SEQ ID NO: 83621 - DNA, 477 bp, Homo Sapiens
tgcggccgccaaacttaccaactgtttccccttttgatgactctgataccttcattcatttttcaaaggaatttactgatcatgaggttggaaaatctgtatttctcttgcttattatgtattaataatcataaatgtctagattcaccagaagtcaccagaaggtctgtctcagtgaagaaaacttataaagccactttgttgcattttgtgtttcagtgttacagtttgagatctgtatatttgtacacagctatgtgtttttcattgaaataatgtacaaagactgatcttgatgctgtgtatttttatgagttgtcttaggcattcctgagctcagcttcagttggatggtgggtcagcaccctgcgtttctgaacatactagacttcagtttaaaactgttttgaggctgtataatatgttgctgtttttacagtgctaatgtttttatagtattaaaattctgtatgatcc

SEQ ID NO: 83622 - DNA, 805 bp, Homo Sapiens
  misc_feature (510)..(510): n is a, c, g, or t
  misc_feature (532)..(532): n is a, c, g, or t
ggagagtcgccgcgcggccgccggtgagccgcatggagccccgggcggcggacggctgcttcctgggcgacgtgggtttctgggtggagcggacccctgtgcacgaggcagcccagcggggtgagagcctgcagctgcaacagctgatcgagagcggcgcctgcgtgaaccaggtcaccgtggactccatcacgcccctgcacgcagccagtctgcagggccaggcgcggtgtgtgcagctgctgctggcggctggggcccaggtggatgctcgcaacatcgacggcagcaccccgctctgcgatgcctgcgcctcgggcagcatcgagtgtgtgaagctcttgctgtcctacggggccaaggtcaaccctcccctgtacacagcgtcccccctgcacgaggcctgcatgagcgggagttccgaatgtgttgaggcttcttatttgacgtcggggccaatctggaagcgcacgattgccattttgggacccctctgcacgttgcctgtgnccgggagcatctggactgtgtncaagtgctgctcaatgcaggggcaacgtgaatgcggcaagcttctgagactgcctttcacacgcgccaaggtcaagatgttgactcatcagatgctatcgagtttgcggcactctacccccggacaccgcggaagagccttcgataccttgaaaacaaccttcgccgtgctcagaatagaaaaaccctcgtttgccaattccagtgaattaaaagcatgggccaggctgaaattcaataaaccccccgtctttaaccccaaagaacgggggcc

SEQ ID NO: 83623 - DNA, 1049 bp, Homo Sapiens
gcaagaggggggcaagcggaagggtcgaggaagagatcgaggggccagaggggtccgacaggaaagataggacacgaggccagatagacggagagagagagggcgagggaggggaaagagtccggggcagaaaggcgcaatgcagggagggacgtggaggcagccccaagggcgttgcgagtcgggacaagaggtccaacagatggtgacagggtcccacatgtccaagagtgaaaggcttagcaattaggtgatgtcctcaacgtcgcaggatgaaggtctcgtcccagacggggttgagtgtctgggtgatgacctgcgtgcggtgggtctcctcctcggggatggtgtgcctcaccacagccttctgccgatgccgggacccggggctgccccctggcacacctaccccctgctcaatgcccagcaggcagtaggggtcgctgaacccactgacatctttgcccagaatgcccttggcctgtttcactgttgccttcagacaaaatattggcttctcaagctccctgacccgctgcagtgtctgctggtgctcctcgggctccacgtggaaggcctcctgcaggtatcgcagcagctcagaggcctccgtcacatggttgggctcaggatgacccaggcggtgcaagacagtgtagagtgcgtcctcgtagagcagggcccgctgctcgggggagaagtggtgggatggaggctggatctccggggccatttggggcgggggatcctgtagatctctgactctgcggcgccttatcttgatggcctggcgcaagaagggagggcgctgctgcggatgggagaggagtgtcgccatggtggccttctctgcccttccctgtccgctggtgctgggtgaagacagcgaagccacaggattatgcaaagagcctggggctgccaccctctgtcaggggaagttttagggagggtggctgggagggacggaagggtgagggtttcaccgcttcggagaggcagtctcccaggcccctgcaccttccccagctgggatccctacaggaccc

SEQ ID NO: 83624 - DNA, 458 bp, Homo Sapiens
agaaaagctgctgtggtgggcaggggattgggccatctgtctcctggccctggcccatctgcctcctggccttcctgttccagccactggggtgggggccaggttcactgggaccagggctacaggcacagagtctcctggaaaagggagaggggaccctgccaaagatgaggctccagctgccctggggggagggtggtggccattactagagggggcctgggtcctctccccaggggctgccagcatccaggccaggaagcctggagccaagaaccttctggctctgagggagcaagagctggcaggcggcagggctggcacagacagacggaagcagaaaggacagtttggctgctgtgtctgctgcgcacgccccctccccggacagcacctgccacctagaaactttcttagcaaaaaaattaataaaaacaaatccattgtcctcttaaaaa

SEQ ID NO: 83625 - DNA, 489 bp, Homo Sapiens
cactctgggcgatggccttctggaacagcccttctgaatggtgggagaggatcagaaggttgacgcaggagcccctgccccggaaccaaagatggtgatacgctccggggcgcccccaaagtgggcgatgttttcactgagccagcgcagggcctggatctggtccaggagcccatagttgccttttgcagcctggtccccggtgctgagaaaaccgagcaccccaagacggtagttgagcgtggctacaatgacgttgccataggcagccaggactgagccatcgaacatgtttccggtcccctccatgtaggagccgccatggagaaacagcatcacaggcttcttcccagggtcacggatatctgtgtctggcggattgagcgtcgcctcgtcacgtttttttgtgagcggaccgtcctcggtgggcacgtagaggttgaggtacaggcagtcctcgctctggttctgcacgtaggtggcggccgc

SEQ ID NO: 83626 - DNA, 337 bp, Homo Sapiens
agtgttcttcagtggcagacgcctgggcaccccgtggccctgcccagcatggccatggcgcaggctctcgaacccgcatggctttcccaggcctggtgattctgctctccagggtacggttggcaccttcctcgggggcgggccccacgcaccccagaacacacagacccacctttctggcgttctttctacctcccttttcgttgcctgaggagctggtggtttcatgagttaatgatacatcttgcaaggtgtacacatagagaaaaaaacctaaaaatgtggaaaagcacgccaaagccttatttaaataataactattaaactattcaaaaag

SEQ ID NO: 83627 - DNA, 528 bp, Homo Sapiens
ttttgctgattaagtttaccgtgttatatgggtgcggttcatggcgccccgaaacaattacaataatatatcaaagatcactgatcacagatcactataacacatataataacaatgaaaatgcttgaaatattgcaagcaattaccaaaatgcaatgtagagacccaaaatgggcacatgctattggaaaaatggtgccaacagatttgcttaaagcagtgttgacacaaatcttcaatttctctgctttgcttttcttaacctattgctgtcacatatatgtcccaaaaccttcaatttctttaaaaattctgctacctgtgaagtgcaataaatcaaggcatgcctgtatactctctcctgttatcctttctccagcctctgcacccccctcagcctcagcccctctgcacccctgcccctggcaccttcccacacctgagctctgcgttgttaccctggggaaatgccaccctttagggaagtctccaacttattcagtctgtaactgtcagagcatacagatg

SEQ ID NO: 83628 - DNA, 652 bp, Homo Sapiens
gttaaaactcttgctaggagagaagaccccattaaagaccacagcaacacccctgagcccacttaagcccccacggatggacactgctccggtggtcgcatctccctatcaaagaagagattcagacagatactgtgggctctgtgcagcctggtttaataaccctctgatgccctgcatgggaccagctgggatctggctggggctgccctgtgtccctaacgaccataggcaatccatcttcttgtgtcagcaatttctggacacccactgttttccaccaagagctgaggtggcaacaactcagtgagcaataaacaaaatgacacagaaatgcacagtgttgttatgaaggagcctgtttacctgtgttcaaaatctggcaccattcccttgagcagggcccgctcaggagggaccaggtctgcccagtttctgtgcctgcagagagacgaagccccacgagccacaccctactctacaagaggaaagggggttggatgggaagaatctattttgctgttttggaaagcacacagccgacctacaaacctcctgtgatggtgtttcttcggatgtgtaaaataaggctttatttgtcaattccgctgtaaaataagcattgtccgagtaaaaacagcaacaacaacaa

SEQ ID NO: 83629 - DNA, 963 bp, Homo Sapiens
gaggaattctggatattagtgggaagttgaaatgttgcaaactttcaggttggataatggtccaactgtttgctataggactatgatttagaacatgtgctaaatatgttatcagggcaagaatttataaatgcccatccagaatatcatagcgtgtaccgccgtattagaaaaagggaaaaggtcaaagaaacctgcagtcagttccgaagatcaagatcagtcgtatgtggaatctgtgaatccttataagaaatgtttattgttcaagaaagaagcctcctctggtggttgataagcaattctccacggcagagaaatgctaatgttttgttcttatgtcttgattgatgctttcactacttagttcttcaggttggtctggtgtttagatcctttcagatgggcatgatactgttctattgagtttagggagacaactgcagatggtacatctgtaattgcgcctcagacctgtggtctttaatggggtcttctctcctagcaagagttttaacctcttggcgtggattttgccttgataatgggaatcggccaccaccgctgaagtgaatgacatgttgcagagtgtgcagcacttgttcttatccaccatgtcggcatcacttccattttctgaccggagcctcttggcaggacaccctccatccctggggtgaagcatgtaatacagtcggactttgcttgcatgttttcgactctcgtagtgggccacacgctgcgattcggagatcagctgtgcactgcacacccttgcagataaccgttcggggaataaatccggatcaatatcggaggacttcatcaggcttttccgcgaggcagaggggccgccggtgcccagaggccagctgccctgccgagcagtagagcgaagctgtgggctggagcacgctgaggattacacgttcctgtctctgcgaccagacctttcggcagctc

SEQ ID NO: 83630 - DNA, 578 bp, Homo Sapiens
attgttttctaccaaattaccactcaatatcttaatgaaagcactcaacattaagtgacataaacagtggcatttgggtaagcaacactcagtggggtgctgacatacagtttgggtaagattaaaaaacaccaaaggctgaaatctgtgagtaccaagaactgtgcatataggtttagaaattgactgtgtaccctagaatgtgcagtgtaatattttcaataggtgtttttttaaagaacactagatttttggaataatatatttctaattaggactatactgtttttcaatggtctgttaaaacatcatacagaatatttatttagtttattgtcatgtattggctaactttcaggggcctcagattccatatgtcttcagtggattgatgaatatcaggttaatttgtgcctgccccagccatctctactttattctgaggtattccacaatcctcttgttgcaggtgctgctaaaaaaaactcaaaattgtgtatcaaatattttctttcaactgtaaaaaatcatctgtgttaaagtgaataaaaagtgcattttgaataaccagcccaaaa

SEQ ID NO: 83631 - DNA, 839 bp, Homo Sapiens
  misc_feature (589)..(598): n is a, c, g, or t
cacaatttagccaagaataagataaaaacttgaataagaagtaagtagcataaatcagtatttaacctaaaattacatatttgaaacagaagatattatgttatgctcagtaaataattaagagatggcattgtgtaagaaggagccctagactgaaagtcaagacatctgaatttcaggctggaaaactatcagtatgatctcagcctcagttctcttgtctgtaaaatggaagaactggattaggcagtttgtaagattcctcctaactttcacagtcgatgacaagattgtctttttatctgatattttgaagggtatattgctttgaagtaagtctcaataaggcaatatattttagggcatctttcttcttatctctgacagtgttcttaaaattatttgaatatcataagagccttggtgtctgtcctaattcctttctcactcaccgatgctgaatacccagttgaatcaaactgtcaacctaccaaaaacgatattgtggcttatgggtattgctgtctcattcttggtatattcttgtgttaactgcccattggcctgaaaatactcattgtaagcctgnnnnnnnnnntctttcccactgttttttctgcttgttgtaagaatcaaatgaaataatgtatgtgaaagcaccttgtaaactgtaacctatcaatgtaaaatgttaaggtgtgttgttatttcattaattacttctttgtttagaatggaatttcctatgcactactgtagctaggaaatgctgaaaacaactgtgttttttaattaatcaataactgcaaaattaaagtaccttcaaaagataagacaaa

SEQ ID NO: 83632 - DNA, 968 bp, Homo Sapiens
  misc_feature (590)..(598): n is a, c, g, or t
taacattatagtgctggccgcttggttctatgattacctaaaaatctagtttttttcctccataggtagatgtgtgtgtatgcatacccccacacacacacgtacatatatgttgtcatagagaggtatttcaacccttatttcaaataacagtagaagatacgaacatgaatttatattttgtaaaaatgtcattcatccactttgttttccattggaaatagttttataagaagggttccccttgctctctccacttaacaatttcattatatacgtagaaaaagcagccgacttaagggcttgatgttttttcaggccttgtggattcaggtttccagtttcccagtgcccttaatggatgttatgaatgcataagcacattttcttttaaagaaagaagttagatttatagtgttatttcttacttgctatatttctttgcactaaaaaagagctatgtgtttgttttataggacactttagtaccgtattgcctacaataactcagtttgctccttaaattccaaactctgggaagttgataaataacttccatgatcacttgtaaaagttacatgcacatctgnnnnnnnnntcacaaatctctatgacagtaggttatgttttgagcttgttaccttgcagtattcttctctgttccataggtgaaaacaaagggtgacagaggttatcaggcaggaaatgcctaaatacatacatctctgcatggtacaatttctcatattcatgtattccataaacagtgttttttctctgtttaagcagactgttgtttcttctgagtcagtgatatgtgatcttcgttggtttcattttgtgaagctcagtctgtctctgtaacatactttaggattctcaccttgtgctccccaggaattatgttagtgtccttttctatgctgtcttcaaggatggacagaggcctaaaccacaacaacaacaaa

SEQ ID NO: 83633 - DNA, 821 bp, Homo Sapiens
  misc_feature (187)..(187): n is a, c, g, or t
acaaaacttcctgggtgggttgacgaggaggatcactccgggttcatctcaatgaaaagggggccaccatgaggaagttttcccccgctttgcgtagggctcaaaaaattgagaagatcttaaaaaagctgggccaccccttcatgtggaaccagcccttgggctacgtgctcacctgcccatccanctgggcactggactgcgtggaggcgtgcatgtgaagctggcgcacctgagcaagcacccaagtttcgaggagatcctcacccgcctgtcgtctgcaaaagaggggtacaggtggcgtggacacacctcccgtgggctcagtatttgacgtgtccaacgctgatcggctgggctcggccgaagtagaacaggtgcagctggtggtggatggtgtgaagctcatggtggaaatggagaagaagttggagaaaggccagtccattgacgacaatgatccccgcccagaagtaggcgcctgcccacctgccaccgactgctggaacccagccagtgggagggcctggcccaccagagtcctgctccctcactcctcgccccgccccctgtcccagagtcccacctgggggctctctccacccttctcagagttccagtttcaaccagagttccaaccaatgggctccatcctctggattctggccaatgaaatatctccctggcagggtcctcttcttttcccagagctccaccccaaccaggagctctagttaatggagagctcccagcacactcggagcttgtgctttgtctccacgcaaagcgataaataaaagcattggtggccttaaaaaaaa

SEQ ID NO: 83634 - DNA, 897 bp, Homo Sapiens
ctggaccggtccggaattcccgggatatcgtcgacccacgcgtccgcaggccggttccggcgaagttaaaccctcggagctggcctcggactgctggggcgttaccccttcggccacccccgctgaccatggcagtgtttcatgacgaggtggaaatcgaggacttccaatatgacgaggactcggagacgtatttctatccctgcccatgtggagataacttctccatcaccaaggaagatttggagaatggggaagacgtggcaacgtgtcctagctgctctctcattataaaagtgatttatgacaaagatcagtttgtgtgtggagaaacagtcccagccccttcagccaacaaagaattagttaaatgctgaagaagccttcaggaatccaaatcctgaacatttggaatgagcccagatagaaatatcgaatgcaaagctactggcttcacagagacaaccatttatgatttgctgttctgtaagagtgtggattctttctatcaactgctgatatcatcttcaggaagcaagtccataacatgacatatctggattttgtgcttagaaccttaaattggaagcattcttaattatgcatctaaatttaaaagaagataatttcaaaacagtgctttctttcccttggtttcatcattttcatatcttaaaccaaattacttcggtatctgacaacagcatcatctacctcagtcattaggatttcttaataaaaaagagattgtaacaaaacaaaacaaaagggacggcccgctctagagtatccctcgaggggcccaatctttacccgtaccccagctttcctgtagcaagcgggtccctataggggagtcgtattataagctaggcactggccgctccgttttacaac

SEQ ID NO: 83635 - DNA, 1195 bp, Homo Sapiens
caggaaaaagcaccattgggaagcagatgaagatcatccatgaagatggcttctccggagaagacgtgaaacagtacaagcctgttgtctacagcaacactatccagtccctggcagccatcgtccgggccatggacactttgggcatcgaatatggggataaggagagaaaggctgaccccaagatggtgtgtgatgtggtgagtcggatggaagacaccgagcccttctttgcagagctgctttctgccatgatgcggctctggggcgactcaggaatccaagagtgcttcaaccggtcccgggagtatcagctcaacgactctgccaaatactacctggacagcctggatcggattggggccgccgactaccagcccactgagcaggacatcctccgaaccagggtcaaaaccactggcatcgtagaaacccacttcacattcaagaacctccacttcaggctgtttgacgtcggaggccagcgatctgaacgcaagaagtggatccattgcttcgaggacgtcacggccatcattttctgtgtcgcgctcagcggctatgaccaggtgctccacgaagacgaaaccacgaaccgcatgcacgagtctctcatgctcttcgactccatctgtaacaacaagttcttcatcgatacctccatcattctcttcctcaacaagaaagatctctttggcgagaagatcaagaagtcacctttgaccatctgctttcctgaatacacaggccccaatacctatgaagacgcagccgcctacatccaagcacaatttgaaagcaaaaaccgctcacccaacaaagaaatatattgtcacatgacttgtgccacagacacgaataacatccaggtggtgttcgacgccgtcaccgacatcatcattgccaacaacctccggggctgcggcttgtactgacctcttgtcctgtatagcaacctatttgactgcttcacggactctttgctgttgacgttgatctcctggtagcatgaccttttggcctttgtaagacacacagcctttctgtatcaagcccctgtctaacctacgaccccagagtgactgacggctgtgtatttctgtagaatgctgtagaatccggttttagttgagtcttcacatttagaatttgaaaggaaaaacagaacatttctcatgtgctttgtagcttaaaa

SEQ ID NO: 83636 - DNA, 843 bp, Homo Sapiens
  misc_feature (312)..(320): n is a, c, g, or t
  misc_feature (433)..(433): n is a, c, g, or t
ggggaaatatctgtgtcttgatttcttagttgccttgaaaatcatgtactgaactgtaaccgctaacttgactggatgaactagtttgcttgtgtgtagagagtgtattgcttcctcagatttcactgttttcatctccttttccatcttagtctttattccttaagaccaaaaactgtaatatcctttagaaatgctctagaagatctgtattgtgtagaatgatcatgtatttataaatattttacaagtttagattataaaatgaaaaagaaggtcatgtgttttggggggtattttgcatgttcggannnnnnnnncccttcaccgaacccttctgattctttcaaactattgccaggtagttgttagtgtttctaattggactcttaatatgaacttcaagaagctgttaccagttatcggctctggncatctgaaattttaaccacttaatttaaagttaccaattttagaatttgtttgtgttgttttaccttaagaaacacaataaactcactgtttaaaaaagatctcaatttatataaagtactggaaaaaaagcttaagtaatttttaattctatctataatctccgtaagatgaattagaaataaattgggaagaaaagaaattaactgcttatttatgaatctaatcatttaaaaaatgtatggaaaagaaaacctgcctttcttaataaaaccaaggcccaaatttggcattcaagctcctgaaattgaattttttgccttgggaactggttgctaacggcaaaccggtaaatttttgcctaccccgaaagggccttaaaactgttttaaaatttggcgtgctaatctc

SEQ ID NO: 83637 - DNA, 547 bp, Homo Sapiens
cgacggcggcggcggcggttccagcatgaagaggagagctggcctggggggcagcatgaggtcagtggtgggcttcttgtcccagcggggcttgcatggggaccccctgctcactcaggactttcagaggagacgcctgcggggctgcagaaacctctacaagaaggacctcctcggccacttcggctgtgtcaatgccattgaattctccaacaatggaggccagtggctggtctcaggaggagatgaccgccgggttctgctatggcacatggaacaagccatccactccagggtcaagcccatacagctgaaaggagagcaccattccaacattttttgcctggctttcaacagtgggaacactaaagtgttctctggaggcaatgatgagcaagttatcctccatgatgttgaaagcagtgagacattggacgtgtttgctcatgaagatgcagtatatggcttgtctgtgagcccagtgaatgacaacatttttgccagttcctcagatgatggccgggttctcatttgggacattcgggaa

SEQ ID NO: 83638 - DNA, 555 bp, Homo Sapiens
  misc_feature (239)..(249): n is a, c, g, or t
tttaaggggtgaagagagtgaaattccaaaatcactctagtttattcacataatatagtatttgattccattcttttgtactgttccctacttttacaatgtgtacaatgtttcaccatgttccaattaatggttgagctttaaatgaaaatattctggatcttccatttattggtatcaaccacaatagcaagacccccaagaaatacttgatctaaactgggagggtccaacacaannnnnnnnnnnaatggacttgccaccttaagaaactttcaagtgtatcttttttgttggcaagaaaattatttcccaagaggtaatcagattcccctccctgcccccgctctttcaaccaaccctcctcctaacatacacatacagagttacacatttcatgaaactggaggccaagtccactggcaagcagagtcttaacattttcagaaatgatccgtccttcatatctggcataagctgggatccttggcaatggggaaaaggtgccatttgcttctctgaagtaacttggggtctgaattggttgtgagcttt

SEQ ID NO: 83639 - DNA, 449 bp, Homo Sapiens
  misc_feature (16)..(16): n is a, c, g, or t
  misc_feature (26)..(26): n is a, c, g, or t
gaattccgggaacctntcgccccgangaccccgcaggtgcagaagcggcgcaggccgccgtggccagctacaacatgggcagcaacagcatctactacttccgagacacgcacatcatcaaggcgcagagccagctggtggccggcatcaagtacttcctgacgatggagatggggagcacagactgccgcaagaccagggtcactggagaccacgtcgacctcaccacttgccccctggcagcaggggcgcagcaggaagaaactgcgctgtgactttgaggtccttgtggttccctggcagaactcctctcagctcctaaagcacaactgtgtgcagatgtgataagtccccgagggcgaaggccattgggtttggggccatggtggagggcacttcaggtccgtgggccgtatctgtcacaataaagggccagtgctgcttcttgc

SEQ ID NO: 83640 - DNA, 915 bp, Homo Sapiens
gcggccgccccggccgcccccgcgggggacacctcctcgccgccacagctttaggaaacacctctacctcctgcgaggcctcccgggctccgggaaaactacactggccagacaattgcagcatgactttcccagggccctgattttcagcacggatgattttttcttcagggaagatggtgcctatgagttcaatcctgacttcctggaggaagctcatgaatggaaccaaaaaagagcaagaaaagcaatgaggaatggcatatcccccattattattgataataccaacctccacgcctgggaaatgaagccctatgcagtcatggtatttcagaccgaacaaaagaatcttttcaggctggaaatggacatggtagttttcaggccagaaatgaagaaacattcatggtgtctcaagagaaaaaatccaccgaatgaaagaacggtatgaacacgatgttacttttcacagtgtgcttcatgcagaaaagccaagcagaatgaacagaaaccaggacaggaataatgcattgccttccaacaatgccagatactggaattcctacacagagtttccaaaccggagggcccacggtggatttacaaatgagagctcctatcacagaaggggcggttgtcaccatggatattagaggcctatcttacagccaggcagaattttcctaagttggaatcagatttaatgtgagatcatgatagacaagaccacagaggacgtatgctctatttcttgttggccaacagcttctttctaatgttctgtgaaaaattattttaagtgtcttatataatggtgcttttatggttattaaaaattgtaaatggtatcacatttatatggatttgtcattggactttttttggttcaacaataaaaaaatttaattacct

SEQ ID NO: 83641 - DNA, 721 bp, Homo Sapiens
  misc_feature (63)..(155): n is a, c, g, or t
ggagcagtaactaacacctcttaaaatgtatatagcactttaagtttaaaaagtcctcccacnnnnnnnnnnnnnnnnnnnnnnnnnnnnnnnnnnnnnnnnnnnnnnnnnnnnnnnnnnnnnnnnnnnnnnnnnnnnnnnnnnnnnnnnnnnnnaaagcaaaactagtgaatggtagagcttggatgtggagccataaattgactccaaggtcagagctctttaacatagccattattagcaaactatttttaatctgaccactggaaattaagagtcagaaggatctttaataaatcctataatctagtagccttttagtagtcacatgtaaggaacataaggcccggaaaaactagatgactgaccaaagtcgccagctagtaagtgacgaagtaggtctgaaggcacaatcttcagactcccaggccagtgctcactccagtcgtccctggccagtgtagttttcccggagcccgggaggcctcgcaggaggtagaggtgtttcctaaagctgtggcggcgaggaggtgtcccccgcgggggcggccgggacgccgctgccgctgctgctgctgctggggctggaggctcagcctcccaaaagacttgaaggaaactggtcctccatgggcacggagggctggctgcgagagccccgcctcgtgccgaattcgccacccaggcctcgctaccttagagaccgttatagttactgcca

SEQ ID NO: 83642 - DNA, 488 bp, Homo Sapiens
  misc_feature (459)..(459): n is a, c, g, or t
gcggccgccccggccgcccccgcgggggacacctcctcgccgccacagctttaggaaacacctctacctcctgcgaggcctcccgggctccgggaaaactacactggccagacaattgcagcatgactttcccagggccctgattttcagcacggatgattttttcttcagggaagatggtgcctatgagttcaatcctgacttcctggaggaagctcatgaatggaaccaaaaaagagcaagaaaagcaatgaggaatggcatatcccccattattattgataataccaacctccacgcctgggaaatgaagccctatgcagtcatggcacttgaaaataactatgaagttatattccgagaacctgacactcgctggaaattcaacgttcaagagttagcaaggcagatagtgtcttcaaagtggatctgtggactactccatcagaattgccctangtggctattaaaatccgagttcatggacc

SEQ ID NO: 83643 - DNA, 1812 bp, Homo Sapiens
  misc_feature (943)..(943): n is a, c, g, or t
gcagggcagcatgaaaaacatgagtggaggctgaaagagaactgctgaacaagatgtgtgttatgcttttgccagagctaggtcctgagaacagggactgcaatatctgcaatactagaggacttgtaaaatataagtaactcattgtggtatcctgccttaactaaatgcattttttttccatgtagaagaaacattcatggtgtctcaagagaaaaaatccaccgaatgaaagaacggtatgaacacgatgttacttttcacagtgtgcttcatgcagaaaagccaagcagaatgaacagaaaccaggacaggaataatgcattgccttccaacaatgccagatactggaattcctacacagagtttccaaaccggagggcccacggtggatttacaaatgagagctcctatcacagaaggggcggttgtcaccatggatattagaggcctatcttacagccaggcagaattttcctaagtcagtttctacttcagtttttgttattttttgttgcattttagtcagagctccaattccagtgtaaatagctgaactcaaaagtttctgagcaaagtcattatattcactttcttcaccaaaatttgttaaagtgcttctatatgcatggtctgatgctgggaattctgcagatttgagtaaacagtctctttctctagggtaagaatttgaaaccaaaacttgagaacacacccaagaatatatttacataggttcatagatgaacatacaagtgtttatattatatataagcttcaaaaccatttgctctgaagtgatctatttattttttcaggaaattcatctccatcggtaaacgttgggaaggtggagagaagtggtggggggcaggaaaaagttttagtgccattgctactttgataatccatgtatccaaaaatgtgagatgtgcgactcctnatgatactgattttcctttaatgttaatatgccagaaagcatacatctaagggaacattgtccttcaaagtagacactttgggaagttatttctttattttaatgatgtatcattgttaaaaatgctgtcaaatccttaatagctacaggagctactgagggaaatcagtgtcattatttaaagtcacgccttgtgtttttactactttattcagcaggattaaacctgaataacttttggctgttgggctaatagggtaaataaaataagcctgccttccataaaacacctaacttttaaaaggaataaacgacttctaaaattatgcctattaacatgtgtaattagtcggcagctcaaatgtttgggagtgcaagaaattaggcaccccaggatataggtcatacagggatatataaaagccatgctcattacaaaatgagcagttgatgttttatgtggcattaagacaatcaagtcctcacaactctggaatgtcttcttatactgatgctgaatttatgaatccaaattaatttccaacaggttggaatcagatttaatgtgagatcatgatagacaagaccacagaggacgtatgctctatttcttgttggccaacagcttctttctaatgttctgtgaaaaattattttaagtgtcttatataatggtgcttttatggttattaaaaattgtaaatggtatcacatttatatggatttgtcattggatctttttttggttcaacaataaaaaaatttaattacctaaatgccaagaaactcaacaatataccagtttttctgtatcacaggctaattcaccagtcttttttttaataaataggaatcgtaaaggtaatgac

SEQ ID NO: 83644 - DNA, 535 bp, Homo Sapiens
  misc_feature (121)..(213): n is a, c, g, or t
ttcactccagagccaggatccagggaacactgaagatttatctcagctgaccaacaacggagcagtaactaacacctcttacaatgtatatagcactttaagtttaaaaagtcctcccacnnnnnnnnnnnnnnnnnnnnnnnnnnnnnnnnnnnnnnnnnnnnnnnnnnnnnnnnnnnnnnnnnnnnnnnnnnnnnnnnnnnnnnnnnnnnnaaagcacaactagtgaatggtagagcttggatgtggagccataaattgactccaaggtcagagctctttaacatagccattaattagcaaactatttttaatctgaccactggaaattaagagtcagaaggatctttaataaatcctataatcacatggccggagagtcacaaaaacaacagctttggccaagaccgtgacttcagtaaagggaacccggggctctcgcagccagccctcctgcccatggaggacagtttccttcaatcttttgggaggctgagccgccagccccagcagcagcagcagcggcagcggccgc

SEQ ID NO: 83645 - DNA, 542 bp, Homo Sapiens
tgcggccgccccggccgcccccgcgggggacacctcctcgccgccacagctttaggaaacacctctacctcctgcgaggcctcccgggctccgggaaaactacactggccagacaattgcagcatgactttcccagggccctgattttcagcacggatgattttttcttcagggaagatggtgcctatgagttcaatcctgacttcctggaggaagctcatgaatggaaccaaaaaagagcaagaaaagcaatgaggaatggcatatcccccattattattgataataccaacctccacgcctgggaaatgaagccctatgcagtcatggcacttgaaaataactatgaagttatattccgagaacctgacactcgctggaaattcaacgttcaagagttagcaagaagaaacattcatggtgtctcaagagaaaaaatccaccgaatgaaagaacggttggaatcagatttaatgtgagatcatgatagacaagaccacagaggacgtatgctctatttcttgttggccaacagcttcttt

SEQ ID NO: 83646 - DNA, 1008 bp, Homo Sapiens
  misc_feature (270)..(362): n is a, c, g, or t
agattgaaggaaactgtcctccatgggcaggagggctggctgcgagagccccgggttccctttactgaagtcacggtcttggccaaagctgttgtttttgtgactctccggccatgtgattataggatttattaaagatccttctgactcttaatttccagtggtcagattaaaaatagtttgctaataatggctatgttaaagagctctgaccttggagtcaatttatggctccacatccaagctctaccattcactagttttgctttnnnnnnnnnnnnnnnnnnnnnnnnnnnnnnnnnnnnnnnnnnnnnnnnnnnnnnnnnnnnnnnnnnnnnnnnnnnnnnnnnnnnnnnnnnnnngtgggaggactttttaaacttaaagtgctatatacattttaagaggtgttagttactgctccgttgttggtcagctgagataaatcttcagtgttccctggatcctggctctggagtgaagaaggtagcttggcagttgactttgagtcctcccgtttcgctgggcattggcagttctgggagcagagcagccttggcatgccatggggtggattgtgtgtttatagaaaagtctgggacgtaagcgaggaaatgggccacagctcagcggaagggaggccggtggtgaggatggaatggtggagaggcaggctcaggtgtggcccaccaggagctgccttccccacttttttgggaggtagggtggggaagaagaaaagagcaaattgtttaaaaatacacatgtatatagaaaatagtaaaactgtaaggttatctgtgtgttgttggattctgggaaattcacattttctctattctctgtattttccaaattttctataacgaatatgtatttcttagaataaaaatttttttcttcaaaatttggaggaaatcgctttttacaaatgtgggttcatctttttctgcttaaccttttttctcatttgattaaagaactaataaaaatgtttttgaaattaaa

SEQ ID NO: 83647 - DNA, 612 bp, Homo Sapiens
acaatgaaataaaacactttaattctatttctaatgttttaaattacagtgtactaaatatttttaaacatttctgcattttttctacatttataactggtcttaagagtttttaatatttgagcagacccttaaagggtcatggaacaatcatcattttccctattgattattaagattgcaggaccatttttatggtcccacagtaccatgtgaaatgaggatcgcttgtagctgggaacagtgcttacttcagggaaaactgattttgatagaaccgactagttgagtattaaactgttttggaaataatttatatatctaagtgctgaaatatatttctcttctccccacttattcaaataaaaaagttttaatactataaacttttcattgttagcgccacgcagtccttgtcaagattgttctgggggacaaaaacttgatgtataaagcatgaatatacacacagtacttaaacagataccatatctgtggtattaaaattttgggggtggttgattaggattgtaaaaagactccttagggagtgaggatggaaaagagaaacactggttaatacagagtataaataaattttttggaaattga

SEQ ID NO: 83648 - DNA, 1113 bp, Homo Sapiens
  misc_feature (699)..(716): n is a, c, g, or t
gggtcggggcctgggccgcgaaggatcttctgccacagctgcaacatgggcggcaagaacaagaaacacaaggctccagcggccgcggtggtccgggccgccgtgtctgcttccagagccaaatctgccgaggctggaattgccggggaggcccaaagcaagaagccagtgtccaggccggccaccgctgccgctgccgctgccggctccagggagccccgtgtcaagcaaggtccaaaaatttatagttttaattctacaaatgattctagtggtcctgcaaatctggataaatctattttgaaagtggtaattaataacaaactagagcaaagaattattggagtgatcaatgagcataaaaagcaaaataatgacaaaggaatgatttctggaagacttactgccaaaaaattgcaggatttatacatggctttacaagcattttcatttaagacaaaggacattgaagatgccatgaccaatacactcttatatggaggtgaccttcattctgccttggattggctctgtttaaacctttcagatgatgcacttcctgaaggattcagtcaggaatttgaagagcagcaacctaaaagtaggcctaaatttcagtctcctcaaatacaagccactatttcacctccattgcaacctaaaacaaaaacatatgaagaggaccccaagagtaagccnnnnnnnnnnnnnnnnnntatggaagtaaatatgaaagagtggattttacgatatgctgaacaacaaaatgaagaagaaaagaatgagaattctaaaagtttagaagaggaggaaaaatttgaccctaatgaaaggtacttacatcttgcagcaaaactgctggatgcaaaagaacaagcagctacctttaaactagaaaaaaacaagcaaggccaaaaagaggctcaggaaaaaataaggaaatttcaaagagaaatggaaactttagaagaccatccagtatttaacccagccatgaagatttcacatcaacaaaatgaaaggaaaaagcctcctgtagccacagaaggagaaagtgcattgaattttaatttatttgaaaaatctgcagctgctactgaagaagagaaagat

SEQ ID NO: 83649 - DNA, 347 bp, Homo Sapiens
  misc_feature (196)..(196): n is a, c, g, or t
  misc_feature (222)..(222): n is a, c, g, or t
  misc_feature (224)..(224): n is a, c, g, or t
gcccccctgccgtggccccttggccccgggcgcgcccggcggggtccatagtctcctccgcgggccctgagcgcagggccagacccagactcggacccagatccagacccagactcggacacagatccagacccaggcaggcccagggcgcgggggctggacgcaggcaggtcagcccggccggagcgcaggatcnagtccgctctctgttgtggcggttcntngggcaacaagcccctaagtttccagccctgccctgacttgggctggcctgggataatccgccctcaggtgtggcgtgcacagtgctaaggtttggttctctggaaaataaaacatccagcgac

SEQ ID NO: 83650 - DNA, 433 bp, Homo Sapiens
tggagctttcaatattcacaaataaattgacgctatgtgataatatttgtattgcctgttatgtatcagatacttctcccatttaatttcacatactctatctcctttaatccaaatatagagaatacatgtaaatccactccatgttattgtaaataatcgttgacaatgaacatagagacgcatattttataatagtaagttacaaacacaaggtaaaaataggcagacacgaaagctatgcataaagactaaatggaaagcagtctagatagtgataatttttttctacctactaaatttactagtaggagcatgtatccttcccataatgagagaaaaaatgaacttttaatggatttttaacatatatggacagccatggaacaatttctgtgctaactttggggtacttatgtgcagcatattggac

SEQ ID NO: 83651 - DNA, 590 bp, Homo Sapiens
ctggaggcggtggctgggataaacgtgcacccagcaggactcgccttggctccgggttttgcttgtgctcacatgtggcaccatccttggttgccctcctggagaaggcattcacggcctggggtgggatggctgggctgtagtttagcctgggccttgggccccagtgggggacagggcctgtctgcatgaagtggaccggagacctgcagaccccaggaaagtgtcactatgggagggaggggcaggcagtcagtggctggtgccatggggtgaagccaccatgggctgggggtgaagagccggcaggaaggggaccagtcacagggagtgtggacagtcaggggtttgctttctgctcctgagttggggtgtgcagcgtggagcccacagcctggttctgggccagggcacagtgccaggggctccgctctgacctccaggagggagactgggcccgggacccctgttttctgctccctggactgcctagccctgagtgccacggatgaccagcgttctgtttactcttctcaataaccctatctcttcacacatccccaggcccagtgcttgccggctgtggtgac

SEQ ID NO: 83652 - DNA, 541 bp, Homo Sapiens
  misc_feature (42)..(70): n is a, c, g, or t
cactgcaatccagcctggatgacagagttagaccttgactcnnnnnnnnnnnnnnnnnnnnnnnnnnnnnttgacagcatcagaaagagtaaaataccaatataattgagggtccagaaatattgatcacatttatcatcaactgacttttgaaaatagtgctaagacaattcaatgggggcaaaatagtctttttcattaaatgatgcttggaaacatggatatccacatgcaaaataatgaaattggactcctacctcatattgcatataaaaattaactcaaagttgacctaagatctaaatgtaagagctaatattgtaagtatcttcaaagaaaacatggcgtaaatctttctgactttgaattaggcaatgatttcttaaataaatgacactaaaaacacaagcaacaaaagaagaaaataggtaaattaaaattaaaaccatttgtgtttccaaggacaatatcaagaaagcaaaaatacaacccacagaatgagataattttttttaaaatcatgtattagttaagggaggaa

SEQ ID NO: 83653 - DNA, 1418 bp, Homo Sapiens
  misc_feature (100)..(149): n is a, c, g, or t
  misc_feature (719)..(734): n is a, c, g, or t
ggcggctgcggactcgttctcaggcggccccgcgggggtgcggcttccgaggtcgccgccactcaaggtgctggcggagcagctgcggcgcgacgcggannnnnnnnnnnnnnnnnnnnnnnnnnnnnnnnnnnnnnnnnnnnnnnnnncgctggacctggcggccgtgtggatgcagggcagggtagtgatggcggacctgcggcggatggctcggctgagggacccgagcggggacttctcggtccgcggcctggagcgggtgccgcgcgggctggccctgtctagtcccaggaaagtatgtgatggtgagtgggagtggttcaggcctgcagccctgagccctgcctgcaggctgtgaagatgacagacctttctgataatcccatccatgaaagtatgtgggaactggaggtagaagatttacacaggaatattccttagagtatgttggaactgtcgttaaaaacaaccaaaatcccgaaactatttagaagcttataatgatgtggatttcatggacacttttcaatgcgtatttttcaaatgcttctcagagagccttgctttggttgaccaaggagtccggatgtaggaatgtttaaatcctcggatacttcagtgacacagcctctgctgccccttgctttgcctgtgtttgctgatgaaaagcagatgcttgtgtttcattttccttcctgggtttgtgtgtgttaatnnnnnnnnnnnnnnnnagacacagaagtctcatgttgcattttccaaattttatgagtgatgatactttttccattactgctgcgtccctgttttacaatgcaaaatttaagtacggtcattgcccatggtgattaaagtgtggttatgggcaggaagacagactgtgtaaaaaaggaatgacatcctggctcctcatcttcttcatcagcaactaccataaccagtttgcgagtcaaatggcatttcctaacggcaggcatggcggcccctgaaagacaacagctccctttctgcttcggacaccactcaaacatttagacgcagctctatcccttttcctagctagagaaggtgatgccttcttccattactcagagatgttgagacgttttcagaatttcttgttgaaatgaaaaacatcaagataaaggacgcctttcaggcattagctaaacttccacttcataactttcggcgagacatggtgagcctcctggtgtagagttcttttgtctttgtatggaatgactttttgctgtgatggttttgaatgttgggtttctgctgtctgcttagtacccatgcctgaattttttgagattgtaaatatcaaaggagttagattgtgttctgacatggttgtagactttcacctggattattgatattctacttctaataaatttttaataggcaaa

SEQ ID NO: 83654 - DNA, 555 bp, Homo Sapiens
taaatttaacagataagtttatttgagcaaagaacagtttgggaatcgggcagccctcagaattagaagttcagagctctgctccggcagcatgagcagcaagcttttgtaggctgagcctagaagcaaagaaagaaactgcagtcatgtgttgcttaatgatggggatacggtctgaggagtttgctgttagttgattttgtcgtcgtgcaggcatcagagtgcgctacacctgccgcacacctaggctgtgtggtgtggcctattgctcctaggctgcatacctgctcgcatgtgactgtactgaatgcttcaggccattgtaacacaatggtatctaaacacatctaaacatagaaaaggtacagttaaaataaggtattataatcttacgggaccaccatctacatgtggcccatcattgactgaaacgttgttagcagtgcatgactgctcttagcggtgcatgactgcttgattggctactgctgggcatttgccttatttgtgtggtccaatgcatggtcccaagttctgccacagttggcggccgca

SEQ ID NO: 83655 - DNA, 348 bp, Homo Sapiens
gaagcgtggccacaaggtggtgtgggacattgccgcgggtcgcagatgtgtacgacatttccaacatagatagaattggtcgatcagaggttgagcttgttcagatagtcatcgatggagtcaattacctggtggattgtgaaaagaagttggagagaggccaagatattaaggtgccaccccctctgcctcagtttggcaaaaagtaaactttccctttcccaatttataaataatctgtctgctggtacaacagacataaatctctactctgagagtttttatacacttggaaaaatataaaattgtagatcctgcctatctttacaataaaactctccttaatat

SEQ ID NO: 83656 - DNA, 804 bp, Homo Sapiens
  misc_feature (65)..(99): n is a, c, g, or t
cactatagggcgctactcttgagcgaacgacgacgcagcgagtcagtgagcgaggaagcggccgnnnnnnnnnnnnnnnnnnnnnnnnnnnnnnnnnnncagtcgacggtaccggacatatgcccgggaattcggccattacggccgggattatgtgacttgtccaaggtcacacagctagcaggtggaactgggatttgaacccatgcaatctgacacaagagttcatgtgtctaatcattatctgtggtttgggggacaccattacattaaaatgaatgagtcactaagtgagtcactgtatataaaatacttggaaattgtaaagtaatatacaaaagatattaacaaagtattattcatggtaaacaaatcacatcagtagcaaacacagggtgggaactcaatcttatgttatagcttactcttaagaagaatatgtgaagccaggaacatggttaaaggtacagaccagaaaatttctgacatgtgataaatatttcagtgacttttcagatttatttcttgttagccgctgtgtctatttggtgctacaaaaactgaaagaaacaaaatccctgatgtaagggcttataataaatacacagttcggagatgaactaaggatattttacatttacgggaaaggattggacaatagtatcattttctcaccatttgcatgtacatcatgtctttccaattgttttcattatttttctgaaagagctgcaaaattgtgcagtggttcaacctgaccaaagtggtattatgctgctgggaagtaaaagtattagacaccaa

SEQ ID NO: 83657 - DNA, 724 bp, Homo Sapiens
cagtcgacggtaccggacatatgcccgggaattcggccattacggccgggggcagctggacccagcagccgctgtctccagtgccgcagcagcaggtagtgctcatagctctctttgtccagtgcttcggccttggtcccagcgccttcccacggagcagcactcttcaccctgcacagccttgttagcccaacagcatggtggtggaacaccccgagttcctcaaggcagggaaggagcctggcctgcagatctggcgtgtggagaagttcgatctggtgcccgtgcccaccaacctttatggagacttcttcacgggcgacgcctacgtcatcctgaagacagtgcagctgaggaacggaaatctgcagtatgacctccactactggctgggcaatgagtgcagccaggatgagagcggggcggccgccatctttaccgtgcagctggatgactacctgaacggccgggccgtgcagcaccgtgaggtccagggcttcgagtcggccaccttcctaggctacttcaagtctggcctgaagtacaacgaaacggaggtgtggcatcaggattcaagcacatggtacccaacgaggtggtggtgcagagactcttccaggtcaaagggcggcgtgtggtccgtgccaccgaggtacctgtgtcctgggagagcttcaaccaatggcgactgcttcatcctggacctggggcaacaacatccagc

SEQ ID NO: 83658 - DNA, 1136 bp, Homo Sapiens
  misc_feature (1081)..(1081): n is a, c, g, or t
  misc_feature (1117)..(1117): n is a, c, g, or t
agagtatgaagtcgacggcgcgccgaattcggcacgagggccgcagcagcaggtagtgctcatagctctctatgtccagtgcttcggccttggtcccagcgccttcccacggagcagcactcttcaccctgcacagccttgttagttcttgcagatacagcgctaggaaaaggggagtaattcaggtctagaatggaaaaactgttttgttgctttcccaacagcatggtggtggaacaccccgagttcctcaaggcagggaaggagcctggcctgcagatctggcgtgtggagaagttcgatctggtgcccgtgcccaccaacctttatggagacttcttcacgggcgacgcctacgtcatcctgaagacagtgcagctgaggaacggaaatctgcagtatgacctccactactggctgggcaatgagtgcagccaggatgagagcggggcagccgccatctttaccgtgcagctggatgactacctgaacggccgggccgtgcagcaccgtgaggtccagggcttcgagtcggccaccttcctaggctacttcaagtctggcctgaagtacaagaaaggaggtgtggcatcaggattcaagcacgtggtacccaacgaggtggtggtgcagagactcttccaggtcaaagggcggcgtgtggtccgtgccaccgaggtacctgtgtcctgggagagcttcaacaatggcgactgcttcatcctggacctgggcaacaacatccaccagtggtgtggttccaacagcaatcggtatgaaagactgaaggccacacaggtgtccaagggcatccgggacaacgagcggagtggccgggcccgagtgcacgtgtctgaggagggcactgagcccgaggcgatgctccaggtgctgggccccaagccggctctgcctgcaggtaccgaggacaccgccaaggaggatgcggccaaccgcaagctggccaagctctacaaggtctccaatggtgcagggaccatgtacgtctccctcgtggctgatgagaaacccttcgcccagggggcccctgagtcagaagactgcttcatcctgaaccacngcaaagatgggaaaatcttgtctggaaagcaagcanggcaacacggaagagagga

SEQ ID NO: 83659 - DNA, 641 bp, Homo Sapiens
  misc_feature (591)..(591): n is a, c, g, or t
gatccacagaacatgacccaggtccctacgtcctccccgaagggtcagcagtctgtctgagtcgtcaggcctccagcagccgccccgataatgccccggcactgaagtcgggacacaatcagctttaaccaatggatgaggggggtggccacaggagatggggagaggagtctgaactaaacccctggcttttgtgcacactgcatacgtttcagaactcctggatggtaaccatctctggagtgcagcgcttgctgcagtggaaatgatcaggaatactgaccgtgtttctcttgcctccgaggttcttgggcacactctatagccatactggacaggaaccaggtgccccgtgtaggcatcgtcggtcggtttgccgtcagagatggcgcatctcgctgcatcccccgagagtacaccggttgctctagccacctgcggcccgcccatctgcgctagctggccttcacgctcttgatcgtctttcctttgtattggagaaggactgggtcagagatctgttggagagagagaataaagagattatttttcattatttttaaatggttgtttttgttttaatttgcacantacacagaggaaataacttaggtacttctgttttttaaaaaaatataagg

SEQ ID NO: 83660 - DNA, 672 bp, Homo Sapiens
gcggccgctctggaagcagcctagtgtccccgttcagcagcgccacagctgcgctcccgccaagtctgaatctgaccacacctgcttccacctcccaggatgccagccagtgccagcccagcccagacttcagccatgatcggcagctcaggctgttgctgagccagcccatccagcccatgatgcccgggtcctgtgacgcaaggcagccctcggaagtcagcaggacgggacggcaagtcaagtacgcccagagccagactgtgtttcaaaatccagacgcacaccccgccaacagcagcagcgccccgatgcccgtcctgctgatggggcaggcggtgctccaccccagcttccctgcctcccaaccatcgcccctgcagcctgcacaggcccggcagcagccaccgcagcactacctgcaggttcttgggcacactctatagccatactggacaggaaccaggtgccccgtgtaggcatcgtcggtcggtttgccgtcagagatggcgcatctcgctgcatcccccgagagtacaccggttgctctagccacctgcggcccgcccatctgcgctagctggccttcacgctcttgatcgtctttcctttgtattggagaaggactgggtcagagatctgttggggagagagaatacagagattattttc

SEQ ID NO: 83661 - DNA, 694 bp, Homo Sapiens
aggacaatgacatatgaatgaggatcaaaacgagctttggccaggcactgtggcgctcacctgtaatcccaccattttgggaggctgaggcggaggaccacctgaggcaaggaattcagaaccactctgggcaacataatgacactaaaaagactatctctaatcaaggctagaaccaagggaaggctaagaattgcccagtactgtgcaactactgaaagccctacccaaggccaccagccttgtcttcctctttcctctgtcagttcaaaaagaacagaaacctccagctcttttacatagcaggtaccaggcatttatcagaagaggccaagcttctggttcccatgcagccctttgaatagtgtgtctaaacaaaaataggtgtccaagtagtcacactgagactttaactggtaacccaccctgtggcgtcagtcgcagtgctctggccaacactatagcagggcttattcttctccctcatgtgtagtgaaacaaaatgtaacaccttgggttcattcagttccattccctatgtctacctgtgtcaatataattccctgatttggaggcagctctcctcattttccccaaaacagggaaagcaaggagtaaattcctcttaaaatcaaaagctaataatatgcttcctaaaataaagactcatcaaggtctcagttcaagtttaaaa

SEQ ID NO: 83662 - DNA, 439 bp, Homo Sapiens
tttggtgtagggggaccctgaaaacaatttaattttatgcttcctgtttccttgtctccttttttgaatgatagtctctgtgtggtgttcctatcctagaaaaccttaactgggacaagctactctcaagcatcttcacttgagaaacagtaactgaggaagtttattgtatctggacatggtttagatgataagattctgaacttaaacttatgccataatggagtgagactcttagggtacagagtaagtacatttttgcatgttagtgagacaagaactgtgccgggggcagactgtgatagtttttgaagatgtccctcaaacaattccttcccttccttggactcctctcttcagagggtagagtccatttccttttccttttaatctggattggccttctaactcactttgaccaataaaatgtggtaaaagt

SEQ ID NO: 83663 - DNA, 662 bp, Homo Sapiens
  misc_feature (418)..(433): n is a, c, g, or t
acaaagttgcagaagttggacctgagtagttatccagaagcgacagaaaaaaacgtagaaaggattttgggattgttgcaaacctactttcgaaagtatcctgatactcctgtgtcctattttgagtttgtgattgatccaaactctttttctcgtactgtggagaatatattttatgtttcttttattgtaagagatggttttgcaagaataaggcttgatgaagacaggctgccaatattagagccgatgaatgttaaccagatgggtgagggaaatgattccagttgccatggcaggaaacagggagttatatctttgactttacaggagtggaaaaacattgtggcagcttttgaaatttctgaggctatgattacatactcctcatactaaagatttcttagtatagcatccnnnnnnnnnnnnnnnnctgaagttagatggagagtaaaatgtaaactgaagcacatattgtatctcttgtaaagtgaaaaagtattttcaagaacatcagacattgttttactgtgcagcatatttttcttagtaatttataaggtcatgatcttctgttattaaaacaaattcactggcatatttatgggaacgttttattgaatgccctttaagactattaataaaaacaagttttggatacc

SEQ ID NO: 83664 - DNA, 2436 bp, Homo Sapiens
  misc_feature (1115)..(1123): n is a, c, g, or t
  misc_feature (1413)..(1425): n is a, c, g, or t
  misc_feature (1762)..(1774): n is a, c, g, or t
cgttcgggtgcagaatcctcccccacaacctgtggactggaataacgactactgcagtagtgggggcatgcagagggacaaagcactgtaccttacttgagaatctgaacacctcttctttccactgaggaattcagggaagtgttttcaccatggattgctttgtacagtcaaggcagttctccattttattagaaaatacaagttgctaagcacttaggaccatttgagcttgtgggtcacccactctggaagaaatagtcatgcttctttattatttttttaatcctttatggacattgtttttcttcttccctgaaggaaatttggaccattcagattttatgttggttttttgctgtgaagtgctgcgctctagtaactgccttagcaactgtagatgtctcggataaaagtcctggattttccattggttttcataatgggtgtttatatgaaactactaaagactttttaaatggcttgatgtagcagtcatagcaagtttgtaaatagcatctatgttacactctcctagagtataaaatgtgaatgtttttgtagctaaaattgtaattgaaactggctcattccagtttattgatttcacaataggggttaaattggcaaacattcatatttttacttcatttttaaaacaactgactgatagttctatattttcaaaatatttgaaaataaaaagtattcccaagtgattttaatttaaaaacaaattggctttgtctcattgatcagacaaaaagaaactagtattaagggaagcgcaaacacatttattttgtactgcagaaaaattgcttttttgtatcactttttgtgtaatggttagtaaatgtcatttaagtccttttatgtataaaactgccaaatgcttacctggtattttattagatgcagaaacagattggaaacagctaaattacaacttttacatatggctctgtcttattgtttcttcatactgtgtctgtatttaatctttttttatggaacctgttgcgcctatttatgaaataataaatataggtgtttgtaagtaaatttgttagtatttgaaagaggtttctttgatgttttaacttttgctggcnnnnnnnnnttcacgcttggtgtgaatactttattatttagtttttacagtaacatgaataaagccaaacctgcttttcatttagcagcaaattaaagtaaccagtccttatttctgcatttctttggttgatgcaaacaaaaaactattatatttaagaactttatttcttcatacgacataacagaattgccctccaagtcacacaagctccaagactaaacaaacagacaggtcctctgtcttaaaaaggttacttcttggttctcagctggttctagtcaattctgaaccaccannnnnnnnnnnnngcaaaaaagtaaaagtcaaaccaaacttcctcaagctgcatgcttttcacaaaatccagaaagcatttaagaattgaactaggggctggaagaagtgaaagggaagcatctaaaaatgaaaggtgagtaaccagatagcaaaagaaaagggaaagccatccaaatttgaaagctgttgatagaaattgagattcttgctgtcttttgtgcctctacaagctactactcattccagaattcctgggtcttccaagaggattcttaaggtaccagagatttgctagggaaccaaaagtgcttgagaatctgcctgagggcttgcatagctttcacattnnnnnnnnnnnnngctagcagatttactcctttttaggggatcatatcaagaaagttagtctggttggaaaccaagagaatggctgatgtctctttcttggaatatgtgaaataaatttagcagtttaactaaatacaaatatatgcattgtgtaatccactcagaattaaacagacaaaaggtatgcttgctttggaatgattttaggcattgtacaaccttgaatcacttgagcatgtaataactaataaataatgcagatccatgtgattattaaaatgactgtagctgagagctctaattttcctgtcttgaaactgtataagaactcatgtgattaagttcacagtttattgtttgtctgtttagtattttagaaatataccagcactactaattaactaatgtcttttatttattatattatgataaagtaaaaatttcacttgcattaagtctaaactgagaaggtaattactgggaggagaatgagcagctttgactttgacaggcggtttgtgcaggaaagcacagtgccgtgttgtttacagcttttctagagcagctgtgcgaccagggtagagagtgttgaaattcaataccaaatacagtaaaaacaaatgtaaataaaagaaaacacatcatcaataaaactgttataatgcgtgaaaaaa

SEQ ID NO: 83665 - DNA, 2110 bp, Homo Sapiens
  misc_feature (539)..(539): n is a, c, g, or t
  misc_feature (1489)..(1706): n is a, c, g, or t
  misc_feature (1811)..(1819): n is a, c, g, or t
tgctattggtgacactatagaccagtgtgttacaaaaagcaggctggtacgctccggataatcccgggatatcgtcgacccacgcgtccggcaagtttaggagagaatagtcatgaaaagaaagggaagaaaggggagaagggaagaggttaaaaagtaagtgctcagacctatgaacgtaatccctttgctagaaatatttaagagcagctcagcttggttgaaactgagttttgtcatcttccatatttgcaggaaggtattttctgacttgcaatgcagctagatgtaaaattttattttatcatactagaaagccttgactagaaaaatgaataaatattgagggtttcctgtccatatctggcttgcatgtgccagaaagcagagaatagaaaatgtaatctccaacatccaagcatccgaaaccccaaggggtaaggcaattctatgtaggttttggacatgaagtttggtgcatcttggtttatgctggctcaactgctattaaacctctctggcttataagtcctcttcanttctattagacaagcaccgtatccgaacaccttgcttcgcacaaggctctttagttaacaatttagcagctactgtttgtgttaaacacacttttcaccaaataggttctggaggcaaacgagagcaatggactatttaaaagaaagggctttcccagcatcacttacacatcccaaaactaaaaagatcaactcttccaactgagaaaagactcctggctttgaatggaaacttacagcagagagtcacaggccacggcaacaacaacgacaacaacaaacatttggaatattattctcaactcacgttttaataatacatcttattatttttctagtagagaaactacaaatcagcctcttcaacatttatatacagtttaataagcctcttgcaagttacttgttctctcacctgaggtatttttttcctccccaccttgcccctgttcctcccttcctcttctccctttgcaagaggaaatatttaacatatttgggtccaacttcaataatgtaataattaatacattaaaagcatttaacttcctttctagaaaaatgcacaggctaaggcatagacaaaacaaagagaaatgctgagaaatttgccactggagacaagcaatctgaataaatatttgccaaaagttctttttatgtcatatagtgtcaggatttgaaggagctattttttttaatgttgcaactagcaactcatcttcggaagacacagccaggagaatgaagtagaagtgaaaggtttataaatccatttgtaagcatttatcccatatattttaaattcaagaaaaattgtgtttatctttagaattttgtattcaatactttatgtactatgtgactcatgcttctggataaataaagcaccaaatatgtatctgtaaccacaatcacacatattatattaaatatatatctatataacnnnnnnnnnnnnnnnnnnnnnnnnnnnnnnnnnnnnnnnnnnnnnnnnnnnnnnnnnnnnnnnnnnnnnnnnnnnnnnnnnnnnnnnnnnnnnnnnnnnnnnnnnnnnnnnnnnnnnnnnnnnnnnnnnnnnnnnnnnnnnnnnnnnnnnnnnnnnnnnnnnnnnnnnnnnnnnnnnnnnnnnnnnnnnnnnnnnnnnnnnnnnnnnnnnnnnnnnnncacccggtcggggccgccgccccctaaaaagatacaccaataacaaacctgcggtcctaaaaagaaacccgtgaaaagcaactctggctggataccttcaaaccnnnnnnnnncccgcgggggaacgcaaccactcatacgcgacaaccccccgggaggggccaaagttccttaactatagaccaccccaccaaggagagccctgaaccaaaccccgaatttataatccggtccaccccccccggcctaaacctattactaagggaaagatgtatcaacacttattacacacccgccgccatcaacacaacactattccataaagagagactgttgaaaatactccccccacgaccaggatcgtcctacccaaccaatttgtgcacccaaattaaatatatttt

SEQ ID NO: 83666 - DNA, 233 bp, Homo Sapiens
  misc_feature (44)..(52): n is a, c, g, or t
ccagaatgagtgctccctttatgagctgcagtgcagcagaaccnnnnnnnnngtttgctgcaattatatagcatcacagtgctctgctaacagccagcatagaagagatttacctacagctttttgcaccactgttctagcctttaatgccttctacttaatattaagctgaccgcaatactaacgtgcccctatatttggcagccaaataaagaagaatcgtgggtaaatag

SEQ ID NO: 83667 - DNA, 1002 bp, Homo Sapiens
ggtccaaggtagcgaggcctgggtggcgaattcggcacgaggcggcgacgacggcggcggcagcgctccaactggctcctcgctccgggctccgccgtcgagccgggagagagcctccgccagcggccaggcaccagccagacgacgccagcgaccccggcctctcggcggcaccgcgctaactcaggggctgcataggcacccagagccgaactccaagatgggaggcaagctcagcaagaagaagaagggctacaatgtgaacgacgagaaagccaaggagaaagacaagaaggccgagggcgcggcgacggaagaggaggggaccccgaaggagagtgagccccaggcggccgcagagcccgccgaggccaaggagggcaaggagaagcccgaccaggacgccgagggcaaggccgaggagaaggagggcgagaaggacgcggcggctgccaaggaggaggccccgaaggcggagcccgagaagacggagggcgcggcagaggccaaggctgagcccccgaaggcgcccgagcaggagcaggcggcccccggccccgctgcgggcggcgaggcccccaaagctgctgaggccgccgcggccccggccgagagcgcggcccctgccgccggggaggagcccagcaaggaggaaggggaacccaaaaagactgaggcgcccgcagctcctgccgcccaggagaccaaaagtgacggggccccagcttcagactcaaaacccggcagctcggaggctgccccctcttccaaggagacccccgcagccacggaagcgcctagttccacacccaaggcccagggccccgcagcctctgcagaagagcccaagccggtggaggccccggcagctaattccgaccaaaccgtaaccgtgaaagagtgacaagggacagccctataggaaaaacaataccacttaaaacaatctcctctccctcgtgccgaattcgccactcaggcctcgctacttgagatgttagc

SEQ ID NO: 83668 - DNA, 328 bp, Homo Sapiens
  misc_feature (36)..(36): n is a, c, g, or t
  misc_feature (90)..(90): n is a, c, g, or t
  misc_feature (192)..(209): n is a, c, g, or t
accatatatatatgtatttaaaaaatccaaaccaanaaaaaactcatttatacctgtgtattttttaaagcgtacaatctgttcaatgcnttttaaaaatctgtttatatgacattgttaaaataaagttggtcttttgacgagagggaggatgtcacggtcagttgtaactttgccttcacaaggcaactnnnnnnnnnnnnnnnnnnagtgtgcctccttgacatttcgttcaagttatagattcaatggagctatgtcttgttttaagttgctttaatgcattgtattagatcttcaaacagaataaaggttgttttgaaactga

SEQ ID NO: 83669 - DNA, 626 bp, Homo Sapiens
gggacagctgcccggtactccagtgatcgccgcggctcgctcgcgccccggaaactgccccttctcgggggtcatgatgggcagcaagatggcgtctgctagtagggtcgttcaggtagtcaaaccacacactccattaataaggtttcctgacagaagagacaatcctaaacccaatgtatcagaagctttgagatcagcagggctaccatctcactcttctgtaatttcacaacattctaaaggaagtaaatcaccagatttgctgatgtatcagggtccaccagacactgcagaaataataaaaacattacctcagaaatacagaaggaaacttgtgtctcaagaagaaatggaatttatccaacgtggaggtcctgaataaccatggtggctgctgtttgtcatcagacaatagaattgtctttacaataaaggacttccaaaatgacagatgagaaactgtatattaaacacctttaataaatattatgaaaaaaatgaaatatagaaaatttagatggacacttgtatttcctaatttatgtatcttggtcagcttctccacaagcttacctaattgtttatatactttatacttattaaagtatacatttttaaatgtt

SEQ ID NO: 83670 - DNA, 1048 bp, Homo Sapiens
  misc_feature (797)..(902): n is a, c, g, or t
  misc_feature (910)..(913): n is a, c, g, or t
  misc_feature (915)..(916): n is a, c, g, or t
  misc_feature (960)..(972): n is a, c, g, or t
ggttttggcaagctggaactctttctgcaaatgactaagatagaaaactgccaaggacaaatgaggagtagttagattttgaaaatattaatcatagaatagttgttgtatgctaagtcactgacccatattatgtacagcatttctgatctttactttgcaagattagtgatactatcccaatacactgctggagaaatcagaatttggagaaataagttgtccaaggcaagaagatagtaaattataagtacaagtgtaatatggacagtatctaacttgaaaagatttcaggcgaaaagaatctggggtttgccagtcagttgctcaaaaggtcaatgaaaaccaaatagtgaagctatcagagaagctaataaattatagactgcttgaacagttgtgtccagattaagggagataatagctttcccaccctactttgtgcaggtcatacctccccaaagtgtttacctaatcagtaggttcacaaactcttggtcattatagtatatgcctaaaatgtatgcacttaggaatgctaaaaatttaaatatggtctaaagcaaataaaagcaaagaggaaaaactttggacatcgtaaagactagaatagtcttttaaaaagaaagccagtatattggtttgaaatatagagatgtgtcccaatttcaagtattttaattgcaccttaatgaaattatctattttctatagattttagtactattgaatgtattactttactgttacctgaatttattataaagtgtttttgaataaataattctaaaagcatnnnnnnnnnnnnnnnnnnnnnnnnnnnnnnnnnnnnnnnnnnnnnnnnnnnnnnnnnnnnnnnnnnnnnnnnnnnnnnnnnnnnnnnnnnnnnnnnnnnnnnnnnngaaacacnnnncnntgggggggcccccccggcccccaaaaaatttttaaaaccctttnnnnnnnnnnnnncccccaagggaaagggaaccggggtttattggtttcctaaaggaaccgggccaaggcaaaggggttggattccccc

SEQ ID NO: 83671 - DNA, 939 bp, Homo Sapiens
  misc_feature (333)..(345): n is a, c, g, or t
actttgggccagtgaaaaatacctagaaattgatcaatatgaaatgtagcccaaaggagtcatatatcttcaaaatctaatgagatcaccctgtttttggcttattcccaaagctgtctctgtgtttacagttggagagaaaaggttagtggagtggcttttataaataagattaattattacagctataactgaagtctccaggcaggaggctttacaactcagtcagtgctatattgtgcctccattttacttccaggacctgactggcataccgttcttgatgctttctacaaatataaaaatctctgcaactgtttagataaaattggnnnnnnnnnnnnnggcaaagctgaccataaaaacaacagggggttgggggaggcagagaaaaaggacaagtatacattacatagtttaggaaagtccaggattattgcagaaattaaaatgaacaaggaaaagggcaggcaccaataaaagcacctaaagctagcaaatgcctaaactggtttatttagagtccctccccacaatgttcataggggaggaaaataatgtaatttgaaaagcatcaaaactaacaatgcacactgaccttagaaaataagattttgaatttcatcaatgaatacccttggttttcctataaaatttgactgtgtcactctgaaagacttcttcatggtggattttgcccttgcccggcaattttacttcctttcttgcactggttgcaggcttcttttgaggagccaccactaggtttcttgatgactgtggatgagggtctggtcttcttggcaggcgttttggccttaggaggtgctttcttaggccaagggcctagctttcccccgctgggcagctgagactttaggtccaggtttggaccctctctgcttcacagatgcggccttccctggggacttggctggg

SEQ ID NO: 83672 - DNA, 529 bp, Homo Sapiens
gcggccgcaaaatacaagctgaacgtggatcagaaagtgatccaggcgggcatgtttgaccaaaagtcttcaagccacgagcggagggcattcctgcaggccatcttggagcatgaggaggaaaatgaggaagaagatgaagtaccggacgatgagactctgaaccaaatgattgctcgacgagaagaagaatttgacctttttatgcggatggacatggaccggcggagggaagatgcccggaacccgaaacggaagccccgtttaatggaggaggatgagctgccctcctggatcattaaggatgacgctgaagtagaaaggctcacctgtgaagaagaggaggagaaaatatttgggagggggtcccgccagcgccgtgacgtggactacagtgacgccctcacggagaagcagtggctaagggccatcgaagacggcaatttggaggaaatggaagaggaagtacggcttaagaagcgaaaaagacgaagaaatgtggataaagatcctgcaaaagaagatgtgg

SEQ ID NO: 83673 - DNA, 549 bp, Homo Sapiens
gtagcgagattccctgtagcgagatctgctgtagggagagcggctgtagcgcgaccggctgtaaggagatcggctgtagggagaccggctatagcgagaacccctatagcgagatcggctgcgggacctggagcagctgggaccccgggatcggctgcggtgtcgccgcctggggctgcggctccgccgcccgtagctgcggctccgccgtccgtagccgccgcctctggacctgccgcgtggctctccctggcggctgcggggcaggtcccggcggccatagcgcgccacctgcacccgcagctcgcgtccgtccagctccgccccgtccatggcggcctcggcgtcttgggcgtcgcgccggtcgtgaaagcggacgaaagcgaagccccggggcgccttggtgtggggctcccgcgggatgtacacgtcgcccacgcgcccgtacttctcgaacacgcgcctcaagctgtcgggagaggtgcggtaggtcaggttgtccaccttgagggtgatcatgccgtccacgtcgggaggggggcggccgca

SEQ ID NO: 83674 - DNA, 1347 bp, Homo Sapiens
  misc_feature (761)..(789): n is a, c, g, or t
tgtcagactctccagtaggccattattattgtagcgtatatttgtgattggcagtcgatgtcaaggttcagggagttatgaagtggccctgttgttggacggcgctagtagttatgttgcacgttgtaagccaatttttaggtatgcagtgctatcgggtcgaatacgtcggtattgtagcgggataacaatgtatgatagaggctcgctgctctcgtgattttccgcatcttcgtatcaaagcggcaatggtccacacaggggtgatacctgttataagtgtttttccttaggtagtcggagcatatcagcagctagctcaatgaaggttcttcgtcaagctaaaggggagcaccagtctcttagagaaatttgttcctgtggtgttccagccatagagataaatgagataaagtgcactttggtttacgtctttcaagcacttaagaacggcaggttattcagtgtttaataaatttttactaaattggtaaatgccaaagaatctgtgtttttattgctcaatatgtcttcctgtctctaagccagaccaatgagcaatacctttgaaactagttgttacatgcttgaaccatttaactgtagataaaagcagaatgtttagttaatgagattaaaggacaaaccctgagcccttttatcagtctcctggctttaaactaagccaatgaggacagtgatttcgggggattcctgtaactaggacaaaatgtctctttatatgttgaaagaacttgcannnnnnnnnnnnnnnnnnnnnnnnnnnnnaatctcaaaggcaattgagtgggtcttctgggccagacctatttaatttacgaaacatagtaccttgcagagaataggcattgaaatattatttaaacaatcaaaccaaagatgttcttctatcttcagctgtcagtgatctaatgccctcatctctcttatcctcaggacccagaatggtatattccacataaaagatgctttgtttatcaaatgaatcaaaaagcacgcctgaggcatttatttttactcctttacttctgtaggccaggtcaaggtgggtctaattcacttttatcatcagcacttaagaaactggatggaagaccacaacaccttgttttttgcaaaaattttccatctcctcaatcaggccaggaagcatgtatcttctggacaggactttatctctctactcagcttagtacactgccttatattagtccatttgtcccatgttttcatcactgaataaacttgttaaatgacttttggtctggatctcacacctatattacttcatttccttctgtgagcactctataatgataacatcat

SEQ ID NO: 83675 - DNA, 754 bp, Homo Sapiens
acaaattcccccactatcctgagggatgacagtatgtccaaatctgacttctacctcatcccacaaccttcaatcccctcctgcctttcctgatttggtaaatggtaccatgcctaaaatttgagggtcatgcacgactttttggtctctcatgccaacccgcattccctgtcttgtcaattttatttctactaccttagttaagtctctcattagcgctcagctagatttcagaaacagtgatgaccttcttgaaatctaactcttaaaccaccaacacactccccactcctgccccaattaacccctctttaaaggactcccagtggcctttaaaaaccatctgacaattgccagcacattaagtggtgtccttcaggatctgctccttcctgcttctctaaccacgacttgacctgtgcttctcccttttccagaaatgtgtttctctcccttcctttgccttgctttctcttacctattcttccaggctcaattcaggcctcttccttctcagaaatcaaaaagcttagcagatcctcctgagcgaggtgaggcatatcttctttatgcaatcatagcccctttcacaaggtattatattgcctcttttcctcactgaaccataagcaatttaagagtgcctggcttggtgcctgacacatatctagtattcaacaactgtttattaactggagtgtgtatatgtaaaacctataacttaatgtacagaattaataaagcattgataaca

SEQ ID NO: 83676 - DNA, 475 bp, Homo Sapiens
  misc_feature (29)..(29): n is a, c, g, or t
gctaaaaataggttctaaagtaatgtaanaatataaagcacaaatatacttgaatattgcttaaagaattgtgtgaatagcaacatatattatggatatatactttgtgatatttttaaaaaataattttttcaaagaatgtataagctgcatatataactcaggagattccatgtctttctcatatttcagaggaaagattataaaatataaaatttcttagagaacacctctttgtcagagataaacaagaacaaatactctaaacttatgtgaacagttttgagtttatgaattctagaaactaaaatcaagaatacagaaaaatgaaaataacattttacttctgcgcttctatgtttgggaaacattgctctgataaaaaatagctgtcattatgcagtgtgtatattcaaatatgagataagactatgtacacatccacttttgttaataaactcaatattgaatacgt

SEQ ID NO: 83677 - DNA, 1059 bp, Homo Sapiens
gcaagaaaagggaggaagatcctgaagattctcttatgaagctccaaaattgataatcctgtctcagctctgcctcctcaggagagcattagtagaacagcagtgatgaggacacagagggagcagacagtgggtaccacgactctccgtaaccatttgcatgtgacttagcaagggctctgaaatgacaaagagaacgagcaccacaaatgagaacaggatcattttagtaaatacagctttatcccaaaagctttaactgtattggaaaaacttaaaaaatagcatcctcaaattttctgattcttatttgccatgaaatagaacttagtaaattaaatgttatttgaaaatgttataagagctttgtaaatatttcagaaaatatgggataaatgcctgaatttggttcttctacaggtgctataataaagtccatctctcaatacttatactttctaaattcatctcagaatattagcagccatattccacagttcctataatttttactgggggggatttgtgataggaaagtccttgggaaacatttccaatctttcaaaatattattgtgtatcttaagaagtataggaacttgtatgttgaaatgttgtatggtagttcttgtatagttaaataataatctttttaagagttaatgataagcatatgttatgtgcattattaataaaatagtggccacttaggtaatacccacttttatcttgtgtgctgggtactctggttactgagataaataaggcactggacatcctcacgtggagttcacaggctcatcagtgaattctgtaccacatttcaaccttgtttattttagtttaatggaatatacattcttagtattgcctgattatttaaatttgttgagggggattgcatgttgctttattggcctgtaaaaatagctagtttggtaagatttggtctcgcaccttccatctttgctaccacattaaagatgagcttgttaaaaaggaaagcatatttctctgattgcccttatggagaaataaagataaaattcaaagaaacaaa

SEQ ID NO: 83678 - DNA, 268 bp, Homo Sapiens
  misc_feature (246)..(246): n is a, c, g, or t
  misc_feature (256)..(256): n is a, c, g, or t
gtatcatgccagactcaattctcaattatccaacctaatggaaaggagataggataattcagtgtttctttattcactttggggggttagtttgatgccttggaagtatgtgaaactccacgaatttttggttaaaactataatgtaagttaggtgtgtgttgagtaactcccaccacactttacctttcttcctttatactcttctttcctcatatttaatctcctaggtattttcagctgtcanctgtgaagcntattttaaggaa

SEQ ID NO: 83679 - DNA, 734 bp, Homo Sapiens
  misc_feature (456)..(477): n is a, c, g, or t
  misc_feature (480)..(483): n is a, c, g, or t
  misc_feature (485)..(485): n is a, c, g, or t
  misc_feature (487)..(487): n is a, c, g, or t
  misc_feature (490)..(546): n is a, c, g, or t
  misc_feature (548)..(550): n is a, c, g, or t
  misc_feature (552)..(552): n is a, c, g, or t
  misc_feature (554)..(558): n is a, c, g, or t
aagtggcccaatgatattatataccatgctgatctgattgttcttttccattccttgagtcaacttccagggtcttggatactaaagagaaggagaactgtggttaatgttttggatcatcatttgtgaacaaggccagactttgcccattttaggctatccagggacttaaggtagccatctggatcataagaaggtcctgcagttgagacaaaatgacccaagtgtattttccacaagttttgatcctgtgtaatatttctttttccttccctagtgtatgtagatacgaaggcatggaatgcagttccactttctccccagagttgatctttttgtgattgctttcccgtctctagtagtattctgttgtgtctagagaactgattttttcctacatacgcaaattgtacatttgtaagtgaaaatgtcaatacattaaagcattaaccttcnnnnnnnnnnnnnnnnnnnnnnccnnnncncnccnnnnnnnnnnnnnnnnnnnnnnnnnnnnnnnnnnnnnnnnnnnnnnnnnnnnnnnnnannnanannnnncttttgttgggcccgccctcgggcccctcaaaaaaagcttttctaaaaaccatttctttttgggcgcccgccgggccccccagtaagggaaagggggaaccttggggccaataagcgtggcttccccataagggaaaatccccggggccaaggaaactagaggggtttgggaattt

SEQ ID NO: 83680 - DNA, 994 bp, Homo Sapiens
tgcggccgcttctgcattcccccagcaacggcgctctgctagagagctgccgtaagtcacgctactgccgcaagcctctgccgtcgctaagcacgtctgtaggttcaggctaaggttttccgtcagaaggccgcgcaagtgcacttgcgtgtcaccgttaccgtagcgactgggcttctggactgtatatcctagctgccttgtcaacatcttcgagcatcggcagctccggaggccggggtaactggcagcaggtaggaaactatgtgaaagaatctcctgatgtcataatttccgggtgtcaccggaacatttgatcatcattcctttggcaattccagccttctgtggaaaggccagtagaaagcattgatttattcacctctacaggaatcagactcagcctcttttggttttcagtgaagtatgccttttcaatttggaacccagccaaggaggtttccagtggaaggaggagattcttcaattgagctggaacctgggctgagctccagtgctgcctgtaatgggaaggagatgtcaccaaccaggcaactccggaggtgccctggaagtcattgcctgacaataactgatgttcccgtcactgtttatgcaacaacgagaaagccacctgcacaaagcagcaaggaaatgcatcctaaatagcaccattaagtcttttgtcaaggtctgactaggtcaagggtaatggaccagtatcatctggtgatctggtaaacaaataaaagtggtggcacctttagatgatgacaacagttgagctctttacttttagtaagaccgacagaaatgtagtcagtaaagcacatgtagtgataggctatcagttatgtctgatacataagacagaataatatttcacaattagaaagtaccttagagatcatcttgctcacagtagatcattaatatcaataattaaagatgaagcttaatccaccatggtcatcagtcaggtggggcttattct

SEQ ID NO: 83681 - DNA, 469 bp, Homo Sapiens
tgaagtctttaataaataacccataattgaagtgtataatataaaaaattttaaaaatctaagcagcttattgtttctctgaaagtgtgtgtagttttactttcctaaggaattaccaagaatatcctttaaaatttaaaaggatggcaagttgcatcagaaagctttattttgagatgtaaaaagattcccaaacgtggttacattagccattcatgtatgtcagaagtgcagaattggggcacttaatggtcaccttgtaacagttttgtgtaactcccagtgatgctgtacacatatttgaagggtctttctcaaagaaatattaagcatgttttgttgctcagtgtttttgtgaattgcttggttgtaattaaattctgagcctgatattgatatggttttaagaagcagttgtaccaagtgaaattattttggagattataataaatatatacattcaaaaaaa

SEQ ID NO: 83682 - DNA, 1099 bp, Homo Sapiens
  misc_feature (568)..(584): n is a, c, g, or t
  misc_feature (651)..(659): n is a, c, g, or t
  misc_feature (895)..(895): n is a, c, g, or t
ggggtccagggacgctaccctcacgtgtctggttccgagtgctgcgttcggctgtgctgggaagttgcgtagacagtggcctcgagaccctgcctgcctgaggaggcctcggttggatgcgaaggagctgcagcatccaggggacaagatgccaactggcaagcagctagctgacattggctataagaccttctctacctccatgatgcttctcactgtgtatggggggtacctctgcagtgtccgagtctaccactatttccagtggcgcagggcccagcgccaggccgcagaagaacagaagacctcaggaatcatgtagaactggggggctttttctcctgagcagagaggcccaaggcatgctgtggagagacttcacctgccaccatttccaggtcaacaggactagagcgttgatggttttcaaaccctgttggaagaaagtgcccatggtttctctggttctgccagtttgacagtttatggaggcttttgaatcgtaatagcaatgtgagggtgaggtacacctacagacattaaataatttgctgtgtctgtgaatatnnnnnnnnnnnnnnnnnaagtcttgtgagcccgggttgcattttaggagttcccccagtccgccccccagaaattgtacgtttnnnnnnnnnatgtgttttttgccgccccccccgaagaaattctttttcttataaaccacctctctcgatttggtgggacggacccgcggcgcctccaaattacaggggaaacggtcgccaaattgtggggtccccaacatttttcgtctcttccttagaggaaagaactctctgggggctattttgtaccaaagccggctttgtgcggaactcctttcttccgtaaaataaaacaacacccgcgntcgcggcggtgcaaaacttacgaagacgggttttttgtgcaaccaatacaccacagaatgtggaggtcccgccacgaggggacgccttaactgggggactccttcctcccaccccaggtggagccgctcataggggagagccgtctttgtatacttcagaatatatgaccgcccgccgcgccccgggtggtaatattgtatatc

SEQ ID NO: 83683 - DNA, 1443 bp, Homo Sapiens
atacacaagagtatgttcccttaatgaacactttggaaatgtcttgacaccctgtactgttttgcctgtgaaattgtattctgatgccaggaatgttctatcaggcataattgattcttatgaaaacttaaaagaatttaaaggtgacctcattaaagtacttgtgtggatacttgttcaatactgctccaaaaggcctggcatgaaagagaatgttcacaacactgaaaataaagggaaagcacctctaatgttgcctgctttgaacactttgccacctcccaaatccccagaagacatagacagtttaaattcagaaacttttaatgactggtctgatgataatatttttgatgatgagccaactatcaaaaaagtaatagaagaaaaacatcagttgaaagatttgccaggtacaaatttgtttattccaggatcagtagaatcacagagggttggtgatcattctacaggcactgttcctgaaaacgatctttacaaagcagttctattaggataccctgctgttgacaaaggaaaacaagaggacatgccatatattcctctcatggagttcagttgttcacattctcacttagtatgcttacccgcagagtggaggactagctgtatgcccagttccaaaatgaaggagatgagctcgttatttccagaagactggtaccaatttgttctaaggcagttggaatgttatcattcagaagagaaggcctcaaatgtactggaagaaattgccaaggacaaagtcttaacaagacttttatgttcatacagtaatgacttgttattttagtttatttggaatagacaatatggctcctagtcctggtcatatattgagagtttacggtggtgttttgccttggtctgttgctctggactggctcacagaaaagccagaactgtttcaactagcactgaaagcattcaggtatactctgaaactaatgattgataaagcaagtttaggtccaatagaagactttagagaactgattaagtaccttgaagaatatgaacgtgactggtacattggtttggtatctgatgaaaagtggaaggaagcaattttacaagaaaagccatacttgttttctctggggtatgattctaatatgggaatttacactgggagagtgcttagccttcaagaattattgatccaagtgggaaagttaaatcctgaagctgttagaggtcagtgggccaatcttccatgggaattcctttatgccacaaacgatgatgaagaacgttatagtatacaagctcatccactacttttaagaaatcttacggtacaagcagcagaacctcccctgggatatccgatttattcttcaaaacctctccacatacatttgtattagagctcattttgactgtaatgtcatcaaatgcaatgtttttattttttcatcc

SEQ ID NO: 83684 - DNA, 882 bp, Homo Sapiens
tcttttctttttctcctcctcctaccctttttactttaaagggaatttacactgggagagtgcttacccttcaagaattattgatccaagtgggaaagttaaatcctgaagctgttagaggtcagtgggccaatctttcatgggaattactttatgccacaaacgatgatgaagaacgttatagtatacaagctcatccactacttttaagaaatcttacggtacaagcagcagaacctcccctgggatatccgatttattcttcaaaacctctccacatacatttgtattagagctcattttgactgtaatgtcatcaaatgcaatgtttttattttttcatcctaaaaaagtaactgtgattcttgtaacttgaggacttctccacacccccattcagatgcctgagaacagctaagctccgtaaagttggttctcttagccatcttaatggttctaaaaaacagcaaaaacatctttatgtctaagataaaagaactatttggccaatatttgtgccctctggactttagtaggctttggtaaatgtgagaaaacttttgtagaattatcatataatgaattttgtaatgctttcttaaatgtgttataggtgaattgccatacaaagttaacagctatgtaatttttacatacttaagagataaacatatcagtgttctaagtagtgataatggatcctgttgaaggttaacataatgtgtatatatttgtttgaaatataatttatagtattttcaaatgtgctgatttattttgacatctaatatctgaatgtttttgtatcaagtagtttgttttcatagacttcaattcataaactttaaaaaacttttaataaaatattttccttccttttcc

SEQ ID NO: 83685 - DNA, 511 bp, Homo Sapiens
  misc_feature (111)..(366): n is a, c, g, or t
ggagcagaagtttaataagcaaaaaggaagaagagctctccgttgcagagggggcctgagcgggttgctaagttgtagtaaagatgtcaaggtttcttttttttctgtcgnnnnnnnnnnnnnnnnnnnnnnnnnnnnnnnnnnnnnnnnnnnnnnnnnnnnnnnnnnnnnnnnnnnnnnnnnnnnnnnnnnnnnnnnnnnnnnnnnnnnnnnnnnnnnnnnnnnnnnnnnnnnnnnnnnnnnnnnnnnnnnnnnnnnnnnnnnnnnnnnnnnnnnnnnnnnnnnnnnnnnnnnnnnnnnnnnnnnnnnnnnnnnnnnnnnnnnnnnnnnnnnnnnnnnnnnnnnnnnnnnnnnnnnnnnnnnnnnctgtcaaggtttttacaaatgggctagtgacgaggggttagaggagggatgtcttgtcctcccagggcccagggttttagctgggacaaggtgtgctatttgtatagagagtttctgtcagactcagtctgtgctgctctgtgac

SEQ ID NO: 83686 - DNA, 821 bp, Homo Sapiens
  misc_feature (79)..(113): n is a, c, g, or t
aggaatgtatagatatatagggcgctaccctcagcagcgaacgacgagcgcagcgagtagtgagcgaggaagcggccgnnnnnnnnnnnnnnnnnnnnnnnnnnnnnnnnnnncagtcgacggtaccggacatatgcccgggaattcggccattacggccgggggagtcaggtggttgacttgtgcctggctgcagtagcagcggcatctcccttgcacagttctcctcctcggcctgcccaagagtccaccaggccatggacgcagtggctgtgtatcatggcaaaatcagcagggaaaccggcgagaagctcctgcttgccactgggctggatggcagctatttgctgagggacagcgagagcgtgccaggcgtgtactgcctatgtgtgctgtatcacggttacatttatacataccgagtgtcccagacagaaacaggttcttggagtgctgagacagcacctggggtacataaaagatatttccggaaaataaaaaatctcatttcagcatttcagaagccagatcaaggcattgtaatacctctgcagtatccagttgagaagaagtcctcagctagaagtacacaaggtactacagggataagagaagatcctgatgtctgcctgaaagccccatgaagaaaaataaaacaccttgtactttattttctataatttaaatatatgctaagtcttatatattgtagatatacagttcggtgagctacaaatgcatttctaaagccattgtagtcctgtaatggaagcatctagcatgtcgtcaaagctgaaatggactttttgtacatagtgagg

SEQ ID NO: 83687 - DNA, 472 bp, Homo Sapiens
  misc_feature (12)..(12): n is a, c, g, or t
gcgaccgcgganccccaacgccgcgtgggccgcctactactcacactactaccagcagcccccgggcccgtccccggccccgcaccggcccctgcggccccaccggctcagggtgagccccctcagcccccacccaccggccagtcggactacactaaggcctgggaagagtattacaaaaagatcggccagcagccccagcagcccggagcgcccccacagcaggactacacgaaggcttgggaggagtactacaagaagcaagcgcaagtggccaccggagggggtccaggagctcccccaggctcccagccagactacagtgccgcctgggcggaatattacagacagcaggccgcttactacggacagaccccaggtcctggcggcccccagccgccgcccacgcagcagggacagcagcaggctcaatgaatcgaatgaatgtgaacttcttcatctgtgaaaaatc

SEQ ID NO: 83688 - DNA, 306 bp, Homo Sapiens
aatgaaaagaaatctttaatatcagatatgttaagtaaagaaagaccttcttagatctcagttcggaaacttcagtgtagattccttcatttgctgctcataatgtttatcaaatttttcattcagggctactgtaaagtggatttttccagtctcctgtaattccctttctcatgaagggcgacaatttctggttcataatttcgtctggcagtgttgtgtaatttgtggatggattgttcttcatctcttggaacgaagtatgatgtataatcctgtccacaagctcctctgatggcttccttt

SEQ ID NO: 83689 - DNA, 755 bp, Homo Sapiens
  misc_feature (224)..(266): n is a, c, g, or t
  misc_feature (672)..(694): n is a, c, g, or t
cctcgagccaaagaatcggcacgaggtgcgtcacgtggccatgtagacgtcacgaagagatatagcgatggcgtcgtgcagatgcagcacgtcgcacacagacatggggaacttggcatgacgtcacaccgagatgcagcaacgacgtcacgggccatgtcgacgtcacacatattaatgtcacacagacgcggcgatggcatcacacagacggtgatgatgtnnnnnnnnnnnnnnnnnnnnnnnnnnnnnnnnnnnnnnnnnnntatagatatggcaccaacatcacatgcacgcatgccctttcacacacactttctacccaattctcacctagtgtcacgttcccccgaccctggcacacgggccaaggtacccacaggatcccatcccctcccgcacagccctgggccccagcacctcccctcctccagcttcctggcctcccagccacttcctcacccccagtgcctggacccggaggtgagaacaggaagccattcacctccgctccttgagcgtgagtgtttccaggaccccctcggggccctgagccgggggtgagggtcacctgttgtcgggaggggagccactccttctcccccaactcccagccctgcctgtggcccgttgaaatgttggtggcacttaataaatattagtaaatccttnnnnnnnnnnnnnnnnnnnnnnngaccgcgtatgcggccgcaagcttattcccttgtagtgagggttaattttagcttggcact

SEQ ID NO: 83690 - DNA, 714 bp, Homo Sapiens
tgcggccgcaacgtctgcaagttcgcgctgcacagcggctacagcagctacagcctcagccgcgcgccggacggcgccgccctggccaccgcgcgcgcctcgccccggcaggaaaaggatgcgcctccacttagcaaggctgggcaggatgtggttctgcatctgcccacagacggggtggttctagacggccgcgagagcacagatgaccacgccatcgtccagtatgagtgggcactgctgcagggggacccgtcagtggacatgaaggtgcctcaatcaggaaccctgaagctgtcccacctacaggagggaacctacaccttccagctgaccgtgacggacactgccgggcagagaagctctgacaacgtgtcagtgacagtgcttcgcgcagcctactccacaggaggatgtttgcacacttgctcacgctaccacttcttctgtgacgatggctgctgcattgacatcacgctcgcctgcgatggagtgcagcagtgtcctgatgggtctgatgaagacttctgccagaatctgggcctggaccgcaagatggtaacccacacggcagctagtcctgccctgccaagaaccacagggccgagtgaagatgcagggggtgactccttggtggaaagtctcagaaagccactgccccaaacaagccacctgcattatcaaacacagagaagaggaatcattccgcctttt

SEQ ID NO: 83691 - DNA, 433 bp, Homo Sapiens
tttaaattgcaaataagaagtttaattgcagaaactgagttcaccatttataaatacactaaaacatagtcaatgcaaatttagattaagcgtacgtacagtatttcaacaaaacaacttttctaaaaggtcgtaggcaaatgagtgattagtctcactcagaatatttaattggcttaaaatgagaaaatgaatctttttttctctgaagacataacttttaaaatcatctgacaactgacacttcactctgatgtccttgggatttgaaaatatcccagtgatggccgcatcttccctatcataaaaaaatctaaacactaaggctattcttacaactggaatataacaagcttcttccctgttaataagccatctcttctaaaaaaattttacacaaatttgatcaaacaagggggtcagtgcacacatt

SEQ ID NO: 83692 - DNA, 1331 bp, Homo Sapiens
  misc_feature (1213)..(1247): n is a, c, g, or t
  misc_feature (1250)..(1289): n is a, c, g, or t
tgctgtgtttttgtttgtgtgtctcgtttcacatgttgtgtggtggctttgtctcgtgatgtttttgttgtgcccgcttgttttgtgctgtctggtgtgtgtgcttgcgtcctttttgacggattgtagctgtcttgtcattgtaggggtcactggtcgccctttgtcgagtgctaagccttatgtgccaccctgatgtttttgtggaccatgttttcgatcgtgtgaatgccctgccaataccaaactcaatgtgttaggctttggacaccacattgatgattgatagatgttgttacatattgcatggattaatatacatacatatgttctcaactctgctactgacatgttgacatcccagtatgcaccagcaccattctgcattgcccagatcgtggtttctaagtatgattctcctgacaaaggaaccatgggctcttttggatcatgtggattgattctagggattctatgggttggtgccagggaatacccaagatgaacctggagcatctttgtatgtgccagaaagtaaagaatgtgctcaaaaatcaaaatgtgatgggcacatcaaatgggacatagtagccaacctggcagaactcctaatagccaatgctggacaactttaagcaacaaaataaatactgtgttacccaaaatacaaaatatacatgagtccatactgatgtaaacaaattagggtgggagggagaaacaaatgttccatatagaaaaattccaaatactacatatggatattcccacttccagggggttgaatgtaatctttcccacccaccacctcccatgactggacttagtgactgttttccaaagaacagaagtatggaaagggaaaataacagtaattttcagcagcaaaaaaccaacacacactaccttaaccaagtgtccaaagttaatacaccatcaagctgatagcatgtaactcctgacatgatgcagtgagaaggaccttcacctctggtattcttcctaaaaatctataaccccactctaaccatgaggaaaacatcagacaaacccaaattgaggaatattctacaaaacacctgaccagtactcctcaaaactgtcaaggttatgaaaaagaaagactgtggaactatcacagaccagaggctaattaggcatgcccggccgtaatggccgaattcccgggcatatgtccggtaccgtcgactgnnnnnnnnnnnnnnnnnnnnnnnnnnnnnnnnnnncgnnnnnnnnnnnnnnnnnnnnnnnnnnnnnnnnnnnnnnnnctagcggacgagctagcgccctatagtgatctatacagtttt

SEQ ID NO: 83693 - DNA, 771 bp, Homo Sapiens
gattcggcactaggccacaaccccacaagctccaacccatccctccagcgtctcagaaagcactatttctggagccaaggaggagactgtggccaccctcaccatgaccgaccgggtgcccagtcctctctccacagtggtatccacagccacaggaatttcctcaaccgcctggtccccgccgggactcggaagcctgggacagcagggaacatctcccatgtggccgagggggacaaaccgcagcacagagccaccatctgcctgagcaagatggatatcgcctgggtgatcctggccatcagcgtgcccatctcctcctgctctgtcctgctgacggtgtgctgcatgaagaggaagaagaagaccgccaacccggagaacaacctgagctactggaacaacaccatcaccatggactacttcaacaggcatgctgtggagctgcccagggagatccagtcccttgaaacctctgaggaccagctctcagagccccgctccccagccaatggcgactatagagacactgggatggtccttgttaaccccttctgtcaagaaacactgtttgtgggaaacgatcaagtatctgagatctaactacagcaggcatcactttgccattccgtatttttcgtctctaaattattaataaacaaaatatatatattataaatataacctttgtgtaaccctgacttaatgagaaacattttcagctttttttcctatgaattgtcaacatcttttttacaagtgtggtttaaa

SEQ ID NO: 83694 - DNA, 1122 bp, Homo Sapiens
  misc_feature (85)..(119): n is a, c, g, or t
  misc_feature (909)..(924): n is a, c, g, or t
aaatctatacactcactatatggcgctagcgtcgtcttttccgaacgaccgagcgcagcgaagtagtgagcgaggaagcggccgnnnnnnnnnnnnnnnnnnnnnnnnnnnnnnnnnnncagtcgacggtaccggacatatgcccgggaattcggccattacggccgggtgacagcctaaggtttctttagttttaggatggggtggggtgggagtggttttgcatgtttgaccaggatgtgatgcctgtctttattccttgataagaagtagctgttacagcatttcaagcaaattattttaggtagaatagaacttactgccaaatgattatttatttagcaaaaattattctccaacttttcgaattcacaatttttctaagtgcatagagtagtttttttacattgtcacgaattccttaatacctttatttaaaatggaaaaaatatggacaatattttagaaatatgttctacacatctaattttatctgtagtttaagtgatctaaattgagatgcctttgatatgaagagatttaccaacattatatgcactcgtgccttcaatgtggaatcaaactggttaacctcagcacagtcctctcgtttctgtgtttctgctgcactaattgccagggggtgggggagaaggcgaatgaattaattcatagtaggaggcggcgataggtgcagcaaagggcagccacagtgttgattccacattataatgttgttgcctcttcttggcaaaagacaccacatggtgggaagatctcagcttccagggtaaaagttaatttataacttaaaagtgctattaagtttttattaccaaatatatcttttatggtttatattgtagtggtatgtatgaaacatttaaaattttactgtggaaattgtgnnnnnnnnnnnnnnnngtcgaaataggtgttcacaggtcacatgtgaacggagaactgcatgactgtacatgaaatgcaataaaccaactggaaaaagtgcatgtgcttcatcctctcaagccaactgcagctggaaagtgctgcttatcctccacccccagaaaatgcatgtatcaatatgagaataaagaacgcacactttcaattttaaaa

SEQ ID NO: 83695 - DNA, 710 bp, Homo Sapiens
gccgcggctgctgaggcggaggctgaggcagtggcgatggcgccctttcctgaagaagtggacgtcttcaccgccccacactggcggatgaagcagctggtggggctctactgcgacaagctttctaaaaccaatttttccaacaacaacgatttccgtgctcttctgcagtctttgtatgctactttcaaggagttcaaaatgcatgagcagattgaaaatgaatacattattggtttgcttcaacaacgcagccagaccatttataatgtacattctgacaataaactctccgagatgcttagcctctttgaaaagggactgaagaatgttaagcctactactgttgactggaagccttaccaataacataaaacaatcgaataacaattatttcatgtattatatgtaaaatatatatactggattcttacagtaagaatgaatatgaacagttaaattatgcaaaacaactgaaagagagattggaggcttttacaagagattttcttcctcacatgaaagaggaagaggaggtttacagcccatgttaatggaatattttacctatgaagagcttaaggatattacaaagaacagtgattgcacaacacttgctctcagaaggatactgcagaactccttagaggtcttagcctatggaatcatgctgaagagcgacagaaagtttttaaatattccgtggatga

SEQ ID NO: 83696 - DNA, 637 bp, Homo Sapiens
actgtgtacaatgagttatgagactcgaggttcatgcagtcagtgttataccaaacccagtgttaggagaaaggacacagcgtaatggagaaaggggaagtagtagaattcagaaacaaaaatgcgcatctctttctttgtttgtcaaatgaaaattttaactggaattgtctgatatttaagagaaacattcaggacctcatcattatgtgggggctttgttctccacagggtcaggtaagagatggccttcttggctgccacaatcagaaatcacgcaggcattttgggtaggcggcctccagttttcctttgagtcgcgaacgctgtgcgtttgtcagaatgaagtatacaagtcaatgtttttccccctttttatataataattatataacttatgcatttatacactacgagttgatctcggccagccaaagacacacgacaaaagagacaatcgatataatgtggccttgaattttaactctgtatgcttaatgtttacaatatgaagttattagttcttagaatgcagaatgtatgtaataaaataagcttggcctagcatggcaaatcagatttatacaggagtctgcatttgcactttttttagtgactaaagttgcttaatgaaaac

SEQ ID NO: 83697 - DNA, 626 bp, Homo Sapiens
  misc_feature (18)..(18): n is a, c, g, or t
agcttttgatctttggtnatctaacttgagatgctctttaatcttggggaataacatttagaagattaaagctgtagtccaataatgaaaacccttggactcttgagaaaacacatgctaacttgtatttataagatgtgaaactcattacccatttacttcagataagtgctcaacatcttacagattgatcttgtcactaatttcctattctcagagctagatttatgtaatttgttttcatgtaagtttaggcttacttgaaagtattctactcttcgcactaatactgaataagtaagatttgtgactaaaaaacttaagaatcaccatttggaccttttataaggtctgatgaaggtaaaggttagaggataaaagcttttatttaacagattccttctcagacaaattatggcaagcactggagcataaattccttcgtggtattccttcgtggtctcctagatactgctggtagttcaataaatacccttggaggccaaatcaggactgttttacaaaatgtgctgggcatattagtggtacataagatgattttagctagttcacagatgtacatttgtttcaatagttgaatattgaacatttaaaaatatatataa

SEQ ID NO: 83698 - DNA, 941 bp, Homo Sapiens
  misc_feature (22)..(22): n is a, c, g, or t
  misc_feature (101)..(101): n is a, c, g, or t
  misc_feature (671)..(825): n is a, c, g, or t
  misc_feature (830)..(831): n is a, c, g, or t
  misc_feature (841)..(859): n is a, c, g, or t
ctataggaattgcccctcgagnccaagaattcgccacgagccagctcccagactgatgccagcaccaggaatggagggagaagcgcctcaccccttagtcntgccaaaccccagctggtggcctttcagtgccattgacactgcccaagaatgtccaggggcaaaggagggatgatacagagttcagcccgttctgcctccatagctgtgggcaccccagtgcctaccttagaaaggggcttcaggaagggatgtgctgtttccctctacgtgcccagtcctagcctcgctctaggacccagggctggcttctaagtttccgtccagtcttcaggcaagttctgtgttagtcatgcacacacatacctatgaaaccttggagtttacaaagaattgccccagctctgggcaccctggccaccctggtccttggatccccttcgtcccacctggtccaccccagatgctgaggatgggggagctcaggcggggcctctgctttggggatgggaatgtgtttttctcccaaacttgtttttatagctctgcttgaagggctgggagatgaggtgggtctggatcttttctcagagcgtctccatgctatggttgcatttccgttttctatgaatgaatttgcattcaataaacaaccagactcagtaaaaaannnnnnnnnnnnnnnnnnnnnnnnnnnnnnnnnnnnnnnnnnnnnnnnnnnnnnnnnnnnnnnnnnnnnnnnnnnnnnnnnnnnnnnnnnnnnnnnnnnnnnnnnnnnnnnnnnnnnnnnnnnnnnnnnnnnnnnnnnnnnnnnnnnnnnnnnnnaaaannccaattttgnnnnnnnnnnnnnnnnnnnaaaaattttttaaaacacttcttttgggggggcgggcccccccacaaggaaagaagaaaagggggcaaaacgtggttccccc

SEQ ID NO: 83699 - DNA, 489 bp, Homo Sapiens
ggtagcctctagaaattcaaacacagtggtgtttgtgaaatagtccttcctgttctccaagccagtgaagagttatctgctgggaaagtgtccaagagcctgtttttgaaacacaagctgggcttctggtagtgcctcatcacaacccatgatggctgttcatgtttcaccccttttcttccttcagcagaggccaggctatggagcagggccactgaatttgctgtaatctggagatgctttttactttcaaccataagcggtaatagcagaggaaagggtgaagggagtctgggcaagcaaagcatagagatggtggggtggtggtggggttgaagaaacttgttggtataattgtcataggacttgcctaaaatattattaaaattacgggagtgtactcagctttgagcctaggagaaaatgccactgtgtgcatccattttaaagggttccctcataaaaaaatgttattccccattaaaaaaa

SEQ ID NO: 83700 - DNA, 1060 bp, Homo Sapiens
aagagctacgcggcggcggcggagcgcaggcctcgtgccgttacggccatcacggcggccgcagtggcgtcctggagccctcctcagtgctgaagctgctgaaagatggcagaagaagtggtggtagtagccaaatttgattatgtggcccaacaagaacaagagttggacatcaagaagaatgagagattatggcttctggatgattctaagtcctggtggcgagttcgaaattccatgaataaaacaggttttgtgccttctaactatgtggaaaggaaaaacagtgctcggaaagcatctattgtgaaaaacctaaaggataccttaggcattggaaaagtgaaaagaaaacctagtgtgccagattctgcatctcctgctgatgatagttttgttgacccaggggaacgtctctatgacctcaacatgcccgcttatgtgaaatttaactacatggctgagagagaggatgaattatcattgataaaggggacaaaggtgatcgtcatggagaaatgcagtgatgggtggtggcgtggtagctacaatggacaagttggatggttcccttcaaactatgtaactgaagaaagtgacagtcctttgggtgaccatgtgggttctctgtcagagaaattagcagcagtcgtcaataacctaaatactgggcaagtgttgcatgtggtacaggctctttacccattcagctcatctaatgatgaagaacttaatttcgagaaaaggagatgtaatggaatgtattgaaaaacctgaaaatgacccaaagtggtgaaaatgcaggaagatcaatgggatggctgggctagtaccaaaaaaactatggtaaccgtattgcagagtattcaattaacctcaggtttgggaaccttaaccttccagtgtggattcattaggccttacattcctggaaagtttgttggcaatcctgggtatttgggaaagcaccaggcttaaaccgaaatgcatttaatgtaagaggacatgagggggattctctttctgatgcgaaacttgcccaaagattctaatgtactca

SEQ ID NO: 83701 - DNA, 752 bp, Homo Sapiens
  misc_feature (711)..(711): n is a, c, g, or t
tgcggccgcagcgggccgggccggtccggcgggccgggggatggcgctgctggacctggccttggagggaatggccgtcttcgggttcgtcctcttcttggtgctgtggctgatgcatttcatggctatcatctacacccgattacacctcaacaagaaggcaactgacaaacagccttatagcaagctcccaggtgtctctcttctgaaaccactgaaaggggtagatcctaacttaatcaacaacctggaaacattctttgaattggattatcccaaatatgaagtgctcctttgtgtacaagatcatgatgatccagccattgatgtatgtaagaagcttcttggaaaatatccaaatgttgatgctagattgtttataggtggcaaaaaagttggcattaatcctaaaattaataatttaatgccaggatatgaagttgcaaagtatgatcttatatggatttgtgatagtggaataagagtaattccagatacgcttactgacatggtgaatcaaatgacagaaaaagtaggcttggttcacgggctgccttacgtagcagacagacagggctttgctgccaccttagagcaggtatattttggaacttcacatccaagatactatatctctgccaactgtaactggcttcaaatgtgtgacacgaatgtcttggttaatgacgaaagatgtgtttgatcaagcangatgacttatagcttatgctcagtacatcgccgaagattac

SEQ ID NO: 83702 - DNA, 801 bp, Homo Sapiens
  misc_feature (224)..(341): n is a, c, g, or t
  misc_feature (783)..(783): n is a, c, g, or t
gggttcaactggtttcatctccttcagtggtgtagagtctgctctctcctccttgaaaaacttccaagcctgtatcaactggtatggacacagcttctagtgttgctttggatcttgtggaaagtcagactgaagtgagtagtgaatatagtatggacaaggcaatggttgaatttgctacattggatcggcaactaaaccattatgtaaaggctgttcaatcnnnnnnnnnnnnnnnnnnnnnnnnnnnnnnnnnnnnnnnnnnnnnnnnnnnnnnnnnnnnnnnnnnnnnnnnnnnnnnnnnnnnnnnnnnnnnnnnnnnnnnnnnnnnnnnnnnnnnngaagaacgtccagaaaaaataccagatttaaaattattggtagagaagaaatttttggctttacagagcaagaattctgatgcagactttccaaaattaatgaaaaatttgtacagtttaaacaacagctgaaagaactaaagaagcaatgtaagtcaacatgctttgctttggttcggctttttgaaattagggaactgacttgatgaacagccccagttaactgattttataaagtttgcttatctgcttggcttgatcctcattctaagttgcgttttattgttgttgcaattctgtattttgtctaatttttggttcaaatcagcctgctcatttctgaaagccaacagtttccacaaagtgctcagaaaatttcccagcagctagttatgtgtattgtcacattgctggggagggaaattgggaaaacaaaataaangtgaaaactattttattt

SEQ ID NO: 83703 - DNA, 1069 bp, Homo Sapiens
gggacttttcagcggcaggcgaagggggctgaggaaaggaggtgggtctaggccaagggaaattggggtgccaccagacggagacagcttggactaccaggcttttaagaactgtgctattgttgacttcttcacagaatcaagcactcttttggaagagggtaatctctctccaaaaactgaggacacttaccttccccatatattgagtccagctgtgtttggtggcccaggtactaatttcaagatgccaggacgttccagttcaaattcaggttcaactggtttcatctccttcagtggtgtagagtctgctctctcctccttgaaaaacttccaagcctgtatcaactctggtatggacacagcttctagtgttgctttggatcttgtggaaagtcagactgaagtgagtagtgaatatagtatggacaaggcaatggttgaatttgctacattggatcggcaactaaaccattatgtaaaggctgttcaatctacaataaatcatgtgaaagaagaacgtccagaaaaaataccagatttaaaattattggtagagaagaaatttttggctttacagagcaagaattctgatgcagactttcaaaataatgaaaaatttgtacagtttaaacaacagctgaaagaactaaagaagcaatgtggtcttcaagctgacagagaagctgacggaacagaaggagtggatgaagatataattgtgacccaaagtcagaccaacttcacctgccccattacaaagggaggaaatgacagaagcagtgaccaaataacgtgtgtggcacacctatgaagaggacgccattgttcgctgatgagtccaggcaaaagcggagaaaaggcctattgcctcaagtggtgtagccacgctttatgaagtcgatctctccggataacctttgacgcatgggaacttacagaagaatctctctccgttggaaaccttctctgggaccagtctccccccgtttttgaacgttccccgttggggcgcatctctggcacactcgtttctgtcacatctcccacgactcgtttgtcggaa

SEQ ID NO: 83704 - DNA, 771 bp, Homo Sapiens
  misc_feature (456)..(456): n is a, c, g, or t
  misc_feature (672)..(672): n is a, c, g, or t
  misc_feature (689)..(689): n is a, c, g, or t
  misc_feature (737)..(737): n is a, c, g, or t
gggcactcgccggcgacggctgatgacgcaagagcccgctctcacttttcagcggcaggcgaagggggctgaggaaaggaggtgggtctaggcaggagaaattggggtgccaccagacggagacagcttggactaccagaatcaagcactcttttggaagagggtaatctctctccaaaaactgaggacacttaccttccccatatattgagtccagctgtgtttggtggcccaggtactaatttcaagatgccaggacgttccagttcaaattcaggttcaactggtttcatctccttcagtggtgtagagtctgctctctcctccttgaaaaacttccaagcctgtatcaactctggtatggacacagcttctagtgttgctttggatcttgtggaaaagtcagactgaagtgagtagttgaatatagtatggacaaggcaatggttgaatttngctacattggatcggcaactaaaccattaatgtaaaaggctgttcaatctaccaataaatcatgtgaaagaagaacgtccagaaaaaataccagatttaaaattatttggtagagaagaaattttttggctttacagagcaagaattctgatgcagactttcaaaataatggaaaaatttgtacagtttaaacaacagctgaaagaactaaggaangcaatggtgggtcttcnaagctgacaggagaagctgaacggaaacagaaggggagtgggatgaangaatattaattggtggaccccaaaagttcaggaa

SEQ ID NO: 83705 - DNA, 473 bp, Homo Sapiens
  misc_feature (73)..(90): n is a, c, g, or t
  misc_feature (95)..(167): n is a, c, g, or t
tgggctcaagtgatcctcctgccccacccttgagtagataggactacaggcacacaccaccatacctggatannnnnnnnnnnnnnnnnncgtannnnnnnnnnnnnnnnnnnnnnnnnnnnnnnnnnnnnnnnnnnnnnnnnnnnnnnnnnnnnnnnnnnnnnnnntggaaaacataaccttatgggaaagttcctaaaaatggttgaagaacaagactgaaggctagaatatgaaagcttaaattctgattctgccccttcctagttgcatattcctgagcaaatattttcaactggtatttctaaaactgtgccaaggcacccagggcattagagtgacctcacaagagtatctcagaatatttaaaaatttgaacacacaaacacaatgaaactcaacatctgtcagacatcacgtgaactactagtgaggtagttcattctttcaacataagattgcactataatcct

SEQ ID NO: 83706 - DNA, 418 bp, Homo Sapiens
ttttctttcttattctgttatccatgtaacataaattgtattgactttatatcatagtatttaagcattattaattatgcatcatatgagatatcaaggagaaaagtaaacatcactcaaggacttaacctcctcttctggggaagaggttagtgtgattttagttgaatgcaggataattgtactatgtcaggcagaattatgaccttgttattgtctttatttggagattaagtacgatttaggaagatgtgtatgggtgtcaagttgacaacagtggacctgtgatggttcattttatgtgtcaacttgactggatcactgggtgcccagacatttggacaaacgttattttgttgtatctgtgagggtgtttccagatgagaataaaatttgaattgatagactgagtaataca

SEQ ID NO: 83707 - DNA, 842 bp, Homo Sapiens
ggggaagttccggtccagggctctgacttcgggcttgttcgctggtggcgtcggagccgagccggactggtcaggatgatcacggacgtgcagctcgccatcttcgccaacatgctgggcgtgtcgctcttcttgcttgtcgttctctatcactacgtggccgtcaacaatcccaagaagcaggaatgaaagtggcgctttctccgccccagggttccaggacatagtctgaggcaagatggagggtatgaggggccttcacacttcacttcatcccttctacccatcacaacatacaaagcaactacacctggatttttccaaacaacttttatttcctcagagtcttccttaatcctatggaacaagaagctgccactgaatagggcccagtataggggcttgcttttctactccctccccccaatataaaaatatagacttttttttgtggtcccaaaatcttgtgctgcggagggagggaaggggtggcaggtccctgttttgttctgtctcaaggtgatactctgtaatgccttggacagcgtggctggcattccaaggacttaacggctgtcacatggaatcagcggcctggaggggaactagcatatttcccactgttaccccatcttggggctatatcctgggattgaacataaaggcattatcagacccggggagaaacagtcagtgggggagatttagggacaaaacaaacctcaggttggcccaagggacccctgctgtaacaattccaggatggggagtcagatagactacaggatataggagaaaaggcaggggcagagcggggccgtgggggcctggcctgaggcagc

SEQ ID NO: 83708 - DNA, 1321 bp, Homo Sapiens
ggtaccggtccggaattcccgggatatcgtcgacccacgcgtccgcccacgcgtccgcctgcctgggcagagactactaagcggaaaacatcttcagatgatgaaagtgaagaggatgaagatgatttgttgcaaaggactgggaatttcatatccacatcaacttctcttccaagaggcatcttgaagatgaagaactgccagcatgcgaatgctgaacgtcctactgttgctcggatctcatctgtgcagttccatcccggtgcacagattgtgatggttgctggattagataatgctgtatcactatttcaggttgatgggaaaacaaatcctaaaattcagagcatctatttggaaaggtttccaatctttaaggcttgttttagtgctaatggggaagaagttttagccacgagtacccacagcaaggttctttatgtctatgacatgctggctggaaagttaattcctgtgcatcaagtgagaggtttgaaagagaagatagtgaggagctttgaagtctccccagatgggtccttcttgctcataaatggcattgctggatatttgcatttgctagcaatgaagaccaaagaactgattggaagcatgaaaattaatggaagggttgcagcatccacattctcttcagatagtaagaaagtatacgcctcttcgggggatggagaagtttatgtttgggatgtgaactcaaggaagtgccttaacagatttgttgatgaaggcagtttatatggattaagcattgccacatctaggaatggacagtatgttgcttgtggttctaattgtggagtggtaaatatatacaatcaagattcttgtctccaagaaacaaacccaaagccaataaaagctataatgaacttggttacaggtgttacttctctgaccttcaatcctactacagaaatcttggcaattgcttcagaaaaaatgaaagaagcagtcagattggttcatcttccttcctgtacagtattttcaaacttcccagtcattaaaaataagaatatttctcatgttcataccatggatttttctccgagaagtggatactttgccttggggaatgaaaagggcaaggccctgatgtataggttgcaccattactcagacttctaaagagactatttgaagtccagttgagtcacaagagaagcctgtcttgatatatcatctcagaaactttcctgaatatgtgataatatatggaaaatgatttatagatccagctgtgcttaagagccagtaatgtcttaataaacatgtggcagcttttgtttgcaccaacacc

SEQ ID NO: 83709 - DNA, 1236 bp, Homo Sapiens
  misc_feature (994)..(994): n is a, c, g, or t
  misc_feature (1072)..(1073): n is a, c, g, or t
  misc_feature (1090)..(1090): n is a, c, g, or t
aaccaaaaaaacaaagagaggcatgtcaaaaagcaggtgttaagacggcagtactatacggtcctaaggtagcgaggcctgggtggcgaattcggcacgaggccggagcggaggagacgaatgaaactggaccggagaaccggagcgaagccgaagcggtggaagcccggaatgaggccggactggaaagccggagcggggccaggcgggcctccccaaaagcctgccccttcatcccagcggaaaccgccggcccggccgagcgcggcggccgctgcgattgcagtcgcggcggcggaggaagagagacggctccggcagcggaaccgcctgaggctggaggaggacaaaccggccgtggagcggtgcttggaggagctggtcttcggcgacgtcgagaacgacgaggacgcgttgctgcggcgtctgcgaggcccgagggttcaagaacatgaagactcgggtgactcagaagtggagaatgaagcaaaaggtaattttccacctcaaaagaagccagtttgggtggatgaagaagatgaagatgaggaaatggttgacatgatgaacaatcggtttcggaaggatatgatgaaaaatgctagtgaaagtaaactttcgaaagacaaccttaaaaagagacttaaagaagaattccaacatgccatgggaggagtacctgcctgggcagagactactaagcggaaaacatcttcagatgatgaaagtgaagaggatgaagatgatttgttgcaaaggactgggaatttcatatccacatcaacttctcttccaagaggaatcttgaagatgaagaactgccagcatgcgaatgctgaacgtcctactgttgctcggatctcatctgtgcagttccatcccggtgcacagattgtgatggttgctggattagataatgctgtatcactatttcaggttgatgggaaaacaaatcctaaaattcagagcatctattttggaaaggtttccaatnctttaagggcttgttttagtgctaatggggggaagaagtttttagcccacgagtaccccacagccaagggttcttttnnatgtctatgacatggcntgggctgggaaaaggttaatttcctggtgcatcaaagttggaaagggttttgaaaagagaaaaattagggaggggagccttttgaagagtctccccccaggaggggggtccctttccttggcttcctataaaaggggcgattggga

SEQ ID NO: 83710 - DNA, 593 bp, Homo Sapiens
cttctgcactaacatgcctgtgaaccatttggacttaacttttgtgcatggtgtgaaataggtgcccagcctcattcttttgcatgtagatatccttttcccagcaccattcgttgaatggagactattctttccccactgaatagtcttggtaccctctttgaaaatcaattgatgataaatagatgtgtttatttctgaactctcccattttattcccatggacctatatctctccttatgccagtttttattactgtgcagttttgattactacagctttgtaataggctttaaaaccacggcgtgtaagttattcaattttgccaacatttttgcctattgtgattcccttgaatttccacatgaacttcacaagcagcttgtcaatttctgcaagaatggcaagtaagatttttatagggattgtgttcaatctgtggataaatttggagtattgccatcttaacaatattaagtcttccaatctatgaacatggatgtctttccatttatttaagtctttaatttctttcagcaatgttttgtaatttttcagtatgtcggtttaaatctaacaaaaggccatttct

SEQ ID NO: 83711 - DNA, 309 bp, Homo Sapiens
  misc_feature (123)..(123): n is a, c, g, or t
aagaaaactgcaaaatttcaaaaaccccccatcctaaaaaaaaccccctaacctgtgaatctagcttcccgaaggctcagtgttggttccttgtggtagtgctgatgtgtgggtaccactgangcccaggcccacagtcgcatgtaccctcctctgggctgactcacgaggctacaggggacagcacacctaatgagcaggtctgtcctccagacatactcattaacaagcacgttcctggctaaaaaataaccagatctttttgccgtgccctcaggttggagaaagaaaacttttaatttggaatca

SEQ ID NO: 83712 - DNA, 691 bp, Homo Sapiens
gacagattcattgtgtgcattgtatttgatgccagctctatcatacttctcctctcagatgatagtaaagatcaaaagaattcgaaaggaggtggtaaacgctggtgtggtacatgtgcctttgctcactcatgtggatagcatggatttgattacaaaaggtgacctatagaaatagagagatgtgagcctgtgaggtccaagctagaggaagtccaaagaaaacttggatttgctctttctgacatctcggtggttagcaattattcctctgagtgggagctggaccctgtaaaggatgttctaattctttctgctctgagacgaatgctatgggctgcagatgacttcttagaggatttgccttttgagcaaatagggaatctaagggaggaaattatcaactgtgcacaaggaaaaaaatagatatgtgaaaggttcacgtaaatttcctcacatcacagaagattaaaattcagaaaggagaaaacacagaccaaagagaagtatctaagaccaaagggatgtgttttattaatgtctaggatgaagaaatgcatagaacattgtagtacttgtaaataactagaaataacatgatttagtcataattgtgaaaaataataataatttttcttggatttatgttctgtatctgtgaaaaaataaatttcttataaaactcgggtct

SEQ ID NO: 83713 - DNA, 615 bp, Homo Sapiens
ttcttccatggaatcatcaaattaaatcatcatgactacattgattccccatcgctgaaggacagaattcattgtgtggcatttgtatttgatgccagctctattcaatacttctcctctcagatgatagtaaagatcaaaagaattcgaagggagttggtaaacgctggtgtggtacatgtggctctgctcactcatgtggatagcatggatttgattacaaaaggtgaccttatagaaatagagagatgtgagcctgtgaggtccaaggtaatgaatgatgcccttcgtaaacacattttctgggctagaggaagtccaaagaaaacttggatttgccctttccgacatcccggtggttaccaattatccctctgagtgggagctggaccctgtaaaggatgttctaattccttctgctctgagacgaatgctatgggcgccagatgacttcctagaggatttgccttttgagcaaatagggaatctaagggaggaaattatcaactgtgcacaaggaaaaaaatagttatgtgaaaggctcacgtaaatttcctcacatcacagaagattacacttcagaaaggagaaaacacagaccaaagagaagtatct

SEQ ID NO: 83714 - DNA, 1713 bp, Homo Sapiens
cggtccggaattcccgggatggggaagaaaggagttggggcaaaacaggaggcgtttccctacccgcatacatccccgtccccgagacacccaatccccccacccccagcctgcccgcgcctcccgcccccagctcctcgccctggggacagctggcagccccgcgcggaccagacacaaagccgatcaatcccggaggcgtgggggcggagggacgacccgccggggctttcccgggcgctgctctcctcctgctgccccctcgctaggacccggcggacgcctcgtctggttttcacgccctctagcccctaccccacacacccccaaaacagaacagacccccatccctgggctggaggacccgcctcttggcagccagctgagaaggcgccccggggagggggaaactgacatcccatctagagccgtccctcctcttcctcccctcccgactctctgctcctttcccgccccagaagttcaagggcccccggcctcctgcgctcctgccgccgggaccctcgacctcctcagagcagccggctgccgccccgggaagatggcgaggaggagccgccaccgcctcctcctgctgctgctgcgctacctggtggtcgccctgggctatcataaggcctatgggttttctgccccaaaagaccaacaagtagtcacagcagtagagtaccaagaggctattttagcctgcaaaaccccaaagaagactgtttcctccagattagagtggaagaaactgggtcggagtgtctcctttgtctactatcaacagactcttcaaggtgattttaaaaatcgagctgagatgatagatttcaatatccggatcaaaaatgtgacaagaagtgatgcggggaaatatcgttgtgaagttagtgccccatctgagcaaggccaaaacctggaagaggatacagtcactctggaagtattagtggctccagcagttccatcatgtgaagtaccctcttctgctctgagtggaactgtggtagagctacgatgtcaagacaaagaagggaatccagctcctgaatacacatggtttaaggatggcatccgtttgctagaaaatcccagacttggctcccaaagcaccaacagctcatacacaatgaatacaaaaactggaactctgcaatttaatactgtttccaaactggacactggagaatattcctgtgaagcccgcaattctgttggatatcgcaggtgtcctgggaaacgaatgcaagtagatgatctcaacataagtggcatcatagcagccgtagtagttgtggccttagtgatttccgtttgtggccttggtgtatgctatgctcagaggaaaggctacttttcaaaagaaacctccttccagaagagtaattcttcatctaaagccacgacaatgagtgaaaatgatttcaagcacacaaaatcctttataatttaaagactccactttagagatacaccaaagccaccgttgttacacaagttattaaactattataaaactctgctttgtccgacatttgcaaagaggtacacgaggaaatggaattggtatttcattttaattttcatgactactaactcacctgaacttgctattttaaacaaatagttctgtcgacacctaaaatataatctggcttcttgtgtctggactaagttaaaagaattaaaaaactttgtaatgtcaaa

SEQ ID NO: 83715 - DNA, 630 bp, Homo Sapiens
  misc_feature (31)..(31): n is a, c, g, or t
  misc_feature (38)..(38): n is a, c, g, or t
  misc_feature (52)..(52): n is a, c, g, or t
  misc_feature (73)..(73): n is a, c, g, or t
  misc_feature (112)..(112): n is a, c, g, or t
  misc_feature (141)..(141): n is a, c, g, or t
ccctttttttgggcaaggaaacccccgaaanttggccnaaaatccaggcccngggttataatttcccaaggtnggacctgttaaaataccgggtgccttggaaattagggcnttaacggtttcctaaaaggctaatttccntcttttcccacctggccagacttgctaaccaagctcgaaaatggaacatgaaaaagccatacatgtattatttctcctaaaacctaaggcattatctgttggtttggcttgctgctcctattttgtagtcttgatagtagatgcttcttcagcgtaagagtagctatgatattcctttttatcttttcagtacatagtgctgaaaaatctgcaacttcttggatcatatttaatgaattatagtataatgcttgcaggcccagtacaagcatatatattgtgcctcttacagcctttggaatacattgtttccattttttaaatatcttctatatccatatagtattcaaattattaatgctcatgtaccaaggttttgctataaaagttttgtctgtatgaataatgtggctttagtaaataatcatttttcaactgtaaacttattctgaaataaagtaaaattctaattgtttaaatactgtgatg

SEQ ID NO: 83716 - DNA, 412 bp, Homo Sapiens
ttggcagcccagaggggcgaaggcaccccgggggagggagctcagcctgagacatgcagaggaccgggagccccgggggacgtcggggtggggtggggatgggcagagtctggggctcgtctgtgttatagcccagccctgaaataaatagtatatacagctagggggccgggcggagcggaggacatgggggtcccgccggggtcacaggtctgagcagcgatcctgcttgctgtagtggtcgaactggttcttccagtgcaccatgtaggagctccagcggtggaactcggccttccactggcgctccgcctcgtcgagcgtgtcggtggcgctgagcaatttggggaggaagcggttccagaaggcgcaggcctgggcgcgcaccccccgccgcacctccagcggccgc

SEQ ID NO: 83717 - DNA, 469 bp, Homo Sapiens
ttgagccaccgtggccggcccttaaaagcatcaaactacatacaagaccgtaaggaagctgtgggtcaacgcggagggacgtgggaacccatcccggtgaagcggcagcgtcacgtcctttctcccagggatctgttggtcggagacatctggactttcatgtggacagcctgagtgacagggggacccaggggcctcacctgggctacctggggtgggtggaccctccactgtgccaaggtgcagcctgggctcggaggaacatgccctccgcctagtccctgacatccttttcacatccaacacgcagagcaggggcgtgagggagcaggcaagcagggaagggaaagacaatgagcaagagccagcgggacggtggggcggatggcagaagcttcgctgctggaaaatcagacgcagagtacgaaacgcctgtgctcactatgttaataataataataaaaggcaa

SEQ ID NO: 83718 - DNA, 681 bp, Homo Sapiens
  misc_feature (418)..(450): n is a, c, g, or t
atatgtgtaagaacctaggtctctcaaggctgaagcagcatggttaagcattcttgtccacagtacttgcggacttctggttagaatcagttcttgtacatcctagctctgactctcccgaaaggttgaaatggtgtttgtaacccaaaggagaagtcggtgtttactagtctatttgagagacaaatgcatttcaaagggtctctgtctacactgctcagccttggccctcatatgatcacagaggttgggcttctctttccctctcctctgttctccttcccgtccagtggtgaccagttacaataactcgctgatggggagaacataccaatagtctctatttttccctctattttcccctgcctctgagaatatcacacaatgctgcttccaggggcttagagacctgaagaannnnnnnnnnnnnnnnnnnnnnnnnnnnnnnnntttagaagaacatggaggagggaaaagaaaaggcaaaaccaccaccagaagccccacaagggaagccccaccaccagacactgtgggtctagaattagcgaatggctcctattcactcacaaagcactttaagcctcgtccaggcgcttctatggattttgacgtgtgaagtttcctttccagtttgttttaaatcgcatacaagaaagagctgttcatgctgaccctaaa

SEQ ID NO: 83719 - DNA, 512 bp, Homo Sapiens
accataaaagtgccctgtagtttcaaaaacacgtaagcaatgaaatgttagccattatgtgttaaactacttaatctcatttctgtgatgtgaatatttttaaccccctttttgtagatgagggaactgacaagtgacttgtccaaggccatatagctgtgagaaaacccatgcattctcttttcagagttcatgctatcactcaactttaaagtaggccaagattaatgttggtaagggtttgtaatctgtaagaatgctaaaaacgtaagtatatatatcattttagatttgacattttgtatcttgccagtttttaggagaacttttcattttgttaagtatgcatgaatatagttgagtatatgagtaactggttcttatgctgctgttttgtatttttaccagcaggaagattgcaaaagttgatgtatgtaaatcttgaaatatttctaagttttatgtataacaaaatatgtattttaataaacttcttttgatattttaaaaaa

SEQ ID NO: 83720 - DNA, 494 bp, Homo Sapiens
  misc_feature (15)..(15): n is a, c, g, or t
  misc_feature (49)..(49): n is a, c, g, or t
tgcccagtagggcancattaaggccatgtcccaatcactctcggaatgntggttccaactgtggtttgaccctataggttactactttacatcggccacatttcagattcaataaaattgaaaaactggtctgtcaggagaagtgacttcagattctctgaagttcatggtgcagagaattttattcagcataacctacagaccttaaaaagtaagatatttgacaatgaatctgctgcctgaaataaaaccattaggactcactgggacagaactttcaagttccttcaactgtgaaaagtgtctttttggacaaactatttttccacctccaaaagaaattaacacatggacattttaaagtctttagtataaagaaaatttgtattcaatgtgttaagcattaacatgtattttatttgtgtatccactccatctgatttttctgagccattttgatttgttccttcattaaaaaaaatctcttaaagtta

SEQ ID NO: 83721 - DNA, 829 bp, Homo Sapiens
  misc_feature (318)..(466): n is a, c, g, or t
  misc_feature (489)..(510): n is a, c, g, or t
gaccagtccaaacctgggcctgtctcctggatgcaccgcattcagtaagactctttaatttggcaaaggacacacacagcctcaggggtgacaggacctcagaacacactgcattcttcactgtgctttctcctctgaaacacatggtgcatggagaggttggcaagttgcttttggttcattcaacagaaattctccactacggggctgggcactgtgggctcacacctataatcctagcactttgggaggctgaagctggaggaccacttgagcccaggagtttgagacctgcctgggcaacatggtgaaacactnnnnnnnnnnnnnnnnnnnnnnnnnnnnnnnnnnnnnnnnnnnnnnnnnnnnnnnnnnnnnnnnnnnnnnnnnnnnnnnnnnnnnnnnnnnnnnnnnnnnnnnnnnnnnnnnnnnnnnnnnnnnnnnnnnnnnnnnnnnnnnnnnnnnntgacagagctagagcctgactcnnnnnnnnnnnnnnnnnnnnnnttctttggtttacccagcccatttctggaggtgaccattgttaacttgctggttgtcttaccagacgcttcttctgccagtacaaacgcatactctttgttcacatatgtgtgtgttaaaaaacaaacaaacagaaaaaccctgatccttgaaggtaaaaatttctgcacttgctcagggaggccaggaacctgaaggtattcagaacagctcaggtgtttgtctgtctgcagcccaggtgatctgacatgcttgtgggctttgcaggcagagctacctgcccccatggcccttgacccccaccttggcagaccctgag

SEQ ID NO: 83722 - DNA, 1639 bp, Homo Sapiens
ggcagcagtactaccaggccctgagcagcagctccatcatgaacaaggaggggctcaacagcgtgattaaagccacacaatacaagcctgtgcccgacgaagaaccaaattgaacagacgtataggaaacgctggaacggataaagaacaacgacccaaaacttgaagaagttaacctcaataatatccggaatatccccatccccaccctcaaggcatatgcagaagccctgaaagaaaactcatatgtgaagaagttcagcatcgtggggacacggagtaatgaccccgtggcgtatgcccttgctgagatgctcaaggagaacaaggtgttgaagacactgaatgtggaatccaacttcatttctggagctgggattctgcgcctggtagaagccctcccatacaacacttctctggtggaaatgaaaattgacaaccagagccagcccctgggcaacaaagtggaaatggagattgtgagcatgttggaaaaaaacgcaacacttctcaaattcggctaccactttacccagcaaggaccccggcttcgggcatccaacgcaatgatgaacaacaatgaccttgtgaggaagaggaggcttgcggacctgactgggcccatcattcccaagtgccggagtggtgtctagtgtgtggcggtggagtccatgcctttgaactggatgtgttctattgatgacctgtgctctgcaggggaaaccagaaggcaaaatgctggcagcatgaaacccttttgtggttcagttctttatgcactaaggttttaggttgactagtggttgtagttgaaaattttataaaataccgttaatgtgaagtttttctttagtcacagaagttgaatctggttattatttaaaaactagaagcccccaaaccagcagatcttactgaagatgatgttccagcagcagcgacttagccccaggagcccagtttcaatggccttgctgtgtggtgtttcaagtgcatttaaaatgtgtgacacagaaacggcacactcttccacatgcttttgaagtattataaaacactttattacaaatttgtcttagctattagcaaataaaactgattatcattctttattaaccctccttggaattttgaaaacctcgattaaagttgccaaattgattactggatccagaacacaattttcccctcagaacagatagacagactgaagccactgaactctgccaggagtcaacatgagattccttttgctggatatgcagaaatgataggaaaaaaaccaatggtgaaatttcaagtttcaaaaaccaacctttcattaccaatcccaggcaacaaacatgtccctgagtgttctttaagaacatttgggatttatgtacaatttaatactggagttagaactttttccttattgaatgccaaccttatgatggatgtgaaaatctacggccaaatactttttgaaaacacctttctatattgcacagtgggcaaatggcttatgtgaggtaagacactagagggataaatttacagatcaaaatggctatgggtatttagatatggcccagcttagagacttcagctacttgatctcatcacttattagacaaaatgctgctgaccttacgcc

SEQ ID NO: 83723 - DNA, 199 bp, Homo Sapiens
ttttgttttactagtgccacagacttgccagtggtaacttatttgtccggttcaagataactctgtagttttctttcctaggacttgttgttaaacgccaaaagacatttttgaactgtacatttgatcagattgttagcttttctgttttatttcttttgagaacctttgaataaaaaacatctgaaattttaaaaaa

SEQ ID NO: 83724 - DNA, 549 bp, Homo Sapiens
  misc_feature (12)..(12): n is a, c, g, or t
  misc_feature (39)..(39): n is a, c, g, or t
  misc_feature (80)..(80): n is a, c, g, or t
  misc_feature (240)..(240): n is a, c, g, or t
  misc_feature (249)..(249): n is a, c, g, or t
tccccattggtntgtcagggatcactgaagcccacaaanttgacgccacccagccttcccagtttacatgatcatggggnagagcctgtcaaaagcaactgcacagagcctgtgcttaagatggcaggatcgcaagacagagcaactggagcaagtcctcattaagaagagccgcccgatgcatttggactgcgatgtgttacgcccatgagatttcagggttaatttgttacctggccngtggcctantcctcttccaagcagatacaagaggctactgaagtttgcaactttgcagaataccagcagaggaagaaaaacctgggagactgctgctaacctaatgtggagacttgacttaaacttcagccagacaaaggcggaatcttaatatggaggggcctggctctgcagggaggtcacctgggctggctggatttcaatccagttacacagcaaaaaagttacaacccaagctttggcgatgctgagccttctactctcagggattccaaagcatttgataaactctttctttgttccattgta

SEQ ID NO: 83725 - DNA, 371 bp, Homo Sapiens
ttttcaattcacaaaggtttattttgatgatttataaaagaaacattgccatagcaatttaaagctatttacaaatttaaaaataaatgtacataaatgtattcacatcacattaaacagttttaaaatattacacgtagtgttgaacacaaaacataaactaagttttaagccacataggtgttctgaaagcatgctcaacaaccacagccactggaggatggtccactggaaaaatatgatttcaggaaccagaagtaaagatgattaccctagtctcaggtgatgtggcctttaaaagtcactttaactttaaactgcaacacaaacttagatgaagacagactgaacaaacagtgagaattaattaa

SEQ ID NO: 83726 - DNA, 536 bp, Homo Sapiens
  misc_feature (461)..(461): n is a, c, g, or t
  misc_feature (495)..(495): n is a, c, g, or t
  misc_feature (509)..(509): n is a, c, g, or t
gactgggaggagcattacagccacggcttgggctggtacctcagccagatgcccttctcctggccacaccagctcacagtggagaagacccccgcgtatttcacgtcgcccaaagtgcctgagcgagtctacagcatgaacccgtccatccggctgctgctcatcctgcgagacccgtcggagcgcgtgctatctgactacacccaagtgttctacaaccacatgcagaagcacaagccctacccgtccatcgaggagttcctggtgcgcgatggcaggctcaatgtggactacaaggccctcaaccgcagcctctaccacgtgcacatgcagaactggctgcgtttttcccgctgcgccacatccacattgtggacggcgaccgctcatcagggacccttccctgagatccaaaaggtcgagaggttctaaagtgtcgccgcagatcaatgttcgaactntatttaacaaaacaaggttttatgctggggacanggcgggacgtgttnatgatcaaagcggcgacccaagtgatc

SEQ ID NO: 83727 - DNA, 1049 bp, Homo Sapiens
  misc_feature (929)..(941): n is a, c, g, or t
gtccacttcttcgactgggaggagcattacagccacggcttgggctggtacctcagccagatgcccttctcctggccacaccagctcacagtggagaagacccccgcgtatttcacgtcgcccaaagtgcctgagcgagtctacagcatgaacccgtccatccggctgctgctcatcctgcgagacccgtcggagcgcgtgctatctgactacacccaagtgttctacaaccacatgcagaagcacaagccctacccgtccatcgaggagttcctggtgcgcgatggcaggctcaatgtggactacaaggccctcaaccgcagcctctaccacgtgcacatgcagaactggctgcgctttttcccgctgcgccacatccacattgtggacggcgaccgcctcatcagggaccccttccctgagatccaaaaggtcgagaggttcctaaagctgtcgccgcagatcaatgcttcgaacttctactttaacaaaaccaagggcttttactgcctgcgggacagcggccgggaccgctgcttacatgagtccaaaggccgggcgcacccccaagtcgatcccaaactactcaataaactgcacgaatattttcatgagccaaataagaagttcttcgagcttgttggcagaacatttgactggcactgatttgcaataagctaagctcagaaactttcctactgtaagttctggtgtacatctgaggggaaaaagaattttaaaaaagcatttaaggtataatttatttgtaaaatccataaagtacttctgtacagtattagattcacaattgccatatatactagttatatttttctacttgttaaatggagggcattttgtattgtttttcatggttgttaacattgtgtaatatgtctctatatgaaggaactaaactatttcactgnnnnnnnnnnnnngattttttctggagacgctatgtttttttgaatataattaacttgcccccaactcaaaatagctgtctgtgttgcaatcattgcaaaatctaaattcttttgttactt

SEQ ID NO: 83728 - DNA, 846 bp, Homo Sapiens
cggaagcggaagcgagtacggagtggatactgaagactccctcgacgaaggacccggggccctggtatggagagtgatttgctactaggccaggatctggagttgaggaggaagaggaagaggaggaaggcgacggcaacagtgaccagctcatgggcttcgagagagactcggaaggagactctctgggggccaggcctgggcttccctatgggctgagcgacgatgagtctgggggcggccgggcactaagtgcggagagtgaagttgaggagccagccagggtccagggaggccagggtgagaggccaggcccagcctgccagctgtgtggggggccgacagcctgggcaacctgaggcggcatcagcgtacccacgcagggccccccactcctccctgcccgacctgtggcttccgctgctgtactccacgaccagcccggcctcccagtcccacagagcaggagggggcggtgccccggcgacctgaagatgctctgctccttccagattttgatgcctccatgtgccaccaggtggtgccagtttcctgccagactgtgggcagctgcggggtgaaggggagggcctctgcgggactggatcagaaccactgccagagctgctattcccttggacctgccggggctgtggaacaagagcttgaaggaggcctctgccccctttgccgatcactatcccgaaaccactgggccccggaccatgaagacaacacagtggtgagaagcccttccgtgcgccccgttgtcccttatgccttcttgctcatcataggattaacctgaaacggccccaacagctgtacataccgcgagcagaagcc

SEQ ID NO: 83729 - DNA, 532 bp, Homo Sapiens
  misc_feature (367)..(367): n is a, c, g, or t
gggctggagccggtcacgatgccccgaaggaagcaaagccacccgcagcccgtgaaatgcgagggggtcaaagtggatactgaagactccctcgacgaaggacccggggccctggtattggagagtgatttgctactaggccaggatctggagtttgaggaggaagaggaagaggaggaaggcgacggcaacagtgaccagctcatgggcttcgagagagactcggaaggagactctctgggggccaggcctgggcttccctatgggctgagcgaccatgagtctgggggcggccgggcaataagtgcggagagtgaagttgaggagccagccaggggtccaggggaggccaggggtgagaggccangcccagcctgccagctgtgtggggggccgacagatttgagcctccatgtgccaccaggtggtgccagtttcctgccagactgtgggcagctgcggggtgaaggggagggcctctgcgggactggatcagaaccactgccagagctgctattcccttggacctgcc

SEQ ID NO: 83730 - DNA, 843 bp, Homo Sapiens
  misc_feature (84)..(118): n is a, c, g, or t
aaggcgtatagactcactatagggcgctagcgcgttgctagcgaacgacgagcgcaaggagtcagtgagcgaggaagcggccgnnnnnnnnnnnnnnnnnnnnnnnnnnnnnnnnnnncagtcgacggtaccggacatatgcccgggaattcggccattacggccggggctcctggttcaaaagcagctaaaccaaaagaagcctccagacagccctgagatcacctaaaaagctgctaccaagacagccacgaagatcctaccaaaatgaagcgcttcctcttcctcctactcaccatcagcctcctggttatggtacagatacaaactggactctcaggacaaaacgacaccagccaaaccagcagcccctcagcatccagcagcatgagcggaggcattttccttttcttcgtggccaatgccataatccacctcttctgcttcagttgaggtgacacgtctcagccttagccctgtgccccctgaaacagctgccaccatcactcgcaagagaatcccctccatctttgggaggggttgatgccagacatcaccaggttgtagaagttgacaggcagtgccatgggggcaacagccaaaataggggggtaatgatgtaggggccaagcagttgcccagctgggggtcaataaagttacccttgtacttggccggcccacatcaccgcccttttccccttctggtcggccgcctcgggccctcgacaagtttcctacaccctttgtttggcgcccgggccccgtaaggtaaatgaaaccgggttttcccccgcttcctaaggagatccgggccatgaactaggggcttgggaatctccac

SEQ ID NO: 83731 - DNA, 660 bp, Homo Sapiens
cagtcgacggtaccggacatatgcccgggaattcggccattacggccgggagacagccctgagatcacctaaaaagctgctaccaagacagccacgaagatcctaccaaaatgaagcgcttcctcttcctcctactcaccatcagcctcctggttatggtacagatacaaactggactctcaggacaaaacgacaccagccaaaccagcagcccctcagcatccagcagcatgagcggaggcattttccttttcttcgtggccaatgccataatccacctcttctgcttcagttgaggtgacacgtctcagccttagccctgtgccccctgaaacagctgccaccatcactcgcaagagaatcccctccatctttgggaggggttgatgccagacatcaccaggttgtagaagttgacaggcagtgccatgggggcaacagccaaaataggggggtaatgatgtaggggccaagcagtgcccagctgggggtcaataaagttacccgtagtactgaccaaaaacacaggaggaggagagaaagggaacaaagcaggcgagggaacgaggcagccagacagaaggcagcgagacccacagagaaggacgagggggaaacagaagagcaaaggaagagggaaagggcgcaaacaagggaaac

SEQ ID NO: 83732 - DNA, 425 bp, Homo Sapiens
ttttttttggatttgaacccatgtactcttctttttgtaaacagaaaatctctcaagtataaagcagacaaaacacaacaaacctccatgtatccatcaccccccagcttcaaaaactatcaattcatggccagtcttattttatcttcacccccacccactccttctacttgtggattttgtcaaagcaaatcccagacattccaaggacaaacatttcggtatgtaccgctaaagaatgaggctcactgttccagaacccatgtccctaaccccatgccactgagatacggtgggaggtcactggcaacctctgtccccaagttctcagtgcccaggtggagacggaacccaggccccagaggaatgatgaggtggaagaaacacacataatgtagggttctctttaaacaagtctgtagaag

SEQ ID NO: 83733 - DNA, 744 bp, Homo Sapiens
  misc_feature (290)..(299): n is a, c, g, or t
tctaatcagcaaggaatgtctttaacaaggaagaagtaaattatgataattactctgaatggtcggatccttgagcattactaattagcatttattgcctggattatagaacaatacatgtgaaaccgaactgcgattgctcttttacgttgaagacttgaaaaggcaatggagcaaaaagccagcatcatcggtagtgtagtcagtagtttacatctccttgataggacgcagaacccctcactttggaaacacgcaaatatggtcctcagtatttatggcccattcannnnnnnnnngttagtcacatatttacataagatatcatagtcatggtagactaatggagaggagaagcattttggttatgtcatttcggggataattttatcaggttgtgagagtttaacaataaagaacataaaacttgctgtttccataaaaatatgaaattttcctgggagaaattttgacttaataaaggaaccaaagaacccagtttgtagtgaataaaattttacattcacttccccactttctcatagaagatctacagttggggataaccgataagaggcaattggtttctggcttaagagcctttttcattaggaattttcggtaaattaaagtctgaaattagaaaaacattagacattaatcaacagaccaacaccagtcacgtaaataaatggcattcgtataatttggcagctgaaattcttaaataatctggcaggtaca

SEQ ID NO: 83734 - DNA, 520 bp, Homo Sapiens
  misc_feature (142)..(142): n is a, c, g, or t
ggcctcccggttgcaccaagaactgttcgccgattctcctgcaacaattccctgcaatcaaggccatgttgtccatcgatgtaccgaatgaagggcgctggtggcctcccgtacaaacttggacaacacggagcagggagantcaccatggaatgaaccccccgcccatgctgtccggcctgggaaaccctctccatctcccaaggctgccagacatggactccgggctccagcacatccccctctcctctcccccagagctgcctgctctgtgagccccacagccctgctcattcctcacgcccttcaatgctgcaggatggactggcccctgacccagggactctccaaacgggatacaggagagaagctggtctagactgtttgctgatccccaacctgcacggggcattcctgcttctctctcaggccaccacagagggcaggggatggttagccacctgccccagcactcacaccctaactcaaaataaatgttaaataagtgcgatcacacaaa

SEQ ID NO: 83735 - DNA, 568 bp, Homo Sapiens
  misc_feature (199)..(199): n is a, c, g, or t
  misc_feature (217)..(218): n is a, c, g, or t
ttcggcacaggagagctggaaggggctagaaagctcccgcttgtctgtttctcaggctcctgtgagctcagtcctgagaccagagtcaagaggaagtacacgtcccaatcacccgtgtcaggattcactctcaggagctgggtggcaggagaggcaatagccctgtggcaattgcaggaccagctggagcagggttgcngtgtctccacggtgctcnngccctgcccatggcaccccagactctgatctccaggaaccccatagcccctctccacctcaccccatgttgatgcccagggtcactcttgctacccgctgggcccccaaacccccgctgcctctcttccttccccccatcccccacctggttttgactaatcctgcttccctctctgggcctggctgccgggatctggggtccctaagtccctctctttaaagaacttctgcgggtcagactctgaagccgagttgctgtgggcgtgcccggaagcagagcgccacactcgctgcttaagctcccccagctctttccagaaaacattaaactcagaattgtgttttcagc

SEQ ID NO: 83736 - DNA, 603 bp, Homo Sapiens
ctatgcatttattttcatggatacccttaatttcatgggcatgcctaataatgatctatgttctaactggagcttagggcttattttagatattggagtgtagctttattacagatggattttatctttcaacattgcattttgatcaactttgtatattcacgtgtattaaaatattgtgcactaaatgttttgcccttgtttgctattatatggtcaaggcatttatcagcactattgtaatgaactcatgtaagtggcatgggtcagggaaaattatttcctacttttctgcctaattaaatttctgttttccagtattacattaatttatttttggcttccatttctgtataaccaaaatagttactgtatttgtgtggcattcctattattttgttgctaaaaatattgtagtttttatttaaaataatctgtaccttaattttttaaaatgtaaccaattcaagcactttaagcaataatgtcaatcttgtgaaattttaatcagtttaacaccctgcctctaaaattgtttgcaaaaaataaataaatgaataaaatgggaattctctttctagagaattatatccgggtaatgct

SEQ ID NO: 83737 - DNA, 105 bp, Homo Sapiens
catttggttgttgagaagtttcaaaaatcagttttcaagctgtggtctttcaaacacatctgcacataagtcacacatttcaataaagcattttcaagactgtta

SEQ ID NO: 83738 - DNA, 557 bp, Homo Sapiens
ctacacagtacaatttgcttcatgtagctgcaggagggagcattaatcaaagatggcactattgacacttgtgcaggaaaggttacctcaacagcctgggctgctcaaacttgcgtattcccagagtctcaagactggtcttggcctggctcctgggaagattacttctgacccttggctgagataggagtttatgccaacagtgtgatttatggcaaacacctgtttttgtatgcctgaggctttggatcatgctgtaccaatttgatctgaggcctgaagactggtagctaaggtgctgcatgcctacatgactgacctccagtaaaaaccctggacacatgcctcaagtgagtttcgttggttggcaacactttacatatgttgtcacacgttgttgctgagaaaattaagtgtactccatgtaatggcactgggagaggacaactggaagctggtgcttaatttctcctctactccacgctatccaccttttcacttcgctgagttttttctgtatcctttcaatgtaataaactttaaccatgagtataaca

SEQ ID NO: 83739 - DNA, 797 bp, Homo Sapiens
gggagaaagggcgcgcggcgcggggtgacgggcgggtgcgcgggcgggacaggggaccttggctaaggcgagagtagcgcacgccagcgccgcctcctagactcgagcagagccggagagagagacgagagggtgggaggtcccggagtaacttctctccaggctgaagggcggcgaggcatagtcccgagaagtcaccaaggccatctggagactcctggctttctgaactttgcgcgttaagccgggacagctgctttgctgcccggagagtagtccgcgccaagaagagagcaacgaggaaaggagagggactctggcgtcccggcaggcgagaggcgaggctgagcgaaagaaggaaggacagacggacctgtctgtcagagttcggagaacactggctctcagccctgagacacaggcctcagttaggacgctcggcgcccaaatctcatcagttttattgcctgctcgattatatagaagaagatacaaaaaatcccgcattaaaaatattaatcctgcatgctggacatgtatggtaataatttctattttgtagccattttcgtgtcttaactttagcatgttgttgatcatggatcatactccccttgtttctttgggtgagaagggatcgcagtttggacaactccggcggctgcgagcggggtatcagtcccagctgtaggcttgtaaatacccgccccgccaaaccgcatagagaacgtggcagcaagctgagggtctttgtttgggtttattattacggtatttttgtttgtaagttaaaaaga

SEQ ID NO: 83740 - DNA, 855 bp, Homo Sapiens
  misc_feature (18)..(18): n is a, c, g, or t
  misc_feature (31)..(31): n is a, c, g, or t
  misc_feature (36)..(36): n is a, c, g, or t
  misc_feature (57)..(57): n is a, c, g, or t
  misc_feature (62)..(62): n is a, c, g, or t
  misc_feature (178)..(178): n is a, c, g, or t
  misc_feature (558)..(575): n is a, c, g, or t
aaatttgaaaggatccgngcagggaatagantctanacccctgtgagatcgggcttnaactncctccagactaaactcctcaggattactatatgggccaaatatcactgcatacaatatctggtatttgaagagaaaactgactttgtatagataaacacaggctttcacaaatttngtattgctttttttcccagttttggcagaaaatttacattctagttctcttcacacagtagcagttgtaaataatttatgaatgacagtacacattaaaaggtatgcattagcagcatattagtatgctgttttatttgctgaagaaaatactgtcttctatttttaatgatacattaggtacgatgtgtagttcggtagagtcctaaaatttttgtactactttcaatttggtgaaaatgtattaagttgtctaccatgttttcttttctagctgaataaaccacatcaaaggaaagggaccacagtatttgaatgtttgaaagtctgtaaagcttaaggttttaaaaatgttgcccgtaatgttgaacgtgtctgttnnnnnnnnnnnnnnnnnntagttgcttcaaactatttttatgagaagttgtaagcattttttagatataaagcagtataaagtacttgttattttactctgaagttgtttaaaattccccatgactttgaccgctgaagattctttaagcgggttaatttatgttttgaggtggaatacaatttacccttttttcttaaaaacatgaatgtgggtttctatattaagcatattttgtgactactattaacagattgatttgtttagatattaaatgctttaagctattttaccttttc

SEQ ID NO: 83741 - DNA, 639 bp, Homo Sapiens
  misc_feature (13)..(13): n is a, c, g, or t
  misc_feature (26)..(26): n is a, c, g, or t
  misc_feature (33)..(33): n is a, c, g, or t
  misc_feature (48)..(48): n is a, c, g, or t
  misc_feature (58)..(58): n is a, c, g, or t
  misc_feature (67)..(67): n is a, c, g, or t
  misc_feature (76)..(76): n is a, c, g, or t
  misc_feature (101)..(101): n is a, c, g, or t
  misc_feature (125)..(125): n is a, c, g, or t
  misc_feature (163)..(163): n is a, c, g, or t
gggttcccttttntgccctaaccacntttggtncaggttaacttgganctgatctgtnccattgcgnaaggggtcnctcaggcatagcacaccaacccttncacggcaagatcccaggagagctncttcacattgaggagggaaggctgccctgacagtgggncatccatgctggcagtatcacagcaagaatccagtggagatcagaggacagtgacagtcacagcagcaggggagagccaggagaaagctgctcctaggggtgtctcaaaggaagaagggctctgcagtgtgaactctgcagagggcagggagaatagaggttaagcctttgctcattctgaattaattgattactgctttttaaaagtgctttctttctctgggaaaaaaaacattccccagtgcctaaggctaacagacgtgggcgctgagctgtgtctggtctgctgagtgtattttccacagagcaatcctcatcttctcagggggtggggatttggacaagactcttcctgaacacgcagcgtggtggggaagggtggccatggaggttttctgttccttctgttgtcactggtgaaagacgacttggtgcccaatttctaataaacacaatgctattagcgtcactccaaa

SEQ ID NO: 83742 - DNA, 1218 bp, Homo Sapiens
  misc_feature (54)..(54): n is a, c, g, or t
  misc_feature (66)..(66): n is a, c, g, or t
  misc_feature (74)..(74): n is a, c, g, or t
  misc_feature (86)..(86): n is a, c, g, or t
  misc_feature (103)..(103): n is a, c, g, or t
  misc_feature (545)..(558): n is a, c, g, or t
  misc_feature (590)..(671): n is a, c, g, or t
  misc_feature (798)..(861): n is a, c, g, or t
  misc_feature (1091)..(1142): n is a, c, g, or t
catgtaactattattaccctgggaatatgggttttaccttaacaccggttcttnaatccataatgngctagttntggaaatggatntctactatataaggttncagagcccattggattagggatcaagtcagccagctaaagttccctactgttaattcctaaacctaatttgggaaaagagaaagttaatcaatggtatttaccttacatgttggaaagaactatgttaggtctgattcatgtgaagaagatgttgcaaaggatttatttcacaaattttaaaggagatatgagtaaaagtttttatcttttcttgactttttctcctgaacacttatgtcttagcaagtggtcaacatgaggatttgaacgcctaattgttggtaaatggttgaggcatgacaaaaatattaatatccactgtttaccatcatgttatttgaaacaaaagtgaccatgtatactatcttgcttgaagaagtctttgacagaaaaagcaatatcatgtcatttataaattttcttgttctaaagaaagcagtnnnnnnnnnnnnnnaattatgtaaataaaagttattttatatcccnnnnnnnnnnnnnnnnnnnnnnnnnnnnnnnnnnnnnnnnnnnnnnnnnnnnnnnnnnnnnnnnnnnnnnnnnnnnnnnnnntccttgtgggccgccccggccctcaaaaacttttctaaaccattcttttggggccggggcccagaaggaaagggaccttggccatacctgttcccaaggaaatccgggccaggactagggctgggannnnnnnnnnnnnnnnnnnnnnnnnnnnnnnnnnnnnnnnnnnnnnnnnnnnnnnnnnnnnnnntgggggccatcacggggatccaaccaacagggagccccaagcgggagcctccattaattcaaatttaagcccccggggcccttgaccctctcttcggaagaacaaggggggaaaaattcattgaaagcacttccctcccagaatggggagaccccatcccccaagcggggaatgaatgaaacccggaaatccgccccacgcgggcattcaccccccctttcgcccccttnnnnnnnnnnnnnnnnnnnnnnnnnnnnnnnnnnnnnnnnnnnnnnnnnnnnggttctcccctattttgggccacgggtctcaaaatgcacacggggggggaaaactgcccccccgggatattcctcg

SEQ ID NO: 83743 - DNA, 293 bp, Homo Sapiens
acttaaacattacaaatattgtattagattcctcttcttgaggtagttcaaagtcttaaaacagagcaaatttacatacttttctacacaccaccgcggggtaattatcataaggcctacgactaaaacatcccatctcctgattctcaggctactatactcttttccttcggatcaaactacaggaaacacacataaaaagatgaaaagtcatgcaaaaatttaaaacaagcaaagccaccataaaaaagaatctgtgtcatcatattcacagtctaaacttcgctaaagac

SEQ ID NO: 83744 - DNA, 529 bp, Homo Sapiens
gtacgaatgtaatcaatgtgggaaagccttcagccacgctcagtactttcaaaagcatgtgagatcacacagtggggtcaaaccctacgaatgtactgaatgtgggaaagcctacagttgttcctcgtcccttcgtgtgcacgtgagaacgcacactggagagagaccgtatcaatgcaaccagtgtgggaaaaccttcaggtatcctcgcatcgcttcaagcacatgtgagaacacatgctggagcgtgaatctacaaatacagtggacctgggagagtgttcaaccgtaaaaccttgttgtaaatgtgagaaacgttatttatgtagagcatgtaggaaaacctggtatagcacttattttgtacctaaaaattcagagtaggagagaaatctcttaattatgattaatatggtattgcctttacatgcctcagccttaatagtgattccttttgtattaatttctagtgtatgtttgtgatataaacatttaataaatatcctgttttgaacgctttcaaaaaaaa

SEQ ID NO: 83745 - DNA, 715 bp, Homo Sapiens
  misc_feature (537)..(537): n is a, c, g, or t
  misc_feature (539)..(539): n is a, c, g, or t
  misc_feature (543)..(616): n is a, c, g, or t
gcgacagtctattgcactcctgagttactattctatagatgtggtaacacctaggatgaggatcaccagaagtctgcactgttaactcttgaagaataaaggcccaggagcacaatgaagttcaattgaaacatttttatttaccttggctgcagggtaagttgaggttcccaatcagggcaagaagggtttctgacctataaaaaccaatggttagctgtaaggcatatataaacttttattaaccttggacctgactcaagtaaaaattattacacttatatttactatttaatttatagaagtggcaaactggtgacctttgggcagaatcttacctatagacatgttttgaccccaaaattggaattcattgccaatactgtatttaaaattcagaattcacggagttctagttccacttgaaaatttgagagatctgggaatcctatattcacatttccatctagcaacaggactgagctaaacagtggctatcccctttaacctgggtatttgtatatttacaaacatgcntnggannnnnnnnnnnnnnnnnnnnnnnnnnnnnnnnnnnnnnnnnnnnnnnnnnnnnnnnnnnnnnnnnnnnnnnnnnaaaatgttcttcacttcaccacatccagtccttttccctggctagtctctataggtcttggcatttcctaatgtcaataaatactctgcctttctctaa

SEQ ID NO: 83746 - DNA, 738 bp, Homo Sapiens
  misc_feature (700)..(700): n is a, c, g, or t
ccatgacgagccgggccggaagaagaggtagggcgccgccgtgacagattagtcctaaagggaacggggttgttagttcaattggctaccgagaaaaaaccaggctgggctgggcgccgccatgacaaccgataccggaaaaggcgggtcgttccccccggacagccctacgccggcaaaggtctcgagatgcaggcggccctagaggtcaccgctcgctactgtggccgggagctggagcagtatggccagtgtgtggcggccaagccggaatcctggcagcgggactgtcactaccttaagatgagcattgcccagtgcacatcctcccacccaatcatccgccagatccgccaggcctgtgctcagccttttgaggccttcgaggagtgtcttcgacagaacgaggcagctgtgggcaactgtgcagagcatatgcgccgcttcctgcagtgcgctgagcaggtgcagccgccacgctcacctgcaactgtggaggcacagccacttcctgcctcctgaggactcctctgacggcaggaaaactggacatgaatgactgcccccacgcccctcccctgcagagtggccagatggagtcctgagccctggacatgggcccggctttcctggatatcaggacttccaataaataaagactctgtatactgacccaccacactttatccccccctttggntttacatggtcgggccgccttcgggcccttccaaaaat

SEQ ID NO: 83747 - DNA, 580 bp, Homo Sapiens
tccttcccccagcgtcaattgttatcaggtgccaaacactgctagaaaggaggccttagtcagagctctttccatacgagtttgggtttgttttaatatttttttctattaaaatactcatgcatttaaccttcccgttattcaaccagtctcttggttgcatccctagcacttctactacaagtgagatggtagtgtttaagtgcttattgagtaaagcataattcggtcataataaaatcgttcacattccctcataagcacaagcccaccaaccccttcacaccccccttcacaggggtcgtatgagtaaggggatttggaaactgtcaacttacaaaggcactataacaattacagaatcatgattgccatgggccactttatttacatgaagacaactggagaacgactaagaccaaattatggaaaataagaaaaagctgttgctggcaagaccatcaagactgttctgacaccctgtccccatcatccctgactgagtactctgacatcacggaaagtgttgaacctgggaccctgaggaattcaccaggagtaaatggctttcatgtaaaaa

SEQ ID NO: 83748 - DNA, 605 bp, Homo Sapiens
  misc_feature (566)..(566): n is a, c, g, or t
gtctcggtcgtccgctcgcgcctggcgctggccgcggtggccgcggtggccttggccgtggcgctgctgccgctggcgcgcgtgggccgctatgagctgcagtacccgggcacgtggtgcttcatcggcataggtcccccgggcggctggcgccaggcactgcttgctggcctcttcgccagcctcggcctggtcgcgctcctcgccgcgctggtgtgcaacacgctcagcggcctggccctgctacgcgcccgctggcgacgccgctcccgacggcctcccccggcctcaggccccgacagccggcgtcgctggggggcgcacggaccccgctcggcctccgcctcgtccgcctcgtccatcgcttcggcctccaccttctttggcggctctcggagcagcggctcggcacgcagagctcgcgcccacgacgtggagatggtgggccagcttgtcggtatcatggtggtgtcgtgcatctgctggagcccaatgctggtgttggtggcgctggccgtcggcggctggagctctacctccctgcagcggccactggtccttgccgngcgccttgccttctgaacccagatcctgacccttggtgt

SEQ ID NO: 83749 - DNA, 586 bp, Homo Sapiens
aacagaggccctgaagttattcgtgagcaagtctgggaaatggaaatggaagttccaattcctgtttttactaatttaatgtgtataaaatgttatctatatcttttcttcattcctttgttccttcctttcttttgagggactttcataggttcattcaagagttttaacccctaactcatttttctcacaaggccttaaattccacaacctcatcatctaccacctttggtgctttcagaatcatgactctcaatgttgaagaatgggctactgcatggaaggtgggtgcaaacccctaaaatttccacccctggttctggaaagtgagaaattggggatttcaatactgcaagccatccttcacattctaaactcattgtctttacttagttccgtcagcatttctttcttccagtcagtggggtattggcatggacttgtactggctcataagagctgattggtaagttttcaggaatttgcaagctggttgttaagcacagtcattattgaaagcaaattatgtaaacttacaattaaataaattatatcaaaaccaaaaataataaatactcagaactta

SEQ ID NO: 83750 - DNA, 954 bp, Homo Sapiens
gaaagcgacgtgggaaataggtactctcataacagctgacagaagtacatattgaagaggacaatatggtaatgtccttcaaaattataaaagcactaactctttgatccagtagtttccacttctaggaacttaaccttcagatatattttcaccagatataaaatgacatacgtaagaagttattactgcatcatttgtaatagctaaagattagaaacaattaattgctatggaacccttaaaaaaggtggctctaaattccttaagaaagatatccaaaacaaattaaggggaaaagggagggttgcataacagcatgtaacataacactatttgtctaaagaatggggaaagagaagcggttgtctgttcacctcatccttgccactccgccttatacctcaccatcggagaacttaccattccccaaatatatcctgctggcactacaccttcgtaactgctgttcccactgcccccacaacactccaatctccaccttcctgccaaccttgagatattgtatgcatatatacatatttcctttgtttaaaatacaaatagcatactatgcatgctgttctgcactttgctttgtttttatacttgcaattagagctgcctcatttcattttacagctgtatactattccattgaatggataaaccataatttatttaatcagtccctcactgacagacgtttccattgtttcctgtcttttgctataaataatgctgtaatgaatattcttgtgcatatttcacattaatttatgggattacatctgcaggataaattcttagaaccaatggtggtttgtggggagggtgacagggtggataggtacaggattgggagacttttcactgtatctccttttgtatttttttgaattttgtaccatatgtatcacctattcaaaaaaaagtaaaatatttttaaataca

SEQ ID NO: 83751 - DNA, 1534 bp, Homo Sapiens
  misc_feature (73)..(108): n is a, c, g, or t
  misc_feature (1224)..(1370): n is a, c, g, or t
ctgatatatacatgggcgccacgcgttcgagccgaacgacgagcgcagcgaagtcagtgagcgaggaagcggnnnnnnnnnnnnnnnnnnnnnnnnnnnnnnnnnnnncagtcgacggtaccggacatatgcccgggaattcggccattacggccggggtctctgaccccaaggagtggcagaagatcccttcactcagagaagcaaggctgatattagcttgtgaagtgtaagagacacaaatgaagaagaacaaagagcctgagaaagcagcaagaggacatgatgaaaaatacgtggagttgatgagaaaggggagccaaggctttatacgtctaaagaaaatattcagtagctgaatccgcccagtgatagcctgtgggcaccagcagcaagggctgccatgggatacagtacccatctacaaagacctctattacataaacactgcttcttacaggaaacaaacctcttctgggatctccttttgtgaaaaccagtttgatgtgctaaaagtaaaaagtctattttccagtgtggtcttgttcagaagcagccagatttccaatgttgtttttcccctccactcagaaacccctgccctttcccttcagaaaacgatggcaggcattcctctgagtttacaagcagagactcactccaacccaaactagctgggagttcagaaccatggtggaataaagaaatgtgcatctggtctcttctgttgtttttatttcatatcagattaaatttctttaccatgttggctaagtctaaatattagagatgaggctgtgcctactccctggccagctctgctgatagcctatgatgggttccaatgggaaatgactctttactattaaaagacaaggaaagctctgacttcgtacttctctgatgaatggcaatgtaaatgaacaaggctccatgtgactggagcatggaagtgaatgctactttcttaatttaatctgccctgtcctacctgctcctctgattgttagccatcacataacttattgaatgcttgccatgtgccaggcactgtgctgagtgccatacatacatttcatttaattatccaataatcctacttactattgtttattctcaatttacaggtgaggaaactgagacatagaaagcttaaataatttgctctaggtccctatactaattgagatgttttcagcagacaaaaataagtcactcttacgnnnnnnnnnnnnnnnnnnnnnnnnnnnnnnnnnnnnnnnnnnnnnnnnnnnnnnnnnnnnnnnnnnnnnnnnnnnnnnnnnnnnnnnnnnnnnnnnnnnnnnnnnnnnnnnnnnnnnnnnnnnnnnnnnnnnnnnnnnnnnnnnnnnacagctgacagaagtacatattgaagaggacaatatggtaatgtccttcaaaattataaaagcactaactctttgatccagtagtttccacttctaggaacttaaccttcagatatattttcaccagatataaaatgacatacgtaagaagttattactgcatc

SEQ ID NO: 83752 - DNA, 714 bp, Homo Sapiens
gcggccgcttccctccgcccggaatgcttccgggagcgcacagctgcagtgcccgggagaaggagcgctcgccgtctgcgggcgccgggcggcgatccggcagtcgacttccttggcgtggttccagaccccctgacgacaccaacctcggcgtcggcaccggacagccccgtttcgcctttctgtgaggagggcgcggtggccgtacagtccgtgccccagcggaagctttagcttggaccttatgcagtcggagggattagcatatctgggcagaggggtgagggattgcttcgaaaggatttcctaaagagataaaatttgatgctgggactctccttcttagtacacaccgactgatttggagagatcagaaaaatcatgagtgttgcatggccattctcctttcccaaattgtgttcattgaagaacaggcggctggaattgggaagagtgccaaaatagtggttcatcttcacccagctcctcctaacaaagaacctggcccattccagagtagtaagaactcctacatcaaactctccttcaaagaacatggccagattgagttttacaggcgtttatcagaggaaatgacacaaagaagatgggagaatatgccagtttcccagtcattacaaacaaatagaggaccccagccaggaagaataagggctgtaggaattgtaggtattgaaaggaaactggaagaaa

SEQ ID NO: 83753 - DNA, 930 bp, Homo Sapiens
  misc_feature (887)..(887): n is a, c, g, or t
  misc_feature (893)..(893): n is a, c, g, or t
  misc_feature (912)..(912): n is a, c, g, or t
gcagccgcgctcttgagtcacgtgcccagggcccgccttgctacttccggtcacgtgccctcagactcctcgcagccagcgatggaggcgagacccccctagtaacagaggcggtggctactgctgcggccactgggtttcggcctcttcccagcagcggctctaagaagcgcagcggaactcgaccggatccaacccagttagttacttcctgtctagagttgtagcttccacctgcaccttctagccaccatggcaacctcatctgaagaagttttgctgattgtaaagaaagtgcgtcaaaagaagcaggatggagctctgtacctcatggcagaaagaattgcttgggcacctgaaggcaaagatagatttacaatcagccatatgtatgcagatattaaatgccagaaaattagtccagaaggaaaagctaaaattcagcttcagctggtcctacatgcaggggacacaactaacttccatttttccaatgaaagcacagcagtgaaagagcgagatgcagtaaaagaccttcttcagcagctgctgcccaaattcaagaggaaagcaaataaagaactggaagagaagaacagaatgctgcaagaagatcctgttttgtttcagctttataaagaccttgttgtgagtcaagtgatcagtgctgaggaattctgggccaatcgtttaaatgtgaatgcaacagatagttcttccacatccaatcataagcaggatgttggcatttctgctgcatttctggctgatgtccggccccaaactgatggctgtaacggtctaagatataatttaacttctgatatcattgagtccataattaggacctataccagcagataaaatgaaatatgcagaaaatgttncccacnacatgacagagaaggaatnctggacacgttttttcca

SEQ ID NO: 83754 - DNA, 500 bp, Homo Sapiens
atagctaaagtaagtatcaagcagttttaagagtcagcctttagcaatattatacatatatatatgtatcttctgtatgataatgtatacataattgtctatgtgattttaaaaataaagtataattctaaaatacttattatattgctttgtctcaggaagaagttgaagctttgatatgagtaaacaagtatctctacctgaaatgattaaagactggaccaaagagcatgtgaaaaaatgggtaaatgaagaccttaagattaatgagcaatacgggcaaattctgctcagtgaagaagtaacaggattagtcctgcaggaattaactgagaaggaccttgtagaaatggggctaccatggggtccagcacttttgataaaacgttcatacaacaaattgaatagtaagtcccctgaaagtgacaatcatgatccgggacaattagataattcaaaaccgtccaaaacagaacaccagaaaaatccaaaacacacca

SEQ ID NO: 83755 - DNA, 232 bp, Homo Sapiens
tcacagttaaaggccatcattctgtattgtgaaacacctcctgatttcctgaaatctactcaacaatgaagaaaatacaaagaggccactggaatcatttctacctatcttctgtagggggtaacgtctgcaacctcaggtgagctttgagacttcaaggcacgttgcaaaaaggaaaaaactgaaaggaaatcgccctgttcgtgggccagaatatatttcattcgcaaag

SEQ ID NO: 83756 - DNA, 633 bp, Homo Sapiens
  misc_feature (573)..(573): n is a, c, g, or t
  misc_feature (580)..(580): n is a, c, g, or t
  misc_feature (593)..(593): n is a, c, g, or t
  misc_feature (600)..(600): n is a, c, g, or t
  misc_feature (609)..(609): n is a, c, g, or t
gcgaccgcgcggtccagagccatcaccgccaggaggacgcattcggccgaacccagagccagcgatgcgcacagctgggccgtgcagtggctgcgcggcagccagagcgctggtccgcgcaggttggccagcagcggcggcaccacgctagtagtgaagcccgcgtctaccaaggccaggtggcagaggaagtagtacatgggcgtgtgcaggcgcgggtcgcgcaccgccagcagcaccagcgccgagttgcccgtcaaggtcaggaggtagcacaggaggacaagggcgaagaggaccggctgcagggaaggccagtcggagaaacccagcaggagaaagcgctcctctgcgctgtagttggcctaaaggaggaaaactcccagaatgtttggaaggtcgaaataaaaaagggtgactaccccttataagcaaagggaaaaccttggagtgtggggctgggctgggagaaggaatggaatcatatacaaggtcagttttgtggattgtaatcccatttacagattgagattacttaaaaataaactccctaagaataagagcaaacttccnagctttngcttggccaacantcggtangcagaatgnttacctccgttgtttcaggtactc

SEQ ID NO: 83757 - DNA, 451 bp, Homo Sapiens
cgacagacgtgaccccagaaggctgccgagggagactttaggacaagaggcgttgttttttttcagcgtggccgcatttggaaaaggctgaaggtagaaaactctggaatggagaggctggcgactggagcaggatccaggggctttaaattttaacctgaatgcgatcgaatgcgcgactcccagaagagatagccaggcgtccgcccggccgctcaacccccgccaggactcggaatgccttgcttttggttcttttcgtgagttccgaccaaatgtttaagtggactgggttttgcagaagctcatttgtaagcactgacggaaatgggttgtgggcatttgatttcctttgattccaacgttttgaaataatgtttctcggatttgctattcgaagcaattttctaaaaactcatatcttatttgctaaaaataaactctttggctc

SEQ ID NO: 83758 - DNA, 763 bp, Homo Sapiens
ttcactacccattccctcgttaggttggaaaaccagtctgaaaaaataaatacaatctgtgaccatgaaaaggagcaatcacttatttttcccatatgttttgaacattatttttaaaaatagattgggaatctggagggtaaaatgccgggtcccttcccgagcccttagagcccgaacgttgtcgaatcggtcaatgtccaccccgctgctaacctctgtcccagcagcgccggggccagcgcgccctcccgccgcgtctgcggagcttgcgggaaaagcaggtccccggggggtatcgagtgtccagggatatccacgcagacatccttgtagaaaagaaccaaaagcaaggcattccgagtcctggcgggggttgagcggccgggcggacgcctggctaatctcttctgggagtcgcgcattcgatcgcattcaggttaaaatttaaagcccctggatcctgctccagtcgccagcctctccattccagagttttctaccttcagccttttccaaatgcggccacgctgaaaagttacgtgcagaggaaacaacgcttagctacgaggtctcaccatctctggaaaccatactttacaaggcacctctccaccccagttcaactctgcacaggctcctcttccttccctaaaaaaacaacgcctcttgtcctaaagtctccctcggcagccttctggggtcacgtctgtcggaagaaatcctttctgtaagcgaaagggagcgagacatatatcacggc

SEQ ID NO: 83759 - DNA, 430 bp, Homo Sapiens
gtcattaggtccagctttctattattgtgtcacagggacccctgctaccacagctttcacccatgggcatggtcaggtagcctctggtggctatgcatttattactcaaaagttgggcaactctaataacgagagagtttttcctcatatcagctgaagtctgcctgtggattctccttgtagtccagatctactatctgcaactctttaacggcacttgagatatgtgcagtgggtggtctccccctcagtcttactttgagctgctgttactctagtcctttaagtcattcctcatatggcatgcttttcttacctgtcacatcttggccatcctcctctagacaaaaccagcctttaaaatatcatgtccaggcctggaaagaatacaaatccagtgcaaaattaaaccgattagttcttgatgata

SEQ ID NO: 83760 - DNA, 519 bp, Homo Sapiens
atatggagtgcaatgaactgagtcaatatggcaaggtgtatgtgatctgtgggagttatgccatttaacataggaagtgcatgggactttccctctctgcactccagctcttactgtaccattagaagatgcagaattctgttggtgtgcaaaaagtatagccttacattcaagcagaatggatctgaagaaagcagcaatatctgttactagagaacattcccatgtgtttaaactcttcacttcttagatgcatttaaattcttaatgcaaatgacgtagcaatttgaaaacttctccgtattacttgtgtttaaaatgtcttgctttaaatacaaaacaaatggtaaaggggattatcttttgtttagatggttaaatattatttttgccttagatagctttgtaataatttttctccagacagttcaacacttttgaaaaatgacatgaattttcattaaaaacccttttcctatgtttattgtatacaagaattatgcaataaaatttctttat

SEQ ID NO: 83761 - DNA, 1464 bp, Homo Sapiens
  misc_feature (57)..(152): n is a, c, g, or t
  misc_feature (886)..(1059): n is a, c, g, or t
agcaggctggtaccggtccggaattccgggatatcgtcgacccacgcgtgcgctggnnnnnnnnnnnnnnnnnnnnnnnnnnnnnnnnnnnnnnnnnnnnnnnnnnnnnnnnnnnnnnnnnnnnnnnnnnnnnnnnnnnnnnnnnnnnnnnnagataaggtaactgacaaacctagccacagtcaccccttcgccctaaaggagaactggaatttgaacccagagccttcttcaccaccatctccgttgtttctggaagcaccctccaggcaggccagccagcatcacggggcctcccctggggctggaacgtctgcaggatgcccctttgagaaatgctgttccacagaaccctgcctttcaggccttggagacgtgggcaggggagaagcagcgtccctcagagccaggcctggcagtggtgctagcaggggccaaggcccagggagcagggtctcctgtcggagggacctgggcaagcccctccacgcgccagcgggtttctcagcaggggaggtccacaccacaccgcttgggaacctgggtgcctaaacgcaacaggagccaaggcacaaatttaaccaaacaccaaggttgcgtgaggccccatttcatgagccgggctccaaggacgtgtccttaggcggctctggaaggcccagcgccagcccccgtcctctgttaaagggagccagccccgcggctccgcccaggcatggtagcctgagcgcgcccccagggtagtagggggcacctgaggagcagggtctgccctggcatgagcagagcccaggatggggtcagggtcaggccctgccagaggctggagggtgcccaaggcgaggccggtgaggcccagctctacaaataaagtgttttatttacnnnnnnnnnnnnnnnnnnnnnnnnnnnnnnnnnnnnnnnnnnnnnnnnnnnnnnnnnnnnnnnnnnnnnnnnnnnnnnnnnnnnnnnnnnnnnnnnnnnnnnnnnnnnnnnnnnnnnnnnnnnnnnnnnnnnnnnnnnnnnnnnnnnnnnnnnnnnnnnnnnnnnnnnnnnnnncgacgccagccagccaggcgcggcggagggagggaccaaacgagacagggaggacgggagaaggaagcaggagagggaggagcgaagaagcgacagggacacgaaagacgaagagaacggcggcacagggcgagagccacgacgacgagagagctgaggatgataatagaggcggcagccacgagcgggacaagacagaactatagcagaggaagctcaggggacgcggaggagacggaaacataaggaggtagaggggcagacagaagacgaaaggaggcggaagaaaaagagacacgagggcgagacggccccgccgcgcggggccggggagtcgagcagaagacagcaagagcgcggaagcagacagtagaattgatcgactgagaggggcgaaacgcaaga

SEQ ID NO: 83762 - DNA, 447 bp, Homo Sapiens
  misc_feature (269)..(269): n is a, c, g, or t
  misc_feature (410)..(410): n is a, c, g, or t
ttgggagaggattgcctggcagtgtcccaattctaagtgacaaggagaaccctgaccctgtaagttctttaacaaaatggagataatttttatttttgatttgaagatactatgaaatagggagcaccgcaaaaacaaagttgcttaacattcttgaatctaaactgacatgacgggacgtttattaacggccgatctcagaggtggatttttgcctttgtagtggcattcatgcttcttgctattaaatggtcacagaactatcctangaagatttatgtagactcccaaagcaaacctgactgtctcccaactgtaagtgggaaattttagtaatgtccaatccatcaacttttctggtaaagaaaaaaaggggaaatgtccggatccggtgggacaagtggggttcnggaactggcatggagaaccccgggtgaaaacgttttg

SEQ ID NO: 83763 - DNA, 672 bp, Homo Sapiens
  misc_feature (407)..(425): n is a, c, g, or t
ttcgcttctcggctcgaggccccagtctcgaccgccgaccgcctcggaaccgggctgcatccgagctgccacgcggcgtgtgaaccttgaagcgcggccggggaatccgcaaggcgccgactctcttcctccttgcaagcccttcgaaagtgagatttctcaccccacccttgcagggtggagagaacacgtttcaaaaaggggatgcctagaactcagccgtgggaagtgcctgtctaaagccttgtgctggtgccagtagcaaacccgtgcgcgtgctcggctttgagcgatcatggagctctgcaaatagctcaactgcagagcgtgccccttagagctcctgtgctgctgggaggcctcataaaggtgccaaaaccaggtgtccccagcggttggcctctttnnnnnnnnnnnnnnnnnnnggcggagtgggatgtccttgacgtgctgaaagacggagtagaatgagacgttggttttcattggctggccattaagcacgcactgcgcaactgttttccagatacgggtttatagcccattatttatatcggagccataaacttgaacaatagattggaatatcttatttttgcctgttgagaatatctcccatttaacttcttttgaaagttcagatgagtatataaataatacattgacccagta

SEQ ID NO: 83764 - DNA, 642 bp, Homo Sapiens
  misc_feature (346)..(366): n is a, c, g, or t
gaaacatagatctctgtggggcgtatcacaacgtcagggtcaggaggcctcaggactggagcagggggtgaaaccccgggatggaactccatacaaaaggaggtgaagcggaactgaccctgtaaagttaaaaacccaaattgaacggaaccaaaacccacaggtgagtgtgagaccgagtgtgtatgtggcagtctgttacagtgactgctgctgtgtgacctggactgttggcggaaggatgagtgggtgtgactctgtgcccagggagtggggccggtgggccagggcggggcgggcaggcacagaccggcgtgccaggcccctgggttgtgaaaacttctgnnnnnnnnnnnnnnnnnnnnnattaaaaaaagctagaaatataaacagaaacttgtgactgacgtggatggagcttagtccagactccaaaccctaggtttaaaaacgtcccagggccccccaccccacaggtcatcgctgagtgtgaggagtcacagtgtggggggctgggcaccctcgggggtctttgactctccccagggcctgtggtgaactgactctaggggtccccctatgatgccctcagaagcccaaggtgggggcgctgcctccaaggggcccttggggcctccccaa

SEQ ID NO: 83765 - DNA, 532 bp, Homo Sapiens
gggagttggggagcgcagatcccgaagcagcgctgggagcgtaagtgcgggcagagcactgcgccgtttgggaacgcaactttgaggagacagcgcggtggacttcagtgaagttccttatgacttcccctgaaattgcttccttatcatgggggcaaatgaaagtaaaaggctctaatacaacctataaggactgcaaagtatggccagggggtagtcggacttgggattggagagaaacaggaactgagcattctcctggtgtgcagcctgcagatgtgaaggaagttgttgagaagggtgtacagactcttgtgattggccgagggatgagtgaggccttgaaggtgccttcatcaactgtggagtacctcaagaaacatggcattgatgtgcgggtcctccagacagagcaggcagtgaaggagtataatgccttggttgcccaaggggtcagggtgggaggtgtcttccattccacctgctgatggagccttaagaggagaataaatcactaagtgccaaaaaaaaa

SEQ ID NO: 83766 - DNA, 137 bp, Homo Sapiens
cagcatccaaaatcttaatgtgtttcatttgatgttgttagatcagagaagaaattggcataaaatcggttaatagtattgtcaaagaattgtgtattgtgtactcactgggaaaaaataaaatatattcacatttc

SEQ ID NO: 83767 - DNA, 392 bp, Homo Sapiens
  misc_feature (192)..(194): n is a, c, g, or t
  misc_feature (221)..(221): n is a, c, g, or t
ctgtgtccagtcagccacagggcccgcctccctgcaggaataaggggtaaaacgttaggtgttgtttggcaagaaaccacactgactgatgaggggtaaaatggaaccaggtagagccactccgggcagctgtcacccattcagaacttctttccgcagctgaagaaatgttcagtaacctgtttgacgctnnntaattacaaacagagcctgcaggaaangtgggggctaaagtggcattcagtgatcctgttctgtagacttttctttctttttttaaccaaatccaaaggatgtttacagaaaagctagccactgatattttgttttgtttaaaacctcgtgccgaattcttgggcctcgagggccaaaatttccctaaaagtggagtc

SEQ ID NO: 83768 - DNA, 898 bp, Homo Sapiens
ccagtagcaggaagggcctcgggagttgcgagtgtcgcgaggtttgaggtcgctcggtgggccgggcgctgtgcgaagctagaaataactgggggcatggagaatgcggtggctgtaaagggccgctgaggcggtggaggcctggcagagagcgtccccgcggtcgcggcttctggcttctctgtggagcttggttcttccgtggtggtgcagcaccccaggaacttcaggaaccagtccttccttggagagctccccgggacagccacgggggccaagtgaaactagcgcgttttcttggatcctacactttatagtgagtcataaatactttaaatacaaagccaacaacatttgctgcaaataaacgtaaaaatactgttaaagtgtaaagtgttttcctccgtaccatctgacgtttctggcggttcgttgaacgcgagagaacgctgagccgtctgcactgagcccgggagcatcttcagggcagcgccgcccacgcgcgaggtgaatgaaggacacggcctcttgacactcccaggcagcacagatagacggatcctggctagaagtgaccccaggatttttttattatcaagagagactagaagaatcatgagacttttcctagttgcctttcaagaatatgaagaaaaaaatggttctcaaagtgggtttgaatgagtattgttccaataaatgaacttatattcatatttcatcccctgagtcctggtgtttcaacatccattagaactgaataatcatactgcatatcaaagtttgtgggaaattgctaaagtgtaaaaaatgctcatattgaaaaagaagaaaagctgaaaattaattgtgcttccaactttaaaaaaggacaacaagctaatcctaaagaaactag

SEQ ID NO: 83769 - DNA, 1657 bp, Homo Sapiens
gggagtgtgagctgaagaccagcagagactaggatggatgacggcctgtccaggggctgaatggacacaggtgtcagcagggccacctggtaaaggtatggaggtgagccagccatgagagggtatcttgtggccatattcctgagtgctgtcttcctctattatgtactgcattgcatattatggggaacgaatgtctattgggtggcacctgtggaaatgaaacggagaaataagatccagccttgtttatcaaagccagcttttgcctctctgctgaggtttcatcagtttcacccttttctgtgtgcggctgattttagaaagattgcttccttgtatggtagcgataagtttgatttgccctatgggatgagaacatcagcggaatattttcgacttgctctttcaaaactgcagagttgtgatctctttgatgagtttgacaaaatgaataatggtcctgttttaggacatgaagaagaagttgggagaaggacaaccttccgacttttttatccagaatctgttttttcagatcctattcacaatgaccctaatacgacagtgattctcactgcttttaagccacatgatttaaggtggctgttggaattgttgatgggtgacaaaataaacactaatggtttttggaagaaaccagccttaaacctgatttataaaccttatcaaatccgaatattagatcctttcattatcagaacagcagcttatgaactgcttcatattccaaaagtgtttcccaaaaatcagaaacctaaacacccaacaacaggaattattgccatcacattggcgttttacatatgtcacgaagttcacctagctggttttaaatacaacttttctgacctcaagagtcctttgcactactatgggaatgccaccatgtctttgatgaataagaacgcgtatcacaatgtgactgcagagcagctctttttgaaggacattatagaaaaaaacctcgtaatcaacttgactcaagattgactctacagactcagaagatgatgctaacagtgttagttttatttttgtactgcaatttttagtttaaaatatgttggatgcactcgtcaaataattatgtatactgtctgttgctgcctggtgattcataaccaccagcttaatttctgtgaatactgtatatttaacttatgaaaaccaagaaatgtaaagataacaggaaaataagttttgattgcattgtttttaaaataagctagttttctgaggtgttttcacacgtctttttatagttacttcatcttagatttttgaagggatatgacttcctactaaggatttagtttaccacaacaattctgactacaataagacattttgaggaggatatttggctactgtaaacatggctggtggaaaatcacgattgtggcttgatgtggcaagccgaaaccacttggctctggaaatctaagttcatactggtttaattaagctctctcctgacaacccccagaattaaatgaaccatgattgtgaagagtaatttggtacaatgaaggcagtgtttgtttttaagttaaaggaaatgggctaaacataaagttcttattagataagtaaataactaaagaaagaatacaattactaaactctgaaaaaa

SEQ ID NO: 83770 - DNA, 882 bp, Homo Sapiens
tataggctaggtacgaggcctgggtggttgaatcggcacgaggaacaccatctgctgacctctgacctgggtgtttctgggtgggccgtcaggcatgggcctgtgcaacacagagcccgttcctcaggcgagtggtgctgaggtgctctgtggtgatgggaacggcagaggctggcaggtgactgaacttagcccaggcagctccacatcctgggaacactttcatgtaaccccttctagttttgaactctgcagcaggctggtgctgtgtagtggccgcccagtcaccacccttggaagggtgtcagggtctgggctcgcatgcaccctgctcccttctgccagcctgcatcctctcctcaggcctccttcccacatcatctgtcttctctaagttagggaaccatatttgagactttcaaaaagggaacttctaggtttaagctcctcccagtagattcctgaacccaattatcaggaaatcatcctgagcactcacaggttcatttaacactcactcatcaagcaccttcctatgtgctaggtgctggggaaaacttgaccaaggaagagttcctgtcctgaagcttccaggacccagctttccttttctggtgtggccttgtagctagtgcctgggcacaggtgtttttctttttgcagttttacctagtgctgggagttcagttctttttcctctagaaaaatacctctgtgctccagagcctaatttttcccagatgcatatttagctctagggagaggactaggaggaaatccccctccctttagctgcctgaactgactgaggcccactcactagagccatgttcagtgctactgtgattagtagtaattaaatatgaactggtattctcaaaa

SEQ ID NO: 83771 - DNA, 816 bp, Homo Sapiens
ctcgccgtatctggcatccggtggaggagctgttctcgctgctgcgggagggacatcggatggaccgacccccacactgcccccccagagctgtacgggctgatgcgtgagtgctagcacgcagcgccctcccagaggcctaccttcaagcagctggtggaggcgctggacaaggtcctgctggccgtctctgaggagtacctcgacctccgcctgaccttcggaccctattccccctctggtggggacgccagcagcacctgctcctccagcgattctgtcttcagccacgaccccctgccattgggatccagctccttccccttcgggtctggggtgcagacatgagcaaggctcaaggctgtgcaggcacataggctggtggccttgggccttggggctcagccacagcctgacacagtgctcgaccttgatagcatggggcccctggcccagagttgctgtgccgtgtccaagggccgtgcccttgcccttggagctgccgtgcctgtgtcctgatggcccaaatgtcagggttctgctcggcttcttggaccttggcgcttagtccccatcccgggtttggctgagcctggctggagagctgctatgctaaacctcctgcctcccaataccagcaggaggttctgggcctctgaaccccctttccccacacctccccctgctgctgctgccccagcgtcttgacgggagcattggcccctgagcccagagaagctggaagcctgccgaaaacaggagcaaatggcgttttataaattatttttttgaaataaagctctgtgggcctgggtc

SEQ ID NO: 83772 - DNA, 923 bp, Homo Sapiens
tctcgggatcgcttctcacctaaatctccagacaaagctcacttaaatcttcacatcaattccctggagcttggtgactctgctgtgtatttctgtgccagcagcccaaggggtaacagggcctacgagcagtacttcgggccgggcaccaggctcacggtcacagaggacctgaaaaacgtgttcccacccgaggtcgctgtgtttgagccatcagaagcagagatctcccacacccaaaaggccacactggtgtgcctggccacaggcttcttccctgaccacgtggagctgagctggtgggtgaatgggaaggaggtgcacagtggggtcagcacggacccgcagcccctcaaggagcagcccgccctcaatgactccagatactgcctgagcagccgcctgagggtctcggccaccttctggcagaacccccgcaaccacttccgctgtcaagtccagttctacgggctctcggagaatgacgagtggacccaggatagggccaaacccgtcacccagatcgtcagcgccgaggcctggggtagagcagactgtggcttcacctcggagtcttaccagcaaggggtcctgtctgccaccatcctctatgagatcttgctagggaaggccaccttgtatgccgtcctggtcagtgccctcgtgctgatggccatggtcaagagaaaggattccagaggctagctccaaaaccatcccaggtcattcttcatcctcacccaggattctcctgtacctgctcccaatctgtgttcctaaaagtgattctcactctgcttctcatctcctacttacatgaatacttctctcttttttctgtttccctgaagattgagctcccaacccccaagtacgaaataggctaaaccaataaaaaattgtgtgttgggcctggttgcaaa

SEQ ID NO: 83773 - DNA, 618 bp, Homo Sapiens
  misc_feature (78)..(82): n is a, c, g, or t
tctccatctgtctccatttatagatatttacaaaagaaagtcatgagcaacaggccacagtcatgcaaaagaaacgcnnnnnccctccccaaactaaccccctgcccaccctgaaaccccgagatgtccaccgcccagcagtccagccaccttccccaaggttctgagagcaaagagggcacgtccttgaagagtcagtgggggaagggtggtggatccggggacctagagccaccagaagtaggcgctggcggaactcaggctgatcggggccgagctcttcccaggcctgggtgctggagtcaggaggaaggggtcccccagtctttgaaacccccaccttcctccagaaggtccatggagccagggttggctctgtcctgagtgtgggagggggtgtcctggcatcccacccccggcagaggctcttgtgggcagtggtgagggccgggcctggaggtcagatggcagacttcctgcggtaggagatgttgtccagcgggagggaagcctgcatgcgctccaggtccaggtggctgccgaactccagcatccggatgatgcccgcctccaccttggaacccgcctccataggacccagcggccaccgcggccgca

SEQ ID NO: 83774 - DNA, 1170 bp, Homo Sapiens
ctgccgaatcaattcaacatggcagccatgcgctggcgatggtggcagcggctgttaccttggaggttgctgcaggcccgtggctttccacaaaattctgcacccagcctgggcctaagagcgaggacttattcccagggcgactgctcgtattcgcgcacggcgctgtatgatctgctcggcgtcccctccacagccacgcaggcccaaatcaaggcggcttactaccgtcagtgctttctctaccacccggaccgcaactccgggagcgcggaggccgccgagcgcttcacgcgcatctcccaggcctacgtggtgctgggcagtgccaccctccgtcgcaagtatgatcgcggcctactcagcgacgaggacctgcgcggacctggcgtccggccctccaggacgcccgcacccgaccccggctcgccgcgtaccccgccgcccacctctcggacccacgacggttctcgggcctcccccggcgccaaccgcacgatgttcaactttgacgccttctaccaggcccactacggggaacaactggagcgggaacggcgcctgagggcccggcgggaggcccttcgcaaacggcaggagtatcggtccatgaaaggcctccgctgggaggatacccgagacacggctgccattttcctcatcttttcaatcttcatcatcatcggcttttatatttaatcggagagagaagggaaggggagtgtccccagccaaccccccagaaacggccttttttcctgcctctgaacccttggccgttgatagtctacctttgctgggatccgaaggaactgtactccccctgccctccccgacccgcccagcttagccgatgacctgcacatcgctccactgtggtccagaaaaggaggcctttcgatgtctgagaaagaggccccacgctgtagagtcccgaaagcccaggagtgaagggggttcctggagtctctagggtgcttcttccagagtctgtcttcttgcttccagatgtggtcaacttctggaacactcgctgtagctttattgtttagccccaagcaagatttatctcctcctgccccgcatgtgtatggtgggcctctgtaaccttgaaatgtgcaatgtgaccaattgttgactaccaaaagaaaaggtctggggttgtacgaa

SEQ ID NO: 83775 - DNA, 468 bp, Homo Sapiens
  misc_feature (75)..(75): n is a, c, g, or t
agccgtacctcccacagcccctccacacggctggttgtccaatctaactgtgcactggagcaagatgtgttttcncaggatgaggaaaggaaggttagcccacactgctggatgtggaaggggatgggaaccagggaaagaatggtaactggggaggaagggaaaccatgatacttttgtagtcgaaggcctaactgggcgcactctgccataacttggcccctctgcttcctttccactgggagtgccagaaatcacagggcagcagtcgctcaccctgcctttgtagacaagaaaatgaaaccatcgaagggtgaatttcagctagcatattgccatcactcttttatggtataaaggatgagagaggcggtgagggagacattgccccaaacatgatgtccacatcctaagacttacctgatatttcttattacacaaagacaacattgactggtttaagagaga

SEQ ID NO: 83776 - DNA, 699 bp, Homo Sapiens
ataatgcctgttctccaggcatccaaagagtcaaagagccaagagacagtaagtttaatacttgtatttgctccagctactagagcacacagagagtagctcttcagttaggagagagaagtcagggaaggcctccacagagggttattttagctgagctttatagaaaaacatggggaaaggacttgaaaaagtatgtaggtgacttttagtatcagctccaacatgtaaagagcttggaagtcatcacatccctcctcacagcaaaaacaaacaaaaaactgtacagattggaatatcaatggcttttcttagatccatggaagaattaaagtcataggacaaaccaccactcaaaaccctggagagacaggcaaatacagagaatcacaattgggatcagcttactgggagaagaggctgctggtcagtgactgctaggaacactaaaatgaactccaggtttgccacgcttcggactccggaacttacaccagtggccccctggatcctgaggcttttggcctcagatggatagttgcaccatcagctttcctggttctgaggcctttggagttggactgaaccatgctaccggtatcccaaggtctccagctttcggatggcctcaccgtgggtcttttcagccaccataattgcatgagccaagttccctaataaatttcctctcatatccta

SEQ ID NO: 83777 - DNA, 151 bp, Homo Sapiens
aaacacggaaggttatgtaatgcagtgccatttccaaaaatatccactctgaggcattacactacacggtggaaggctgattcccattctgtcgtcttgattgcaaatatactgccagtagtatgtctgggaacaaagagcagccagaaaa

SEQ ID NO: 83778 - DNA, 422 bp, Homo Sapiens
gaggtccctccccatctgcagccccctgagctgcaggagcggccccatcagtgcacctgattggaacacactagatttcaggtcctggaaactgggcgctaggatccgtttccctggctgcagagagtgggaggtgtgatgtggaatatcccttctcccagcacaccccaattaatactgaagagtagggcaggaggaggtgctgggaaaaccgggtttcttggcacatgggggtgcaagcactgtggttgaaattggccatgtccaaggcacaccagacgatttcaggtcatttttagccctagactggaaaggggtcaggggacaggtgacctgggctcagcccccagcagctcccaactgcccctctcccaagcaactcctgatccctgcttttgaggaaataaacaaataaaacccca

SEQ ID NO: 83779 - DNA, 488 bp, Homo Sapiens
cagaggatggttcccgcgtgaccctggctctgattcctttatgggatatgtgtaaccacaccaacggcctgacaccagaagattccttcgctcttgctgtcgcctctgcctaagaccctccattccttaggcacttacgggactcactcatagacctcctccagcgtggctgccctgagcaccctatgtggaatgactacgcctccagctcatccgccctcctgccctgtcctgttacatttccctctattgtccagatccgcttgtttctgcctttttaaaaaattattgttggttcacccccccgcctcccattagaatggaagatccatgaacgcagggtgattttgggggagggtctgttttgctcattgctatatcgctgtggtttttaatgaattcatgaccggtaaataaatgactgtaaaagccccatgcctaggaaaaaagatcagaaagaaataaaccaaaatgttaacgtgaaaaaa

SEQ ID NO: 83780 - DNA, 846 bp, Homo Sapiens
  misc_feature (309)..(321): n is a, c, g, or t
tttcagacttctgccaagtaaaacagaaattgccaataaaataatcagtattttgtaaatggcaggcaagcttctggctgtcgaaaacatctgagtcatttattcagtagacaatatgtccttgatccaggttctttgccagctataagggaatccctgtccttgagaggctcatagtctataagtaacattacagaatttgttagcatacccattcattattagttttacctaaacgtgttaggatcactactggtggaaattgtaaccagcctttgggcatcttaaagggtgacatgtggcatgccnnnnnnnnnnnnnaagaatttaatgtttttcaagattgtagtgttgatcagcgcaacaattcaagtgtgcaaagtaacaggatagtttgcctcttcactttacccctggataaaggcactttcactgcctgtcactgatcagcagatactgacttgttgccattaagtgaacttgacttcttatgtgtgctctatgagtttgttgtaattttcttcttgaaattgtgatttttcactgacagtaatgacaaatttaatgtatgtaattgtctatgcattttaagttaaactgcctaaaatgtgatttgagacatatacatatgtttgtattataaattgtaagcaatcagtttgagatactaggttttatcacctgctgctgtatttgtaaacaaagacaaatgttgctttaagaagtaattataattaggaataggctatggatgtgatacttggtattttttaagataaacttgtttgcttttgtgtattatacctggaaactttttttaaaaaatgtattttcatggtttcacag

SEQ ID NO: 83781 - DNA, 623 bp, Homo Sapiens
  misc_feature (22)..(22): n is a, c, g, or t
  misc_feature (29)..(29): n is a, c, g, or t
  misc_feature (46)..(46): n is a, c, g, or t
  misc_feature (60)..(60): n is a, c, g, or t
cggaggcaggggtggttaatangcaggcncaaccacgagccctcanagggttctggaccncatgagggaagcattaattatgggacctccaaagtagggctaaggcatggagatggccacattaattttaaaactgacaagcctgaattttcatataaatcaaagaactttttccttataaaagctcccatttttgaaaagttggatcagttgtaagacctttcatctttagtattgtatgatataattctacattgaaaaataaacacttggcattaaatgggacttggagtcaaaagatctggttttatggtccatctttaccaatcatttgctgtggatctctttaaaggtcctggaacctttgagcctcagttacctcacttgtaaattggcaaaaatacctacctcacagggttgttgtgaggattcaatgagctaatgtatgttgaaagcactttgtgaattgtaaagtgctacacaaatgttagttgttgttgctgctgtatctgagatgtcttaattttctttttcttcagaaatagtctaataaacctccagggcttttctgttaaagtatactagttggtaaaatgttgaataaacagtttattacaataaaa

SEQ ID NO: 83782 - DNA, 403 bp, Homo Sapiens
  misc_feature (21)..(21): n is a, c, g, or t
  misc_feature (31)..(31): n is a, c, g, or t
  misc_feature (69)..(69): n is a, c, g, or t
  misc_feature (102)..(102): n is a, c, g, or t
  misc_feature (120)..(120): n is a, c, g, or t
ggtcaaatccatggacccagnaccaggatgnttaattgtatcgggataacactgtttctaaacacaggnttttccttttttattaatatgcaacatagcatngccataacagataataanccacatgtgggttttaaaaatgaaatttggctaataggagcaattcagctatttttctatacagtaattggtgtgtggtatagaagaaaaacgggttcaaaccccacttctgccacctaccagctatatggccttgaatgagtcattcagctttaataaggttcattttcttctgtttaaaaagacacaaaacttgaaaatcagctttggccatctacctgagaattagaaagtctgatttttggaattagaaatcatgattgtaggctgggcacatgtgtcg

SEQ ID NO: 83783 - DNA, 1303 bp, Homo Sapiens
gccatcggtgttcgctgatgtccagtctatggagtcagttggtaccggtggcggcgcggaggcagaaggcggtgtccgagtaggggcctctgccccaccaggatgttacccggcttggccgccgccgcggcccacagatgtagctggtcctccctgtgccggctccgtctgcgatgcagggcggcggcctgtaatcccagcgaccgccaggagtggcagaatttagtgacatttggaagcttttcaaacatggttccctgtagtcatccatatattggtaccctgagtcaagtaaagttgtactccacaaatgttcagaaagaaggacagggatcacaaacactcagagtggaaaaagtaccatcatttgaaacagcagaaggtataggcgcagaactcaaagctccacttaagcaagaacctctccaagtaagagttaaagcagtccttaagaaaagggagtatggctcaaagtacactcagaataatttcatcactggagtcagagcgataaatgagttctgcctcaaatccagtgatctagaacaacttcgaaaaatcagacgacgaagtccccatgaagatactgagtcttttactgtatacttgagatcagatgtggaagcaaaatctttggaagtttggggaagccctgaagctcttgccagagagaaaaaattgcgtaaggaagcagaaatagaatacagagaaaggctatttagaaaccaaaaaatattaagagaatacagagatttcttggggaaataccaagccacgctccagaacagcatcagtgtttttttaagggacccaggaaaagtggtgatgggtgccaattggcatcaatggattaaactgcttctttaaatttcttgcctggatttataccggttcagcaagtatgttctcagaagctatacactcattatctgatacttgtaatcagggtttactagcattgggcatcagtaagtctgttcaaacaccagatcccttctcatccgtacggattttccaaatatgcgctatattttcttcgctatttaggggtgttgggattttcatgatgggtgcaggaatatcttggtaccatgggagtcatggggattgctttctccctcaacccattaaaattcgccttctaatggggaatattggaatttttaaccaagggaaccattaaagtatccctgaaagggagcacaaacccttctccttggggtggcccgggaaaaaatggaaacccttcccccaaaaggaaatggggctcccgcgggcctttaagaggggaaattggtcccaa

SEQ ID NO: 83784 - DNA, 829 bp, Homo Sapiens
cccaggcagcttgtggcggcgaagccatcggtgttcgctgatgtcagtctatggagtcagttggtaccggtggcgtgcgcggaggcagaaggcggtgtccgagtaggggcctctgccccaccaggatgttaccgggcttggccgccgccgcgtgccacagatgtagctggtcctccctgtgccggctccgtctgctgatgcagggctggcggccgtgtaatcccagcgaccgccaggagtggcagaatttagtgacatttggaagcttttcaaacgtggttccctgtagtcatccatatattggtaccctgagtcaagtaaagttgtactccacaaatgttcagaaagaaggacagggatcacaaacactcagagtggaaaaagtaccatcatttgaaacagcagaaggtataggcgcagaactcaaagctccacttaagcaagaacctctccaagtaagagttaaagcagtccttaagacaaagggagtatggatcaaagtacactcagaataatttcatcactggagtcagagcgataaatgagttctgcctcaaatccaggtaatttttttaaaaaatgtagccgtgtgtcatatctaaataatctaaataactattcctttcttagagtgtgtaacctgctaccatccatatatggaaaatttgctactggctccttaaacatgaagagatattgtattcaggtcaaacaatgttcacaaatggttagcagactaaaactgaatcctgcccagcattagcaattctagtctttcttagtttcttaagacccacaatggtaaattcttcaaaacctttccatcaaa

SEQ ID NO: 83785 - DNA, 567 bp, Homo Sapiens
ttagtcaatagtcttcatatataattgtgttacatatattgctgtagactctcagaaatcagggtagagcttttcctttgagcagtttaatgagtgaattcagcagcaaagtcgcaagaaatggttctccagccaggagaggttatgtttatcctctgattgcccgttttctctgcacacagtgatatcgtattcagtgagaggtgctgttggcacccagcagcaccctgggcacacagcatttcatgtcatgtcacagtgtacaagctaccctctaattcagaaagaagagcattttgcacagagaaaaataaaaagatccatgaatgtcatcttttatcttttattttcagttggctgatgttggaatttttgttcttgtcatgaacttgtaaaccaatcttgccaagatacaagttgttttggtttttcactacaatgacctcttgttcctcctgtcttgactgctgacgttcctcaatgattctattgtctattttatgggaagcagccttcccataggtttccttttacacactgcagggctatctttatactttaaaaaaa

SEQ ID NO: 83786 - DNA, 1048 bp, Homo Sapiens
tttggtggtggacggactgtaattgatagattgattatggaattaaattgggtacagcttcaaatcccgtcttctctgtggcactgggggttagagggggcactacaggctatgaatgtgggaaaagaggggctgagaggggttggggtcctgaatgacagctgccagcttggggattgagggctcagacagctgctgtggacggtgtgggggcagtggacgccctgacatcagcaggccggttcttctcaatcacctctcgcagccctttggcaaagtggagatcagccccgatggtgaggaatcccgcatggttcgtcaccacctcatgcacaaagttgatgccctcaggtagtgggatctgcaccccacgccaggtccgctcattgagcatgggcatcaccccaatctgcagcatggtcttcagaggggcctgtaatgggatcagagccagcgactccagtgcagaatggttggaatagattcggaacctgcgcaggtccagctgcgtgcgcagggccttcccccggagagccatcttggcgctgagacgggcgtccatagtcatgctggtacagctggacctcaggctggtctggtgtggaccagaggcaatggtgacgctatgcagtgacagagatggtggtgccagagggcttgatggtgcagctgcggtggggccagtgaccccggagctccagcttcaatgggggatgtcaatcactgctgggctcaagcaggaccagtgcatgccaaagtaagtggacctcaagccgacatgtccaggtcagtggggcaccttgtcccccaaccagacaccagcatggaaggaacccgcgccgcgggaaaggtaagcttcataccattgggcagaggtcagaagtggaaagcaacgactagaagaaaggccagcagtacggagcgagtccggagtcatttacgtccctgccaggtggaggctcgccgactgacgcggcaaggggagggcacacaaagcacacgcatagggtgagagagaacgaaaggcgccaaaggaagatgaagatca

SEQ ID NO: 83787 - DNA, 332 bp, Homo Sapiens
ggaatgctttcatcagcaaaacattgtaacattcccctttacttgagggcgtcccacaataccgtaaggttgcgtgaactgtcctactgaatcttcatggttgcttggattttaatcacatcagaagaatttgagagcataccatggctggcagtccataaaagactagttaggaacatcagcttttaatcatcgaccctgctttcaggtttcattttaaacttatagaagaggggaagacatcagtgtgcttatttggcctttactctaaatcttaaaaggaagaaaattttaatatttcttagtttgagcccaggtgcggtgtctcacgc

SEQ ID NO: 83788 - DNA, 2019 bp, Homo Sapiens
tatcagaacctgaaacattataacttggaaatggaatcttttacggtaattctttctttcaaaccctcataatcagaaaaataatccaatttgaaagccaaagatcttaacatttaggatactttctaatgaaagaaatcaagataagaaaaatccattgaaacatgtgctttaagaaatatcctcctaattagggggtgagaaaccagatattacattgttaaaatttaatgaagacctaaaaatgataaatgcagttttaaaatatttgttgtcatcattaagaaaacattaggcatgttgccaacacacacacaacatcactccactcacagtaggaaatgactgaaaaacagcagagttgaactgcagcaggagactgcagattcctttcagctttctgtctaaagttccagaatactttcagctctacagatgctcatgaagaaggggagctaaatgttttcaaggcacttttaaatgaggcattctaggtaaaaggaagaaaaggagaccctaatgtttccctaccaaaaaatatatccatgagctaaatctcaactttttaaaaggctaaaatatcttgaatattcattagagttatttgaaagagcagaaaaggtattaagaccttaatttataacagttgatcataatattacaaatgatcttttaactaactactattcagatcatgaataatacaaaatgtgtccaagagcattatctatttttatatactaaaatatgtagacgtataaagaggtattcctaaaaagttgcttgtagttcaaatatgcactagagcaattagtaattttgtaaaattgagtctgtaatataaatatttatgttttagattcatgctttaagattgagattttattactatgaagggcacatagtatctttattgaaagaaacatttattgaaacattatataaaatgttgactaaattctgtagtgtatttggagtgaacatcatcttgaatagagattctaaaatttcataatcttaacctccgacgatatgattatacttgtttaaaaagaacattatatccagatataaacttaacaaatgaaatattacaaaatatgaacatagatagttttgtttcccattataattcccagcattttcaccctgtcctgttcatacgagtcaattctcttcttcaattcctgtcccatcagccgtctgctgaaaaacactgctttgtcttggctaaggctgcacaagttcagtctcgcactggctcagcctcccctttcagcaacaccatttccctaccagggtacaagctgtttcctggtgctctaggtggagtctgatttggcattcgttccccatccctagtgctctttaagctggtacctgaagtcacagaaacgcttttgcttgctaattatttacaccagcagtgcatttaaagcaatttcataggtacaccctgaaaatcttggtaaagattcttcatcactgcctatgtcagcactttgggcaggggaaatggaagagaataggaaactttctctaaagctttgtcaacacatgtattatagaatggattctactatgtaagagttctcaattataaaatatggtaagcatttaccttttaaaaccaacataaaagggatgaaattaagctttttatgatgatatttttatatgagttatcagagtggtatatcaaatatctactctatttataaaatggataaaacaaggcacaatgaggaatgatgtgcaactataaaaactcagtgtgctaacagtagcacatgaagaaatcataattcacatcaacatgcttctgctaacactttcaaagcaaaaaccttttggaatgctagaggaaaaccacatcagacttcatgttaaaaacctcagatctttcaaggaattctctgcgcacctgcttctcatatgaccaaagttgtacatgtattcaaaggaaagggcttattgctagggggcaataaaatcagtaagaacagttatataaataaa

SEQ ID NO: 83789 - DNA, 730 bp, Homo Sapiens
ccctgcccaactgctgcgtgatccatcaggatgacttcttcaagccccaagaccaaatagcagttggggaagacggcttcaaacagtgggacgtgctggagtctctggacatggaggccatgctggacaccgtgcaggcctggctgagcagcccgcagaggcctcggacacccacatcctcctcctggaaggcttcctgctctacagctacaagcccctggtggacttgtacagccgccggtacttcctgaccgtcccgtatgaagagtgcaagtggaggagaagtacccgcaactacacagtccctgatccccccggcctcttcgatggccacgtgtggcccatgtaccagaagtataggcaggagatggaggccaacggtgtggaagtggtctacctggacggcatgaagtcccgagaggagctcttccgtgaagtcctggaagacattcagaactcgctgctgaaccgctcccaggaatcagccccctccccggctcgcccagccaggacacagggacccggacgcggatgcggccacagaacggccaggcctgcagcgtcccagcaggacagcatgtgagcgtttccctatgggggtgtctgtacgtaggagagtggaggccccactcccagttgggcgtcccggagctcagggactgagccccaagacgcctctgtaacctcgctgcagcttcagtagtaaactgggtcctgtttttttaaaaaa

SEQ ID NO: 83790 - DNA, 251 bp, Homo Sapiens
aaaaatatatatgtaatatatgtaaaatatataacgtgcatcattacatgtaatatatcaaataattcagtttctcctggtagtctaaatttgtggttaaacagttccactagtatttcaattaactattatttcctcacactaagttcccaagtatgcatagacataggaaccttgtgattcaaaattttggttttaattgtaaaaacaggtcttggctgcaaagagaataaaaaagccatgccaaaaaa

SEQ ID NO: 83791 - DNA, 650 bp, Homo Sapiens
tttactctgactatgtgctattgggttttatttccagaaaatatagttctccttttttctgcatgaaggatacatcgtggtgccacatgctttaagcaatttaaacaagagagataagaggaaaatgcaaccaccacatctgacttgcccaatgtagactttcctctattagattgaagtacacaacctaatatgatatattattttgtagtatctcagactttgtaaataaataccattatttttatatggaaattttatagaagagctatttctgtatacgtaattactcctgattttctgaaattgcttctggtagataacagacaagtcctaagcagtgttccactaagggtggttccaggcctgcctgccgtggagttgactgggggaattttacagttttgcgatcctaggatgcgtcccagacgctcagtcagaagtgctggaggtggggcctgggaagctgtatttgtaatgaactctggtgttttttgtccattaaagtgtatctttgtccatcctataagattaaaggaaagaaaaagcatctcaaatgagtgtaagttgttcttgagaaaaaaatgtatcagacttttatgatttgaatgaaatgtattatagaaaaaaataaacactttaaaatatat

SEQ ID NO: 83792 - DNA, 430 bp, Homo Sapiens
agagggtatacatgaggctagtgtttgcattcctggttatatgtaatgtgataaattagctatgaatggtaaaagaacaaaactgatcagagtaaattcattagcaattatcacatttaagaattgttatcatttaaaaatcatcctttttttcacacatactgactgtagaattaaaaaacaaagctacaatttgccctcatacacactgcttccacagcttgctagttctgtgtttactcaatggaatatgagaactgaggacattatggctctcataatctgcataggtataaagaggatcatttctacctagggatagccaaagcatgggtttcaacacgttttgtattaaatatattttcaaagtccacagtgatttttctaaacgcttacagattccatgaaataaaagtctattctttcaaaa

SEQ ID NO: 83793 - DNA, 543 bp, Homo Sapiens
agttcatagtgacattattcataatagccaaagagcgcgaacaacccaaatgtcccaaatgtctatcaagtgatgaatggattaaaaattgtgttatacccaaacaccagactattactcagccatacgaaggaggtgcgcactcacgttacaacacaaataaaccttgaaaatattatactaagtgaaagaagctggttaccaaaaaaacccccacatattatatgattcgatttatatgaaatgtccagaacaggcaaatccatacaagcacaaagtagattcttggtttcccagggctggagatggaggagatgagggaagttaaggggtgacagctgaaagggtgacagctaaaagggatggaggtttctctgagaggctggggaagatgtgtgaaattgtactgtggcaatggttggtggcacagctctgtgaatatagtaaaagccactgagtggtacaattgaaaccagtgaattgtgtggtatgtgaattatatttcaataaaaaaagtacatatctaattgataacccaccacc

SEQ ID NO: 83794 - DNA, 1185 bp, Homo Sapiens
  misc_feature (1151)..(1151): n is a, c, g, or t
tacggctaggtacgaggcgggggtgaatcggcacgagggttgcagcagtacaagagacgccaagaaatggctgatgaaataatagtctttagctgtggccatttgtatcactcattctgcctacaaaacaaagaatgcactgtggaatttgagggccaaacaagatggacatgctacaaatgcagttcaagtaacaaagtaggaaaactcagtgaaaattcatctgaaattaaaaagggaaggataaccccatcacaggtaaaaatgtctccatcgtatcatcagtccaaaggggatcccactgctaaaaagggaacctcagaacctgttctggatccacagcaaatccaagcatttgatcagctttgccgtctctaccgaggaagctccaggctggctctcctcacggaactctcccagaatcgcagcagcgagagctataggccattcagtggctcgcagagtgctcctgctttcaacagcatcttccagaatgagaacttccagctgcagctcattcctccacctgtgactgaggattgatgactccatggagcctggcccaggagaaccagagatgatcccgaggcagctggggagaggccccgcctctggtgggcttggcctccaccacctcccacgcttctgagaagaggttccaaattgggcttctgtgcccagagcgtccacagcaccattcccagtgtagactcccagtcttctccacattgctgtcatggcgtcagttcaccagactcattgattttgttttgcttgttaagcaaaggaatgtcacatacctctgtccagctttttaggaaatacatttcgcctattgcgactttttccatttaccctgaagcctagaaagtaggtggaactcacacaaatggcattccagagtctgccatactccgtctcctccagctgctggataatacagaggaacttcaacttctacagggaacagtggttggccaggctgcagtataactgaagcatgccttggagagagcagacactgtgggggccagggccatctccctttaatgtgttcatgttaaaacctatttgagtgtaagacttgccctttctaacaataaatgctctgtgtttaagttctgcaggtctcctggttgaaaggctggctnccagtctgtcaagtcatggaggacatttcgaaaa

SEQ ID NO: 83795 - DNA, 884 bp, Homo Sapiens
  misc_feature (693)..(693): n is a, c, g, or t
ggcccactccaatgggcggcgccggggcgacttgctgttcccggctggcccgtgcgtcggcggtggttgtggtggtaatgatggcggctgtgagtctgcggctcggcgacttggtgtgggggaaactcggccgatatcctccttggccaggaaagattgttaatccaccaaaggacttgaagaaacctcgcggaaagaaatgcttctttgtgaaattttttggaacagaagatcatgcctggatcaaagtggaacagctgaagccatatcatgctcataaagaggaaatgataaaaattaacaagggtaaacgattccagcaagcggtagatgctgtcgaagagttcctcaggagagccaaagggaaagaccagacgtcatcccacaattcttctgatgacaagaatcgacgtaattccagtgaggagagaagtaggccaaactcaggtgatgagaagcgcaaacttagcctgtctgaagggaaggtgaagaagaacatgggagaaggaaagaagagggtgtcttcaggctcttcagagagaggctccaaatcccctctgaaaagagcccaagagcaaagtccccggaagcggggtcggaccccaaaggatgagaaggatctcaccatcccggagtctagtaccgtgaacggggatgatggccggaccgatggccgcgtccaaatggcagccnaaccgcaagcgagcctgctaacagatgcagatcctcatatccatcatttcctgctaagccaaacagagaagccagctgtctgttaccaggcaatcacgaagaagttgaaaatatgtgaagaggaaactggctccacctccatccaggcagctgacagcacagccgtgaatggcagcatcacacccacagac

SEQ ID NO: 83796 - DNA, 471 bp, Homo Sapiens
gcggccgccctcctgcaggaggagctcggaggcgcgccgcgtccctcgggcctgggtgaggcggcggctccaggcaagacccggtcgtttcgcccccgggacttttacttgcggagctccgcgttcctacggcaccaggccctgaaaaagcccccagtcatcgcctcggggttcggcacggccagacccgtggtcctgctgcctccgcccgagccacccgtgaagcgcagagcgcgcggggtcttggagagctcgcggcacgcggctcccaggcgggtcttccacttgggaagggagcgcgaacagagccaggaggtagctcctctcgcagggccctgcatggccaaagagaggaaggccagctccgtctccgcagaggacggctacatggaggccagcagcgggcggaggaaagtgaggatccgcagcaacttcgtgagcgagagcggggcccgcgaggcgcgggaagcg

SEQ ID NO: 83797 - DNA, 1087 bp, Homo Sapiens
ggcctgggtggcgattccggcacgagggaggaaccaccgcggagccggggacagggggagcagggcagtgctctgctgggtgaggggcacccagctccagaggctagtgctggccggcgaggactgcctgtggtacctggaccggaatggctcctggcatccggggtttaactgcgagttcttcaccttctgctgcgggacctgctaccatcggtactgctgcagggacctgaccttgcttatcaccgagaggcagcagaagcactgcctggccttcagccccaagaccatagcaggcatcgcctcagctgtgatcctctttgttgctgtggttgccaccaccatctgctgcttcctctgttcctgttgctacctgtaccgccggcgccagcagctccagagcccatttgaaggccaggagattccaatgacaggcatcccagtgcagccagtatacccatacccccaggaccccaaagctggccctgcacccccacagcctggcttcatatacccacctagtggtcctgctccccaatatccactctacccagctgggcccccagtctacaaccctgcagctcctcctccctatatgccaccacagccctcttacccgggagcctgaggaaccagccatgtctctgctgccccttcagtgatgccaaccttgggagatgccctcatcctgtacctgcatctggtcctgggggtggcaggagtcctccagccaccaggccccagaccaagccaagccctgggccctactggggacagagccccagggaagtggaacaggagctgaactagaactatgaggggttggggggagggcttggaattatgggctatttttactgggggcaagggagggagatgacagcctgggtcacagtgccaggagtcaaatagtccctctgctcccaagatcccagccaggaaggctggggccctactgtttgtcccctctgggctggggtggggggagggaggaggttccgtcagcagctggcagtagccctcctctctggctgccccactggccacatctctggcctgctagattaaagctgtaaagacataactc

SEQ ID NO: 83798 - DNA, 827 bp, Homo Sapiens
ggaattcccgggatatcgtcgacccacgcgtccggctgagccatggagagaactctggagatggcgctcaagacccctgcactgtgtacctcctttctcacctctggccaggagcagcagggaccatagaaacttaaggaggagggggaacatagatggctgaagacagaatctagagccttcaaataatgtggagatgtttccaccttcaggttccactgggctgattcccccctcccactttcaagctcggcccctttcaactctgccaagaatggctcccacctggctctcagacattcccctggtccaacccccaggccatcaagatgtctcagagaggcggctagacacccagagacctcaagtgaccatgtgggaacgggatgtttccagtgacaggcaggagccagggcggagaggcaggtcctgggggctggaggggtcacaggccctgagccagcaggctgaggtgatcgttcggcagctgcaagagctgcggcggctggaggaggaggtccggctcctgcgggagacctcgctgcagcagaagatgaggctagaggcccaagccatggagctagaggctctggcacgggcggagaaggccggccgagctgaggctgagggcctgcgtgctgctttggctggggctgaggttgtccggaagaacttggaagaggggagccagcgggagctggaaaaggttcaaaggctgcaccaagaacacctgtcctctttgacacaggctcacaaggaggctctttccagtttggacaaccaaggctgagggcttgggagaaatctcctgggtaagccgggaaacc

SEQ ID NO: 83799 - DNA, 1102 bp, Homo Sapiens
gacgaggcagtttcaacccagcgttagtaaacgacggcagtactataacggtcctaaggtagcgaggctgggtggcgaattcggcacgaggatggtggctcggatgggaggaaccagcgcggagccggggacaggggagcaggcagtgctctgctgggtgaggggcacccagctccagaggctaggtgggcgtcgctggtgggtggactcctgggcgctgcgcggagccggccggctgggttagcgcgggcggggcgcttagtcccacccccagaggaggcggaagaggagcccgagcctggcgcgggctgggccccgccgcagctccagctggccggcttggtcctgcggtcccttctctgggaggcccgaccccggcccgcgccagcccccaccatgccacccgcggggctccgccgggccgcgccgctcaccgcaatcgctctgttggtgctgggggctcccctggtgctggccggcgaggactgcctgtggtacctggaccggaatggctcctggcatccggggtttaactgcgagttcttcaccttctgctgcgggacctgctaccatcggtactgctgcagggacctgaccttgcttatcaccgagaggcagcagaagcactgcctggccttcagccccaagaccatagcaggcatcgcctcagctgtgatcctctttgttgctgtggttgccaccaccatctgctgcttcctctgttcctgttgctacctgtaccgccggcgccagcagctccagagcccatttgaatggccaggagattccaatgacaggcatcccagtgcagccagtatacccatacccccaggaccccaaagctggccctgcaccccacagcctggcttcatatacccacctagtggtcctgctccccaaatatccactctacccagctgggccccccagtctacaaccctgcagctcctcctccctatatgccaccacaggcctcttacccgggagcctgaggaaccatgccatgtctctgctgcccttcagtgatgcaaccttgggagatgcctcatcctgtacctgcatctggttctgggggtggcaggagtcctccagccacaggccc

SEQ ID NO: 83800 - DNA, 1647 bp, Homo Sapiens
  misc_feature (26)..(26): n is a, c, g, or t
  misc_feature (303)..(303): n is a, c, g, or t
  misc_feature (937)..(937): n is a, c, g, or t
gcggggccgccaacctttcccgtgtnttgggattgagggggcgggtcgctcttccaagcgttgcagggttttctgccattgccaggggcgggttgccgtgttctttcccgccaaggtttgctgccaactccaaagggtctccccatcctgtgaacccgggtggtggtaagggggcccagctctcccttggcgccagctgagccaaggggcaaagctttcgagcaatccaggcccccgaatgggtgtggaccttgcggacaagcatagctgaagtcggtttgttgagggctgggaaagctgggngggcagcccccttcccaacctttagccatggggtctcgagccagatctgagagctgctgacagcattgaccacaagcctcagctgctcctcggctgaggctgtctgctgctgccactgacgcctggcctcctgagcacggctcagctccaactgcaggcccttggcacccatacgctccacctccacctctgcggctttgtcctgcagggatcgctgcaggatggcctgctcctggctctgggatgtcactttttcctggagtgaggccacctgtcccttcagctgcttaacagagtcactgtgttccagctcctgggcctttagctgcaccatgagggcaaacaccttctcccgccagcggctcagcagggactggcacttcctggtaaactcaggctccagggaatctgaaggttgaaccttcctggtcagctcctcctcctgcagggccgaggatctgtgtgaggctctgcacccgcacctgcagcagctccgcggtggcatgcaggctgtcccggtcctcctgcaagtgctgcatggtttccagaagcttctgtcgctccagttcccatgtctggctgtggacctcagaagggacttgttccccaacatattttcttagattctcaaccnagggtcacctgagcctccaagtcttcctgggtcttgctcagctgcttccgaagcagctcggcctccctctgagcctcggccagctccttggcttcccctgctcttctggtttccagactactcagagacttctccaagccctcagccttgctggtcaaactggaaagagcctcctcgtgagcctgtgtcaaagaggacagctgctcttggtgcagcctctgaacctcttccagccgccgcagctcttgcagctgccgaacgatcacctcagcctgctggctcagggcctgtgacccctccagcccccaggacctgcctctccgccctggctcctgcctgtcactggaaacatcccgttcccacatggtcacttgaggtctctgggtgtctagccgcctctctgagacatcttgatggcctgggggttggaccaggggaatgtctgagagccaggtgggagccattcttggcagagttgaaaggggccgagcttgaaagtgggaggggggaatcagcccagtggaacctgaagaattacaaaaacaaagatggtcagtttcccaggcagagacaaccaccactccccttgtctggtcccactgacctgaaggtggaaacatctccacattatttgaaggctctagattctgtcttcagccatctatgttccccaaccgcgagagccccctactgcgctttggccacacccc

SEQ ID NO: 83801 - DNA, 918 bp, Homo Sapiens
ctgttcattcctgctgctgtggtcatatggttgtcccgctgtggtgttgccttgatgtgcaggctctgtatgtccaggactattctgcgtgtctgagagcttgcctaccctcgtacttagcgcatggtctgatcagcttagagttctgatacaggtctgcgcccaggcatccgaatcggcaaatggtcctgcatgttatagcgctgttgttgcaatggcatgtgtggatacgtcccacctcattgcaccagttgtcctggtgtctgtgtaccttgtagggtgttgcacattgcgtcaatcctggccctcatagcaatgcgtgtgaccatcaggctggctgggtcaattcttatctccgctctgcttaggatgtgttagaggtcctgtaagtgaattacagagtttgaagtcaggattttgtcgttattcacctgattgtttatcctcagtccctagcacttagcacactgctttattatttgtatgcactgtaggaactatattgcttacataaaaatgagtacgttctggaaactagggccgaaatagggtaaggagtttattccagtgaggaagggtcacctagcaaagcaagcctgagaataacggcgtggatggatccctacctgcctctccgcactggctcctgcctgtcactggaaacatcccgttcccacatggtcacttgaggtctctgggtctctagccagcgctctctgagacatcttgatggcctgggggttggaccaggggaatgtctgagagccaggtgggagccattcttggcagagttgaaaggggccgagcttgaaagtgggaggggcgggaatcagcccacgtggaacctgaagctggaaacatctccacattatttgaaggctctagattctgtctccagccatctatgttccccaaccg

SEQ ID NO: 83802 - DNA, 1211 bp, Homo Sapiens
  misc_feature (685)..(696): n is a, c, g, or t
tcggcacgaggggcacgcgcgcggttgaggcgaggtcgctcggcgcagctgttgcggggccatggcggggaccgcgctcaagaggctgatggccgagtacaaacaattaacactgaatcctccggaaggaattgtagcaggccccatgaatgaagagaacttttttgaatgggaggcattgatcatgggcccagaagacacctgctttgagttatggtgtttttcctgccatcctgagtttcccacttgattacccgttaagtcccccaaagatgagatttacctgtgagatgtttcatcccaacatctaccctgatgggagagtctgcatttccatcctccacgcgccaggcgatgaccccatgggctacgagagcagcgcggagcggtggagtcctgtgcagagtgtggagaagatcctgctgtcggtggtgagcatgctggcagagcccaatgacgaaagtggagctaacgtggatgcgtccaaaatgtggcgcgatgaccgggagcagttctataagattgccaagcagatcgtccagaagtctctgggactgtgagacctggcctcgcacaggcgcacacacaccgccaagcagctcagcattctcccccggcacacttagtgacagtgatgctctgtgctggtaccaaacaaggcagacttgcaagaaccacggcatcnnnnnnnnnnnncaaacctttcctacttcaaacaggcttctcttctgaaatgatgacttaatgtcgaatattgacagcttactgcagttttacagtattcctcacaaagggcttcaggtagattatcagagctgtcagcattacctctccccgctgaaaccagcagttcatggcttcctggtggattccctccctccctggagtgttgagggggttgtacctgccagacttccaggggacgatggaatacccagaacgctccttctgaagaaatggggccctgtagctgcagcacaggggaagggcccggcacccttttctgggtccttccgggttccctgtggggccccatgaggagtccattacttcctttcttccttcatattttacaggcagatgcttttcttataatctaattacatcttttcatttgttatatattacaaaccatcacacttagaaatacttccaggaaatgcttttttgaagtgtgaattaataagaaatggggtaaatagaaaagaaat

SEQ ID NO: 83803 - DNA, 593 bp, Homo Sapiens
  misc_feature (14)..(14): n is a, c, g, or t
  misc_feature (286)..(286): n is a, c, g, or t
aggcgatggagcgnagttcttgtacgacctgctgcagctccccaaggcgtcggagccccacgcggaggaggagctctcaaaaggtgtgtgcccacgcaggtctgagggtggagggtgaaggtctgtgtggcaagagtgagcctggccatgctgggacttgcagcaccttccccagctgtccagctgagcgcccaattctgctcacccctgcctccaccttctgctttatgcttgacctaactcctcctcctgggaccttctacagagctagaacctcttctctccnagatgagagacggtgtggattacgatggagcaattcaacgactataggtcgccctttcagtaaagctctgtgtcatgagcctttggggggttggcggccacagttcctgcaacctcccttctaggagatggctcaaaagaaggacatgggcaggtacccagagctgtcaccctctctgtgttctctgaaagaaacaaatgaacaacagcttgcaaggaagcagcgagatgtcccagtggggaagggctttaggtgaactcattggaatttatgtaaccacaaaaacataaatgtgctgacaaagaaa

SEQ ID NO: 83804 - DNA, 436 bp, Homo Sapiens
cagcatgagctccgcagccgggttctgcgcctcacgccccgggctgctgttcctggggttgctgctcctgccacttgtggtcgccttcgccagcgctgaagctgaagaagatggggacctgcagtgcctgtgtgtgaagaccacctcccaggtccgtcccagggacatcaccagcctggaggtgatcaaggccggaccccactgccccactgcccaactgatagccacgctgaagaatggaaggaaaatttgcttggacctgcaagccccgctgtacaagaaaataattaagaaacttttggagagttagctactagctgcctacgtgtgtgcatttgctatatagcatacttcttttttccagtttcaatctaactgtgaaagaacttctgatatttgtgttatccttatgattttaaataaacaaaataaatca

SEQ ID NO: 83805 - DNA, 628 bp, Homo Sapiens
tggaggtcgtcaagaagaacacaaaaggtgctgaggactaccctgaccctccaataccccacagctattctagtgataggattcacagcttgagctcaaataagccacagcgtcctgtgtttactcatgaaaatattcaaagtgggggggaaccgtttcaggctctgtataactatactcccaggaatgaagatgagcgggagctcagagaaagtgatgtcattgatgtcatggaaaagtgtgatgacggctggtttgtggggacctcaagaagaaccaaattctttggtactttccccggaaactacgtcaagaggctgtgaattgcgctccctccttctgtagaggccgcctgccagccatgcacctgcgtcaacgcgactgaaacaccccgcgggcctcccgttgtcatgccttacggtttccaatgcgccgtcaccatctccacctgccaccaaaccaccagcagagtagccgccgctgctgtgagcctggggacgacatggcaggctggtccccctccgtgaaagtgtggattcctacttcctgctctaagctttgacacgtcaaaatgtgggatcagaaagaaaaaaatcatgatatttaaaaatggtcaaatatttgaggc

SEQ ID NO: 83806 - DNA, 1004 bp, Homo Sapiens
gcggccgcccggtcctccttcccagcccagtgcagccaggcacccgggttcggcttgctcaggtctctgtccgggactgggaagccacggagggccgggaaagtggcacactcctggagctcaagcttcctactctctcatcgctgaataactaccgggcaggactgggtggaacagacagcatatttaggtcattgatgggctgctgggtggatggagctggaaagtgatgggcactgctttctggggctgcccaggttccttccgagggctcgcttttcctgggcagagcgggaaagaggaggggcaggccggtcgcgaaacgcaaatagtcgagaatagcgatccggggagaagcaggtgtctgtggggcccaagagaagtaccatctcgttaaaaattcagattgaactatcttacaaatggctcccagaagatccactccctgtgggaacacagcagttgtggaagtgaagacaggactggacccagaataagggttcaaatatgtggggaaatctgacctctaaattcttataagtcagagagtgactgaacaacagcagtgagacatcgaagagttttaatatctgctgtaaaccttggcacagatcatttacttctctaagactgaatccaaaaagcacaatggaatactataataagctgagacagcatggtgaattccagacaagcctgagcattccctatagccagagaaggaggcccaacacctaacatagccttggatgcagaactgatagaacttggggaaagtgatgaagtagttgacctcacctgtgaatctctagcacctgtagtgattgacctaactcaccgtgactctgtagtgattattgaacaaaggaggaggccaagagcaaacacaaggccactccaagaccccacctggccagttgtgtggtgaacaatgatgaaggaggggagtgaaaggggaccgagatgtatgtattaccaaccggggccccccataaatccctggc

SEQ ID NO: 83807 - DNA, 449 bp, Homo Sapiens
  misc_feature (85)..(85): n is a, c, g, or t
cagaaccagagtaactcctcgcctgttgctgctttgcaatgaatttcctttacctttctggaacacaaagctgctgtgaaccaanactgatatcaagtgattagctcaccgggccttggttgcttttcaaagatccccctcagccccctgccagagtcactgccccataatcaccatgtcagaagggaccctagggcattcgtgtcctatttatcaatcttcagcaccacctctaagatctctgagagagggtggatcagcctctgtgtaaacaaaaagctgttaggacttgttgcctctcaaggtggactattctgttttctgccaggacactgccattcatgcattgtcagatatttattaaacagcagcaaagtgccagccaatttgtcctggaggaattcatagcctcatggggcaaaagtaaataaacagcttattacaattca

SEQ ID NO: 83808 - DNA, 443 bp, Homo Sapiens
aagaattcggcacgaggcacttatctcagtggactccaaagcaaaagctcccgactactagctctgttagttccagcctgctatacctcagatgggagagagccagagagaggagtgagggtggctcaacctaatggaatttttaaattgtatacaatactgctactgattgttataatatcctcttgcgttttccctgtgggaatgcccagcattaattaagtccatttcatttttgctttactttgcatttgattgctgtgaagatgaaagcattagacttttatccccttcatgtcacttcttcggcattatggtttgcatctgaaagcagttaaatcttgtttactgatgagaatgacatacatcctttccatttagctcataagcacggctatctttttaagagaaaaataaagccatggtattttcatacttaaaaa

SEQ ID NO: 83809 - DNA, 330 bp, Homo Sapiens
gcgaccgcggccaaggctaacaccaactcggtggacgtcctcgacggggaggggtgggagtcccaggacgctccctcgtgcagcacccacccctgcgacagtcgctgccctgcgactccgacctctagacgcttgtagagcctggggggcgccgggtggcaaaggactcacccccgcacaggcccgcctggcttcgagttggaacccggacacttgcccctcactggtgtggatggaaatctgcctttcctgggaccaaacaggactccttggacgattagttcaggttgggtttggttttcttcttaaaaaagtttaaattttccctcc

SEQ ID NO: 83810 - DNA, 405 bp, Homo Sapiens
tctttttgggttttggttcctttttgggtttatgggtgcccctggatactccagcagagatcagaaggctacagatccattctatccatccgttatgtggctttgccatcccagcttggagtgtctttacaaagataataacagttgtgttctttgctctcgttttggatgcatagactgaaaaattaaaacaaataacttgtaaaatggcttgttaaaaaatacaattacctctaattagtagtacgcgtaaatgttttacagaatgaaaggcgtgctttttattttcttacttcgttacattggtggcgaaagaagtctgtatgaaaatcagttctttgctgacacaagttccatttgttacaaatgaattctaataaaaatgtcagtgttatgcaaaaaaaa

SEQ ID NO: 83811 - DNA, 659 bp, Homo Sapiens
tttttttaaataaataaagtcatttacttaacatttacatagcactgattatctgacagagactgaggaagcagaaacgagtaagacaccactccaggccccagggatctttcttgagggagattcacatcctcgggaaaacaagatgtatagtcgaatgaaggaggtagcagaggggtctgcagtaactgagtaaggtatggagctagaggactaatacctccaggataaatgaatttatacaaagattgtatttgagagaagaggtgaggaaccactcactagtagttttgaagtgccctgaaagtgaaaatagattgaattttgtcctggaggtcaatggggatgttccaggacttaagccccatagggactgacaatcaaaaacaggtctgggctgcactgtgggaaatggattgagggggcgctggagtgaaggcaggaaggctgtgagacgtgtcagacaggacaggttgaacctggggctgagagaactgaaccaactggaaaggtctcttaaggtctcttacaaggtaaaaagagacctaaggcaggtgtgaagagcgataaggcaaggatgagatccaggtttctggcgtgggtgtccacggaaatgagaaacacgatgggggcagagctggaatgaaagaaggagctga

SEQ ID NO: 83812 - DNA, 619 bp, Homo Sapiens
tagaccagaacaatagtaatgcctttttcatgttttaaaatattatataccagggtgattctctttcaacttgttatatagtctgtacttgcagtatgcgcaggcaggctactaagtttctctcagcctctgtctctagaatttaaagcagtcactgagtggcagaaatttcttctaaaatctattatatatagactgggcacagtggttcatgcctgtaaaacaaaatccaagtcctagctctcttgagccataaagaagaaatagaggtatctctatactggatccacctcaacttagcaacgcatctctgcatctccacaatgccattctcctcaaaacatctgctgtctttaacatctggcataggtggtagaatggggagatactaggctgcagaaataaaatccaacgtttgacaaagccaacagaattttgagataaagaaatggtgaggtagagttgagagagttcaattatattgttgagcacagaccatttggcacattctaaaattagattccctatcaacttctcctttgtggtacctttacaaaatgctgacaccttaggaatcctccaacacctatgtaaagctaacagaataaagtcatttgaa

SEQ ID NO: 83813 - DNA, 583 bp, Homo Sapiens
  misc_feature (26)..(26): n is a, c, g, or t
  misc_feature (41)..(41): n is a, c, g, or t
  misc_feature (58)..(58): n is a, c, g, or t
  misc_feature (79)..(79): n is a, c, g, or t
  misc_feature (93)..(93): n is a, c, g, or t
  misc_feature (108)..(108): n is a, c, g, or t
  misc_feature (143)..(143): n is a, c, g, or t
agtgcattgtacacacgctcttcggngatcccttagggaancttcaagttaagatccncatctggtaacagtggatggntgggttcgttttangagttgccactgggnttcagattggtgaaagttttagtcccaggaaaccngggatgaggctcttggattaaagggtaacttcattcactgattagctatgacatgagggttcaggcccctaaaataattgtaaaactttttttctgggcccttatgtacccacctaaaaccatctttaaaatgctagtggctgatatgggtgtgggggatgctaaccacagggcctgagaagtcttgctttatgggctcaagaatgccatgcgctggcagtacatgtgcacaaagcagaatctcagagggtctcctgcagccctctgctcctcccggccgctgcacagcaacaccacagaacaagcagcaccccacagtgggtgccttccagaaatatagtccaagctttctctgtggaaaaagacaaaactcattagtagacatgtttccctattgctttcataggcaccagtcagaataaagaatcataattcacaca

SEQ ID NO: 83814 - DNA, 571 bp, Homo Sapiens
gcggccgctcgcgcgcagccccgcacctccgcccctgcctctgcctcctgggccatgccctgctgtttacatgccggtgaggtccccggccgctccgaacccctccgagccccggctccccgagggtgaagcccgccggcccgcgaactggactggtggatctctcagacctggggccccggactccgatctccgccgtctccgccaccatcagggcgggatccggctctggtgttttgaggagggggtgtggtgtagggaaaggaatcccgtccctctccaccttttttcgccttcggggcttcagactcagggaactcgctcatggctttcttgatgaagaagaagaaattcaaattccaaactactttcaccctggaggagctgactgcggttcccttcgtgaacggggtcctcttctgcaaggtccggctgctggatggaggggattttgtcagcttgtcgtcaagggaggaggtacaggagaactgtgtgcggtggcgaaagaggttcaccttcgtgtgtaagatgagtgctaacccggccaccggcctgctggacccctgtgtct

SEQ ID NO: 83815 - DNA, 491 bp, Homo Sapiens
gctggtagtggctaccttacgtattgccagtctgaaaaattcgctcttctcatcgactggggaatttgaaagagctgttaagtgaatggcactcatatgagcctttgccccggacccgccaccccagagtcaagctgagggcatcggcatgccgcagggaagacgatcaggactgtttttaatcgggcagtcgcgcggatggccttttccctctcgcctccttccgccccgcccccactctcagcccggccgcgctgattgtcctgggtcacataatgccagctgagcgtaaaaagccagcaagtatggaagaaaaagactctttaccaaacaacaaggaaaaagactgcagtgaaaggcggacagtgagcagcaaggagaggccaaaagacgatatcaagctcactgccaagaaggaggtcagcaaggcccctgaagacaagaagaagagactggaagatgataagagaaaaaaggaagacaaggaaccc

SEQ ID NO: 83816 - DNA, 651 bp, Homo Sapiens
gcctcctgggacagcgggctggcagggactggcaggaggcaggtgcagggaggcctggggcagcctcctgatggggatgtttggcctctgcttcctcccagttcacagccagagttgcctctcctcctcctcttccccaacccccagaccatgaccagccttagaaaatccatgtactctgttgttagagggcccagagttccttctccacccccgctctctctctcttggcctgagatctctgtgcaggaaccaagatggggctgaagcctctggaggcagttggttgggggcgggcaggcaggaggccctccctccacccccccaccctcagcccggcaacttctgggttccatgggttttagttccgttcttcgttttcttcctccgttattgatttctcctttctccctaagcccccttctgcttccacgcccttttcctctttgaagagtcaagtacaattcagacaaactgctttctcctgtccaaaagcaaaaaggcaaaggaaagaaagaaagcttcagaccgctagtaaggctcaaagaagaagaaaaacaccaaaaccacaagggaaaagaaaaacccagtttcttaggaaacgcaaacgatttattatccagattatttggataagtcctttttaagaaa

SEQ ID NO: 83817 - DNA, 1325 bp, Homo Sapiens
gggcatgtaatataaacagtggtacaaaaagcaggctggtacggtcggaattcccgggatatcgtcgacccacgcgtcggtccctgagtcccgggcgggctgcattcgtcggggaaacctctcctcgacaggggcacctctactcgaccaggagcgacggcgtactttgggcttcatcatggaggactacctgcaggggttgtcgagctgctctgcaggagtcccgacctctacatgttgtgctgggaaatgaagcctgtgatttggactccacagtgtctgctcttgccctggctttttacctagcaaagaagtgacacagccctagaggaggcagtagcagaggtgctagaccatcgacccatcgagccgaaacatgccctccctgcatgtttcagttgagctggtggggtcctgtgctaccctggtgaccgagagaatcctgcagggtggcaccagagatcttggacaggcaaactgcagcccttctgcatggaaccatcatcctgggactgtgtcaacatggaccttaaaattggaaaggcaatcccaaaggacagcaaatatgtggagaaactagaggcccttttcccagatctacccaagagaaatgatatatttgattccctacaaaaggcaaagtttgatgtatcaggactgaccactgaggcagcatgctgagaaaagggaccaagaagactatctattagaacaaggcgtcaaggtggccattagtgcaatatatatgtgatttggagatctgtgaagtcctggaacgctcccactctccacccctgaagctgacccctgcctcaagtacccaccctaacctccatgcctatcttcaaggcaacacccaggtctctcgaaagaaacttctgcccctgctccaggaagccctgtcagcatattttgactccatgaagatcccttcaggacagcctgagacagcagatgtgtccagggagcaagtggacaaggaattggacagggcaagtaactccctgatttctggactgagtcaagatgaggaggaccctccgctgcccccgacgcccatgaacagcttggtggatgagtgccctctagatcaggggctgcctaaactctctgctgaggccgtcttcgagaagtgcagtcagatctcactgtcacagtctaccacagcctccctgtccaagaagtgactgttgagaggcgaggaggtagtgggtgaggctacctgactcacttcaaatgcatgttttgagatgtttggagattcagcaattctgtcttcattgctccaggatctggtatactgttctcataaaactgagaggaga

SEQ ID NO: 83818 - DNA, 752 bp, Homo Sapiens
  misc_feature (538)..(540): n is a, c, g, or t
cccgcttacgcagttcctcccggggtcggaggccgattcgccgtgtggcgggttcgagtcccgcctcctgactctggcctctagtccctgagtcccgggcgggctgcattcgtcggggaaacctctcctcgaccaggggcacctctactcgaccaggggcgacggcagtacgtggggcttcatcatggaggactacctgcagggattgtcgagctgctctgcaggagtcccgacctctacatgttgtgctgggaagatgaagcctgtgatttggactccacagtgtctgctcttgccctggctgtttgacctagcaaagaaggttcatattccagagagtatcgttgatgttgttcgggatgagattgacctccatgcattataccaggctggccaactcaccctcatcctggtcgaccatcatatcttatccaaggactgaccacgtgagcaagatgctgagaaaaggaccagaagactatctatagacaaggcgtcaaggtggccattagtgcaatatatatggattcggagggcnnnctttctgcagaggtctgaacctccattgcagatctccatgcttgtctgccaggctcacagctaatgatgtcctggttgccatgactatcgtttggcaacactcacaatgagccagtgcggcagttggctattttctgtccccatgtggcactccaaacaacgatctgtgaagtcctggaacgctcccactctccaccctgaagctgacccca

SEQ ID NO: 83819 - DNA, 672 bp, Homo Sapiens
attttaggtttgaattttctcaggagcagagtaatctgctttcggactggagagaagctcttgtcagggtggccagactcaggacatggcagcagctgtgaggggtttttaggtatggctgaatgttgccatatttcattttcttattttgggcttatagcaaaatgtctctatgaagccctaagaccagacacttgacctcctagaatggacaaggaatgtcaaaaggcctttctaaccattaagtaaaaattactaatggatctggctactgagaccccctgaactaagaaagccatttgatttgttcatacatgagagagaagggatgggtttaggagtagtaacccaagacttggggaatatcatgaggcctgtagcctacttttcaaaacagctggacattgttatgatgggttggacttcttatctctgaccactggcaccacttgtgatcttctccaggaggcagaagagttcactttgggttaacctagcactgtacacaccccacactgtgtatgctatttgttggaacagaagtggagctactgacttacctctagaagactgaatagatatcaggtcatcctcctggataatcctagtgttactttgagagctgtttctgctttaaatcctgctaaataaacctatacatgattgcatata

SEQ ID NO: 83820 - DNA, 479 bp, Homo Sapiens
  misc_feature (11)..(11): n is a, c, g, or t
  misc_feature (62)..(96): n is a, c, g, or t
cagaaacgganttccctatgttgcccaggctggtctcaaaactcctggatgcaagacactgnnnnnnnnnnnnnnnnnnnnnnnnnnnnnnnnnnngtgtgagccaccgcacaaggcctggatatatactaacttttatttatccgttccatcagttgatagtcattgccgttgtttccaccttttggctcttctgaatattgatagaatacttctggacacccacccatctgggcctccatctgcaaagctgtctgacaaccatgaggctcacagcttggtgctggcaactgttctttagtgcataataatcctgctactctatatatagatggccaaaggtatatttttccaataaagcataatatgccaagaaaataccaggcaatatggaacacaaaacggttacacattttaaaaatattttacttttagtaacttaaatgggataagaaaaaaaccctcagatattcctcgtg

SEQ ID NO: 83821 - DNA, 660 bp, Homo Sapiens
gcgaccgcgtggtatctcccgagggctgcttggaccctggtgggctcgagtgctccaccccgctgtgggcctcagataaccctgtacaaaggggaatggagattgcctgtatccacctagattcataagctgccctgaggcgatcttggcatcaagaaagacagcattgaggcacatctcaccatcagcttcagaggatgtcagcctttgatatgtcccatgggttttttcccagggaaccaatctgtccttttgaagaaaagacaaagataggaacgatggtagaggaccaccggtcaaattcttaccagtgaatattggtggaagtgttcattggctcaaaccagcatgtgtttgatgacttaggattcagtgacgtttgatgatgtggctgtggagttcaccccagaggagtgggctttactggacacaactcagaaatacctctacagagatgtgatgctggagaactacatgaacctggcctctgtggatttctttttctgcttaacttcagaatgggaaatacaacctagaaccaaacggtcatcacttcagcagggttttttgaagaatcaaatattcactgggatacaaatgttctgcatccccctccctgagccaaccccaggccctttctgcacccactctgattggaac

SEQ ID NO: 83822 - DNA, 569 bp, Homo Sapiens
ctataaattgacttggttccatttacctcccagaatcagcatacagtgacaaagtagagagaaaaggtctgggcaccacaaacttgtacttgtgctagaaatgtaggtgccttttcatttgcccagcagggctagtttaacagccagggtatcttctgggactcttccccaaatcttgctctaccgctgactagctatgtgatcttgggcaagtttctcaacctttctgtgcctttcttcctttacttataaataaggataacagaatttgcttcatagagttagtctgaggattcagtaagtagatacgtgtaatcttagaacagtgtctggcacacagtaaaactctatctttgctattgttgtttttgttataactgtatagatgttagctattattactatccacaagaatgggacatatcaattatatatattactggcctagtaattatatatacttagaatccctgatcaataaaataaattgtaatagaaatttttattcctcaaacacatttttgttcctcaaacacatttttaaataaacatgtcttgggaaagccaaa

SEQ ID NO: 83823 - DNA, 1099 bp, Homo Sapiens
ggaattcccgggatcggtcggcgacctctgaagagagtgcacctgagcaaaccaagtgccggaccaccagcgccgcctttccatggagactcgtaagcagcttcatctgacacgggcatccctgcgcttgcttttcatgctacaagcaagcagcgtggcctggaagctgatgggaaacgacccggcacgggcatcctgtgtgcggcccgcatggaggggttggaaaagttcacggaggctccctgaggagcctctcagatcggctgctgcgggtgcagggcgtgactcaccgctgggtgcttgccaaagagatagggacgcatatgctttttaaagcaatctaaaaataataataagtatagcgactatatacctacttttaaaatcaactgttttgaatagaggcagagctattttatattatcaaatgagagctactctgttacatttcttaacatataaacatcgttttttacttcttctggcagaattttttaaagcataattggaatccttggataaattttgtagctggtacactctggcctgggtctctgaattcagcctgtcaccgatggctgactgatgaaatggacacgtctcatctgacccactcttccttccactgaaggtcttcacgggcctccaggtggaccaaagggatgcacaggcggctcgcatgccccagggccagctaagagttccaaagatctcagatttggttttagtcatgaatacataaacagtctcaaactcgcacaattttttcccccttttgaaagccactggggccaatttgtggttaagaggtggtgagataagaagtggaacgtgacatctttgccagttgtcagaagaatccaagcaggtattggcttagttgtaagggctttaggatcaggctgaatatgaggacaaagtgggccacgttagcatctgcagagatcaatctggaggcttctgtttctgcattctgccacgagagctaggtccttgatcttttctttagattgaaagtctgtctctgaacacaattatttgtaaaagttagtagttcttttttaaatcattaaaagaggcttgctgaaggataaaaaaa

SEQ ID NO: 83824 - DNA, 449 bp, Homo Sapiens
  misc_feature (27)..(27): n is a, c, g, or t
  misc_feature (74)..(74): n is a, c, g, or t
  misc_feature (411)..(411): n is a, c, g, or t
ccatgagagagaaaggaaaggaacccngggatgacttccaggaaatttttggccctgggccccactggaagggntgaaagtcccccattttactggagatggtaatgacttgggaggttgagctggaagaactgagaatcaaatatctggttttgaatctgtcctttttgagatgcatattcaacttccatatggaggtgtcaaggaggatttagatctagaattttggagctcaagggaaagggttgagctgtagacataaattctagagatgccggaatatagattgtgatccttctttatcagcacagaaatgacttgactttgtccaaactaagcaatcatactgtacatgttagcaacacattttacgaggccaatttggccttttgcaatgttctgtggtttctnaagataaataaacatattatatgtttccctctggaaaa

SEQ ID NO: 83825 - DNA, 1035 bp, Homo Sapiens
  misc_feature (853)..(853): n is a, c, g, or t
gggtttcccccggtggagccttaggttagtgcccagtgcagtgccagactgtctcctctgctcctcccacctcatccctaggaggacccaccagtggagcacatgcagcctcagtggagatgcttggtgtggggatctgggtgaagggggttgagtagcgactgcctgggagatggctgttagtaggtctgcgcctggtgtctgcctcgccatcctggggtaaggggcagagagaaggacttgtcttatgtagggtgtggtcagccttggggccttacctacccagttccatgatatttcttgccctgttccccctggaatgtgcagtgggccagctgagagtacgccttgaggaggggggatgaggccttaatctgggaggcctatccccctatcccaggcatcccagacgaggactggctgaggctaggcgctctcatgatccacctgccccgggagggcagcggggaagacagagaaaagcaaacgcattcctcctcagctccacccacctggagacgaatgtagccagagaggaggaaggagggaaactgaagacaccgtggcccctcggccttctctctgctagagttgccgctcagaggcttcagcctgacttccagcggtcccaagaacacctactaattcctctgcactccttcatggctgggacagttactggttcatatgcaagtaaagatgacaatttactcaacaaatatttatccgagcaccttttatgtaccaggcactgttgtaggtgcttaggatattctcatgtttctgagggattacagcctgggaggattccaccgatcttcacttctagcaggttttttaaacgtgacccttnggcttgtaattcccatcttcacagttcaagcaccccaaacctgggccctttcttcccctgcagactggcaggtgggattggctcccaggtcatttcctctctctctctttctcccaagcctttctccctccacaggaaacagatttttcagggccttccatgcctgccactttgtccgtctc

SEQ ID NO: 83826 - DNA, 664 bp, Homo Sapiens
tagacttcaaagtcccggaccttatccgtgcgccgcttcaggtttgcaggtgacctttgcgtgcgggcgccccttctgattgaccctgatgagctgtagctctgatggcccctccttcgggaatgattagggtgacggctggccggggctcgttcgagtggcgcccggccggtggtgacccgaacaggagagcgggacggcgaccattctctcgggaggggcccatctggagaaagtcctctcgcttggtcaaactaggagggcgatagcaccggccttactgcgacgatgacaaagtacaacacaccgtctggcgcgaaggagatgctcgagaaccctttgctgttgttatttttcgcgtgtcctccgaaaccaagggaaatgcggctctgtgggttctgttaacgtcagcatttaataagtgaactctaaatgcattgccccttatggtggccgctggcctcctgagttgactcagctcttgcaacgtagctagttgataaccctcgaaatatagcgaattgagatgtgctatattgtaaaatacgggacttagtacgaaaaaactgatgtaaaaattatctcaatactttttaatactgattacatgttggaatataatgttttgcatatattgggtcaaataaaaatgttattaatttca

SEQ ID NO: 83827 - DNA, 188 bp, Homo Sapiens
aacctctggatggcatttccaaaattaatgtataaaatagctctatttaattggctcaaagaaaaataagcacttgtataagtaattctaaaactttcagaaaaacaggaatttactcaaatgttttttaagttcatgtgacacggataatctttggtgagtaagaatatcgttggtttagttttttt

SEQ ID NO: 83828 - DNA, 934 bp, Homo Sapiens
  misc_feature (637)..(654): n is a, c, g, or t
  misc_feature (663)..(702): n is a, c, g, or t
  misc_feature (749)..(821): n is a, c, g, or t
  misc_feature (863)..(871): n is a, c, g, or t
gtgaagcgggggtgggatctgaacatggcggcggtggtagctgctacggcgctgaagggccggggggcgagaaatgcccgcgtcctccgggggattctcgcaggagccacagctaacaaggcttctcataacaggacccgggccctgcaaagccacagctccccagagggcaaggaggaacctgaacccctatccccggagctggaatacattcccagaaagaggggcaagaaccccatgaaagctgtgggactggcctgggccatcggcttcccttgtggtatcctcctcttcatcctcaccaagcgggaagtggacaaggaccgtgtgaagcagatgaaggctcggcagaacatgcggttgtccaacacgggcgagtatgagagccagaggttcagggcttcctcccagagtgccccgtcccctgatgttgggtctggggtgcagacctgaggagcgctgcgaccctcctaggctattgactgttaagtcctcaggtttggcccagattccagttcgtgcctctgaggtccaccagagggcgcatgaagcccaggctgttgccaaaccctaccctgccccacaccaaggagccagccaaaggcaaataaagttattgagtgtttagtagaaaggnnnnnnnnnnnnnnnnnnctcgaggcnnnnnnnnnnnnnnnnnnnnnnnnnnnnnnnnnnnnnnnncatggtcatagctgtttcctgacccagctttcttgtacaaagtggtnnnnnnnnnnnnnnnnnnnnnnnnnnnnnnnnnnnnnnnnnnnnnnnnnnnnnnnnnnnnnnnnnnnnnnnnntgcagtacccggggaatttaaccccgcctaatgaacggggcnnnnnnnnngtgatccaaaggatcttccttgagatcccttttttttcttgcaagtaaatctgcttgctttgc

SEQ ID NO: 83829 - DNA, 744 bp, Homo Sapiens
  misc_feature (687)..(687): n is a, c, g, or t
ctggtaccggtccggaattcccgggatatcgtcgacccacgcgtccgcccacgcgtccggcagtctgtgaaggagactgtgcgggaagctgaagctgcttcaatcaaaattcgaacagatgctggatttacactgcgctgggttagaaagactccctggtaccagtaggcacctggctgagcctggctggcacagaaacctctactaaaaagaaggaaaatgatctgagtcccaggagctgcccagagttgctgggagctgaaaaatcacatcctggcctggcacatcagaaaggaatgggggcctcttcaaattagaagacatttatactcttttttcatggacactttgaaatgtgtttctgtataaagcctgtattctcaaacacagttacacttgtgcaccctctatcccaataggcagactgggtttctagcccatggacttcacataagctcagaatccaagtgaacactagccagacactctgctctgcccttgttccctaggggacacttccctctgtttctctttccttggctcccattcactcttccagaatcccaagacccagggcccaggcaaattcagttactaagaagaaaaattgctgtgcctcccaaaattgttttgagctttccatgttgctgccaaccataccttccttccctgagctgtgctacctgngtccttttcagaagtgagctttgctgctacaggagaaggtggtctctgtggagcccc

SEQ ID NO: 83830 - DNA, 579 bp, Homo Sapiens
ttttgctttggtcattaacacagtttattattggcacacttatcagtaaagcatacataaaatacagctgttttttaacacacggagccactgtgcctttacatgtgtggaggaacatattaatatgcaaatggaaaaattaattctcttataaagtttcacataaatacactggagttgcccaaaaacgaaaagtccccataaaagaaccaggtgagagctttacaaaatatcatacaagaaatatactataaaaagaaaggatggtcaactcaggtacaattagaaaacacacaaaggttcaggtttattaaactgcccacaaaaccaatggattacatggcttgaaaatatttggatcaacagcaactttacaaatgcataaattcttaagggtccaattgtctttctttacttaaaaatctgccctggtgtctttgatgaaaaaaatgacatttcttgtttcagcacttgggctaaattgagtcgactcaagacaagaaccaattgacatcagctcaaccataaattaccttgctgggccctcttagctgttgcccaatgaaagaaaacataaag

SEQ ID NO: 83831 - DNA, 523 bp, Homo Sapiens
gaggggcggtgtctccaaggggcggggtcccggggtccctgaaaggcgcggaccaggccggatccacccagtctcgcgcctgcagcccgtgccgccccagccgctgccgcctgcaccggacccggagccgccatgcccaagtgtcccaagtgcaacaaggaggtgtacttcgccgagagggtgacctctctgggcaaggactggcatcggccctgcctgaagtgcgagaaatgtgggaagacgctgacctctgggggccacgctgagcacgaaggcaaaccctactgcaaccacccctgctacgcagccatgtttgggcctaaaggctttgggcggggcggagccgagagccacactttcaagtaaaccaggtggtggagaccccatccttggctgcttgcagggccactgtccaggcaaatgccaggccttgtccccagatgcccagggctcccttgttgcccctaatgctctcagtaaacctgaacacttggaaaaaaacccctcctcatccgccctacgg

SEQ ID NO: 83832 - DNA, 575 bp, Homo Sapiens
aatttcaaagttggagatgaaaagaatttctacgagttgaatattggggaatattctggaacagctggagattcccttgcggggaattttcatcctgaggtgcagtggtgggctagtcaccaaagaatgaaattcagcacgtgggacagagatcatgacaactatgaagggaactgcgcagaagaagatcagtctggctggtggtttaacaggtgtcactctgcaaacctgaatggtgtatactacagcggcccctacacggctaaaacagacaatgggattgtctggtacacctggcatgggtggtggtattctctgaaatctgtggttatgaaaattaggccaaatgattttattccaaatgtaatttaattgctgctgttgggctttcgtttctgcaattcagctttgtttaaagtgatttgaaaaatactcattctgaacatatccatgcgcaatcatgataactgttgtgagtagtgcttttcattcttctcacttgcctttgttacttaatgtgctttcagtacagcagatatgcaatattcaccaaataaatgtagactgtgttaata

SEQ ID NO: 83833 - DNA, 201 bp, Homo Sapiens
gtatttcagagaaaactcaggtaccaggatgcaatggatttatttgattcaggggacctgtatttccatgtcaaatgttttcaaataaaatgaaatatgagtttcaatactttttatattttaatatttccattcattaatattatggttattgtcagcaattttatgtttgaatatttgaaataaaagtttaagatttga

SEQ ID NO: 83834 - DNA, 716 bp, Homo Sapiens
  misc_feature (37)..(37): n is a, c, g, or t
  misc_feature (300)..(309): n is a, c, g, or t
tgaggagaatccctaaactcgaggtggtgtgcccagnacaccacagcccgtgttcccgaagttgctaagtgcccgagcgcagcgccttaagtagagaagtcttggtagtaagcgaacccgacccggctctcggggcgcctagtgacggaaagcagcacgcatatctttgcgggaagaatctagagtcgccctgggatagatgcatctccttctgccactgaatttcacacttgaaaaagataaggtcatgggggcggatgaatgatatcccccactcatttagccattcttattattatnnnnnnnnnnggcttgtcaattatgaaggtgtgtcccagatattacatgaagatcatgcaaactacttgaaatttgaatccggacatgatcgtaaggaaactctttcataaagcacttttgtggcctagttcccacacacacacaaaagtattaggtctttaaaacttttccaagtagtaagtgagaccccctcttactgtctacgaatacacaataaagagatgagacactgccccaatcctaaagaggccagaactgaagtgctacattgtgggagttaggggatgcttcttttttccagctcttttttctagaatcctcgatcacacctaacgctggtaataaaggtaggaaaacaatagaactcataaaacttagaaatggtaataaattttggctcctgttgtctgtgaaaa

SEQ ID NO: 83835 - DNA, 1737 bp, Homo Sapiens
gggggccaagagtgcgtgggcggcggcgcgcgggtgcgatcgcggagctgtgaggcgcaggcagggctctggggcacctagagaccggggccggagacgtggcagccgccctgcccgccagaaagtttcctagaagtttgctgggcgcgggcgcacgactgactggctggaccatgaacgtgttccgaatcctcggcgacctgagccacctcctggccatgatcttgctgctggggaagatctggaggtccaagtgctgcaagggcatctctgggaagagccagatcctgtttgctctcgtcttcaccaccaggtacctggacctgttcaccaacttcatctccatctacaacacagtaatgaaggtggtttttctcctctgtgcctatgttacagtgtacatgatatatgggaaattccgtaaaacttttgacagtgagaatgacacattccgcctggagtttcttctggtcccagtcattggcctttccttccttgaaaactacagtttcactctgctggagatcctctggactttctctatctatctggaatcagtggctatcctgccccagctcttcatgatcagcaagactggagaggctgagaccataactactcactacctgttctttctgggtctgtaccgggcactctacctggctaactggatcaggcggtaccagactgagaatttctatgaccaaattgcagtcgtgtctggagtagtacaaaccatcttctactgtgacttcttctacttgtatgtgaccaaagtccttaagggaaagaagttaagtcttccaatgccaatctgaggaccttcagagacagtctacgccttaacaagcacatgaaggaaactattttgaatgttctctttggcaacttatccataatttgggatcaaatgttaaaaccagaaaagtgtttagtgtggatttcagcaaaacctgatcatcccacccagaagaccttctcatcaatagatcgcccttaaagacccattgtaaggtcataaaaaaactcggccaactgcacaaagaatggtgcctcactgcaacaagaaaccttaaggtgtcctaccggacgaaataaaaaacataaatgattgttctccaaggcctgagggcaagactcatgatgagcaagtcaaccccaatctggaacaatgtccctcctcttagaatgtcccaactaaagaccagttaaaatattagggtacgttcttgtgaatttccactttccaggtagatgaccaaatttaggtggtcaagatataaaggtgtcagctagttttaagtgtgaaacttatttcactttcacactgccttcaggccagaagcaaaccaaatttaccaggtttggctggaggagttttgtgactcatcttttactggtttgaattttttcaaaccagtggctgatacctgccttgtacttagtaccttaataccaataacctaatggtacttaggcgagtaccatttgcacaatcactgttttacttatgagcagatacagatatatccaaacccttacctactaggtatcctgctagggttttcaattccaattcttgtattaagttttttcctttcagttttaggtgcgaaagtaatcagtcaatccaatatcccccatctttgtcttgaaacaaaaactgttttaagacgtctacgttgaattattcagagaattaagcaataaaagctcacaccttattgtcaaaaaaaa

SEQ ID NO: 83836 - DNA, 767 bp, Homo Sapiens
  misc_feature (114)..(114): n is a, c, g, or t
ccaggaaaagattctgaatcggtgttctggtttgtgcaaaatactttattattgatttttgctttttttctccctttccctcccaggagaagacatttgggtcttggcctgagnaggggtgttgagcgatgatgctctgatatggagctgtcactctagagctcggtcagatggaagacactatagaaccaggttggacagatttggggtcagggttggaggctgagttcttttgaggactggttggagtggcagccagatggtggctgctgacaaggcaagaggaatttcagagattaaacattgtcctttgaggaagggagaggaggtgaatgaactcccagaggaggtgagtggcttgttgggaggaagctcagttccagaacttacctcagtgcacttgggaggggtggagtcctgagcattccatgatttctgccctggccccacctatcctaggatggggtgggatggagagtgggttcagttttcttgtactttagcctggctgaacatgaactttgtgtttacctggaagtggtaggggtgggagagattctcatctttagttctggtgcccaaaatctttggtagatggagggaactggggattcagaagatgtggtaaaggtctatttctgtagtgtggcagagatgtgtttttctaaagtgtttgcagggcatttttccctcttacctcagattaagttatttatatattgttgattgaaggttttttaaaattgcttttaaacttctaaaaaaaa

SEQ ID NO: 83837 - DNA, 547 bp, Homo Sapiens
gcggccgctccctcgactatagttgctgaccttgaaggagtggctccagaggccttcacaaagggcggctggagtggggaagtaggactcaaaggtgctgcagagggccccggccggacactcattaatccctgaggtccaattccagcctttgtgccagttgcttttgcaggtgtaggaggtgcgacagtcctcccaccagcgctcacagtcctctttgcacaggggcacgttcagaatgcgctctttgcgccagctctggttgacctgccggatccagggccccaggttgggtgagcactcagagacagctgtcctggataaagtggcgcttgcaggtgggttccatcttaccacagtgatcccagttaaagttgtacaggcgggaggtgtccttgtgcagctcctggctggtgctggccgtgcagcaggcattcttcttccagggactgcactggccatacagctcgtcctcggggctgggctgtgtcttgtggtgcttggcgttcatgcagacattgagcaggtccgtcctggcccgcgcact

SEQ ID NO: 83838 - DNA, 607 bp, Homo Sapiens
tgcggccgctccctcggctgtagttgctgaccttgtatgagtgactccagaggccttcacaaagggcagctggagtggggaagtaggactcaaaggtgcggcagagagccccagctgggcacttgttaactcctgaggtccagtcccatcctctgtgccagttgctcttgcacgtgtgggaggtgtgacaatcctcccaccagcgctgacagtcctctttgcataagggcacatccaggaagcgttctttgcgccagctctgattcacctgctggatccagggccccaggttgggtgagcactcatagagacaggtgtcctggatgaagtggcgcttgcaggcgggctccatcttgccgcagtggtcccagttaaagttgtacaggcgggaggtgtccttgtgcagctcctggctggtgctggctgtgcagcaggcattcttcttccagggactgcattggtcatgcagcttgtcctcaggacctggctttgtcttgtggtgcttggcatccatacagacattgaggagatcagtcctgtcctgggcactgcacatggtggctacacagaccagaagcagcagaagtggcatccatttccagaccat

SEQ ID NO: 83839 - DNA, 691 bp, Homo Sapiens
gcctcatgcaaggccagtgtacactcaagcctcctacacttgattatcctcgccacaggggtttggcaaagatagcagctcagggcagttctcacccactatactcactttcacacatgcagattaaggggtcacttgtgcaaaacttctagggaatgggtctaccttttgggtcatcgagtcaacccaatggaaaaaaggggggataaccccttggtgttgcgatggcaacggtaaactgacatggcaactgatgagcgtgtcttacggaaagctcattccaccccagccctgtttcagctagtcctcaatttggtccagtgtccgagccctgcctctggagtcaagtcccacctcctacctcataaggagagacataaatcaatggaatagaatcgagagtccagaaataaactcatacctcgatgatcaattgattttcaacaacggtgccaagaccattcaggggggaaagaatcatattttcaacaaatggtgccagataacgacatccaaaggagtgcaactgggcccctatctcacaccgatctacagaaattaagtcaaagtgcctcaaacactaagagctaagactataacattcttagaagaatacagggatacctctttatgatcttgatttggtaattgatttttagataacactaaaagcacaagcaacaataggaaa

SEQ ID NO: 83840 - DNA, 563 bp, Homo Sapiens
cagtctattaaaactgtgaatgtatgtagcaatcctgcgtgtgaaggcaaataaactctttaacaggcaattatattgctggccaaaatatgctatatttgtatacaaagacattctaactcagttccagtatgaagaaagattattcactctagctccactgagaaacattttcctaagtgaaaacaatttcttaagatggaaatggattggattgtcaaattattatttattggagaaaaaaacctgatctacacatttttacttatatggggttgccagagtctctgggttctagatgattttggtggcatgcttgctgagccataattactaaagagaatgtaagtggacgggttccctgaatccccggggtccttggagagccatcgaggagaatgtgcaattggactgaagctccctggctgaagatacatgccgagtcagcacatgggtagagatgatgtaaaagcagccaatctggaaacaatacattgtaaatagtttttcattgtatgaagtagtgttcacattaaaaagatgttttatgatatttctccaat

SEQ ID NO: 83841 - DNA, 674 bp, Homo Sapiens
  misc_feature (515)..(515): n is a, c, g, or t
  misc_feature (546)..(546): n is a, c, g, or t
aatagagacagggtcttactatgttgcccaggctggtattgacctcctggcctcaaacgatcctcctgccttggctcccaaagtgctgggattacaagcataagccactgcacccggccgagaggggtttggaatgaaggtagaggcagggggatgaaggcgccagagctgaagaccagcccctagaagccacacccctgcccttctagcagctacgggtcctctggctccgggccttgtaaacctcgatgagcaggtccttgacgtactggatctcgcgctccacggactctgcccgttccttcagctcgcgattccgtgcctccagcccctggcactcgccctccagggcctcaccctctgcccgcttccgctggcggtacctcagagccgccgacttgttctggtctctcttcttttgcttgcggtcccctcgggtggtggcaggatgtgggtagggggccaggcgagaaggttgaggtggagaaggaggagggggctgctgtggcgggggnagaggcggcatccccacttcctcctgcccgnctcgttgcggcagtagatggccagcaagtccagagtatccaagacagggggctgggggaggtcaaaggagggtggtgggaggagcggggaatctaggaagaagtcttccatctgttccagctccttct

SEQ ID NO: 83842 - DNA, 599 bp, Homo Sapiens
cgtgggattcttagcatgtgctacatctgataacaaaaataaaacttggtgttgacttgctttctgtggtgtagacagctgaagatcagctgctaccttcaaagttgaacaagattctgttgttggctgatccacaggctgtccagtggttaatgaaacactgcctttattcatattggaagtcttagttaaggaggagtgtgaaactggtccattaacagcagctcctttaggcaagataaagttttcactagaaacagtaggagcaccagcatgtataaatagactagactggcctccacttaaggcgttttcagatttgtcctttgacagttcttcaggcagagtcaacgtattatttttctgaaatgatgtttgacaatcttttggcttatgaactccgctctctttgtctgagataaaattgttgtcatctaggagttcttctttagcaccagtaatatcggtgtttatcttcaaatcatccatattgttggcaagcccatttaacacatttagtctagattttgtcttattaacatcttgctgcaagaacgatctcatccaaaattaaatcaaacctcaggctccgtggcccc

SEQ ID NO: 83843 - DNA, 547 bp, Homo Sapiens
  misc_feature (471)..(471): n is a, c, g, or t
  misc_feature (499)..(499): n is a, c, g, or t
  misc_feature (522)..(522): n is a, c, g, or t
cgccagcccctcgctcccaggcatgttgacgtgggcactcagcaggggtgcactttggccttctcgaagcaccagcacctatggaggagtggccatggcagcagggggcatacacccctgaccccttgcctggtctgcgctggccctaatgacaggccacagggctccactgtgcagatacccccacccccacccaggagccccctaaggtctttgttggcactcacccttactgtcctccccagggtcctgctcaccttccacgtggtacaagtgcggggcctaccttgatgatgtctgagatgcccttgttactgagactctccacaaaggtctccagggggtagttgagccctggcaccagcaagggtaccttggaagaaggcccggggcagggaatagagcgcctcgttgtacaggaagcagaccagcagccccaggacaggacgggtttgttgaagtgttctgcangtgaagtgtgagcttaaaggttggggcnaagcctgaaacacggcgtgaagnttgaatggctctcgggctgtcttga

SEQ ID NO: 83844 - DNA, 793 bp, Homo Sapiens
gggccgccagcccctcgctcccaggcatgttgacgtgggcactcagcaggggtgcactttggccttctcgaagcaccagcaccttgatgatgtctgagatgcccttgttactgagactctccacaaaggtctccagggggtagttgagccctggcaccagcaagggtaccttgaagaaggcccggggcagggaatagagcgcctcgttgtacaggaagcagaccagcagccccaggacaggacgggttgttgaggtgttctgcaggtgaagtgtgagcttaaaggtggggccaaggccctgaaccacggcgtgcagcttgagtggctctcgggctgtcgtggacagggggctcaggctggactcgagggcctgcaggtaggcgcgggcagcacgtaggcgcagcaggtataggtctgtctggaaggcccggtgcatggcggtgccagcctcccgctctcgcagtgtctgatccacgtaaagccgggtctttcggggcacattgagtttcatggcctgggctggtgggggacccacctcacttcctccctctacaaacactgctgtacgcttcaggatcttgatgatcaggccaccacctcgagtggtcatgatgagggtgttgtcctcccgcccgtaccggccaaagcaaaggctggtcactgcatccggggtgtggatgacattgagcagggccttgtaacgataaatgcggacctctccattggccagcccaaccatgacggcctgcaagggcccgggaatgctgctccaggaggtccatggtcaggatgg

SEQ ID NO: 83845 - DNA, 682 bp, Homo Sapiens
gacacttggatttctgatcagtgttgcaaaaaattgctactgtgagatttatttccaccagtgatatattaaacccaaaaggaatcatcatatttggatgcttaaaatagagtatacaagttttttagacccaaagaaaaaaacagcagagtctcagcatgatcagtcctgattgaatttcattatgtcacagtgatgcatgtcttagcactgattattggttttacttaatattccctaaaaacttgaggaaggaagatgatagaacatgagatactctttgttttgtacatactagaaaatacagctatcttctgatgagcaattgtgttgattttctttgcttttttcctcttatggagctctcagtgtgtgaaagttctaaagccacaagaatcaatgatgttttagctgctaatatttagtattgatcgtttcttttaaaaatgatttggggaacttgatctgtactgtaattttactaattccttgtgcagaggtgggtatggcaattagaagtcaagaaatgggttgtttagcttggtttgtttccctaacttctgattaactctctgtatgacaactctacagaagttgtgcgcgtgctttctcagcagcatttttccttcaaaatcatctttttaatcaacagtcattaataaatgtacatgtacgatattca

SEQ ID NO: 83846 - DNA, 431 bp, Homo Sapiens
  misc_feature (11)..(11): n is a, c, g, or t
  misc_feature (195)..(195): n is a, c, g, or t
  misc_feature (355)..(355): n is a, c, g, or t
actcccacctnggagaccctgcagctgctgaggactgcacagctcccagaacaggtcaccctcagctacggtgtctttgaggggaaactcaacgtcattaagctacagggccccttctccccggaggaggacccctccagatttcgctccctccattgtctgctctatccagatacaccctggtgtccccagctngggtgcccgatgaatcctgaactgctgggcaaaggttgggcagagacttctgggtgtgccttggctcccaaggtggcactgtgggtccctggcaagtgtcttgtgataggcaagtccctggcaagggctttccgggtggttgggcaaagcccaggatctnagttggcaattggcactgaaggcaccccaggcccctgggaggttgagttagacagcccaggggaccaggtggacca

SEQ ID NO: 83847 - DNA, 449 bp, Homo Sapiens
tttgtacagaaccagatgctggagggaatagctgtggatgattgtcttggcctttccttcatggtagcaaggtggctgccccagatccagccatcacacccacatttatagcaggaagatggggagtgggctgcaaaaccttccccagaaacatctctattggatttgcttagttccctctggccagagctggtcccatggtagcccctaacagcaagaaaggctttgcccagcacttcaggattcatcgggcacccagctggggacaccagggtgtatctggatagagcagacaatggagggagcgaaatctggaggggtcctctccggggagaaggggccctgtagcttaatgacgttgagtttcccctcaaagacaccgtagctgagggtgacctgttctgggagctgtgcagtcctcagcagctgcagggtctccaggtgggagt

SEQ ID NO: 83848 - DNA, 469 bp, Homo Sapiens
atttgggtgcctttccctgaagggagttgggtggaatgatggcagaatccagggtctgcagcacctgctgttgttgccaaccagtctcccaaagctccttgcttccccaccccttgcgaacaggaccagattttgtttggagcctcagcatgccggggcccagatgatggagcataacgggtcccagccaattgtgatgatcctttttgctcatttcccagcctttcttgctgttaggggctaccatgggaccagctctggccagagggaactaagcaaatccaatagagatgtttctggggaaggttttgcagcccactccccatcttcctgctataaatgtgggtgtgatggctggatctggggcagccaccttgctaccatgaaggaaaggccaagacaatcatccacagctattccctccagcatctggttctgtacaaaaattaaatgcttatttgtttaagtt

SEQ ID NO: 83849 - DNA, 318 bp, Homo Sapiens
gcacctattctgaatcaccatgttgctctgcagctagagttgataggagaaaatccatttgggtagatggcctatgaatttgtagtagactttcaaaatgagtgatttgttagcttggtacttttaagtttgtggtacagatcctccaaacccatactctgagcaattaactgccttgaacatagagaaaaattaaggcctcacaggatgagtctccattctctgtaaatgcttattttatcatagtctttagcctctactatgagtaaaatgttctcttcggccgggtgtggtgactcacacctgtaaccctcgtgc

SEQ ID NO: 83850 - DNA, 602 bp, Homo Sapiens
agagcccgaaaggcttgttaggaggagttttcagatccccaggaagagcagagaaaagaaagcacttttccagccattaactccaggctctcgagaatttgaagatgttgtaaatattctccattcttcttaccttgaaccaacctcagtaacaaattttaactacagacgtgcttgcttggtacacaatgagcttttggaaaaggagtttacagaaaagcgaagagaactgaagtttgatggtcgtttagataaggaactttcagaatcctatgcatttctgatggttgatcgataccaggttcaaaccatatgtgaaaaaggattacatgtgggtcagtccaaaataacaattcttggcagtccttccatgggtgtctatctttctaggtatgctgatttattacaagcgaatcctttggacacgggggcaatgggtgatgttgttatttttaaaataatgaagggtaaaataaagagtatatatgaccccatgggtgtaaaaagtttggaatctatgttaaataagagtgctttggaccccacaccaaagcatgaatgtcacgtgtcaaagaatgccaatcgaattacatcacttttgg

SEQ ID NO: 83851 - DNA, 871 bp, Homo Sapiens
  misc_feature (138)..(227): n is a, c, g, or t
ggtaccaggaacttcgtcacctccttgaatgctggcggttcatttcatgatcagtgttaagcattttcctccatgggaaggaagcatgggatatagaaaagcgaagggctgtcctttacaaattctggttctgcaacnnnnnnnnnnnnnnnnnnnnnnnnnnnnnnnnnnnnnnnnnnnnnnnnnnnnnnnnnnnnnnnnnnnnnnnnnnnnnnnnnnnnnnnnnnatctaccttcaggattgctgacagacagaatttgaaataaaatatgcaagttagctaatacaaaaagtagatgatccaaaaatggtagccactcacccttcacaaactgaagtccatggaccacggaagtcgagaattaatgtacacctgtatcatgtgtaggaaaccagaaatgtgttccttatttcttgttcccaaacaggattaactgtgaagactaatttataaatgtgaacctaagaaaactccacctctgaaggaaatcatttgaattttgtttttgtacgtaaagttaaccttccaattgtctgagctgtcgtcactgacttcatgacagtctggccctccagacaagagcagcgctggcatcgggcaggtgattcctgacacctgctgcctgcaggcattcactgaccaggcctttcctggaggaaacacccagggccgggcggctgctgtttccacacgtggactcggatctgctgtgacaccgtcagcccgacagtctctccatatgcagcctttcctctgtacttttctccatggttgaaataaaacagggtgactgggagttacttagaattcatgaagattttaaaatggctttggagattttgcttttaaaccagtagattcaaaactta

SEQ ID NO: 83852 - DNA, 1143 bp, Homo Sapiens
  misc_feature (908)..(996): n is a, c, g, or t
gggctcgctcgacacagccagagctggaggtgggtgcccggcacggaggggcctgcggaccaatggctctgccctgcaccttagggctcgggatgctgctggccctgccagggcccttgggctcgggtggcagcgcggaggacagcgtgggctccagctctgtcaccgttgtcctgctgctgctgctgctcctactgctggccactggccaagcactggcctggcgccgcctcagccgtgactcagggggctactaccacccggcccgcctaggtgccgcgctgtggggccgcacgcggcgcctgctctgggccagccccccaggtcgctggctgcaggcccgagctgagctggggtccacagacaatgaccttgagcgacaggaggatgagcaggacacagactatgaccacgtcgcggatggtggcctgcaggctgaccctggggaaggcgagcagcaatgtggagaggcgtccagcccagagcaggtccccgtgcgggctgaggaagccagagacagtgacacggagggcgacctggtcctcggcttccccaggaccagcgagcgcagggggcagtgctgaggccctgctgagtgacctgcacgcctttgctggcagcgcagcctgggatgacagcgccagggcagctgggggccagggcctccatgtcaccgcactgtagaggccggtcttggtgtcccatccctgtcacagccgctcactccccgtgcctctgcttcccaagatgccatggctggactggacccccagcccacatgaccatgcctcagactgtcaccccctaccagttcccaagtccatgtgtaccccgctcaccacgggaacggccccccccaaccacaggcatcaggcaaccatttgaaataaaactccttcagcctgtgnnnnnnnnnnnnnnnnnnnnnnnnnnnnnnnnnnnnnnnnnnnnnnnnnnnnnnnnnnnnnnnnnnnnnnnnnnnnnnnnnnnnnnnnngaccacggggtcccattgaacccccaaaaaacccaaccctcattggtggggccccctgggccccccaaaaaattttttcaaaacctttcgtttgggggcggcggcccccctaaggtaaagggaaactgggcccaaaccttgtttccc

SEQ ID NO: 83853 - DNA, 217 bp, Homo Sapiens
gttaactgtcaccttccactcagggcctctgctctatatctattcccttccagccagactggcagatgggggcttccccctacccctgaggatgaggacaagcccctcggccagttcagcgttcccgtgcttctcccttgggcagcctctctcttgagcccctcaccctgtttctttctgtgaagcgagaatgtctgaaaataaataggaccatgcc

SEQ ID NO: 83854 - DNA, 490 bp, Homo Sapiens
caggtgatggcgattcatggattcagagtgggctagggactccactttattgttcgtgtatttctgagctgctaacccagcaaacctcacccataagcttaggtcaggatcatctgtcctcgggatgccatagagcctggtttcagaagcagaacaatcatgctaattaaaatgtcgtgttctggcctacagcagacaacagctggttttagattaagaaatctttttaaagaaacacatcttactggcctatagagaagacgaacttgaactggccctggcccaagtgcacactgacccactggctttgcccccaggggcctaactgggatgggcctgcttggaatgccagggctggaaatacttttttattttgctgattaacattacatagttgttaaaatgtttatctcatgtattttaccaaccctcacacatttaggtataaacctccttttctgggagaattaaagagaaaaacagcaacttt

SEQ ID NO: 83855 - DNA, 582 bp, Homo Sapiens
gcggccgcgcccgtgcacgagcagtccctggggtctgtagtggcctctggagagcccttctccccaggccaggcgggaaggcccccgctccggcctggttgaagtaggggaacgggtcccaacgcggggccgactcccttgaccctctgacttgctggcttcccttgttttacagtcctcggcctggcggaagttttgcaggttgtgaagacccctagtctttcattctctccttgtcacagccttgtagggcgtgaaggggtcattgccccatttagggatgcgcacctcctgatttcccgtccactgctctgcgccctgaagtggctgaaaagtgctcttaaaaggatgggaatcccgtcgccctcagctggtgcgctctccactgggtcgtggggctcctcatttcatcctaagtgagcccctccatcacctgtgtgttaaggaggcatttctttcccatcagtaaacacatttcgcctcttcggccgaggtaggaatataaaaggcccctggcctacccaaagtttggtccagcaggggagccaggccgggaaagggccaagccgccacactcggctt

SEQ ID NO: 83856 - DNA, 518 bp, Homo Sapiens
  misc_feature (47)..(47): n is a, c, g, or t
accatccctctcccccaggccccaggacctgcagggcaaatgctggntgagactgtccacaggaggtgggggaactggactccggcataagccacttccccacaaacccccaccagcaaggggctggggccagggagcagagcttccacaagacatttcgaagtcatcattcctctcttagggggccctgcctggtggcaagagggaatgtcagcaggaccccatcgccatccctgtgtctctacacgctgtattgtgtatcaccgggggcattattttcattgtaatgttcatttcccacccctgctccagcctcgatttggttttattttgagcccccattccaccaccccagtttcctggggcacaagtgtctgtgcatgtcccccaggagccaccgtggggagccgatggggaggggatggagaaacaagacagggcttctctcaggcccagtggccggtcagccacaccagggcaccgcagccaataaaccgaaagtgttacagccaaaaaaa

SEQ ID NO: 83857 - DNA, 652 bp, Homo Sapiens
taatataaagttataaaaagcggcagcagcctggggcccggatctggaggggaggaggtgctggcggctccgttgcagtgggcaggcactttctcgttaatgggcttttgacttcagtgtagagcacttctcctcaaaggccagggccgggcctggcttcttgcggcgcacagagcaggccacatcagcaggggcaccagcctgacagtgcttggccttcactggccggcaataagtggccaggtttttccgcttcttggccacctcctcctcagagaggcagttggttggcagggccttggctgggtgtccagctgctccccggttctccagctgagaagccttgactggtgtggggagctgatgaggggagccacgacagtccaggggccctgcccgcttcactcttggccccattgtcccattaagccccatgctcagggctgttttagttttggccgagaggcccctacagccagagggtttcccttttccagtgggctccaggatgcaggtccgtttaagagtggtagggccaggggataacttccgctttcgagaaggggcctccacctccaccccgtccttgcctttggatgacttgctggccttggaaggcggcagcttgctgaaggacggggatggcggccgc

SEQ ID NO: 83858 - DNA, 873 bp, Homo Sapiens
  misc_feature (79)..(79): n is a, c, g, or t
  misc_feature (180)..(180): n is a, c, g, or t
  misc_feature (383)..(383): n is a, c, g, or t
gtcgagaagccccagttgtccctgaagcctcccctcagtcgggccctcctcccgccagccgtcccgaacggggccgttntcaacttttaaagggagcggcccacgctccaagcgtggggagcgcccgaggtcctctcgccacgagctggacgctcttcaggacgtttcaccgccccctcnccccgcacctcgaacctccagccttcccgactcgcagagtctcccgaggccccttttcgcctcgggtttatttattgactgtctttccccctgtcctcgacaaaagagtgggaggtgaaaaacccgtctcctcagtgagccagcatttcagggggagctggcggactcccactccccgctcccttcagccaagctgccttaancctccctcgggctcccccagagactgtgccccgggcgggccgcgcgcgctgtgtccagagtcctcgggcctcctgggtctgggacgtgcctctcctactgtgtaggacctccgcttcccaatacagccgtgtctgcagccactgcctgacttcactcgggcgggggagggcggcagtcggtcggctcgctctgggcgccctcgctctctgccttcatctgggccctgggctctcccgggtaatgggatggcggcggtcccgccggggggcagtctggaaaggtttcctaaaggagacgagcgaattaacggtgtcgaggtgagccagggccagggggaccccggtaaagtttagttgaggctggggaaggccctcggagctcgtttccagatcgaggtaagagggactttcttaaaggcctagtctatgggatggggcggcggagggaattttttgagaaataaaatgaagctgcagtgtacgttaaaaa

SEQ ID NO: 83859 - DNA, 716 bp, Homo Sapiens
  misc_feature (179)..(179): n is a, c, g, or t
  misc_feature (674)..(674): n is a, c, g, or t
gaaatccagtgattaagctctgccttgatcagaggcacctgcttgggcatggatgtgtgcattcatgagctcaggttctcggtgctcgccatctccccaaacttggacgaagtattgcctgtccctttgtagaagtggagatctgtggagccgagtatgacaacaacaagttcaagacngactggttgtgaatgataatggcctcagccctatctgggctccaacacaggagaaggtgacatttgaaatttatgacccaaacctggcatttctgcgctttgtggtttatgaagaagatatgttcagcgatcccaactttcttgctcatgccacttaccccattaaagcagtcaaatcaggattcaggtccgttcctctgaagaatgggtacagcgaggacatagagctggcttccctcctggttttctgtgagatgcggccagtcctggagagcgaagaggaactttactcctcctgtcgccagctgaggaggcggcaagaagaactgaacaaccagctctttctgtatgacacacaccagaacttgcgcaatgccaaaccgggatgcccctgggttaaaggagttcagtggttaatgagaaaccagcctcccagctggtaccagggagaaaattggcaacaaggagggtttaaggagaagaaagagaagtccngccaaaacagccaaagttttttacctccataagaaagcctga

SEQ ID NO: 83860 - DNA, 573 bp, Homo Sapiens
ggctccctcctgggttttctgtgagatgcggccagtcctggagagcgaagaggaacttaactcctcctgtccccagctgaggaggcggcaagaagaactagacaacccagctctttctgtatgacacacaccagaacttgcgcaatgccaaaccgggatgccctggttaaagagttcagtgttaatgagaaccagctcccagctgtaccaggagaaatgcaacaagaggttaagagagaagagagtcagcaacagcaagttttactcatagaagctggggtatgtgtgtaagggtattgtgtgtgtgcgcatgtgtgtttgcatgtaggagaacgtgccctattcacactctgggaagacgctaatctgtgacatcttttcttcaagcctgccatcaaggacatttcttaagacccaactggcatgagttggggtaatttcctattattttcatcttggacaactttcttaacttatattctttatagaggattccccaaaatgtgctcctcatttttggcctctcatgttccaaacctcattgaataaaagcaatgaaaaccttgaaaaaaa

SEQ ID NO: 83861 - DNA, 450 bp, Homo Sapiens
gacaaggctcctcttatagccaggcaagcagttgtttagggctagacctgttgtccccgctcgcgtggggtgaacgccccgcagtggatactgtcctcctgtgctctgggcgaggcgtcatagggtgagcacaagtcagcagtgccatggaagtgaacaggcatgtccccgcagaaacaatgcttccctctgaaaaatagagccaggctaggaacctgtaccctcttggtagaagcactttggtcttcactctcttgggtgggtgcagttggaggcaccgattggaggagagcaaggttgagtcaggtgtcagggtctggcaaatcttttgccaatgccctagcaatggagtttctctccgggcattgtcttaccttgggggaaggaaacaaaaccaatgggaaaacagtttctgtaaataataaaccttgaaagacaaatgctcaaaaa

SEQ ID NO: 83862 - DNA, 513 bp, Homo Sapiens
agggattaggacatgtatctctctgagggccactgttcagctgaccacagaggtgactataatgtactcttgcactcatagaccttaccatgaattagacagacatccatgattcaagtgtgtgaaatttgctgtcacacaaagaaaggactgagggaacatggaggatgaatttaattttgttcgaagggattggggatgacatgcaaaatgaagaaaaatggcttgaataagtggggaagagtatatcaagtaaaatagcaaaagcagaggcattgaaggatatgccaaagtcagacatggcaagtcatgctgtgacgattcaccagaaaggtgccgggctgggagaagggggatgtggcaagaaatatggcagaaaaggacaggctggggccatattatggagagccttgaatgatgagccaagagttagaatttaacttgccagatagtgtggagcccttagggctttctgagctggggaatacgtgattagatttgtgtgaaatagag

SEQ ID NO: 83863 - DNA, 318 bp, Homo Sapiens
ggaatgcctctcctgccagtgacagtgacaagaaggaagcggactgacacatggtaggaacatagctcgttcaacagtaatcacacctgctaatcctaagagggtgacttctagtttcagataaagtagaagttgtctgtacttcttccctagcaaactgagggagtggtactgacttctgtctctgtctggggcccaggcctggatgtgagttgacctttgattttgaatgaccacagtcacggttgaagcattcaggtctgttatggctgcaagagtcccagtgtaagaaacaaatagggccaggtgtgtgtgtca

SEQ ID NO: 83864 - DNA, 699 bp, Homo Sapiens
  misc_feature (36)..(36): n is a, c, g, or t
gtcttgcccaagcctgctctgaacacagccattggncaccacctgatgggcagaggcgggacagtggagaagcctggaacccaagtgggcctgtgacaggaactaagacttaaaaaattaggtgcttacctgggacagtaagttctgtctggcacaagcaggtaaccaggatggctaacaggctttgatagctgctcgtgaactaaaacagcagggtgtgtgcaggttcctcctctacggtcaggcagcaggctctgaaggctgatcctacaccgtcccagtgactccccttgacagagtgcccccaccccctaatagccaacagggttagcatggccagcacagatcgctgcttttattgatgcaaatcaagcctgctgcttctcctccctgcagacttagccaaggaactccaagatgcatgactgggacaagaaaaggtgagactccacatggaaatgccttgccctaaaccttgaatgactgtgagatgcgatctgggagtgcatctgtcaagtctttgtgttttcttcactaacctcagaatactgggctctattttatcaagcgctgcagtttatgcctctgtcccgtcaatgctcagcttctgcaacaggacaccaaacttgatgcagaaagccaaataggtcaattatgcaaatctcctggtgccatattaaatttcttgacgatggaaaa

SEQ ID NO: 83865 - DNA, 1662 bp, Homo Sapiens
  misc_feature (295)..(295): n is a, c, g, or t
  misc_feature (323)..(323): n is a, c, g, or t
  misc_feature (330)..(330): n is a, c, g, or t
  misc_feature (411)..(421): n is a, c, g, or t
  misc_feature (554)..(575): n is a, c, g, or t
tttttgtccgtgtcctctcatttgggttttgtaactgcaattttcaaaccaaagtttaaaatcaccttttcttcctgttttgctgtagtcactggtgttcctcacccaccagctgtaactcagtttgtgtgaggtacagccacagaagatgtcatgtactgtatattacctggtgatagttgcttttcaccccccgagttcagtttctaggagccaatgaaacttcccctcacctcctcatctttccaagttgttctttgaattgaggagtttgaaggcattaaacagttacttnggggatttgcgaaaatcccacttagttnactgcgntttacagttctttgggcccagtctctgacccttcccaagtatttgtgcaatgattgtgtttactgctggatttttgaaggnnnnnnnnnnnaagaaagtgccatttcattatttgattatcaccaaattatctggaaataattgggacattgtaacttatctatttatagttatgagattaagactggagtgccatcaccgcgggtgatgatttagcttttgcnnnnnnnnnnnnnnnnnnnnnnccttccaaatcatgccataattgtaatgttgaatcggacagagccttacgtgcccgagggggggcctacctgcctgagcgcgagcccttcatcgtgccggtggagcccgagcggacagcggaatacgaggactacggcgcagacgagcctgcagaggagcctcctgagccccaccggcgctggcggcgcgccctgccccacggacccgggcagtgaaccagagatcacgcgccgcgccgcgaggcttgggggaggtgttgaaattctcatttacaggtcagatagagcagtgtacgtcttttctgaggtgtttcttccagcgttgctcatccaggagtaccctttctgattgtagagaaccttgtttctgcaggaagcctagctccaagcacgcagtctgtagacatttttgcctttgcccttgaaatgcttgcaaaatactttgttaacaaaagctgcaaagagagaacatgccgtgtgcctttagttagcacagcggggcagccttcagtgaaactcttaggttaagcagttaagtcctggaacccagagctgctgtgtatttcgagcgggcagtttatcttttgctatacttattttcaattcaattacaccacgattcaaataattcccctcctaaaaccaaaaaggagggaaacgtcaactccattgcaattacttatcttcctcttctatctctgttatacgccggggcatagaatgctcgtatacatctctttaacaaccacaaaccttaagccatgtagatgaagttagtgcatcaacgggatacagttccatattgccttaaacctccttgttttagacacactaacatttataccaaattgcagattattctgcagagagggaattgcatgtttgtgttgtatatttagtatgaacttttttcagaatataatatttcttagttatcaaaagtagttggaaaacatttgcaagactatgaacatagaattgctgcttttatattttaactgcagattgtgaatttcactgccttatattatttatttctgaaacaaaagaggcatttttcaataaaactactgaaaatttgaaaaaa

SEQ ID NO: 83866 - DNA, 341 bp, Homo Sapiens
ttttttagtattcagagtagtttatttcctgaaatcttatataccatcttcaatttcaatttttatttgacagatattaaaagctgatcaggaaaaatatttataataaatgaaaagaaagcatacatcataatatatacaaagacttgattttataaaaccaaaatataatatagccatattgtatacatcaaaatgtttacagtgataacaagtccttggaggcaaaaatccttgtcttactcatctttatggtcccatattatagcagagtgcttggcacagagtagatgttaagtaagtgtttattgtaaaaatggaagtgaataatgtatgtcttc

SEQ ID NO: 83867 - DNA, 1533 bp, Homo Sapiens
  misc_feature (565)..(565): n is a, c, g, or t
  misc_feature (788)..(943): n is a, c, g, or t
  misc_feature (1098)..(1124): n is a, c, g, or t
  misc_feature (1380)..(1380): n is a, c, g, or t
  misc_feature (1398)..(1398): n is a, c, g, or t
  misc_feature (1451)..(1451): n is a, c, g, or t
  misc_feature (1454)..(1454): n is a, c, g, or t
tttgatggctaccgatctccgctgcccaccaatgagagccagcccctcagcctcttcccgactggcttcccgtaggtaccagcaacctgcttctgactggccagccccctcccctgctggaggaggggagaagccccgctctggtcctacccttcagtctctgctcttccttcatcaaccaccttccccaagcttagtgacagcagccgcccatcctacctggatggagaagagacccttctccaagcacctcagcgcacttgccctctgccacacctgtcggtggaggctgtggccaggagagactgtagaagctcggtccctgtgtatgtttgcatatgacatcctgcattggatccgcttttgtattttttaaccatacccacggtggggcgggtggggggagcctggaacagtgaccagatctgggggcctgagtggggaacagagttgaatcgtccacctggccattttgaccctgagtggacagttcacagcctcagctcatgtctggctgtgacacacactgcccccagcttcccttggtcagccccactccagaacngggggtgtaaacggagccccagagtactagggaaggaggaagggaggacatgcctcttcttcctcctttctttccccatctgttcctgggaagagtttgtctttcttatctttaagcccctttaccctggtcctgtactgatcagtgaaggaaaccgtggttactgaggccctgttgaaaagtgcacgtcttgtccaataaatcacgctgcagttggtgtccnnnnnnnnnnnnnnnnnnnnnnnnnnnnnnnnnnnnnnnnnnnnnnnnnnnnnnnnnnnnnnnnnnnnnnnnnnnnnnnnnnnnnnnnnnnnnnnnnnnnnnnnnnnnnnnnnnnnnnnnnnnnnnnnnnnnnnnnnnnnnnnnnnnnnnnnnnnnttttttggggggggcccccgccccctagaaaatttctttaaacaccttctgtggtgggccggccgccccccatgagaaaggggaaaatgggcccaatctcgtttttcaaaaagaaaacacccccggcccggaacaacggggggttcggcactctnnnnnnnnnnnnnnnnnnnnnnnnnnnggggggcgcatcccccacggccgctctcttcccaacacacacctcccccacaagcggcgcgcaccctctatcaggggcgccgccctctctaggccgcggggtctatcctcccacacaccagcggggaggttgccccacagcagacgggacgcgccctcctccaccacaccacccatattattgtccgcgctgcctcccccctcccggggtgaactccaatttgttcccccgcgaaaacacggcggggcggccgtantatctccgtctctttaanaggatctttcttccctccagcccgcaccgggcggggagagacacacactcttnatnacacaaacgcccacgtgatttcttataacgccccccctcacctaattcattcgcccccgcgcgcgcgtgtttttatcta

SEQ ID NO: 83868 - DNA, 890 bp, Homo Sapiens
  misc_feature (669)..(669): n is a, c, g, or t
  misc_feature (671)..(671): n is a, c, g, or t
  misc_feature (676)..(676): n is a, c, g, or t
  misc_feature (678)..(678): n is a, c, g, or t
  misc_feature (681)..(683): n is a, c, g, or t
  misc_feature (686)..(686): n is a, c, g, or t
gcaggctctggcggggaccagagctctgcgtgctagctgctgccaccaagaagtgttagcagaagcagtagcagccaactggccctcctgactttggcccagagcacatgcgtggcttgctgaacccaggctcaggtttatccccaaggccccagctttgagaagggggaaggcccctggtaagttattgatgcccccatatttcagctactgctctctttccaaggccttgcatggaaaggcctagccattgtctgaggcagcaatctttggcatctacaggtggcagcagcctttcaccagggctccatctgtgaagagtctcagccatgactttgagctgagcttgggagaagtaaagcaactgttaaggccagcccttgcccctcagacctgccatgaaaggaatgagccctagactgactcctgcagcacccccgggacaggctgggaccagctgtttgtctccaggtgtcagagtccctcctcctcctccaacctctccaacctactttgtttggaaataccgagctacacttcaaaatgtattcaagggatttccaataaatttttttctgtactttacagcctcctgtcctgtaggttgtctgaagacctcgtaaccccttccccacccctgccccagtgcaggtctgggaaaggggagantngtgcngngtnnngangcgcagaaagacctcaagtgtctggcaagcctgttttgagtcggggtgtggcctcttaggggctgtataccctggggtttcctgggtcaggaaacttcttagtatttctctttccctggtccctatcaggggcttgaatttgaatattcagttggagaatgcatttaaaatacacccatagtaaaatctccataaaatgcaaaa

SEQ ID NO: 83869 - DNA, 1645 bp, Homo Sapiens
  misc_feature (1420)..(1420): n is a, c, g, or t
gcccactctataggatcccccgccctcacagtcctttgtggacaccacccggagtggccggcctggctggaaagcacctaggaggtgctggggcctggccaggcccatggggcccagggcagtgacgtggatgtcttggtttgtcagcggctgagtgaccaggctggggaggatgaggaggaagagtgcaaagaggaggcagagagcccagagcgggtcctgctgcccttccacttccctggcagtttcgtggaggagatgagtgacagccggcgctacagcctggcagatctgactgcccagttttcactgccttgtgaggtcaaggtggtggccaaggacaccagccaccccactgaccctctgacctccttcctgggcctgcggctggaggagaagatcacagagccattcttggtggtgagcctggactctgagcctgggatgtgctttgagatccctccccggtggctggacctgactgtcgtggaggccaaggggcagccagacttgccagaggggtctctccccatagccacagtggaggagctgacagacaccttctattatcgtcttcggaagttaccagcctgtgagattcaagccccccaccaggcccctaaaaatcagggcctcagcaagcagaggagacacagcagtgagggaggcgtccaagtcttctcaaagtcttaggattgcagcaacacgctcggctgcccaaacccaaggcgaagaccttgccagagttcatcaaggatggctccagtacgtacagcaagattcctgcccacaggaagggccacaggcccgctaagccccaaaggcaggatctagatgatgatgaacatgattatgaagaaatacttgagcaatttcagtaaaaccatctaagtgctggaggaaccacgcttcctaactgctgcttctcagggaatccgacaccagccaaccattttaagcctctaaaagacctcgggcaagtctcacagaaactgagctgcagacggggagtagctttgtggaaactgatttgatggacactgcaccagcttccttcaggttctagattcttgctacttagggcgggctggtttggacctaacatctcgcacgtgactccctcagcctcagagccttgggatgcagagcagctggcagggttcctctcaatcctgcaaccccagctgtcccaccggtggatgcagaggggaatccgaggccatcaaccttggtgacagcagcgcagtgccaatgctgatcacactgcatgggagattttgttaacgtctgccacccccactctcacccccaagctctaagcccccgggaggcctggactgtcttcctcatctctgtagcaccaagcctgatagatctgtatatggtaaacaggggtttaacaccatgtggttaacatggnattaaggtggaaacttggcttcaagaacacaaccttaggaccttgagccccaaaagctggtggtgaaatgaggaggagccaatttaagaagacccttatggagacctgaggctgcagaaactggtaggtttcatcaggtggttaaagtcgtcaaagttgtaagtgactaaccaagattatttcattttaaaaccacagaataaaaatgacacctgagcttctcta

SEQ ID NO: 83870 - DNA, 887 bp, Homo Sapiens
gccgcggggaccatggagccggtgccgctgcaggacttcgtgcgcgccttggaccccgcctccctcccgcgcgtgctgcgggtctgctcgggggtctacttcgagggctccatctatgagatctctgggaatgagtgctgcctctccacgggggacctgatcaaggtcacccaggtccgcctccagaaggtggtctgtgagaacccgaagaccagccagaccatggagctcgcccccaacttccagggctacttcacccccctcaacaccccacagagctatgaaaccctggaggagctggtctctgccacaactcagagctccaagcagctgcccacttgcttcatgtcgacccacaggattgtcacagagggcagggtggtgactgaggaccagctcctcatgcttgaggctgtggtgatgcacctcgggatccgctctgcccgctgtgtcctgggcatggagggtcagcaggtcatcctgcacctgcccctatcccagaaggggcccttctggacatgggagcctagtgcccctcgaactctgctccaggtcctacaggatccagccctgaaagacctcgtcctcacctgccccaccctgccctggcattccctgatcctgcggccccagtatgagatccaagccatcatgcacatcttctcaagtcttaggattgcagcaacacgctcggctgccaaaacccaaggcgaagaccttgccagagttcatcaaggatggctccagtacgtacagcaagattcctgcccacagggaagggccacaggcccgctaagccccaaaggcaggatctagatgattgatgacctgttttggaagaactacttgaggcaatttcaggaaaaccatctaagtgctggaggaac

SEQ ID NO: 83871 - DNA, 783 bp, Homo Sapiens
gtggaccggtccggaattcccgggatcagagagccgcggggaccatggagccggtgccgctgcaggacttcgtgcgcgccttggaccccggcctccctcccgcgcgtgctgcgggtctgctcgggggtctacttcgagggctccatctatgagatctctgggaatgagtgctgcctctccacgggggacctgatcaaggtcacccaggtccgcctccagaaggtggtctgtgagaacccgaagaccagccagaccatggagctcgcccccaacttccaggtgcgcaggaccattgtcaagatcccttctaccctggaggtcgacgtggaggacgtcaccgcctcctcccggcacgtccactttatcaaaccgctgctgctgagcgaggtcctggcctgggaaggccctttccccctgtccatggagatcctggaggttcctgagggccgcccatcttcctcagcccgtgggtgggctccttgcaaaaaggccagaggctttgcgtctatggcctagcctcaccaccctggcgggtcctggcctcaagcaagggccgcaaggtgcccaggcacttcctggtgtcagggggctaccaaggcaagctgcggcggcggccaagggagttccccacgagctatgacctcctaggtgctttccagccaggccggccactccgggtggtggccacaaaggactgtgagggcgagagggaggagaatcccgagttcacgtcctggctgtgggtgaccggctggaggtgctggggcctgggcaggcccatgg

SEQ ID NO: 83872 - DNA, 497 bp, Homo Sapiens
caacccagtgatttcaaaaaattaaacatttgtttagctcatgaatctgtgggttgggtgaacatttctattggtcttggctgggctcacctgtacccagtcagctgcagggtctagctcttcttatcttggctgggatctcacacatgtctaggatcagctgctttactagtctaggattgtcttggctgagacaggtggactactcagttctcctccactgccttatccttcagctggccagcccagaaatgttgccatgtttacagcataagagcaagcaagaaagaataatatgcaaccacttttccaagcctaaggtgaaagggcgggcagaacctgtggtgttaggaggcaactcataccagcccatgggtctactgtttaattttcagaaatttggcaagctgattgttaacacagctgttgtttaatttatgtacttgtaattaaataatttacattaaaacaaagataataggtactcaaaactcatg

SEQ ID NO: 83873 - DNA, 437 bp, Homo Sapiens
ttcataatcctcatacacggaaccagcatgtcagtgcatccagggtcttccagagccccctggaatctgatgtttctcttctcaacattaaccaggcagtcagctgtctgactgcaggcgtattgaaccctgagcttggctatgatgcccttttagtggggacacagactaatcttttggcttatgatgtctacaataattcggatttgttctacagagaggtagcagatggggcaaatgcaattgtgctggggacattgggagacatttcttcccctcttgcgattattggtggcaattgtgctctgcaaggtttcaatcatgaaggaagtgatctcttttggacggttactggagacaatgttaattccttggccttgtgtgactttgatggtgatggaaagaaagagcttcttgttggatctgaggattttgat

SEQ ID NO: 83874 - DNA, 506 bp, Homo Sapiens
  misc_feature (445)..(445): n is a, c, g, or t
tttttgctctagcagcatttttatttacaaacagcaatgtccattgactttatttataccataaaaaagccatttacaagcaagaaacaagaattcagaacaaaattaagcagcactgaaatattcatgtcacaaatctaaaacaaagtgaatacaagagtaaaatatcatttgaataaatagtcttaaattcatgctataaaataatccttaatggcaagttactagttgatacagcatccgcttagctagcttcatttacttcatatggtgatgaagtgtggagttgtgaggttaccagtttatattgcaagataatgacactgtgttaagtcattcaaattgctcaaccatttataacggaaaaaaatgttagccctactaataaaagtggtgagagagatggttttcacattaggaaaatggtcattctcaaacaaaccangtaagtttacctcttacaatagtcagggcagcaaccaaaggcttgggcagcaagtgcaaag

SEQ ID NO: 83875 - DNA, 806 bp, Homo Sapiens
  misc_feature (720)..(720): n is a, c, g, or t
ggggacgctaggttccggaacctgacctgagctggggcctgtgcttccagcgggtggtggggggcctggtgtgctggcatcaagtaagccgactacctcggcaaaggcttagggacaagagaccagcagcctgaactggctggggcatccggaaggcttagatcttgtggccaagagttcagaccgtggcgaagtggagagtgacatgcagttggatggcggtgactgcgtggtcctgcaaccctggttccagtctggcaagcattgtagacctggctgctgaagactgacggggcccagggtccgctgcccccaccgccatcaccacctcggaacccagggtaacgctgtcagtctttgagcctacgaggaaaccattcggaagctccagaacccaggccctaatcacaacgcccctatccagcaggaagcagccagatgatcaacgacgccctttttcctttttatactaaagtaagaaataagaatgttagcccaaactgcactattttgcagacccctaccattttacaaactggtcagagtggaaaattccaccagggcctgagctgtgagaaacatcctgtcaggcaggtcccaggcctaacccctggctgcactaaattccttcattatcagcagccaaacacaccgcccccaccccattttcacaacaatcccagacctctccctgcccgggactgtaactggtccagcctngtaagcgggaaagggggctctggcactagctggtaccccctctccgcaggtctttctcccaataaatctgtgttgccattgaaaaa

SEQ ID NO: 83876 - DNA, 1353 bp, Homo Sapiens
atgctcaggtctggggcattcgtgctattaggacatcaagtgttttagaaacctttttaggagagagattgtaagtgggagggccaggaaagaagccaagcaggatgagcttgcttttgaatccatctttagcaggtcagagagcagctctcctcgacgggagagaaagaaaagctcaaagaagaagaagcacaggtcagaatctgagtccaagaaacgtaagcataggtctcccactccaaagagcaaacgtaaatctaaggacaaaaagcgaaagcggtctcgaagtacaacaccagcccccaagagccgccgggcccaccgttcaacttctgctgactctgcttcctcctccgatacttcccgcagtcggtctcgaagtgctgcagctaaaactcatacaactgccttggctgggcgaagtccttcccctgcttcagggcgacgcggggagggagatgcgcctttcagtgaaccaggtactaccagcacacaacggcctagtagcccggagactgctacgaaacagcctagcagcccttatgaagacaaagataaagacaagaaggagaaatctgcaactcgacctagcccctctccggaaaggagcagcacaggcccagaaccacctgctcccactccgctccttgctgagcgacatggcggctccccacaaccccttgcaaccacccccttaagccaggagccagtgaaccccccatctgaggcctctccaactcgggaccgttcaccacctaagtctcccgagaaacttccccagtcttcttcctcagagagcagcccaccatcccctcaacctaccaaagtttctcggcatgccagctcttccccagaaagtcctaaacctgctccagctccagggtcccaccgagagatttcttcttctcccacatctaagaatcgctcacatggccgagcaaaacgggataaatcacattctcataccccctcccgtaggatggggaggtcccgtagccctgccaccgctaagagagggcgatctcggtctcgaaccccttaccaaggagaggtcattctcgatcccgatctccccagtggcgtaggtccaggtctgcacaagaggtggggaagatctagaagcccccagcgacgtggcgctctaagtctcctcagcgacaggctggtctaggagcagaaatacccagagaagaggcaggtctagcgtcagcaggggaagggaggtccattctagatccccagcatagaggtagattgttctgagcacaggcccgcggggaggtccgtctaaaaacctgcaggggaaccgacagaatcccacggtggttcgttaaacacgcggggaggttcgca

SEQ ID NO: 83877 - DNA, 441 bp, Homo Sapiens
  misc_feature (231)..(260): n is a, c, g, or t
caccgacggcgggttgtactcgagcgggcacgtaggcgtcaccagggggtagaattaaatgagaagaagaatgaaagactccgtgctgcctttggcatcagtgattcttacgtagatggcagctcttttgatcctcagcgtcgtgcccgagaagctaaacaaccagctcctgagcctcccaaaccttacagccttgttcgggagtctagcagttctcgctcaccaaccccnnnnnnnnnnnnnnnnnnnnnnnnnnnnnntagaggacgcaggtcagagagcagctctcctcgacgggagagaaagaaaagctcaaagaagaagaagcacaggtcagaatctgagtccaagaaacgtaagcataggtctcccactccaaagagcaaacgtaaatctaaggacaaaaagcgaaagcggtctcgaagtacaacctgccggtgg

SEQ ID NO: 83878 - DNA, 698 bp, Homo Sapiens
tgaagagactggggaagtttctcgggagacttaggtggtgaacggtcccgagttggagaggcctcagatggggggttcactggctcctggcttaagggggtggttgcaaggggttgtgggtagccgccatgtcgctcagcaaggagcggagtgggagcaggtggttctgggcctgtgctgctcctttccggagaggggctaggtcgagttgcagatttctccttcttgtctttatctttgtcttcataagggctgctaggctgtttcgtagcagtctccgggctactaggccgttgtgtgctggtagtacctggttcactgaaaggcgcatctccctccccgcgtcgccctgaagcaggggaaggacttcgcccagccaaggcagttgtatgagttttagctgcagcacttcgagacctgcaggagttaattgaggacgtgggagaggaaggaaatcagctcaaagggagaacagaaaaccccctccccaactcccatccacctttcctaactggacaaccctcttccaaaaagcctttagtcgcacaactcaaatcattcactgaaatgcaagtacagtccactttggttcttcttttcccaacacaatcccaaagagcgttctccctctacccctttactcacctcccccaaacatccccaaaccatccacccagcccactcaccaacctcatcaa

SEQ ID NO: 83879 - DNA, 545 bp, Homo Sapiens
  misc_feature (412)..(412): n is a, c, g, or t
aggtgatctagaggatcctaaggtggttgtgggtagcgcatgtcgtcagcaaggagcggagtgggagcaggtggttctgggcctgtgctgctcctttccggagaggggctaggtcgagttgcagatttctccttcttgtctttatctttgtcttcataagggctgctaggctgtttcgtagcagtctccgggctactaggccgttgtgtgctggtagtacctggttcactgaaaggcgcatctccctccccgcgtcgccctgaagcaggggaaggacttcgcccagccaaggcagttgtatgagttttagctgcagcacttcgagacctgcaggagttaattgaggacgtgggagaggaaggaaatcagctcaaagggagaacagaaaaccccctccccaattcccatccanctttcctaactggacaaccctcttccaaaaagcctttagtcgcacaactcaaatcattcactgaaatgcaagtacagtccactttggttcttattttcccaacacaatcccaaagagcgttctccctctaccc

SEQ ID NO: 83880 - DNA, 471 bp, Homo Sapiens
  misc_feature (145)..(145): n is a, c, g, or t
aggagagaccaaaggcttctgagcaggatttttatttcattacagtgtgagctgcctggaatacatgtggtaatgaaataaaaaccctgccccgaatcttccgtccctcatcctaacttgcagttcacagagaaaagtgacatancccaaagctctctgtcaattacaaggcttctcctggcgtgggagacgtctacagggaagacaccagcgtttgggcttctaaccaccctgtctccagctgctctgcacacatggacagggacctgggaaaggtgggagagatgctgagcccagcgaatcctctccattgaaggattcaggaagaagaaaactcaactcagtgccattttacgaatatatgcgtttatatttatacttccttgtctattatatctatacattatatattatttgtattttgacattgtaccttgtataaacaaaataaaacatctattttcaatattt

SEQ ID NO: 83881 - DNA, 828 bp, Homo Sapiens
cgaacgagacctatttagttcagtggacagagataagtgaatagacaaagctctctgctcaattacaacggtttatcgtggcgtgggagacgtctacagagaaagacatcagcgtttgggcttctaaccaccctgtctccagactgctctgcacacatggacagggacctgggaaaggtgggagagatgctgagcccagcgaatcctctccattgaaggattccggaagaagaaaatgatccggatcattttcttcttccggtgttggccttcacgaaagatgggtaaagtggagtgacctgcagagtagtggtccaagtctgggtcccccttgaacaaagggtttcgtggagggccccgtgtgcacagcacatagccgccggggggatgaaaagatgtgtcactctttgctcttgaatgattatgaaaatgtcagatggttttatggatctgtgatctcaggattgtaattaccaatccacaatcgcattgctcactgggaattgcttcaagcgtattttccaggtagtgaatgatgagctacttaagtcctcttcccttgaattcatcagatatggacttggactatagttctttctagatgcaatcctgatccacacaggaattagaaagtaattcttcctcccctcccacctaaagcaggagcaaggcagaggctcaaagatgaggaaaatgctgtcgtgactcacatcccctcctccccactttgaaaggcatttcaggccaagctgaaagttctgggggtacttccacctggtacttttatgtccttctgtgttaagctcctaaactacactgatgacttag

SEQ ID NO: 83882 - DNA, 452 bp, Homo Sapiens
cccaaaccttttcatggggaatgtgtggcaaccttgccaaacagcaccactcagagtgtgactctgactgtgaccttggccttaatgaggaacttcttaggagagtttgaggacaaggccaacatcgtcatctgggctcgctgcgtcccagcacatcaaactctgtccagagacaaggccaactgcaaatgaaagccagggaacattgctaagggtctgtggctctgtggtggtgttcatcgccttcctgagataggatttcccttgccagtcccaacctgtatatattctgtacgagaagacatccctgaatatactgtaggtgagtcgtccagccaaatttatatctccaaaacatttttagctttttctacatgctatgaattgagatgacatgctcaacttgtaaataagtctttttgtacattaaaaaagtaatattttcataaaaa

SEQ ID NO: 83883 - DNA, 1532 bp, Homo Sapiens
  misc_feature (689)..(779): n is a, c, g, or t
  misc_feature (881)..(1028): n is a, c, g, or t
  misc_feature (1201)..(1251): n is a, c, g, or t
tgcggccgccccctcccctggaggacaacctgttcctcccgccccagggtgggggcaagccgcccagctccgcacagaccgcagagatcttccaggcgctacagcaggagtgcatgaggcaactgcaggctccggccggctccccggcccctctcccagcccggggggtgacgacaagccccaggtgcctcctcgggtacccaaaccccctcggcccacgcgcccacacgtccagctgtctccagcacccccgggcgaggaggagaccagccagtggcctggacctgcctcccctccccgggtgcctccgcgggagcccctgtcccctcaaggctcgaggacacccagccccctggtaccacctggcagctccccgctgccaccccggctctcaagctcacctgggaagaccatgcccaccacccagagctttgcctcagaccccaagtacgccaccccccaggtgatccaggaccccatggacccgctgggctggtccctgcatcctgcccatcgtccgggatggcaagaaggtcagcagcacccactattacttgctgcccgagcgaccatcctacctggagcgctaccagcgcttcctgcgtgaggcccagagccccgaggagcctaccgccgtgcgtgtggctctgctgcagcccaccaccgccacccccaacaccaaacatcannnnnnnnnnnnnnnnnnnnnnnnnnnnnnnnnnnnnnnnnnnnnnnnnnnnnnnnnnnnnnnnnnnnnnnnnnnnnnnnnnnnnnnnnnntaaactcactctacatcaccatcccgccgaccacatcactcccccatcctctccccacaccactctacccgactcccaacgaacatccacccagcccacacnnnnnnnnnnnnnnnnnnnnnnnnnnnnnnnnnnnnnnnnnnnnnnnnnnnnnnnnnnnnnnnnnnnnnnnnnnnnnnnnnnnnnnnnnnnnnnnnnnnnnnnnnnnnnnnnnnnnnnnnnnnnnnnnnnnnnnnnnnnnnnnnnnnntcgtcagacacgcccctctcggcaccacccacccccacctctggccccccatcaccaaacacttctcactcccaccctccacccgacacaaaactacctacatcaccacaaccacaaacaatacacacatagcaccactactacctcacacagaaacaaaacctaactctacnnnnnnnnnnnnnnnnnnnnnnnnnnnnnnnnnnnnnnnnnnnnnnnnnnnggaccgagagagcagggcgagtagtgaagaacgagcagggtgacaatgacccgcctccaactacaacacactaccatacccaatctccctacccacaacctgcaccaacactccaactaacccccaccaccacagtccaaacctaatccaatgagactctacccaacacacaatcccacccaccccgctctaaactctctctacacaccactctccccacacacgcgatgtaccacgccttcattccatccctcaaaccccagcaacctgcacccactatc

SEQ ID NO: 83884 - DNA, 650 bp, Homo Sapiens
gcggccgcggctgtaggctttgctgacagtggcctgggagaagtggggccggaggctccgcccccatcatgtgcctgccaccccttcccagtcatccctttactcttacagtagcaaataagacccctgtctaatggggggagacaaatgtgtagacccttagccaccttggccagggctgactccttaaatttctggatgatgatgattgttatttaatagccagaggctcatataattggcctctttggaagaggcctcatggcctccttactctcaccaaagcaatttttccctcaggggggctcccatcttcttacacagagaggcagctgaggcaggacagtggggctaactgtagaccaggcgagggcacgggctgctggggtggccctgcttccccagtgtacatattgtatctgtgtaacattttgtatattccaggggtagggccgccccctgtatcatacctagcagaggttggagctggcacatggggaggaggttctaataattatttggggctgggaaacttatttattgatagcataggacagaggaaggaggcggggatggggtcgtggcgccctggtgatgcgactcctgtttattttgctttttatttcggaataaatggatttagccataaa

SEQ ID NO: 83885 - DNA, 968 bp, Homo Sapiens
  misc_feature (378)..(387): n is a, c, g, or t
aacgttttcaaaatctatttttatttttcttcagtattacctgctgttcccaagtggctgggtaatctatgggttatattttcatttaccctcaaagctaggctgccagtggaagctaagaataacacaattaaattcaagtttctctagaaaatatcgacaaatcaaattttaagaaagtgtaacttgtggttttgctttggttcaagatggctgatctgagaatatcaaagcatttaattcaaactaatagtgtgtcctcatcctaggactagaaggtaatttttcttttaaggagggaaaagaagagcaaaggggaaaaatccctgaataagtgattcccttccatgaattatttcaattcctccaaaatagacnnnnnnnnnnaggaaggaacacctgactctgaatatatttcctcaaacggagtcgcttttgaacccaaagagtccagcaaatcaggttgcaactcctgttccaagctggccagagagctgagggatggggcccctccacactccccttcctcgctgtagacgtgaggtaggtagccggggtcatcttccagcacattggcaacatggagtttctgattcaatgtctctgccatccttccttccaccggagccaggagttgtctgtgcattgtggcatctgggtaagccttaactccctgcgtgggtcctgctgcagctgtgcagatgagcagagccggcctctggccttcaacatctgaccatgtccatatcagaggtttcatgaggatcttgttctgttcatgtataactcagtcatgaactggcaaggccaaattgcgtcttagtcatctgtgtagctataaagttcagcacagttccagggtaccagtagatgctacataactgtttgttgaattaatcaataatactatctggccagtaatattgtattgtttcttggaaaagctgctttcttattagccttgccag

SEQ ID NO: 83886 - DNA, 760 bp, Homo Sapiens
  misc_feature (614)..(638): n is a, c, g, or t
  misc_feature (640)..(640): n is a, c, g, or t
gggagtgcgcagacgcaggggtcggcgccgggtgagagcgtgcggccggattcaccacaacatggcaaatctttttataaggaaaatggtgaaccctctgctctatctcagtcgtcacacggtgaagcctcgagccctctccacatttctatttggatccattcgaggtgcagcccccgtggctgtggaacccggggcagcagtgcgctcacttctctcacccggcctcctgccccatctgctgcctgcgctggggttcaaaaacaagactgtccttaagaagcgctgcaaggactgttacctggtgaagaggcggggtcggtggtacgtctactgtaaaacccatccgaggcacaagcagagacagatgtagaccctttccctccagagtcacgcacatactcgtcatcgcatcacttgggagaatggttgtatcttatggaaggaattatcacatcaaggagtcaggggaaagtgactggaagcaaacgccctaaaagttacccatcacgtttcagtgtaaatgagtaactatagaagacattgcgttatcttatttccaaaacgttccaactaaaaaacattttcctattaaaatagaccttccgaaaaannnnnnnnnnnnnnnnnnnnnnnnncntgtcgggccgccctcgggccctcgaagaagcttttctagaaccattccgttttggcggcgcgggggcccccagtagggtaaggtgaaacattgggtccattaagctgggtttcccctaag

SEQ ID NO: 83887 - DNA, 2930 bp, Homo Sapiens
  misc_feature (79)..(113): n is a, c, g, or t
  misc_feature (1590)..(1605): n is a, c, g, or t
  misc_feature (2225)..(2225): n is a, c, g, or t
  misc_feature (2239)..(2250): n is a, c, g, or t
  misc_feature (2412)..(2412): n is a, c, g, or t
  misc_feature (2414)..(2415): n is a, c, g, or t
  misc_feature (2417)..(2421): n is a, c, g, or t
  misc_feature (2423)..(2423): n is a, c, g, or t
  misc_feature (2425)..(2428): n is a, c, g, or t
  misc_feature (2432)..(2432): n is a, c, g, or t
  misc_feature (2434)..(2441): n is a, c, g, or t
  misc_feature (2443)..(2443): n is a, c, g, or t
  misc_feature (2445)..(2622): n is a, c, g, or t
  misc_feature (2681)..(2699): n is a, c, g, or t
  misc_feature (2846)..(2846): n is a, c, g, or t
  misc_feature (2887)..(2887): n is a, c, g, or t
ctgtatagatcactatagggcgtagctctggccgtagcgaagaccgagcgcagcgaagtcaggagcgaggaagcggcgnnnnnnnnnnnnnnnnnnnnnnnnnnnnnnnnnnncagtcgacggtaccggacatatgcccgggaattcggccattacggccggggagtcgtcagaccggtgctagcgacacgggagtggcaaacgcatcctcttgccgttcccggtgtttgggccttgcctgtgacggtgggaaaagaaaatggccttgctgtgctacaaccggggctgcggtcagcgcttcgatcctgagaccaattccgacgatgcttgcacataccacccaggtgttccggtctttcacgatgcattaaagggttggtcttgctgtaagagaagaacaactgatttttctgatttcttaagcattgtaggctgtacaaaaggtagacataatagtgagaagccacctgagccagtcaaacctgaagtcaagactactgagaagaaggagctatgtgaattaaaacccaaatttcaggaacacatcattcaagcccctaagccagtagaagcaataaaaagaccaagcccagatgaaccaatgacaaatttggaattaaaaatatctgcctccctaaaacaagcacttgataaacttaaactgtcatcagggaatgaagaaaataagaaagaagaagacaatgatgaaattaagattgggacctcatgtaagaatggagggtgttcaaagacataccagggtctagagagtctagaagaagtctgtgtatatcattctggagtacctattttccatgaggggatgaaatactggagctgttgtagaagaaaaacttctgattttaatacattcttagcccaagagggctgtacaaaaggcaaacaccatgtggactaaaaaagatgctgggaaaaaagttgttccatgtagacatgaatggcatcagactggaggtgaagttaccatttcagtatatgctaaaaactcacttccagaacttagccgaatagaagcaaatagcacattgttaaatgggaatattgtatttgaaggagaaaaggaatttgatcaaaatgtgaaattatgggggtgtgatttgatgtaaagccaagttatgtaactatgactgcaacaaagattgaaatcactatgagaaaagctgaaccgatgcagtgggcaagccttgaactgcctgcagctaaaaagcaggaaaaacaaaaagatgacacaacagattgagtgggagatggaaggaaggctattacattatttccgaatttttaatactgtgtgaagtggtggcttgctgctgtaatcttttgttttgttgttgtgttactgaatgtggcatttcagggttaacattaggttcttaaaagccaaagtcagtttgtctttttgtgcctctcatctttcttttgtgttatgtaagattgattattcatttctccctactggtaggaaccatagttgtgtcctatacttgaagaggctggaaagtagcccataaccataattgcagtatttctttgtatttctctgttaagcaaagaaatattaaggaacannnnnnnnnnnnnnnngtattatcccataattagtaaagcaagatgaaatgtcaaattttaatcagttttttcatggatttgtgttcttacagtacttgaaaatatttaaggaagagatgaagctctgcagttttttctatgtgggatgattacttttttaaggaggattaattctgaggtagtatagtaactaaaggggaatatatgaattgtttaacaaattagaatttgtttacaactacttgaatttttaaattatgtcaaaacttacattacttgccaagcagtatgatgttataggaaacataaataagattacagaggtatcaatttggttaaaattcaccattttataagactaagcaataatcttaacaacctctttcctgaatatttaaatgtgtttgtatggtgttatgactaattgttactgatttagagactaagccctcttaaaacctttagttaaatataaaaagaaattatatatatcttgcctccctgatggaaaactatataaaattgtagacttaaaaggtttgtggaaatacattaggatatcagaaaactaaatatatggagttgctttatgactattacatgttaaataaaaatagcttaattgttttggaaanacaaaccaaaaccnnnnnnnnnnnnccttgtccggccgcctccgcccttcaaaaacttttcaagaccaattcgttttggcgcccggggcccaaaaaggtaaaatgaacattggtccattagctgttttcctaagaaaatccttgggaaaagactaaagggtttggcatttcccccccataaatgatncnncnnnnncncnnnntccncnnnnnnnncncnnnnnnnnnnnnnnnnnnnnnnnnnnnnnnnnnnnnnnnnnnnnnnnnnnnnnnnnnnnnnnnnnnnnnnnnnnnnnnnnnnnnnnnnnnnnnnnnnnnnnnnnnnnnnnnnnnnnnnnnnnnnnnnnnnnnnnnnnnnnnnnnnnnnnnnnnnnnnnnnnnnnnnnnnnnnnnnnnnggtgttccctcctcgcctccgcgcggcgccgtcccccctcttgactccctttggcgctnnnnnnnnnnnnnnnnnnntttcacgccacctactctattttagacccccccgtcctttgggttcctccccatagctataccatcttttgcgtgaccacccctatatacccccccaatgctcaccacccacccaatatcccccctcttttattatctaccttatanttgctcacaccctacgttttctctagctccccagtaagatntcccatacgacaatacccctaacccagcagttataattccagg

SEQ ID NO: 83888 - DNA, 423 bp, Homo Sapiens
  misc_feature (75)..(75): n is a, c, g, or t
tgaacccttgtcccaaggtgaccctgagattgcccgagaggtgtggagaacctgggtggagttgaggcactgtcnagtatgcagaggaagctcgagccttcgcaatatagctgtggaattctgcaatctggagctgtgctaaaccaggcaggggtcagcaatctaggtctgtgagtctagttccacttgggactgatgatgagctcacaaagtggcagatggcccaactgtgaccagcaacgtagcacagtgctggccaagtgctggggtcatggcagtgcttcagccccattggccatctcaggtgctaggcaagggagctgaagtaggaattcagtcatcttgatgaggctgccagagctgatggaaagaaagggagtctgagactcagcaggcacatggaagatgaataaagttgaggtt

SEQ ID NO: 83889 - DNA, 436 bp, Homo Sapiens
gctcggtggcagctttggcgagggccccgtgtccacgcgcggccaccctgccgcgtcacttggccggcctattccggcggggaagcaggtgacgggaattccgcgggccgaggcggcgacgagggacgcagagacgcagagcctcgcgccgggcctcccagtcaagagccgacaaaaataaaggggaaaaactcaaaacccccatccattaagcacagaaaggagaggggcgcggggagagctcgcggggaagaacaaaacgagggacgctccccccggggcgggcactgacccaggtggcggggtcggccctccggtgccgcgatctcaagggggagggggagaccaaaaaataactcagatccgcccaggaggcggggatccgggcggcaggccggggcccgaggggccgtgggggccggactcccgcggccgc

SEQ ID NO: 83890 - DNA, 828 bp, Homo Sapiens
  misc_feature (34)..(34): n is a, c, g, or t
  misc_feature (224)..(224): n is a, c, g, or t
gtacacaccaagaactctccccagcacagctgtnttttaagactctccaccagcgtcattggcgtgttgggaagaaaccctctgccacagaggccaagcttcagcctttgcctaacaccgcaaggcaaatggaaaggtaaacgggaaggagatgtctccccagcaggctatttgaggacagtcttccctgcagaagatctcaacctggggtccacagagtgaanatgttagagtagggagctaggcaaacatgagcaggacaggtgagggcccccacaggaatgtcaggctaccatcaggtgatggtcaggtggttgttaaactgtctctgtaaaataataattggttgcagccagctccaagcaaggacagtctctcaatagatacaaaacaccctgatctggtgatcagccgcttcccgataagatctcaggagctgggcaagcagcctggagcatgcgcaccaagaggcaaaatggcggaatttaaccagtatatgacctaccttcctctgggaacgcacgactggtaaggggaaaaatgcctcaagtgagcatgcgcgcaacttcagtaatcacactgtgcatgcgaccccttccaagtgctggcaggtcaccacatacgcggacagcctgctgcaagggaagaatcaggggagatgagacgtaaatcccagaactatgccaaatacataaaaccccaagttaagggtcaggcagggcacttagatctctcaagttgcctgcctgatccaagtgtagtgtacttccttttgttcctgctctaaaactttttaataaactctcactcctgctctaaaacttgaaa

SEQ ID NO: 83891 - DNA, 553 bp, Homo Sapiens
  misc_feature (481)..(481): n is a, c, g, or t
  misc_feature (484)..(484): n is a, c, g, or t
ttggtagttctttccaaaactttatttagagaaactaaaatctcgtaattttcgtattatacaaaatattattttgagccattaacaaaagggaatataaaaaccatagtttgtaggccatacaaaaataggcagcaggccagatttggcccatgggtcggtagtttgctgacccctgctctagattaacaaaatttacgggctttggaagctttgtggggcaaggaggcttgatatacaggttggtggtgcagaacaaagaggaaatttctaagtataattagaaaaaagatgtaatgcttgtcctttcatgtatcaacgctggattcaactatgtgcaaaacattttatcatatgtcgctggaatcaaagatgcagaagtcacagtctctggtctcgaggagcatatacttctccatggtagcttagaaatggaaagtcttccttcaaagtacaatacatccttctcagactttgacanatnacccgtgcgtgctcatctgtgaggcaggtagtttctttggcaactacagctgaggccaaacatgcatta

SEQ ID NO: 83892 - DNA, 850 bp, Homo Sapiens
  misc_feature (56)..(56): n is a, c, g, or t
gttaaacagcaaaatgaccagctaataaaacaaaagaatgtatggttaagccatantccagcattcttcccaatggaggtcaaacctttggaaggaaagaacccttaaaagagaggctcacaaacaagtaacttgtgagaattctccaaagtctcctaaagtgactggaacagcttctaaaaagaaacaaattacaccctctcaatgcaaggaacggaatttacaagatcctgtgccaaaggaatcaccaaaatcttgtttttttgatagccgatcaaagtctttaccatcacctcatccagttcgctattttgataactcaagtttaggcctttgtccagaggtgcaaaatgcaggagcagagagtgtggattctcagccaggtccttggcacgcctcctcaggcaaggatgtgcctgagtgcaaaactcagtagactcctctttgtcacttctctggagatccagcattccttatttggaaatgactttgtttatgtgtctatccctggtaatgatgttgtagtgcagcttaatttcaattcagtctttactttgccactagagttgaaagataagggaacaggaaatgaatgcattgtggtaatttagaatggtgatagcaataccttcttcttgcatatggtaatacttttaaaagttgaattgttttatttatttgtatattttgtaaagaataaagttattgaaagaaatgtaaagttatccacatgacttagcatattccaaagcataatacatacattaatataaaacatcattttattaacaaaattgtaaatgtttttaataccttacacattcaataaatgtttagtagttctgaatca

SEQ ID NO: 83893 - DNA, 577 bp, Homo Sapiens
atgcccatgaagggccgcttccccatccgccgcaccctgcaatatctgagccaggggaacgtggtgttcaaggactccgtgaaggtcatgacagtgaattacaacacgcatggggagctgggcgagggcgccaggaagtttgtgtttttcaacatacctcagattcaatacaaaaacccttgggtgcagatcatgatgtttaagaacatgacgccgtcacccttcctgcgattctacttaggtgagtggggccctcgccatggtccaggggctgtcccagacatgcctggagagactgcgtccttcctatgggagcgtcaggatgagctgcagtgtgcgctgtcatggtgtgtctgtgactcctggcacctttggcttccccataccgaggcactcagcagccactgaggtctggactctttccctctccagcctcacctcttcttaccctctgcctcacaccatgggggtaatttttccaaagtcccttgtcacaccaggctgtgatgcctttgctcaagattgttcctggcctggaatcccatttctacctgcgtttgcttatttaaatgaaaaa

SEQ ID NO: 83894 - DNA, 947 bp, Homo Sapiens
  misc_feature (865)..(866): n is a, c, g, or t
  misc_feature (869)..(869): n is a, c, g, or t
  misc_feature (871)..(872): n is a, c, g, or t
  misc_feature (876)..(876): n is a, c, g, or t
  misc_feature (879)..(880): n is a, c, g, or t
  misc_feature (884)..(884): n is a, c, g, or t
  misc_feature (886)..(886): n is a, c, g, or t
  misc_feature (888)..(899): n is a, c, g, or t
  misc_feature (902)..(902): n is a, c, g, or t
  misc_feature (911)..(911): n is a, c, g, or t
  misc_feature (933)..(933): n is a, c, g, or t
ggcacgaggggcacgaggaagccgcgtgagatccgcgcgggtgctagctagtcctttctcgtcgctgctcggctcgcggcccgtggggtcggccccgccaccgttgccgccatgcccatgaagggccgcttccccatccgccgcaccctgcaatatctgagccaggggaacgtggtgttcaaggactccgtgaaggtcatgacagtgaattacaacacgcatggggagctgggcgagggcgccaggaagtttgtgtttttcaacatacctcagattcaatacaaaaacccttgggtgcagatcatgatgtttaagaacatgacgccgtcacccttcctgcgattctacttagattctggggagcaggtcctggtggatgtggagaccaagagcaataaggagatcatggagcacatcagaaaaatcttggggaagaatgaggaaaccctcagggaagaggaggaggagaaaaagcagctttctcacccagccaacttcggccctcgaaagtactgcctgcgggagtgcatctgtgaagtggaagggcaggtgccctgccccagcctggtgccattacccaaggagatgagggggaagtacaaagccgctctgaaagccgatgcccaggactaaggcccacggtcactgtgggctggggtgatggtgtctgaccagtggggagattggaatgggattactttggcccagggaagcccctggttctgtccctggagactctggaaatccttttgcattaaaaggactttacacacctgtgtaaaaggatgtgggagaggagggtctgaagctgagctgctaaatgaatatccctgctctgctggtcaataaaacgcttccctaatannaanannaaanacnnaaananannnnnnnnnnnnaanaaacaaccncccccaaaaaaacattccacanaccccgtgccctca

SEQ ID NO: 83895 - DNA, 449 bp, Homo Sapiens
  misc_feature (73)..(97): n is a, c, g, or t
  misc_feature (216)..(234): n is a, c, g, or t
cttctttttgagttccgcaacttgctcctgcctcccagccccactggcactgaccatgaccacctacttctannnnnnnnnnnnnnnnnnnnnnnnngatcacttactttcaaagcacacagtcaaacaaggttatgccaaatttccaggcctttttgaagtattgagaaggggaaggggatttctcacttcaattatagatcataataggaagcnnnnnnnnnnnnnnnnnnngcaaacatatgcacgcacttttcttgttgacaaagcaagaatgtaggtttgctgtgtaggtttggtgctctattgattggtgagtgaccagagcaagtatgaaggtgatgctgccaaagcacaagccagtttcttgggaaaattcaagttacagtggagtatttttttgaagaccatatgcttggaggtagaaacaaaccaacgaccaaaaaaaa

SEQ ID NO: 83896 - DNA, 985 bp, Homo Sapiens
  misc_feature (51)..(51): n is a, c, g, or t
  misc_feature (62)..(62): n is a, c, g, or t
  misc_feature (80)..(80): n is a, c, g, or t
  misc_feature (98)..(98): n is a, c, g, or t
  misc_feature (100)..(100): n is a, c, g, or t
  misc_feature (126)..(126): n is a, c, g, or t
  misc_feature (169)..(169): n is a, c, g, or t
  misc_feature (193)..(428): n is a, c, g, or t
  misc_feature (447)..(466): n is a, c, g, or t
tccaccctgcttccggtgaattacatagatgatttagaagatctgactggntaacagaaggntctaattcactattgcancaggcagccccagcatantngcagcaggaaatgatgtattgagtcntggttgccaaaacctgagcacatgtttcttgaaaacatgcacntcagggctggcgcgtggctcacannnnnnnnnnnnnnnnnnnnnnnnnnnnnnnnnnnnnnnnnnnnnnnnnnnnnnnnnnnnnnnnnnnnnnnnnnnnnnnnnnnnnnnnnnnnnnnnnnnnnnnnnnnnnnnnnnnnnnnnnnnnnnnnnnnnnnnnnnnnnnnnnnnnnnnnnnnnnnnnnnnnnnnnnnnnnnnnnnnnnnnnnnnnnnnnnnnnnnnnnnnnnnnnnnnnnnnnnnnnnnnnnnnnnnnnnnnnacagcaaaactccgtctcnnnnnnnnnnnnnnnnnnnntgccacctcacggtctctatcgttgggccctgtggttgcaaagctgcctcctgaattaagaaggaaagggaaaagatatagctggaagcgagtggaagagatgctgagggctggggctgcacagacgtgctcagcagggctacaggtgctcaagccctattggggatgggtggggagtggggcagcggcgtttgccaccttaagaattggggccaaagccactgatgtttatttgacagtgacactgcactgggtacttaaagaaattatttcccgttgtaattataattactgcttattaaggaaaatatgggaattttagaaagaatcaagtttgccacccaaatgctaccactgttaatcttttggtgttaaatgttccccctagacatttctgtgcatagatttttggtgtgtttacatagtcgttattctgtatatacaattttatgtcccttttgtacttaacgtataaacattttttccatgttacagtcttaaacagaattttatggctgc

SEQ ID NO: 83897 - DNA, 651 bp, Homo Sapiens
  misc_feature (557)..(557): n is a, c, g, or t
  misc_feature (563)..(563): n is a, c, g, or t
  misc_feature (582)..(582): n is a, c, g, or t
gcggccgctgcccgccttaatcgactgaagaagaaggagtacgtgatggggctggagagtcgagtccggggtctggcagccgagaaccaggagctgcgggccgagaatcgggagctgggcaaacgcgtacaggcactgcaggaggagagtcgctacctacgggcagtcttagccaacgagactggactggctcgcttgctgagccggctgagcggcgtgggactgcggctgaccacctcgctcttcagagactcgcccgccggtgaccacgactacgctctgccggtgggaaagcagaagcaggacctgctggaagaggacgactcggcgggaggagtctgtctccatgtggacaaggataaggtgtcggtggagttctgctcggcgtgcgcccggaaggcgtcgtcttctcttaaaatgtagggtcaagtaatctgctctttatccgcgtttaccctttcaactcccttacaccatgtcaaattacttagtgggacatttcaccggacacatttcagaggagagaaaaaaagtaatattgaacttaaagtgtttantaaaancatgaatgtgacacagtanccactcctaatgataacatgtgactattaaaccctctgacagttctttttaagggattcctcctccagc

SEQ ID NO: 83898 - DNA, 1207 bp, Homo Sapiens
  misc_feature (213)..(246): n is a, c, g, or t
tttaaaagatcaacaaacctggttttattatgacaccatatttttgtcattggtactgcacaaaattatatacaaagaaatatatacaaaatgttcaagtattagttaaatttcaattcaaggcttctgtttcaaaaaagctacatttaacatatttcataaagatagcacaaattagtcatttcaaataatctttccaactacttttggttnnnnnnnnnnnnnnnnnnnnnnnnnnnnnnnnnnattcagtaggcactaaaaacccatgcagctgcattgtgaggggcttgctcctgcccttaggtataagcaggttcatcactccaatttgtgagtttggctactacccattcatgctcaagtgcagtagtagatgattttacaaaatatgctgtgatgcactggaaaccaaagaccaattcaggtctcaaatcgtattatctagcaacaaaacatttacagttgtgcaagaacaaggattccattttcataaccaaataacaaaataaaacattttatgtgtaagataacttacatctttggactgctggaaaatactttttaattatgaacatgttaaaaataaaaaacagcagaagccctgatattacctctttttcctcatttcttatactaccttttaaaataaagcaggaaatgtggccagcagctggtcccgtctcttctgccccaacagctgtatccacaggttgtgaggcgggaacgactgttctgtaacccctacaacggagcctggcaggaaggaaatcacctaaaaaagaaaattttaagagaagacgacgccttccgggcgcacgccgagcagaactccaccgacaccttatccttgtccacatggagacagactcctcccgccgagtcgtcctcttccagcaggtcctgcttctgctttcccaccggcagagcgtagtcgtggtcaccggcgggcgagtctctgaagagcgaggtggtcagccgcagtcccacgccgctcagccggctcagcaagcgagccagtccagtctcgttggctaagactgcccgtaggtagcgactctcctcctgcagtgcctgtacgcgtttgcccagctcccgattctcggcccgcagctcctggttctcggctgccagaccccggactcgactctccagccccatcacgtactccttcttcttcagtcgattaaggcgggcagcggccgca

SEQ ID NO: 83899 - DNA, 1319 bp, Homo Sapiens
ggcaccaatggtgtgcagaagcggatgtctgtcatctgggacaaggctgtggccacagggacaatggacgaaaaccagttcgtggctgtgacaagcacaaacgctgccaagatcttcaacctgtatccccgcaagggaagaatatctgtgggttctgacagcgacctcgtcatctgggatccagatgctgtgaagatcgtctctgccaagaaccaccagtctgcggcagagtacaacatctttgaagggatggagctgcgcggggctcctctggttgtcatctgccagggcaagatcatgctggaagatggcaacctgcacgtgacccagggggctggccgcttcataccctgcagcccgttctccgactatgtctacaagcgcattaaagcacggaggaagatggcagacctgcatgccgtcccaaggggcatgtacgatgggcctgtgtttgacctgaccaccacccccaaaggtggcacccccgcaggctctgctcggggctctcctactcggccgaacccacctgtgaggaatcttcatcagtcgggatttagcctgtcaggcacccaagtggatgagggggttcgctcagccagcaagcgcatcgtggcgcccccaggcggccgttctaatatcacatctctgagttaagcaagccttcctcaaagagaggggcagaagcaagaagagattgttttgaagccaaaatggtacaccgatatttaagaaggaaagcgaatccaaacggttgtgatctaaagaatcaataagcctcaagccttatgtttctccaatgttacgctcgcttgcctagctttacgaatattgctttgttttctgtttatgcatagccttgatttgtttgactcccctccccccatttacatgcatgcaatcagacaggccactaaggtaaaagagtctgctctatcatagtgttgagagcgtgtgtagtgctgcatcttatgacaaggggacagacaagctgggacgtcagggaaatgaacaaaagggacgcaggttatttggggtgagtgggtggtgggagcctggagcaaggtggagggtgcagaggggctggggtagggcatgtaggagggaggtgggtgggtcaggtgagtggaaggggtgttgtatattgtgttgatgacgtacgttatttccatggaagatagccgctgtggcagctgtcacatcaccacagctccctagggtctgccgagaaggcaggcagtctttgggttctgttctttgtcacgtcccctacaagtaaattttgtttctttgaacgtttattaaaatgccaagacccaacc

SEQ ID NO: 83900 - DNA, 561 bp, Homo Sapiens
  misc_feature (166)..(189): n is a, c, g, or t
tgagccactgtgcccggccttcttctttcaagttatatagaatggagcatgggggtggcagtggctagggacatttcctggggacactctcccctaaccccccagaaggacttcacaaaaacctgtggataatggaagggatgttacggtacaaacgtatatttannnnnnnnnnnnnnnnnnnnnnnncgcgcgcgcgtgtgcacataggcgtgatgtctgtgaccctcctctcctcgtcacatttcccccagaatgaatgctgtcctgtctgctcatgtttgtgttgaagctgccaaagtcggggagctctggtcctgcccagacccctttggaattgctggcccatcctcccactggagagctggggtgcagctcaccttggggaaggaaacctcatgcctcagagtaatttcttgtgaatgcaaagcctgggggagcgggtctttggggggcaaggagccagtcaggggcttgtttcccctcatagagctccccagacgtgcctccgcaatgcctgaaacccagacctaggctaataaacggttcaatttctgaaaa

SEQ ID NO: 83901 - DNA, 346 bp, Homo Sapiens
tgagttattttcttgccctgggggtttacaaggacacgagtgcaacactctttatatggagaagacaggaaatagaccttgagctctaaacctttgcctgaccccctcttctgtgggcctgtgtttctggacaatggggaggtttacagccagtatgagcagagcagactgggagcacctcaatcctcatgcttatattagaaaatgccttagcaatgttgatgggctccttgtagcactggagcatggggagggaacaagctcactgatgtcatttatgcctattgtcttcagtaacttagaacttattatggtatattaaatcaataaaatgttggtgatgaac

SEQ ID NO: 83902 - DNA, 893 bp, Homo Sapiens
  misc_feature (66)..(66): n is a, c, g, or t
  misc_feature (613)..(613): n is a, c, g, or t
aaggaatgggatcccgaggtgcttgccaggaccgtagcaggcggaagctgctggcagcgcgaaacngggctcccgccggcgtgggtgggggaaggcggcagccacacccggaagtcggtccgggagggagggggaaatctgagggaacgaggcttccggtggcgcaaagggtgtcgggagcggcttcctgcaaaccttccctggcatctggagggaccaccgttgccgcgtcttcggcttccacgatctgcgttcgggctacgcggccacggggcagccactgcgactcccactgtgcctggctctgtccatattagttcccaggcggcgtcgccgttccagcagcggcagcggcagcggcagcggcggacatgttgtgaggcggcggcgcgggtgtctgaaggatggtttggccgaggcggcggaacggctgctggcggcggggcagcggcagcggggcctcgggctctatagagccgagcccgctgggtacccgcccggtaccgggcgaggccagtgcccctggatctgtgcctctgttccgacgccgttggggaccagttaggcgacaggcccgcccctctgaggagacaccgaaggtggttccccaagncggtcaaatttccggaaccaccgggctttcccctcctcaagccttggtctgtgctctctctagaatcctccgggtcccccaattttcttcccaaagtcatcctaaaatccctcacacagcgagtgttcccagcctcaaagccagtgctcctcggtcattttcgtgaccctcttcgaaagaccccccgggatcactctcggagggcgactttgtgagaaatctcgggggagtagtggaccagaagttggggaagtttttacaagccggggggcgaagaaag

SEQ ID NO: 83903 - DNA, 1025 bp, Homo Sapiens
  misc_feature (36)..(36): n is a, c, g, or t
  misc_feature (863)..(863): n is a, c, g, or t
ccaggcggccgtcgccgtatccagcagcggcacgcnagcgcagcggcggtacatgttgtgaggcggcggcgcgggtgtctgaaggatggtttggccgaggcgcggcaacggctgctggcggcggcggcacggcagcgggagcctcgggctctatagagcgagcccgctgggtacccgcccggtaccgcggcgaggccagtgcccctggatcttgcctctgctccgacgccgttggggaccagttaggcgacacgcccgcccctctgaggagacacgaaggtggttccccagccgctcaaatttccggaccaccgcgctttcccctcctcagcctgggctgtgctctctctagaatcctcgggcccccactttcttcccaaactcatcctaaatctctcacacacgcgagtgttcccagccctcaagccagctgctcctccgttcattttctgcaccctcttcgcaaagcaccccccgggatcactctccgagggcgactttttgagaaatctcggtggagtagtggaccagagctggggagtttttaaaagccggggcgcgagaaacaggaaggtactatggcttcctcgtctggcaacgatgatgatctcactatccccagagctgctatcaataaaatgatcaacagaggactcttcctaatgtccgggtggccaacgatgctcgagagctggtggtgaactgctgcactgaattcattcaccttcatatcttctgaagccaatgagatttgtaacaaatcggaaaagaagaccatctcaccagagcatgtcataccagcactgaaaagttggggattggctcttacatcagtgaagtaaaaaagtcttgcaagagtgtanaaccgtagccttaaaaagaaagaagggccagttctccttttggaaaaccctgggcatttcctgaaagaagaaggttttgggaaacccccccaacggaatttatttggccaaaaggcttaaaacagcaaccaaaggccgaaatttgggccccacaccgggaaa

SEQ ID NO: 83904 - DNA, 727 bp, Homo Sapiens
  misc_feature (669)..(681): n is a, c, g, or t
catctgccttctccagttcattctaaacactgctgggactagggtttttccatcaggagcaaatggaatccaggccttcccagaagtagaccatactgccttgaacttgtccatatgtacaaactgatcaccagctttctccatacatttttaatgcagacctgtaattgagttcagaagcctccaagaaaacagaaaggatcccctttctccagtttgtgctggaagaggagctgatcagagacatcaaataagagaaagatgggttgctagaggatggtagaactggaagcaaggcagctacctttttgcaaaaggaaatggtgttaggccccttttccagaagataagacagactcatagagattaaatgatcactatggtccttcttctgttaaatggagccaaagacgcctatgttgttctgaagtcttgtaatgtttaacttctgagaacttagattagtggtgtgatgatagagtctgtataacgcattgaaaagggtatcaggcttagttatttatccaataaatatttattgtatgcagggtattcctattttaactcctgtgacaacacaaagcatagcgatttccatagttctaactgttcagggtctgctcctcctggtacactctttttggttcactgtatgtactcctgttgtcnnnnnnnnnnnnnccaaagcacttttctgttttcataaattatatactcattcaaaaaa

SEQ ID NO: 83905 - DNA, 523 bp, Homo Sapiens
caaatggggctactagctattgtgttagatagcacggtatactttattctctttcttgtgttgtagaaccagctgggagaggtgtgggtcagtcatgggcttggtatcccctggtcttcactattctagcttgccattgaatttgtctcccagaggaaaagaaagaatggtatttggaattaaattcaagatgttaacttgacatctatatattgcacatattcctgtatagtgaatggatgacctcctgggaatagttcctgtgactgattttagtgataattgatcatgaagaaatggcagtactgctccacttcaccttcctagtgactattatgtgttcctagtcagagtgactcagcagagattattttgttctcttgtgcaatttattctgtgtcattttatttttgtaatattgtggcagctaaatgattattctgtgtatgtttttcaaaatattaggtggcttatattttttaaaaggctatgaaataaaaataaactatacgtaacacgagtt

SEQ ID NO: 83906 - DNA, 179 bp, Homo Sapiens
tttttttcaaatacatgagaaaacaatccaagaatcactgcaggaagaaatgatcatttaagctcaatcatgttcttttgccttttaatttcatttaagagattaatattagagtcataaaagctttacagtttcaacacacatacacacaatcacagaattaaaaatctttactcctt

SEQ ID NO: 83907 - DNA, 990 bp, Homo Sapiens
atacttaggtaaaatatgttcaacaatgggagcatttttgttggagttaataattatggaccatgttaatccaaaagtatccttggaatatttattatagtagtagacactgttcatcttactagcctagaacttattttaaaatagtttaagtaagtaagtccaagcttaatttgttattgacagaaaagtaatacagcctaatctaatctaagcaaaaatgtaagggaataaagtctacatgcatcaactgaacagccttagaatgaggaactgaatggatatattaatttccatggtaaacttgatactggttttcataatggacactaaggaaaataaagagccatatttatttttgggtcagaggcagtttattttaaatgtgatttcatttacatttataagcagcttttcttgacaggaattttgattaaattgccttcagttctaaaacaaacctctgttgctttcagacttaatgtgctctgtccccaacaaaacatatgaaaatataatttaaagcacagttttcacagacacagtacaatacattcactatacacagtataacaaaatattcccatccttacctgtttagtaatactgtcacaatgaataagtaaatagaaattggaatttatctttgaaagcattgaaagaaatttaacatgcacaatgactattttatgactgtttagctgttgaactactgatccagcctgcagtttcttgcactagaaagagcgaagctaaataataattgctggcctaaaaaattttttttggtcaattgtaggtagatatgaaatagccaagtggggccttcttatgcaccaactagttgcgtctcatgtctggatcacccttttaaacataggataacactgtatattcaggaccaagaccatacttcagatctgaggaaatttttagagggcagtgtttttataaatactttgaatcgctcataatgaaggatttcctcgt

SEQ ID NO: 83908 - DNA, 472 bp, Homo Sapiens
aaggttgccagtcaggacattttgaaggagtatttctacaatgcaaagaaaaatctgtgcccttgggggaagagtgttggtctttggggcaatgtggaggtgtcttcctttcctgtactgacaagctgaacagacgcaccttgttggttcgacccatcagcaagcaggaccctttcagtaattgctctggcttctttccttctacaactacaaaacttctagatggcactcatcagcagcatggattcctctctctgacatacacaaaagctgtaacaaaaaatgtccgccacaagttaacatcaagaaatgagcgaagaagttttcataagttatctgaaggcctaatggatggttctcctcattttcttcatgaaattcttctttcagcacaagcttttgatattgttctttattttcctttacttaatgccattgcaagtatatttcaagcaaaactaccaaagaccca

SEQ ID NO: 83909 - DNA, 475 bp, Homo Sapiens
atgcaggggttctcttctgtgtcttgtaaccatgaaacagcagaagaactaacataactaactacatttttatttaaggggcctttacctattcctgcacctaggctaggataactttagagcactgacataaaacgcaaaaacaggaatcatgccgtttgcaaaactaactctgggattaaaggggaagcatgtaaacagctaactgtttttgttaaagatttataggaatgaggaggtttggctattgtcacatgacagactgttagccaaggacaaagaagttctgcaaacctcccctggacccttgctggtgtccagatgtctgcggttgtcagccccttcctttcccccgacctaaacataaaagacaaggcaaagcccgcataattttaagatggttctttaggacattagtccaccatcttcttggtttgctggctctccgaaataaagtccctttccttgctccaaa

SEQ ID NO: 83910 - DNA, 504 bp, Homo Sapiens
agacccggtgctgcgttatgtagctcaggaccttggctgggcctggtcgtcatgtaggtcaggaccttggctggacctggaggccctgcccagccctgctctgcccagcccagcaggggctccaggccttggctggccccacatcgccttttcctccccgacacctccgtgcacttgtgtccgaggagcgaggagcccctcgggccctgggtggcctctgggccctttctcctgtctccgccactccctctggcggcgctggccgtggctctgtctctctgaggtgggtcgggcgccctctgcccgccccctcccacaccagccaggctggtctcctctagcctgtttgttgtggggtgggggtatattttgtaaccactgggcccccagcccctcttttgcgaccccttgtcctgacctgttctcggcaccttaaattattagaccccggggcagtcaggtgctccggacacccgaaggcaataaaacaggagccgtgaaaaa

SEQ ID NO: 83911 - DNA, 794 bp, Homo Sapiens
  misc_feature (584)..(589): n is a, c, g, or t
  misc_feature (591)..(591): n is a, c, g, or t
  misc_feature (638)..(638): n is a, c, g, or t
  misc_feature (640)..(640): n is a, c, g, or t
ggcactggggagaagctcggagagctgtataagagctttatcaagaactatcctgtggtctccatcgaagacccctttgaccaggatgactgggccacttggacctccttcctctcgggggtgaacatccagattgtgggggatgacttgacagtcaccaaccccaagaggattgcacaggccgttgagaagaaggcctgcaactgtctgctgctgaaggtcaaccagatcggctcggtgaccgaatcgatccaggcgtgcaaactggctcagtctaatggctggggggtgatggtgagccaccgctctggggagactgaggacacattcattgctgaccttgtggtggggctctgcacaggacagatcaagactggcgccccctgccgctcggagcgtctggccaaatacaaccaactcatgaggatcgaggaggctcttggggacaaggcaatctttgctggacgcaagttccgtaacccgaaggccaagtgagaagctggaggctccaggactccactggacagaccccaggccttccagacctgcttcctgaaataaacactggtgcccacccaggaagnnnnnnanaccgcacggcgcgcccaggggttcctaccgcaaacgcgaaggaaaantntcttggtcggcccgcctcgggccctcaaaaaagcttttctagaaccttccctttggggccgcgggccccccgtagggaaagggaaccttgggccataactgtgtttcccaaagaaaaacctgggccctgacataagggttgggattcttccccc

SEQ ID NO: 83912 - DNA, 516 bp, Homo Sapiens
  misc_feature (74)..(74): n is a, c, g, or t
  misc_feature (143)..(143): n is a, c, g, or t
  misc_feature (147)..(147): n is a, c, g, or t
  misc_feature (154)..(154): n is a, c, g, or t
  misc_feature (170)..(170): n is a, c, g, or t
tgccctctaaggcctttctttaacacacactgactttttgaagaatgatctttagattgataacttgctatttnatggtgactctgtggttaggcttatttaccgttaatctaaagtattcataaagcaccatttattaatcnaccnctttggngatcttccaaaccaancacgtataccaaaaatgtcttcaaaaatgttatggctttgtttgtaattcgggtatattaaaatgttgttttgaaatacagtttatcttaaagaaaatttgacagtaactatattaaggggtacattaagtaatatatttttaattaatggtgtaccattgagagaataagaaatggaagtctattgttttattctttaaatgtgctgtttaaatatatttccatatgttaaaatatattaaacagatgctaatttctgctgttcttgatttggttctttatttaaaaggaatacaaaatgtaagtatatcataaattgagacaataagaatatttatcaaatgta

SEQ ID NO: 83913 - DNA, 680 bp, Homo Sapiens
  misc_feature (35)..(35): n is a, c, g, or t
ggagattcctaggagtagaattgctgggctgtgtngtaacttccaggcctccttaaagctttagcctggactgggtagagcatggtttccactgcattctcttagtcacagtgagttgcaggttcaccccagcgtcagtggcgggcgggaagtggggaaaacacaaggacctgagtgtccaagggggcttcatggagccctcatgtgaagtccccagcatggaccctgacacatcgtaggtcctcaacaaatgtcactccctgttgtcactctgtttagtactaagaataatgatataaaactgggacagtaaggaaaacacaaactgttgggacctatatctgaatctattagtctgcctaatagaaaagccaccatcaggattttggagattacaagctcactttagattagccatactggagtcagccctggaggctcccagagatcagaacaatcccagcgcttgacaggatggctgggaaacaatacatatgaatgccggaaaatgcagaactaatctaggaaaaagtgtaagaagaaaataaacatcatctgtcattctatctatcagagataactgctgtcaatattttggtttccttccaatattttttctattcactctgtgcataagtatgtatattttaataaaagtataattaagatcacaatgtaaa

SEQ ID NO: 83914 - DNA, 1293 bp, Homo Sapiens
agcccataacaagatctaacaaatttaatgattaacttgtaaaagacactacattaacagaagaccactggaaaagataaaagtggggagagtgggatacaacttatacacatgtactcattgacaattactctcaggtagaattttttctacaaaaatggtgatttatttaacatacaatggtagatatattggggatcatcaaatttttaaaaatttttgttgggcttactttacatattacaatactaacgtaagcttataaactcttccatttcagtgaaggaaagggatccaattaacacctgctagcagcttggctaagaacggacattaaaatcagacaaaacactgaaaatataaagtacttttctccaaatgtgtatacaaagttttggaacaaaatcactgcctgctccacaggacagacaatttgaatttcaaaaatgctccaggccgggaattgcataaccctgtgtaacaatacttataatacagcttaacaatattgtatcgaagactttttcatttgagatttttaaaaaactgaagtaaaagaaaaacagtagccaaggaactgcacaaccaaaaaatgaaaattatataaaatatttccaccactatttaaatgccaaatttaatcaagcaatagtgaaaaaacaaaacaacataataatacaaccttctgtttaaaataacagcactgttccacctctcttccactgaattttacatatgaacagactatatatactggttttttagagaaatgtccatttggtctgccacacctatcgggctcatcctaaatcctctcattgtcttcagaggacttgcaactccatgctgtttctgtatttccagccttccggggtaggtgcaatgtctcaagtataatacatttctcccttttcctttacacagtgcagagtatatgggcttaggttatgtagattctgtttcactccaggtcactgtctttctctaaattcaaggcggtattcaacggagtgcagtagtttggcttgtcagaaggcacgtagcctggcagacacaaacacttgtaggaaccatcggtgttaatgcacttggcattcttgcagagagacatccggttgttcaactcatcgcattcatttacatcgacacaggtcatcttggccgtatccaagtgatacccatcaaagcaatcgcaggtgtaaccttcctggaccctcacacagcgaccattttcacatccattgaggatgccgcattcctcagcctgtaactcctcaaagctatttagaaaac

SEQ ID NO: 83915 - DNA, 701 bp, Homo Sapiens
tctgcttcatccctcggtaccggttccagagcaatcacatggatatggtgagaatagaatcaccagagggaaatttcttgacatccaaaaacatcctggaatatccctcagcctgggtgagggtgatgttcggcaggaggccttgtccacaggtatagaagacagaactgaacttcaagcctgatggtgctctggcaacagaaagaggacacgagggagtaaagtccaaattcacagtccactgtcaatcccaagagggacaaatgagctggacaggaacagggaggaaagacagagggggacttgatctcatcttcatgccaggccttgggtttgacaaacatggcaaccgactggggaggggcaagggctactatgatgcctatctgaagcgctgtttgcagcatcaggaagtgaagccctacaccctggcgttggctttcaaagaacagatttgcctccaggtcccagtgaatgaaaacgacatgaaggtagatgaagtcctttacgaagactcgtcagcagcttaaatctggattactacagccaaataatcagtgttttatatgagagtaaagcaaagtatgtgtatttttcccttgtcaaaaattagttgaaattgttcattaatgtgaatacagactgcattttaaaattgtaattatgaaataccttatataaaaccatctttaaaaaccaaa

SEQ ID NO: 83916 - DNA, 885 bp, Homo Sapiens
ggggagggcgggactggactcggcttgggcgtgagatggcggcggcagcggtgagcagcgccaagcggagcctgcggggagagctgaagcagcgtctgcgggcgatgagtgccgaggagcggctacgccagtcccgcgtactgagccagaaggtgattgcccacagtgagtatcaaaagtccaaaagaatttccatctttctgagcatgcaagatgaaattgagacagaagagatcatcaaggacattttccaacgaggcaaaatctgcttcatccctcggtaccggttccagagcaatcacatggatatggtgagaatagaatcaccagaggaaatttctttacttcccaaaacatcctggaatatccctcagcctggtgagggtgatgttcgggaggaggccttgtccacagggggacttgatctcatcttcatgccaggccttgggtttgacaaacatggcaaccgactggggaggggcaagggctactatgatgcctatctgaagcgctgtttgcagcatcaggaagtgaagccctacaccctggcgttggctttcaaagaacagatttgcctccaggtcccagtgaatgaaaacgacatgaaggtagatgaagtcctttacgaagactcgtcaacagcttaaatctggattactacagccaaataatcagtgttttatatgagagtaaagcaaagtatgtgtatttttcccttgtcaaaaattagttgaaattgttcattaatgtgaatacagactgcattttaaaattgtaattatgaaataccttatataaaaccatctttaaaaaccaatagaagtgtgaatagtagaatattaattaaaatggaggctatcagcctgtgattttcagcttaaaaaa

SEQ ID NO: 83917 - DNA, 1180 bp, Homo Sapiens
  misc_feature (51)..(51): n is a, c, g, or t
  misc_feature (61)..(91): n is a, c, g, or t
  misc_feature (721)..(740): n is a, c, g, or t
gcagccgctgctacacatactcacaacgctgccgccgcgctccgtgggcanctcctactannnnnnnnnnnnnnnnnnnnnnnnnnnnnnncgcggagctcgcctgcacagatcagctccggagaggggaaaaccacgctcctcggaccaagcctcgggagctaagccagatctgccagtgagcctcaggctttaggaactgaagagtgtttctgaaagatctatccagcactccgatggccagcaacaacaccgccagcatagcacaagccaggaagctggtagagcagcttaagatggaagccaatatcgacaggataaaggtgtccaaggcagctgcagatttgatggcctactgtgaagcacatgccaaggaagaccccctcctgacccctgttccggcttcagaaaacccgtttagggagaagaagtttttctgtgccatcctttaagtctttgagaggggcctgaagagcctccgggctcctgggacattgatgtagagtttttagtgaagtgggcacctttctagtccacggcatttgaagagagcgaggagaaccattctggaaactctaggctatgcatgtttaaagatctggtcccctttatgagaatgcaagccgatccacatcctgacttaagagatctgattctgacgaactgcctggaggaggggaatatataaaaataaaattggtgtcacttcttttctgctatnnnnnnnnnnnnnnnnnnnnaaaatcctcatgtttctgcttcatattttgaaaaataacaattaaaacagacagctgtactgaggtaagatatgtgtgaccttcttggaatgaatattgtctttagaataccctttgataagctgagctgtcccgtgtagatgcaattcggtttaatggcattgatgtatagtcactgtgcctttctttttctttcttccttctcctctacccctccttccacccctccccattagagtagtgtggagataaggctggactggtctatcagattgaactccaagaatgatcacacaaaatgtttagggagatgttccccgtggtgtatcctcatggtaacaacgacaaaaaatgccggttgtctgtgttctcttttcactattcctaacatgtgtacatgatagctttgattctgcaagtaaaagtaaatcctgtgttgt

SEQ ID NO: 83918 - DNA, 180 bp, Homo Sapiens
ccctggatacatttgaagctttgagtgttcaaggttttccttaatgatttcacgcagccaaattcttgaatcagttgaactaacctgtatgttactgttattaatgtttactctgcagtctgaacctggagattactggaattgttttccaagaggaaataaattcagtttaccattaaa

SEQ ID NO: 83919 - DNA, 736 bp, Homo Sapiens
tggcataaacctggctcttggttccccgcaccatgaatacatttgtaaaatcagccaatgactttatggggctggccagaaagcagccttttctttaaaatatctgctagtgttgctgttcatcaaacagtgtttgatgaacaagtgttttatgagtcttcctcccttgtttctattacatctttgaaaagctggtcattagcagcttctttgactttacaaataaactacattaaagaagaagaaaacaaaacaaaatacattatgctccaaatctccacagatcatccatgatcattcaagaaacttaatccagatattctgaagaacaaataggaattcattggtctattttaagttatggtccaaagtagaaaggaagctgaccaacttaccatgttatctttgaatggacctccccactctaaaatcaatcaaggaaaaagtaaagaccagtgtctggtattgcatttctcccaagaaagcagaatttcatcctgagataaacaaaaaaaggatctttcctttgacattggtcacgatacagataaaatcctaaataaacacttgcctgtgagttactgaagctcccttaagttttactgtcctgatggctacatgtatgtgatgacccatatccctcacagacataataatcatatgggggaaaaaaatgatgtttacctctgtaaataaacaggttgtagtcttaataaacttggagcattttctttta

SEQ ID NO: 83920 - DNA, 286 bp, Homo Sapiens
aaccacatccaggaagaggagaaacctgtctcatgacaggaaacgaagagggaggatgcatccgaactgagggacattgtttcagttgcctcacctgacatactgtctcacctgagagagggaggccgaagaggcagccaatggtggctggagcaagccctgtcctcgttacctgggctgtggctgagccctggggctcaccggctgtatggccctgggcaagtcctcggagccttaggttctctgcaaaatggagatgatgtttaatagaaaatgtttctataaa

SEQ ID NO: 83921 - DNA, 1521 bp, Homo Sapiens
  misc_feature (1111)..(1296): n is a, c, g, or t
ccaatagatatgacaatttatggagaacttccagaagaaaaagaggacagtgctccagtgaaagtggaagaacaaaggaagatgagtcaggatagtgtccatcacacctcaggggataagagcactgattatgctaatttttaccagggattgtgggattgtactggagctttttctgatgagttgtcatttaagcgtggtgatgtgatttacattcttagcaaggaatacaatagatatggctggtgggtaggagaaatgaagggagccattggcttggtgcctaaagcctacataatggagatgtatgatatttgagagtcctggaaaaggaaaattcttctgcttgtctgcaaatgctttggatttagaagcgtcatgaaagcacgagtgacagctcctaacctctccttgttttattaaacattacttatctttgactgttattttatgcagtcgctcattaaaatattcctctgatgtgaaattaaatgaaggatattaatgtaaattagatgcaaccagttaagttatacctgttgctattttgcaaagaaataattatagtttttatttacccatttgatttgtgtgaagaattcatcactattttatacgtaacatatagtctactatagcatagtatgctactattgctacttctggtgtgatttgtaatgtttcttaatcattggacatcaattatttttagagagtaatgtataatttcatagcattttaaatttagtgtatcatgcgagttttttttggtagatgctgaagaatgtggttgctaaacaaagaatgctaaagaatgttcaaactttatagataactttattggtattatttattttcacacatttaattcctattaagtacagccgcaagaaagaaaaaatgatgaagttgcaaatggcagtgtgctgtcacctgcaacagaagtgcgtaccagaagtatgactcatgcaaagcattttaccgtacaaatatcctggtgcgatgatgggcctggcaacattttctactgtacttttgtttaaatttaatgaaacaaaaaattcctaagaaataccaccctaccactaacaaaatggtataaagaatctcnnnnnnnnnnnnnnnnnnnnnnnnnnnnnnnnnnnnnnnnnnnnnnnnnnnnnnnnnnnnnnnnnnnnnnnnnnnnnnnnnnnnnnnnnnnnnnnnnnnnnnnnnnnnnnnnnnnnnnnnnnnnnnnnnnnnnnnnnnnnnnnnnnnnnnnnnnnnnnnnnnnnnnnnnnnnnnnnnnnnnnnnnnacaaagggggcgctcaaaaattccctgagaggccagcttacgacccagcttcgtaccgggcctagcgaccataccacagacagaccgctaacacgggcaggccgcccggacctgcccgcaccccgggccaagggcacccaaaatatccgacaaacgcaccaacgcacacgaggagcgcgaaacacacaaaaaacgcgagagacaacccgacagcagcgacaacca

SEQ ID NO: 83922 - DNA, 2404 bp, Homo Sapiens
  misc_feature (1780)..(1854): n is a, c, g, or t
tggaccggtccggaattcccgggatggggcgtccaccggagtcctgccagctgtccggcgctggggtggacgtctgatttatgaagctccccatccacctatctgagtacctgacttctcaggactgacacctacagcatcaggtacacagcttctcctagcatgacttcgatctgatcagcaaacaagaaaatttgtctcccgtagttctggggcgtgttcaccacctacaaccacagagctgtcatggctgccatctctacttccatccctgtaatttcacagccccagttcacagccatgaatgaaccacagtgcttctacaacgagtccattgccttcttttataaccgaagtggaaagcatcttgccacagaatggaacacagtcagcaagctggtgatgggacttggaatcactgtttgtatcttcatcatgttggccaacctattggtcatggtggcaatctatgtcaaccgccgcttccattttcctatttattacctaatggctaatctggctgctgcagacttctttgctgggttggcctacttctatctcatgttcaacacaggacccaatactcggagactgactgttagcacatggctccttcgtcagggcctcattgacaccagcctgacggcatctgtggccaacttactggctattgcaatcgagaggcacattacggttttccgcatgcagctccacacacggatgagcaaccggcgggtagtggtggtcattgtggtcatctggactatggccatcgttatgggtgctatacccagtgtgggctggaactgtatctgtgatattgaaaattgttccaacatggcacccctctacagtgactcttacttagtcttctgggccattttcaacttggtgacctttgtggtaatggtggttctctatgctcacatctttggctatgttcgccagaggactatgagaatgtctcggcatagttctggaccccggcggaatcgggataccatgatgagtcttctgaagactgtggtcattgtgcttggggcctttatcatctgctggactcctggattggttttgttacttctagacgtgtgctgtccacagtgcgacgtgctggcctatgagaaattcttccttctccttgctgaattcaactctgccatgaaccccatcatttactcctaccgcgacaaagaaatgagcgccacctttaggcagatcctctgctgccagcgcagtgagaaccccaccggccccacagaaggctcagaccgctcggcttcctccctcaaccacaccatcttggctggagttcacagcaatgaccactctgtggtttagaacggaaactgagatgaggaaccagccgtcctctcttggaggataaacagcctccccctacccaattgccagggcaaggtggggtgtgagagaggagaaaagtcaactcatgtacttaaacactaaccaatgacagtatttgttcctggaccccacaagacttgatatatattgaaaattagcttatgtgacaaccctcatcttgatccccatcccttctgaaagtaggaagttggagctcttgcaatggaattcaagaacagactctggagtgtccgatttagactacactaactagacttttaaaagattttgtgtggtttggtgcaagtcagaataaattctggctagttgaatccacaacttcatttatatacaggcttcccttttttatttttaaaggatacgtttcacttaataaacacgtttatgcctatcnnnnnnnnnnnnnnnnnnnnnnnnnnnnnnnnnnnnnnnnnnnnnnnnnnnnnnnnnnnnnnnnnnnnnnnnnnngagagaggaggggcgcgcgcccacaaattctccccccgcgaggaggagcccccacgacacggcacccccccgttttttgtcaacgaaggggcgccccctaagagagggagcgacgtatattaaataagcgcccgagagacgcgaggcggcgccgcggcgatataaccacaacgcgggggagcgagggagagaaaacaatgcgccagacgggagcatcctcgtgaggagaagaggcgccaccaaacaagggggggaggagcgaaaaatcaggtgggagcgaccaaccactccctctcccaccgagacgacgaatttattatacatacgcagccctcccgcgaggaaggaagcgaaacatcacaaagcgatccctatacgcacgaggagtgctactaacaggtgggtggttgtccccaccaccagccgtcgaaggcaatttataactactggccgggcgcgtcgaaaagaaaaactatcgtcgctgccacacgcgacggttagtacatcatcaccatgcagcaaccaccttttattcaccagcgcgggggga

SEQ ID NO: 83923 - DNA, 1096 bp, Homo Sapiens
  misc_feature (73)..(73): n is a, c, g, or t
caggccacagtccgcctctttaatcttggactggaggatatacagatcgagagggtgggagagtggccccagnaagaggcctacggagggatagaggggccggttcaggaccaccaggggctctgggaaagggggttagggatgaggctcagcctctcatctgcccagctggtccccgccacctcttccactctcagctggactcccctgccaggggtccagatcctgccagagtagttggtcccccagccatgtccggcctggacacaggactcatggtggggccagacttcagctctgggcagagcagtgtcttagtagcctgcggcctccccactcttcctcaggtccgagacggcgtacacacaggccccctcctgggacacagcctgggaccacgttcaggaagaagggcctctgggtctggttctggccacggtcttggagtcccctctgcacctcctggctgaagttgggctcgtacgtccactacagtcccttgtctgttgacatgcaggcatgggggctgcaatggccgctctcaggtcaaagccaagccacagcttgctcatgatggcctgggcctacagcagagatgatgagctccccgccagccccgtccaatcactagcttcgacccctgggctttgtagatcaagatggagggcaccattggaggatggggaacgctcgccttggaactgggggcctagcaccttccgggagctccagccgaacctgatcgtccactccacaggtgagggggtggtcgccgggaaccccgggggcatccctcgcgtaagtccagggagctcggagcttgacgatgatgcctgtccgtggtgcattacaccatcggctcctgacggtgtgttggatggtgccccgtggccgcccgtcgcgctgcggtccgtgcccagcatcagatacatgggacatgcctgtacccgtggccccaggcatcagcaaagcagtagtggataactgactgcccccggaccatggacctgttgaccgatgagcgggaaggtcaacacaaaaggaccggagaggctctagacctcggaagatagaagtccccagccaagattccata

SEQ ID NO: 83924 - DNA, 703 bp, Homo Sapiens
  misc_feature (23)..(23): n is a, c, g, or t
acaagatgagaagggctgggctngcagggtcaagagccccaattacgtacaagacactttgggaggaaagaagactaccttttcttttccccctgccactggtatagctggtgccccaaaactttcacctccctccctggccacctctaaaatgattggcataggggcttccccaccccttagctcccctatcctgggctagaaggccacagggactgtcctctagaattcttcctcccctcccccacaccattcattcaattcgtgaaacaaatcttcaccgagagcagtttatgtgctaggaacatcattctatccttgcaacctggaacaagaccagctaccaccttagcttcatcccctacttgcaccaaccagtcccgggttagatctcaaatgccggaagtcagggatgcccaactctgggcagccccagtcagaacctctgggatctcagtgaagctggcctggcctctgctcttgctctcaaggggctgcttttcaaccaagagccttgtgagcctggtctgagccttgcacagccactgagtattttttattccttagccagtgtacctcctacctcagagtctatgtgagaggaagagaatgtgtgtccctgtgggtctctgcaagtgacagatgtgttgtttttaacagtattattaggttatgattaaagcctcatgaaatcctccaaaaa

SEQ ID NO: 83925 - DNA, 471 bp, Homo Sapiens
  misc_feature (353)..(353): n is a, c, g, or t
  misc_feature (383)..(383): n is a, c, g, or t
agggcaccaggggtttctcgcataggacctttccaccacagccagcacctggcatcgcaccattctgactcggtttctccaaactgaagcagcctctccccaggtccagctctggaggggagggggatccgactgctttggacctaaatggcctcatgtggctggaagatcctgcgggtggggcttggggctcacacacctgtagcacttactggtaggaccaagcatcttgggggggtggccgctgagtggcaggggacaggagtccactttgtttcgtggggaggtctaatctagatatcgacttgtttttgcacatgtttcctctagttctttgttcatagcccaagtangaccttgttacttctgaaggtaagttaacntaagttgattcggtatccccccaatcttgctttccctaaatctatggtccgggagaaagcatcaagggtaaggggctcccggggtacc

SEQ ID NO: 83926 - DNA, 945 bp, Homo Sapiens
  misc_feature (81)..(115): n is a, c, g, or t
  misc_feature (208)..(208): n is a, c, g, or t
  misc_feature (770)..(770): n is a, c, g, or t
aaagaatgtatagatcactatagggcgcactctttgagccgaacgacgagcgcagcgagtattgagcgaggaagcggccgnnnnnnnnnnnnnnnnnnnnnnnnnnnnnnnnnnncagtcgacggtaccggacatatgcccgggaattcggccattacggccgggatgaaactacaacttacatgattaacttggcaatgtcagactntgctttttgtttttactttacccttcaggattttttacttcacaacacggaattggccatttggagatttactttgtaagatttctgtgatgctgttttataccaacatgtacggaagcattctgttcttaacctgtattagtgtagatcgatttctggcaattgtctacccatttaagtcaaagactctaagaaccaaaagaaatgcaaagattgtttgcactggcgtgtggttaactgtgatcggaggaagtgcacccgccgtttttgttcagtctacccactctcagggtaacaatgcctcagaagcctgctttgaaaattttccagaagccacatggaaaacatatctctcaaggattgtaattttcatcgaaatagtgggattttttattcctctaattttaaatgtaacttgttctagtatggtggctaaaaacttttaccaaacctgttacattaagtagaagcaaaataaacaaaactaaggttttaaaaatgattttcgtacatttgatcatattctgtttctgtttttgttccttacaatatcaatcttatnttatattctcttgtgagaacacaaacatttgttacttgctcagtagtggcagcagtaagggacaatgtacccaatcactctctggtattgctgtttccaacctgtggttttgagccctatagtttacctactttaccatccggacaccaattccagaattcattaaaattggaca

SEQ ID NO: 83927 - DNA, 1167 bp, Homo Sapiens
gcgtctatgtgggcgtggccgtggccctcatcgcctacctctccaagaacaaccacctgtgagcttcctgcgaatggagggggagcacctggggccaggtctgtgtggacgtggaggaagcaggcataccgcatgatgctgtacagtacaaatgattgccaaatgatgccacgaagccctgggatttcctacccatgggattaattttgtttgtatcacttaaatgtcaggttcacagcactgtgtagagcacctagacagacgggcactgcctaatcccttccgaaaggaaagcttccaaaggatcccagcccgcaaggctgtctctggatggattctggtggatgaatggcaacgcggctctctgcagcctgccagtgcccaggagtgccaccgcattagcaatatacatacagtcctaaaaaagtgtttattttttatggaatacggtgcaataggcagaggacaagggacacatcactcttctgtctgtggcccttgctggagtcctttgtgccccccggagtccacacgccttccctgcaagacgagaatcggggctgggaagaaagaggcaacaccacggctggcaggagccccgctgcactgctctgcagacccattggcctgaccctgagaagcagagccagcaaagcccgggacctgcccctctttctgttcccttcacaccaccccagcctcaggatgtcaagccacctccggaacgtgtctacactccacagctaccccgcagcaatacgcactcttgggacctcgctgatctaggatggggaggcaggccaccgcccctcccaagactcctcaagaaagagccccgcggttgctccggaaactcgaggcactgcagctatgggcactgcctcagcctaaagacacaggggcgcctcccaatcaccgcgctggcggatgctcaccccgtcataagcagaaactagtgatcctggaaatgagatgggccttactctgtcgactaaatgaatagctattttcttgtcattttttaaagtgcaactcttgcttcatgctgcttaagttaccagatgaatgctgagaaataagtaatcacaaacactttggtaccatttcattgctgttttacgagtgttcattacttaacaaaaaattatcttttagctttttcgctta

SEQ ID NO: 83928 - DNA, 581 bp, Homo Sapiens
  misc_feature (518)..(518): n is a, c, g, or t
aaatataaagaaggcaaatacatcattgaactagcacacatgatcaaggacaatggctgggactgattggacagcatctacccaacccagtgtccacgtgaacgccattcaaccgaacattcttcccaagcgtgagagagtgactgacacttggttccatccatttaggggccttgccatccggggcatcctcccaccctgacgccatctttctggtgaccggcctctaaatcgctgtctctctgtctctttgctttgtatctgtttgtgagttgatcctggcttctctctctgttctagttttgggctgaaaacaaaacaacaaaaggaacagatccttgaccgcatggcggcagcccaccttggtaagagccccagggcccatgcgagagctgcctgatggcctcttgtcaggagagcagtggcacgggggcgtgaagaagagggaaaggggaaactctaagggtcctggcgcggggaaggggtggaagggtggaggtaggaacaaaattgcgccngctcctggagacctgataacttaggcttgaaataattgacttgtctaaaaggacaaagagaaa

SEQ ID NO: 83929 - DNA, 951 bp, Homo Sapiens
  misc_feature (768)..(780): n is a, c, g, or t
  misc_feature (836)..(870): n is a, c, g, or t
gtgtatttctccttctgtccccttctcgatgaaatggctttgcaacagttccctccttacgttgtttggttttgtcctagaagtttcagggacatatgaatttcgttcctataaatgtgaaaatattaaaattggttcccaatcctttggaactaataactaattcttagttcatccccaaaaaccatacattctaaaatgaacttttaactagttactttctaacaccggacaggaagctcacagtagcatctgagccaacggtgctctcccgtaggcttataaaccacagtgaagcaggaatgaaaaggaaactgacctgtggagttttaaactacctggaaacttttcattctatttatcagtccttaaaaggaatttatatcatgacaatctcacacaattcttcaaattacacagtgacctcataaaaattccaacttgaagttttaaaaaaccacctcttcatacacttattcggtagttcttgaaaatcaagggttatagcttacatttcctaaggattcagtcatagcagataaaggatgttctctgaaaaaaatgccatggccattccatcccaggctgtgttttaagaagataagaataacatggtttcatgtcacagcaaaaggttttcgggtctgctacatggacatttttttgactaaataaatacggtggctaaaatccagtttgcagatctcatgtcatgcatggaaggtatgtgtttggcataggggattcatataagaaaaacacagttgnnnnnnnnnnnnncagagcccggccgtaatggccgaattcccgggcatatgtccggtaccgtcgactgnnnnnnnnnnnnnnnnnnnnnnnnnnnnnnnnnnncggccgcttcctcgcttcactagactcgctgcgctcggtcgttcggctcgcgaagctagcgccctatagtgatcgatcgca

SEQ ID NO: 83930 - DNA, 680 bp, Homo Sapiens
gcgagtgaaaaaggaaagtagaaggcagctgctggcctagatgttggtttgggaatattaggtgatcctgttgagattctggatccagagcaatttctttagcttttgactttgccaaagtgtagatagcctttatccagcagtattttaagtggggaatgcaacgtgaggccaactgaacaattccccccgtggctgcccagatagtcacagtcaaggttggagagtctccttccagccagtgacctacccaaaccttttgttctgtaaaactgctctggaaataccgggaagcccagttttctcacgtggtttctagcttcttcagactcagcccaaattaggaagtgcagaagcacatgatggtgaaaaacctaggatttggcagccttccagaatggtatggaatctgagggaagatttatgtttcgttttggaggatagctcaagttgaattttctttccagccagttaccctttcaacctacccatactttgtacaactcttacacaaatacttagatatttattagatagccctgaattcactctaattataaacagggagtgtaaactgcccccagatgttcctgggctgggtaaaagcagctggagtgaagcactcattttccataaaggtaacaaagggcagctcagtggttactcaagctcaaaagggt

SEQ ID NO: 83931 - DNA, 582 bp, Homo Sapiens
atgcaagtcagaaagcaagctcacaatcacatgaccacaaagagacaacagtcagagacagttcatgagatggctaccaattataatgaaaaaccaagaggaagttaaaagggggcttcagaactttcactccactaaaaaagaatgtgctgaaatcacttccaactcagtatacacagacttaaccaatgctttaagtatttgtgtaagagttgtacaaagtatgggtaggttgaaagggtaactggctggaaagaaaattcaacttgagctatcctccaaaacgaaacataaatcttccctcagattccataccattctggaaggctgccaaatcctaggtttttcaccatcatgtgcttctgcacttcctaatttgggctgagtctgaagaagctagaaaccacgtgagaaaactgggcttcccggtatttccagagcagttttacagaacaaaaggtttgggtaggtcactggctggaaggagactctccaaccttgactgtgactatctgggcagccacggggggaattgttcagttggcctcacgttgcattccccacttaaaatactgctggata

SEQ ID NO: 83932 - DNA, 704 bp, Homo Sapiens
gtttatttgcctccagttattccaaaatgcttattaaatgaaaggcccaggaacatgtttattttagtcacctttgctttttaacaattttgttttgtaatcaatgagtaattcatgatgaattatttttgactaatggatagccgaaggccaagcttttaattctaataggtaatgttcttcttttgtcttattgaaacaatgagaatactctgtgcatttcaaatgcactccgattatgctgtggttttattcacataagcacaatatgtgttttatttataacttcataacaaacttataatataataatttaccttagcagacatgcaaaagcttattcttgtgtgacttactttctttaagctaataatataaaaataaatatgtatcttaaaaatctataataaaacattagaaattaaagatatgtgctttttattttgcagatgagttcatttgcttctgtagatgtgttttcagagctaggtacagaggaatgtttgctacctttagcggtgaaaaaagaaagagagtcaagaattttgttggattgtgtttgtgtgtgcatatatttgatatcatcatcatatttgtaatctttggacttgtaatcatagcctgtttattctactgtgccattaaatatactttaccttatacataacgaataaaatacctagatgtagatttatttacaaaaa

SEQ ID NO: 83933 - DNA, 444 bp, Homo Sapiens
agttttagaaacatttactaacttgcctgggtcacatagctaaggaagaggtggacttgcccagctttgcataaaactcctcaaaagagttgcctatactccctgactccacttatcttcctactatcctctttttaaaatatattatttatttatttaaataagcaatatatgaatgtggtttgaaattcaaaagacacaaagaagtatacagaggaaagcctcactctcaatccttctcaaggtttgctaattcctcttgcataggcaatccgttcttccagctttgtgtttatctttccagagaagtttactgtgtattaagcaaatatgtatatctttattcttgctcagtattttcgcaaacagcagctgtctaagttcactgttctgaactttattttttaaattaaaaatatatggctatgtagtattctattttaa

SEQ ID NO: 83934 - DNA, 1351 bp, Homo Sapiens
  misc_feature (478)..(478): n is a, c, g, or t
cagggaggagagtaaataagtctagtgatgagagagcaagaggaaaaagggccgcagcgttgtgatttgcttccatcgcgactggtgtgatgatcatgctccacagccgattgtgaccgccccgtcttacgaccatgtagtcgtctgtgtcatgcttggtctctgcctccttctcccccatgtttgctgtgcatcgtcgtcatgcgttgcttgctttgctcacgttcttccgactactcgttgggtgacacgcgaccgattcatctgtctgtttcactctgctgctgtgctgttttcatccacctgtgtcgtgtggggttcatcatctcccctgagcccctcctgttcggtgtctgttttcttgtgcatcagctttacttctcttgtttctactcagtgcgccggttcgtgtaccctctcttcaggttccctctggtttcacgtttatgctcccagtgttccttgggacttgggtccnagtgaacgtgtatcgctgtgtggcctccctgagcgcatgttggccctcttcttgcctcctggtagcccttctgctccattgggcaagtgcaacatcaggtctgacatacagtgggctagcactctaattttgatgtggactcagcccactcagtacctaggtctcaggctggcagcttatccctagctcagccaattgcttcttgagaatcgtctctagcttgatttcatgtcatttgagcccagggatctacccacttactgaaatctaaattttaaaaaatcagtgatgaaagtaattttcaggatttccctatttaaaagcatccatgaaacagttcctttatgccttctgtttaggatttccagaattaggaagggaaaccaggcttgtgccttggatccaaaagcagcaaaaatactacacttgccaaaagcaaactgaggaatgagcattggccagtcctagtatgaagtcaagaggtggacttttgttaagttagcccttaccatttagtgcttactgaatgccaacaatgcacttagaaaaataagggagacaagaatttacagaccataccctaaactggaaggtacaggaaagacacatctcctagagctgggaatgtgtccctaacatttcaagaagaagcagaaagtaggagagatcacgatctcagtctttttaggattccaacacaaaatggaagggagccctctgtggggtgatattacaaagggtttttcttgtctttctttagaaaaaaaaggcattccttactggcttgctaccagcaattgaactgtattctttatatagctagagctgtttgtgtcttcttaaaataaactttttctgttaaaatcataaaaa

SEQ ID NO: 83935 - DNA, 789 bp, Homo Sapiens
  misc_feature (35)..(35): n is a, c, g, or t
  misc_feature (78)..(86): n is a, c, g, or t
cttttgccagtttagaattcttatgcgtttcaagnctctatatagaaagtaattttacttttgatttttctcttgttnnnnnnnnnctcctttattctaagaacaatgtctcaaagtctcatttttactttaaaggtataagagacttctaaagagacttacgggatataaaagtaattcctggaaatgatatttgatgaggagaatgtaagagaatgaaaaacacattgatgttttcatttttaaaaaatacaactagcatgagaaatcaagaaaatatgtttaccaaaatgcattgcaattttcccaaacctgagtcttcaaataacaaacatgaacttataggtactgtgaactagaagaattggttatatccagatttctgggagataaattaaaacatatttttgtggcataaataagctgattcagaagttacatttcttaactttaggtagaggagaatatttgtatccttttgttgctatgcaactgtttaatgatgaagcttcaaaccacaattttgtatatcatatgacaatcaattgttttccaagaatatttattattttaagtacacaatttcagtgaatcttgagtttttctaggagtcccttaaagggaaattagcattccatgagccagtaaaatacctactctggtaaaacattattatggttaaaaagtaaattcaagttagttttttataaagaactataacatttattttaaacattttataataactgaaaacattaaagtgagcaaatgaaatttcaacaaaaaaaa

SEQ ID NO: 83936 - DNA, 433 bp, Homo Sapiens
catatatgtgtaacccgagcatttgtggacaacctgtctccagctgcatgaagcgaaacgtttggactccggccactgcttgcatggcgaaatattgggcatctgagttacaaaatagtgtagcttacgactgtgtacagctccatggaggttggggatacatgtgggagtacccaattgcaaaagcttatgtggatgccagagttcagccaatctatggtggtacaaatgaaataatgaaggagctgattgcaagagagattgtctttgacaagtagacatctgcccacatcctggagtcctattacagctaatctcgttttaaatctgctcaagataaaatgtaacttggaaagcgaggaaacactaaacatgtttttacctgctctctctatagagaaggaaataaaatataaatataagattaacacaa

SEQ ID NO: 83937 - DNA, 1954 bp, Homo Sapiens
  misc_feature (1219)..(1258): n is a, c, g, or t
  misc_feature (1262)..(1337): n is a, c, g, or t
cgcatggacactatgaacagtggttcaaaaaagcaggctggtacggtcggaatcccgggatatcgtcgacccacgcgtcgctggcagagaaagtttcctcgttgtaagtatttgcatctacttcaagccagattcttctgcctctttctcctttccagacccctactctgtgcagtgctgaccacagctagagccaccgccccattgctcaaccagtatttatttccctaaacgacccttcctcacattcccttccctccacctctccttaccaagcacccaaaagaggatttagaactagcagggtggacatcatctggttgtttctacttttctctgcctagcacaaaattgggagaaaactggagcctccatccgcagtcacacgtgtacagatctggggatttggatgtaggctttttctaacttctctctcagaagcttctacagaaacccttccatctgtagcctcaagggcccacctccaagggaaggcttaggcaatgatcctgtttctaccaacactgcaccttatcccaggaacctgccctagacctccagagaccatattttctctccctccatttctacccagacctccaggcctccttctggaatcatagaaccgtagcaattggaaggaattttagaggttttctagttggagttgtgtccaacagaattcattaacaccagcctgggcttgtttttcctcctccctctggacttttttcatcttttcctccacctcaaaaaatacttacacacagattcttcttgtacaggcatcaaaaccaactcctctgcccctaaggctgtgtccctgtggtctccagccacccctaccccagtcactcgccccttcctcatctctggaatttggccaggcagtcccagaagactctggagtgacctcctttgcctaaaaagcagacagataggcatgccccaggccctgagtgagcagaggaggactgtagggtgagagggaaagaaaatgaaggtgactttcatggaagtttcatttcttttccccgattgtaccaactgcatgtacttttggcctggctgcaaggagcaatattggtttactctcgtatccttaaaaagttacagaactgtgtcttaagagaattatttatagttactataactgaattgacaaatgtcaacttaactgataaattatatttggtaaaataaagaggacgtttatttnnnnnnnnnnnnnnnnnnnnnnnnnnnnnnnnnnnnnnnncacnnnnnnnnnnnnnnnnnnnnnnnnnnnnnnnnnnnnnnnnnnnnnnnnnnnnnnnnnnnnnnnnnnnnnnnnnnnnaatatggaggagtcggtctacaaataagacccagggcaagtgaggcgcgcccgtataaaaaaccatactggtaacggggcaaaacactggcacggccgtgggaacacatcgggcaaagcacaccccacccaccagggagggggaaccatcgttggggcaccacctccctcagcagaagaatcaacccccctagggcgcacactatacaccaccttcacgggtacatgcgtgctaacaacggcccaattgcgctggcggcgagacaaactcgggcacacgcccgaacgcgattgggagacattcttattccgcgcgagcccgagcgatgacaagcccgccccccgtcctaccgcccctagggcacactacaacgacacacgcagcagtgacacgaagagcaatcgccacacacgcgcgcgacacaccctcacacgcacacccgaatgtacacagcccaaggcacgcaacgagagccagcacgtcgactggccacacactccacccacgcagccacagcggccgaacaccgctgcacagcgagccacatagactaccatacaactgtacgcgtgcacgcactacgcacagaggctcccagccagtgaccaggacgaacg

SEQ ID NO: 83938 - DNA, 884 bp, Homo Sapiens
  misc_feature (568)..(568): n is a, c, g, or t
gggaaattgacgaacacgtgacgcggtcgggcggaccactgcagactgagcggtggaccgaattgggaccgctggcttataagcgatcatgtttctccagtattacctcaacgagcagggagatcgagtctatacgctgaagaaatttgacccgatgggacaacagacctgctcagcccatcctgctcggttctccccagatgacaaatactctcgacaccgaatcaccatcaagaaacgcttcaaggtgctcatgacccagcaaccgcgccctgtcctctgagggtcccttaaactgatgtcttttctgccacctgttacccctcggagactccgtaaccaaactcttcggactgtgagccctgatgcctttttgccagccatactctttggcatccagtctctcgtggcgattgattatgcttgtgtgaggcaatcatggtggcatcacccataaagggaacacatttgacttttttttctcatattttaaattactacaagattattaaagataaaatgatttgaaaaactcttggggaacccgcaaacaagaaggcgcccgaantagcttgtcgggccgcctcggcccctcaagaagcttttctagaaccattcgttttggcccggcgggcccctgtaggtgaagggaacatgggccttagcttgttttcctagggaaacccctgggccatgaactagtggcttggggattctcacgcaaataaaagaaaagcccccggggtgggaaccccggagcggtttctggaaacaaaatcccagaatggggagacttcttgaaggggcccctctcacggtggatccctctcccccccggggaggagtccccaagccgcgacctctccccattttctcacaatttt

SEQ ID NO: 83939 - DNA, 478 bp, Homo Sapiens
  misc_feature (71)..(71): n is a, c, g, or t
aggctctgagttaggtgggccagccggtatcctggtatctcctcctcaggttttaatattaacccatctgncggacacttttgccatgtaaactaacattcactggttccagggattaaggaatgaacctcttttgttggggaagggtggcattctgctgaccacagcactccaaccaaaagccaaaaaccaaagcaagacttactaacgcatatcaaataaattaaaggtacaaaatcgtgaatctcagttatcttaaatattccaatactatttacaaaattattcaaattctcacgccttccaactcaaaattagcaatctaaagtaatttccatatcctagatggaaaccctcatgctaaactgtctgattatgcatggttctaaatggtttcagtggcaaatacataacattgtactactgattaaactgaacttaaaagcatcaataccaccattgctgcacttaaaaaaaa

SEQ ID NO: 83940 - DNA, 1045 bp, Homo Sapiens
  misc_feature (878)..(887): n is a, c, g, or t
tggaccggtccggaattcccgggatgttgccgagcgcgccccgtccctcgcgcgcgatgctcccctggacggcgctcggcctggccctgagcttgcggctggcgctggcgcggagcggcgcggagcgcggtccaccagcatcagccccccgaggggacctgatgttcctgctggacagctcagccagcgtctctcactacgagttctcccgggttcgggagtttgtggggcagctggtggctccactgcccctgggcaccggggccctgcgtgccagtctggtgcacgtgggcagtcggccatacaccgagttccccttcggccagcacagctcgggtgaggctgcccaggatgcggtgcgtgcttctgcccagcgcatgggtgacacccacactggcctggcgctggtctatgccaaggaacagctgtttgctgaagcatcaggtgcccggccaggggtgcccaaagtgctggtgtgggtgacagatggcggctccagcgaccctgtgggcccccccatgcaggagctcaaggacctgggcgtcaccgtgttcattgtcagcaccggccgaggcaacttcctggagctgtcagccgctgcctcagcccctgccgagaagcacctgcactttgtggacgtggatgacctgcacatcattgtccaagagctgaggggctccattctcgacgcgatgcggccgctctagagatccctcgaggggcccaagcttacgcgtacccagctttcttggacaaagtggcccctataagtgaggcgtaattataaagctagggactgggccgtccgttttacaccgtccttgactgggaaaactggctagctttgggaacttttgggaagggaaccttactttctnnnnnnnnnnacattaaatgggacaaacttccctaccgaagattttaagccttctaagggaaaataataaaaatttttttaaggggaaaaatgggggtaaaactaaaccggcaaaatgccttggcccggccttgaaaaggtttttgccttcacctgggaacaagtgga

SEQ ID NO: 83941 - DNA, 457 bp, Homo Sapiens
cagcagcaaacctaagtgtgtgctcatttctgtgggcccttactctgtgacactgcagctctccagagagacgctttgaaaacaaaacaggaaagaacacacggccccgcgtctgttgcctgagtcactgtattccttaaaaggtgaaggaccctggtccttggcttttcgtgcacatgagaaaatgttggccaaggttagcgattatgcttctgtaatctgtaaccagaagtgctcttatgcccaaaccttgatgtgattctgctgtaatgtaacttcggagccagctggatggatgtgactgtgcaggtcctgagccccggcccccgtaaccaagcagtgggccgagacactgagccgggcagtcaaacaggagctctctaaggctgctcccgggctgggacctgggtctaggattctcagtaagacctttgaataaaactaacttgaattcttc

SEQ ID NO: 83942 - DNA, 187 bp, Homo Sapiens
tctaagggctcaggaaccagtttggacttgattttgaatcccagttcatccccttcctagctgtatgaccttgattgtgtgccttaaccgctctgtgacacagtctacctgtctgcaaaatgggaaacataatacctgccatcaggattgttgaggagtaaataaatggaaattggtggaaaaaaaa

SEQ ID NO: 83943 - DNA, 984 bp, Homo Sapiens
ttgtttacagatgtagttcttgttagaggatgccgctagctcctgcccggggtccctatgcccagtccccgttactcttagagaaaggagttggggtgagggccagagctggcagtggaaacttgttctctttttcactgacactgtcacagcggatgacagactttctacggggaggagggggggatcatcaggaagcccagaacactaacaagcggttctcccatctaccgtcagtccacatggcaggtctgctgtgtccacaccacagatgaccacatctaatcctgcttctactctcagctttaggacaaaagctctgtcagaggcacaagctgaaggtcaaaaatgatttaaaacattttacctcagactaatttctttaaaggattcaggttcaaaacttaaccactgcttatttcagtgcactgtttcaactaacacccatgctatttttgtagtcagaaacagctatgcaaaccctacctaatttacagtctgagccagcatgctggcttgtctactgcatcctcgggacagtcacctgccactgagtggccactgtccttcctaaatgtcaagaagtgaagtatgtcaacctttcagggcaaattcaggcaattactgaaataggagggtggcaagaacagttctatcctgggtgccttacgaataaaaaactggattctggtttacagcagctttacagtgatagttaaatcaactgggggctagagggaagagcaaagcaaacgaggggaagaaggactccctaggcccatgcaagtaacatgctgcagcaacaagggctggcatggtgcccgaccaagacatcctagcgggcatataaacaatcccagaaggatgggcagcacggcatccttcgagagaggcatcagcggcacgcaggggaaaccggagccagagtaacggagaccagcgccgtagaaggcacaaacaagagagcagagaaccgggacatac

SEQ ID NO: 83944 - DNA, 454 bp, Homo Sapiens
  misc_feature (15)..(15): n is a, c, g, or t
  misc_feature (34)..(34): n is a, c, g, or t
agaaatgggctggangaggaatcttttcttttgngagacccccagttatttctactgtgctttattgccactggtctttattgtgaatggtggaacattttaaaaatgttttgccatagctttttaggacttggtgttaaaggagccagtggtctctctgggtgggtactataatgagttattgtgacccacagctgtgtgggaccacatcacttgttaataacacaacctttaaagtaacccatcttccaggggggttccttcatgttgccactcctttttaaggacaaactcaggcaaggagcatgtttttttgttatttacaaaatctagcagactgtgggtatccatattttaattgtcgggtgacacatgttcttggtaactaaactcaaatatgtcttttctcatatatgttgctgatggttttaataaatgtcaaagttctcctgtt

SEQ ID NO: 83945 - DNA, 507 bp, Homo Sapiens
ggaggtaactccactccatcccgtgtgctcccttctcaggagtaggccactaaacaaagactactaggaagaatcactgaggggcgactcccgcaggttagcgctatctcgggcaccccgcagggagagaggatacggctgccccgcgaaaacactctctggcacccgtgcttccaggacaggccctgaggcctctcccggggaagcagttacacctgttctccggggctcccctgaagaccccaaaaacacccaacacctgcctccccaggaaagacgctctgggcccgatctatgccgcccggccgccgggcctgagtgaagcctgtccagcctaggaggggccctcagaacctcccggtccaagcctctcacttcgtccaccctgcggagaagggcgagccccgcacccttcccgtggcccggccgcaccgccctgtgcccgtggtggcggccacacaggccagcctggcgagtactcacggcgacgctctccgcgccggccgc

SEQ ID NO: 83946 - DNA, 1182 bp, Homo Sapiens
cacccaacacccctaagtagcgaggcctgggtggcgaattcggcacgaggcccgggccgctcgtcccgtcggctgcggccgcgcgcggcccggggtcgccgtgagtactcgccaggctggcctgtgtggccgccaccacgggcacagggcggtgcggccgggccacgggaagggtgcggggctcgccccgtctccgcaggggtggacgaagtgagaggcttggaccgggaggttctgagggcccctcctaggctggacaggcttcactcaggcccggcggccgggcggcatagatcgggcccagagcgtctttcctggggagcaacagaaaccaagcagcaacagcccttggaaagaggctaaatttttcttgacttctgcagcaacaaagaccgtgaaaagttggcacttctggcctaacgctgccgtcatcctacccctcaccccagggcaacccaggctggacatttagtgcctccctctttattcctctgtgatcatccagatcagcacttgactgtttattttcaaatctcacgaacctcaccccaagatcttcacattctggatctcagctgctcttgaaggacagtgacttgttaccaccgcaacagcagagcctgccatccccaacagatcaccagttgtccctgacatcgtgccctaccttgtctccctttgtggtctcctaaatgcccatctcgttggccttggttcggctagtggtatggaggggtgctgcctagcactgacctgagagtgtgtgtgacccactgacccaatggacatcaaaggccagttctggaatgatgacgactcggagggagataatgaatcagaggaatttctctatggcgttcagggggaactgtgcagctgacctgtatcgacacccacagcttgatgcagacattgaaaccctggaaggagatctacagtgagaactctgtatccatcagagaatatggaactatcgatgacgtggacattgacctcacatcacatcagcttctcgatgaggagtctctacagctgaaggtcctcggacagactatgtgtgagctgcgattctctctcagtactaatgacagacatcatgaggttcagcatcatagagatggctgtctcatgaagactgtagtatcacagactcacagatctaacacgaaagcatgtagatgc

SEQ ID NO: 83947 - DNA, 352 bp, Homo Sapiens
ccgcccaccgcagggtgaactgcagcgagtacttcccgctgttcctcgccacgctctgggtcgccggcatcttctttcatgaaggggcggcggccctgtgcggcctggtctacctgttcgcgcgccctctggctgctggtggcgctggctgcgctcggcctgctcgcccacttcctcccggccgcgctgcgcgccgcgctcctcggacggctccggacgctgctgccgtgggcctgagaccaaggcccccgggccgacggagccgggaaagaagagccggagcctccagctgccccggggaggggcgctcgcttccgcatcctagtctctatcattaaagttctagtgaccg

SEQ ID NO: 83948 - DNA, 1296 bp, Homo Sapiens
  misc_feature (619)..(733): n is a, c, g, or t
ccccagctcgccttcacacacagcccgtgccaccacaccgacggtaccatgaaggacgaggtagctctactggctgctgtcaccctcctgggagtcctgctgcaagcctacttctccctgcaggtgatctcggcgcgcagggccttccgcgtgtcgccgccgctcaccaccggcccacccgagttcgagcgcgtctaccgagcccaggtgaactgcagcgagtacttcccgctgttcctcgccacgctctgggtcgccggcatcttctttcatgaaggggcggcggccctgtgcggcctggtctacctgttcgcgcgcctccgctacttccagggctacgcgcgctccgcgcagctcaggctggcaccgctgtacgcgagcgcgcgcgccctctggctgctggtggcgctggctgcgctcggcctgctcgcccacttcctcccggccgcgctgcgcgccgcgctcctcggacggctccggacgctgctgccgtgggcctgagaccaaggcccccgggccgacggagccgggaaagaagagccggagcctccagctgccccggggaggggcgctcgcttccgcatcctagtctctatcattaaagttctagtgaccgagnnnnnnnnnnnnnnnnnnnnnnnnnnnnnnnnnnnnnnnnnnnnnnnnnnnnnnnnnnnnnnnnnnnnnnnnnnnnnnnnnnnnnnnnnnnnnnnnnnnnnnnnnnnnnnnnnnncaaggggcggggcgcgcgcgccagtggaaggctccccccgggaggcccaccggagaagacggtaatagacgcccttgcttgtttcgagagatcatgacggcgagactcctggctacagtcgtaggttaccattgaaaatggaaaaccagggagggagcgagaaccccagataaagatcatcgcaaagactgagtccatagtaataatagtcactcccgtgcagcaaccttgtgccacaagaagtgcacgtatctttggatttgaaacgtgggctggaccgagaaggagttaccagcgtggcctgcaacttagttaaggtcccgagcaattatttgcacaaatatgcgcggacaagagagttggcccccccattaatttggtcgaaccagtaagagtgaaggaaacaacagttgagcgaggagcgatagagctaggccccccattgccttaggtggcccgctcgcgagggggcgaagcgagagcgtacaaggtagagattggctcaccggtgagaccgtagtctttcccgatggacgaaaacccattgggtgtattaccagcgg

SEQ ID NO: 83949 - DNA, 668 bp, Homo Sapiens
tgcggccgccaactttttaatatgcaatactcaattgtaaataaccattctctttactgaatcagatgtttcattaactgttagcagttatttcgagttatttatatatcacagaattttgaactaaagatcatctagctgaatttcctttatattaaagaagaggagaaaatcttaatactaagtatgtgtgagcctggagctgccatggagcatgtagagagagtctcctagttgataccaactcaggaaagcagaatcaagcaataaagagacattttgggcctgatgacatcatttcagcacctggatccagcgatgcctaaagatgtgactcctagacttttcacttacatgagccaaaacggttcctttgcatcaataaatcgctctgtgatgcattttataatgtacaaccaagaatctcaatatttattattttgcattaaatatcagtaagtttgatataaaaagctcagtaaaattcattaatttgagaatgtgtctatatcatagtaaagttttaaacctacataattttcaatatttataccttttactgcaaaaataaaaatgagtttatccttgccctaaagctgtaaaattaaactctgtacaattctagttatttgaaatataaaataaaattattggtcatttcatgtaaa

SEQ ID NO: 83950 - DNA, 1086 bp, Homo Sapiens
  misc_feature (1009)..(1026): n is a, c, g, or t
acattcaacactaacctacctgatgcggagattttaaagatgacaaagccaccatttgtaatggagaagtggattgtaggaatagcaaaaagtcagactgtggagtgcactgtcacatatgagagtgatgttagaactccaaaaagcactaaacatgtccatttgattcagtggagtagaacaaaacctcaggatgaagtgaaagcagtccaacttgccattcagacattattcaccaattcagatggcaaccctggaagcaggtccgactcaagtgctgattgccagtggttagatactctgaggatgcggcagattgcatccaacacttctttacagcgttcccagagcaatcctattctggggtcaccgttcttctcacactttgatggccaggattcctacgctgctgctgtgagacggccccaggtgcccattaagtatcaacagattacacctgtgaaccagtccagaagctcgtctcctactcagtatggactgaccaaaaacttctcttccctacatctcaactctagggacagtggcttttccagtggcaatactgacacctcttcagagaggggtcgatactcagacagaagcaggaacaaatatggacgtggtagtatatcactcaattcttctcctagaggaagatacagtggaaagagtcagcattccactccttcaagaggaagataccctggaaagttctacagggtttctcagtcagcactcaatcctcaccagtcgcctgacttcaagagaagccccagggacctccaccaacccaacaccataccagggatgcctttgcaccctgagactgactcaagagccagtgaagaggacagcaaagtcagcgaagggggctggacaaaagtggaataccggaaaaagccccacaggccatctcccgccaaaaccaataaagagagagccagaggggaccaccgtggatggagaaacttttgatgaattgaactacatagcttttctaagcaggttnnnnnnnnnnnnnnnnnngaccgcgtatgcggccgcaagcttattcccttgtagtgagggttaattttagcttggcac

SEQ ID NO: 83951 - DNA, 748 bp, Homo Sapiens
  misc_feature (180)..(180): n is a, c, g, or t
gctttctggcctttctctgtggaatatgcatgagcagccccatcagccaccactattatgacaactcttaacccttttctgggcttccagcccatgcccgaggaatttctccaactctggtatcttcataaaatcggtgcactgagaatgcagctggacccatgtgaagatacctcactncagcccacttcctaggaacaatggaagaagaaaggactgaaccagggtatttttgttaggttttctatgtgactccaagagggaatggtcaagttgtttcatgagtttgcatgggcccttggaaaaacaggaaaggagcaatgaagatccaagcaaaactttactttcagcgttggcttggaggacaaataagaaatgaaacatcctatgaaatactttatagcacatggcagatttgcaactagtaaaatgctggtgaaatgctgttggtaaagcacatggttcaaatctagaagatgcagttcaaaaacaagacagactcgagttgttagggctgaggaaccaatcaaggtagaacaaagaaaatgttggggtaaaagtgttgctgattgtcaacacaaactggcttaataatattaataagaacctgtcttattaagactggctttagaaccgtaggtttttttaaaaaattattatttatttttgccctctttggggaagtgggtgggtagatttaaaaaatcccttcctgagtaataaagatacaaaatgttactgctgaaaa

SEQ ID NO: 83952 - DNA, 855 bp, Homo Sapiens
  misc_feature (610)..(610): n is a, c, g, or t
  misc_feature (613)..(613): n is a, c, g, or t
  misc_feature (617)..(617): n is a, c, g, or t
acagctgttgaattgacagaaaaattgctcagcttttcagcatttccccttgccagatcagccagatttacaagcaggggccaacaggaattcatgtgctcatcagtgatgagatgatacagaactttcaggaagaagcatgttttattctggacacaatgaaagcagaaaccaatgatagctatcatatcatactgaagtaggagtgcggcgtttcgtgcccagtggctgctccttccttcacctctgaaaacggccctcttgaagggggatatgaatggagatttgaaggtctgcaagaacctgactcgtctgactgtgtgtggaggagtccaggccatggaggcagaatcctggccctctgtgttggcccaagctcttgtggtacacacagattactgcccaatatgcagttctgcagctgttttagttaaatttctggaccttgttgttgttaaatatcagtagaaactctacataatttagagtgtatgtagggcataatgatgatgggaattgtgtgatgtttaacaggaagatcttaaattttgtgatatggagccctgtaatttttttcttatataaaaatgggtatctatatttcaaaaanaanaaantaaagaagggaattgtccgtggtgggccgccctcgggccctccaaaaagctttctaaaaccattccgtttgggggcggggggccccgtagggaaagtggaaattgggccaaaggttgtttccccaaggaaaaacccggcgccaagaaacaaggggtttggaattcccccccacataaaaaaacgcccgcggggggaaaccgcaggggttttttgagaaaaaatcccgagaggggggcc

SEQ ID NO: 83953 - DNA, 1144 bp, Homo Sapiens
  misc_feature (112)..(112): n is a, c, g, or t
  misc_feature (1102)..(1104): n is a, c, g, or t
gtccttatgagtatatttatgtgtcacacacacatgtacacactcaatgctggacgggagggaggttgagacggacaggacaggaggaggcacccaggtggcactggcacangggaggagaggggacacagcgagtgtgtggccccactttggccccccaccgcctcccaacaggaggtggacctggagctggaagaacaggaaatgcttattctcttagaggacagtttcaaagtgcagaaatttctcttaataaaaatcctcttccctttccacgctctgccccttgctgaagcccagccccctgcgccaggctgtccgtgaggctggggcaggacaaggtcaaggggaagggcgtaaggccaaagcactggaagggcccagaccacatgggcctaggcatagtggctgccgggcgtcagggggtggtcccctctgtggtccagctggtcctgtaagcgggcaaactccgccagctcgttgagctcctggaactgtcggtcagtcttatggctaaccagtgagcggtagaagtggacggcgaagacgataaagatcaggccgaagggcaccatgatggtggtcgaggcgatggcagctgcctggcccggggtgatgccgctggtgctgacgttggctgctgcgccactggcggggggcttgctggtgggccttggctggcctggctgcttcttgaggggcaagaacttgacccagcagagcagcaccacctcagctaggaagagcagcgtgccgatgacggtggagaaggcccaggccagctcgatgtggcggtgcatgcgctcatggggggactccttgaccgagttgagattgtgcacgttgctcaccgcctcgatgttgggcaggatgcaggtgctgatcatgagcgcaaacaggtgcacagccaccagcactgtggtgcaggcactgaaggcgatgagcagccccggtgggtagtcgtggtcagcgtccagctgcacctccaccattgccaccatggcgaagccggagagcagagccgaggtccggctggaggctttaagcttggcgcggctcaagtagagcttgcgccaggacagcgcctgcatggagtgctcgnnnaggctcatcacctcggagtaactctggccgatccagtccg

SEQ ID NO: 83954 - DNA, 576 bp, Homo Sapiens
  misc_feature (30)..(30): n is a, c, g, or t
  misc_feature (37)..(37): n is a, c, g, or t
  misc_feature (43)..(43): n is a, c, g, or t
  misc_feature (64)..(64): n is a, c, g, or t
  misc_feature (70)..(70): n is a, c, g, or t
  misc_feature (99)..(99): n is a, c, g, or t
  misc_feature (136)..(136): n is a, c, g, or t
  misc_feature (147)..(147): n is a, c, g, or t
agatccagctgcaggttagggcctttgaanaatctgnaaatgntctcccaaaagttgatcccanaccatncatccacgaagaacttgggcttccatctnctctcaagagcttgcaaccccaagaacaaagctgaanatgcctcagtnaactttggatgctgatcctactcaaatgggaggcctgagtatgctgctgttagctggagacatgctcttggcacaccagaggtatcctctggcacatgcaggcctgatgtttcagaatctcctgaattacgtcagaagtcaccattgtttcagtttgccgagatatcttcaagtacgtcccactctgatgcttctacaaagcagtgtcaaacatctgccttgtttcagtttgcagagatttcttcaaacacttcgcagttgggtggtgctgagcctgtaaaacgctgtggaaagtctgcactctttcaactggcagagatgtgcctggcatcagaagggatgaaaatggaagaatcaaagctaataaaagcaaaagaatccgatggtggaagaattaaagaattaaagaagggttgagctggaaaaaaa

SEQ ID NO: 83955 - DNA, 461 bp, Homo Sapiens
  misc_feature (85)..(141): n is a, c, g, or t
tttcaactggcagagatgtgcctggcatcagaagggatgaaaatggaagaatcaaagctaataaaagcaaaagaatccgatggtnnnnnnnnnnnnnnnnnnnnnnnnnnnnnnnnnnnnnnnnnnnnnnnnnnnnnnnnnacagatgaaactaggttacagaaggaagcagaatttgaaaaatcggctaaggaaaatttaagagattctaaggaattgagaaattttgaggcattgcaaatagatgacataatggctataaaaatggaagatcccaaagaaattagaaaggaagagttagaagaagatcacaaatgtagtcattttcctgatttttcttattctgccagtagcaagataataattagtgatgttcccagtagaaaggatcatatgtgccatcctcatggaattatgatcattgaggatcccgcagcattaaacaagccagaaaagctaaa

SEQ ID NO: 83956 - DNA, 535 bp, Homo Sapiens
  misc_feature (73)..(73): n is a, c, g, or t
  misc_feature (194)..(194): n is a, c, g, or t
  misc_feature (434)..(434): n is a, c, g, or t
  misc_feature (456)..(456): n is a, c, g, or t
  misc_feature (510)..(510): n is a, c, g, or t
ccgctccctgccctgcagctttgggctagggacctgccgcttgcgccggttcctacgagcggcgccaagcccncactctcccagtgtgggcagtggcaccagtctctgcagtacatgcgaacggctggtacgaggccctggcgcgtcttcgccggtgcgggttgcggaggaagtactgctcggcgtgcacggcncacgggcctgccctggtggggcagcattctgctctccaccgtggccttacggggtgctgtcacgctgcctttggacctaaccagcactacatcctggccaagctaggtggaaaatttgcagccagaaataaaaatattgccaggcatcttaaccaagaagttgcagttcgtgcaaatcagttggggtggtcaaaagagatgcagctcacttattaaagaatatgaggagctaattcagantatatgtctggaataaagcgtncacctgtgccaactgagatgtcttatatttgaagtgagagatttaacccttganactgaaaaggtatattgatggttcc

SEQ ID NO: 83957 - DNA, 848 bp, Homo Sapiens
cagtcgacggtaccggacatatgcccgggaattcggccattacggccgggggcgtatcagccttggctggccggtgtatgtccgctggattgtgaggcccgggatctgggctccgccgtggtgcagaaatgctgtgccggctcggcggtcggtggctgcggccgctccctgccctgcagctttgggctagggacctgccgcttgcgccggttcctacgagcggcgccaagcgccccactctcccagtgtgggcagtggcaccagtctctgcagtacatgcgaacggctggtacgaggccctggccgcgtcttcgccggtgcgggttgcggaggaagtactgctcggcgtgcacgccgccacgggcctgccctggtggggcagcattctgctctccaccgtggccttacggggtgctgtcacgctgcctttggcagcctaccagcactacatcctggccaagctaggtggaaaatttgcagccagaaataaaaactattgccaggcatcttaaccaagaagttgcagttcgtgcaaatcagttggggtggtccaaaagagatgccaggctcacttatctaaagaatatgaggaggctaatttcagagctatatgtgcgagataactgccaccctttcaaagccaagtgggtcgggtgggattccaagttcccaagtgtggcatcccttccatgtcttatgggatcatccgggaaattacggccacggggcaaggacacaatttccagacacggttttacgtgtccacgggaacagttacgctactgggtgggaactctgagggaaacctgaccttcagtggaacccgactccattggattctggcaatg

SEQ ID NO: 83958 - DNA, 902 bp, Homo Sapiens
  misc_feature (161)..(211): n is a, c, g, or t
tggcgactcccatgcatcggctaatagcccggagacaagcgtctaagagtgtaaccagttccagtagcagtagcagtgacagttctgccagtgattcttcatcagagagtgaagaaacatctacctcttcctcctcagaggacagtgacactgatgaaagnnnnnnnnnnnnnnnnnnnnnnnnnnnnnnnnnnnnnnnnnnnnnnnnnnntgattcagactcagattccagctcttccagtagcagtagcaccagcacagatagcagctctgacgatgaaccaccaaagaagaagaaaaagaaatagagttgctccattcatattggactgatggactgaaaacattgatgtgattcttgaaagggaatttagaatatgttaaggccaagtaggttaactggtgaacatttctagaattcaaacagtttctaaatgttttacattgtaagagcatagagaatattaataatggcttatagagagagacttttatttgaagggtgaatcttggtttttttatctttaaaatatatctctagaacttaaagctgaaatctgcaaatctgtttgtgtgatgaaactatcttttctctctgtgaaataaatgccatactttgttatatatgttagtggtatgtatcagacatattttcaggatggtgcgtcaggatatctggcagtggatttctaatgcttttggctgtatgttatgtaagatttaatatgtcgtacctgtaagcttaggagttttcctactattaataaatgtgctctatttctaccttctatgttcagaaagttatctgacttttgtcctaagtggtatgtccaggagccctatactatatttatacgttcccgattgcctgcaggttcaaattgctgtgttaccgtcattca

SEQ ID NO: 83959 - DNA, 558 bp, Homo Sapiens
  misc_feature (19)..(19): n is a, c, g, or t
  misc_feature (41)..(41): n is a, c, g, or t
cgttatcaagaggcaaatnattcagccatcacaaacagtgnattttggctcaatgaatatttcctatatgacataaacactaacattcagatcatttatcatttatggaaggtaccatatgtacaatcccaacaatcctagacacagtagacactcaaaatatttaagcttcacaagtaccatgcagcgcaaactataaaacagaaaaaaaatcaaactagtggctagcatcggcttgacctgcctcattcccctcgaataactgaagatcctgtacaacaatggagactctcggaacatttatccacagtgcaattacagaaagcagttcgtgatttctctagaaataataaatatggctcactggtgaccattcccctcacgtgtcctctgtggtgcccacacgtgcgccgggatgtgcaggcgtggacgcagagacgcccctgtggaaagcacacatgcggtgcacacagctccacacgcgcgcgcacatggaggctgtgcccctgcctcccccgacggccagcgcatgagcactgcctgggaggccgcggccgc

SEQ ID NO: 83960 - DNA, 1162 bp, Homo Sapiens
  misc_feature (1008)..(1008): n is a, c, g, or t
  misc_feature (1092)..(1092): n is a, c, g, or t
gagtatgaagtcgacggcgcgccgaattcggcacgaggccgggaaggcggctgcgctgctgggcgggggcgggagctggagccggagctggagccggggccggggcccgggtcagcgcttgagccgggagaagagtttgagatcgtggaccgaagccagctgcccggcccaggcgacctgcggagcgcaacgaggccgcgggcggccgagggctggtcggcgcccatcctgaccctggcacgcagggccaccgggaacctgtcggcgagctgcgggagcgcgctgcgcgcggccgcggggctgggcggcggggacagcggggacggcacggcgcgcgcagcttctaagtgccagatgatggaggagcgtgccaacctgatgcacatgatgaaactcagcatcaaggtgttgctccagtcggctctgagcctgggccgcagcctggatgcggaccatgcccccttgcagcagttctttgtagtgatggagcactgcctcaaacatgggctgaaagttaagaagagttttattggccaaaataaatcattctttggtcctttggagctggtggagaaactttgtccagaagcatcagatatagcgactagtgtcagaaatcttccagaattaaagacagctgtgggaagaggccgagcgtggctttatcttgcactcatgcaaaagaaactggcagattatctgaaagtgcttatagacaataaacatctcttaagcgagttctatgagcctgaggctttaatgatggaggaagaagggatggtgattgttggtctgctggtgggactcaatgttctcgatgccaatctctgcttgaaaggagaagacttggattctcaggttggagtaatagatttttccctctaccttaaggatgtgcaggatcttgatggtggcaaggagcatgaaagaattactgatgtccttgatcaaaaaaattatgtggaagaacttaaccggcacttgagctgcacagttggggatcttcanaccaagatagatggcttggaaaagactaactcaaagcttcaagaagagctttcagctgcaacagaccgaatttgctcacttcangaagaacagcagcagttaagagaacaaaatgaattaattcgagaaagaagtgacaagagtgtagagataa

SEQ ID NO: 83961 - DNA, 570 bp, Homo Sapiens
aacatcgcatggcagatgggtgttggaataattactttctccacaatctatcattttaatagtttataatagtgcagttcatggaaacatgccaagtccaacaaaagcacaacagattagattacagtcagattgagaagactggtgtgcgttggcagatagacgtgctggacatgctccacacgcgacctgcagacgggacatgactgtagctgggcggcgcagctctcacagcacacagtgtggccacagggacagaaggtggagttgatctcctcctcgcagcacaccatgcacagcatggctttccttcagcttgcgtagcttcatcctgcagcacccgggtctgctggcagctgaggccctcgcagctgctgcagttcatgctgctttctgaggacttcagaggcgagtgtgaagggctctggttgtttcttgaaacgaggtccacaacgccagcattgtacagagccctcctgggatggtcatacacctcctttgatgttcttttaatatcaaagacatatttcttgccaaggttaatgttttcattcagaacagagatgccag

SEQ ID NO: 83962 - DNA, 526 bp, Homo Sapiens
aacatcgcatggcagatgggtgttggaataattacttgcgccacaatctatcattttaatagtttataatagtgcagttcatggaaacatgccaagtccaacaaaagcacaacagattagattacagccagattgagaagactggtgtgcgttggcagatagacgtgctggacatgctccacacgcgacctgcagacgggacatgactgggaaagaaaagccaacagtctctgttagcatgcaagcctcggtggggggcctgtgtctctgtgcacacccctggtctctagtgcatttaattttctaaatcaattgtgatcacagtgatttctagctttcaattggtagagatctttgctgtctcacaggttgaaagtttatactttacaagggcttaaaaataaatactatgacatagtataaactgaaggaaattaattacatttttagtgaaacgctaaagaaggtacattgaataaagcaattactgaagacgtctttctgtgcagaatgtggtctctacatg

SEQ ID NO: 83963 - DNA, 357 bp, Homo Sapiens
  misc_feature (29)..(29): n is a, c, g, or t
aacttagtttggggtggattgggcaaaanccgactcgggaccaatccatgattttatattgtgacctgaattattgtgaaaatatcttctcagctgctttagctttcttctttgtgaaaggcagaatggaaagaggcctgggatcccaagtcacaagacccaaactgcaggccccacactgccacagttcaacccttctgtgtctctgtgccctgaaatgtaaaacatgggcttgaaccaagtaacgtccaaagccctacttaactctaacaaatgtgttattctctagtttctttcaggttgcctgtctcagttgaagaatatgactaaatttttttctcataagcatccataaaa

SEQ ID NO: 83964 - DNA, 717 bp, Homo Sapiens
gccaattcatctaagttttgatgttgacggactggacccatctttcacaccagctactggcacaccagtcgtgggaggtctgacatacagagaaggtctctacatcacagaagaaatctacaaaacagggctactctcaggattagatataatggaagtgaacccatccctggggaagacaccagaagaagtaactcgaacagtgaacacagcagttgcaataaccttggcttgtttcggacttgctcgggagggtaatcacaagcctattgactaccttaacccacctaagtaaatgtggaaacatccgatataaatctcatagttaatggcataattagaaagctaatcattttcttaagcatagagttatccttctaaagacttgttctttcagaaaaatgtttttccaattattataaactctacaaattccctcttggtgtaaaattcaagatgtggaaattctaacttttttgaaatttaaaagcttatattttctaacttggcaaaagacttatccttagaaagagaagtgtacattgatttccaattaaaaatttgctggcattaaaaataagcacacttacataagcccccatacatagagtgggactcttggaatcaggagacaaagctaccacatgtggaaaggtactatgtgtccgatgtcattcaaaaaatgtgattttttataataaactctttataacaaga

SEQ ID NO: 83965 - DNA, 1188 bp, Homo Sapiens
aatataggctaggtacgaggcctgtgtggtcgaatcggcacgagggtttattatgtggagtccctgccacttactgccttatgacctaggactgatgctgtggggtgctggtggagcagctgatgtcgtgtttacagagcaaggcttccctgtctcccacggggaggggctcgggcctctagtcagacattcctgcagagggtcggtggaggggtcattcacctgcccctgcagcaagcaaaagttgtctgtggtgccatttgattccctgacactgccccctgcttgaattgattccgaagggtagggtgggaaggtgagcaaagggagcagaaacaagggaattcaagacccagaatgtaggtgccactgcctcctatgtttacaggatcctccgtggccctaggcacctgggctgcaggaagtgactccgttccactcctcctttattcccttaaaaagggaaaaatgactgttacgaccctgttcacaaaactcttacttttgctattttgtctgctgtccagaactgaagactttaaaattttgttactgtttacaagtccagattcaaaaaatgtttttactttgtttacaactcaaaactttgagttttacactttgtttacagtagataattttttttcctttgtttccaagtgaaaggtagggaaagtgggagagggacttggaggacccacctgtgaggaccctgacctggccatcttgaggggttttctaacccccaggtctcccaggccgaaggtcagccttgagtcccgtttaacagcagatccagaagaccttgagagtaggcgtcctctaaccacgggggagagtggctgtgcagggctggggggtggtctgtgcagacaccctcctcacccaccaccccatgcatactcttgggaagcagcttcctgggagattagaaattctacttccctgactggagctaaatcccaccagccaggacccaaactctccttaccgagaaggaccccagctcttgaagggctgagtggcctgctgggggtgggagggtgtctttactatgtcctaggtttcgtagatgcccctctctggggttcccctcctccagcccagcggccctctttcctgtctgtgtaaattgttccgtgaagccgcgctctgttttgggaataaacttctatagaaaacaaaaaa

SEQ ID NO: 83966 - DNA, 594 bp, Homo Sapiens
ctaccccaaacagagagcaaataagtatccccattttttagtcacatagagttccagagttgccacagttacatcgcaaagtcaggatttgaatccagtgcagaccgcaaacaccatggttttctctccaaagcagagcagctccagaggtggaggtgactggaatgtcctagattcagtgggaccaggagctgggggtgctagcagaggctctcatctccccagggtcttgtcagtcagagtcctaaacccttcaattaactatccctataatcccagctgaagcctgggtaatacctcccaccaagaggtatatgtgtggaacctggccctatttagggattaggtgatggagataaatttccatggcaaacggccctcgtccccgttcgtttgcagagcacaacaatccagattaaggtacagagtttgggttttatttggagattagttggtattacaggtgatggtgataccaaaacccaatgctgctatacctgcctccatcccagatctgtcaggttgtctccacagccccacatcagagggcatccaatctgatctttgtgaaaattaaaaaaaacattagcccca

SEQ ID NO: 83967 - DNA, 899 bp, Homo Sapiens
cggtgactcgcagatcactggacgcactctgcgcccggaggacagagcggcccggtcgccggcatggtttctccgtcctgctgcagccggcgggaggcagccagtccaggcgcccgctagcttcggcggcgacccagacggggaaagcggaaggaatgtcgcgtgcaagcaggcagctggtgtggaagaatggcggtgagccattcagtgaaggagcggaccatctctgagaacagcctgatcatcctactgcagggcctccagggccgggtaaccactgtggacctgcgggatgagagcgtggcccacggacgcatagacaatgtcgatgctttcatgaacatccgcctggccaaagtcacctacacggaccgttgggggcatcaggtcaagctggatgacctctttgtgacaggccgcaatgtccgctacgtccacatcccagatgacgtgaacatcacctcgaccattgagcagcagctgcagattatccatcgggtgcgaaactttggtggcaagggccaaggccggtgggaatttcccccaaaaaactgtaagtgaggccctcagcaagccctggccccaactcggagtcctccagtgatctccggagctagttccctgccctcacaccctgtctggtacccgagaagaaagcagggccaggccagaagctggtgtccaacagacaccacctgtcaaagctgcctttcacagggttccacctcccagactcactctgggacccagaatcctatatgtggccttggggtaggtgacaatccccctttttgatgatctgaatctctgacttattgattatggaacctgtcaagtagttttcaactctcccagtgaggataattaaacatgctcagcctgagccacctctaagtgtc

SEQ ID NO: 83968 - DNA, 578 bp, Homo Sapiens
  misc_feature (36)..(36): n is a, c, g, or t
ttaccccttgtagctgtgctttccttgatgcgtagnaacaccgtgcatggaggatcaaacactgtcagaattgctgaaatcaatacacaaagagataaagtttagcttcctttttactattcaatattgaaccataatattggttaaatattgagatgaaatgctgttggatttgatacattaaatcttaatgtaatattgtaagacttttgagaatatacttgattaaaatgtgaaaagaagggattgttaacttattgctattttggtatataatgttaatttattgactagtttgaaataatgtgaagtgttttttatatcagattaatataggaaatgtttattcttgaaaaatactcaatttgttgttgtttatttttctcaaaattcatactgatatctgatgaaatgattatgaaattgggagcaggtgaccaggtgctgtaactaagtagtgctatgaccatgagcaagtttttgtacctctctaagctcagagttttcatgtaaaatgagatgattgcattgaggtttcaaaaatacctcttaagtaaaatgtgcttttattttaaaaa

SEQ ID NO: 83969 - DNA, 472 bp, Homo Sapiens
  misc_feature (290)..(308): n is a, c, g, or t
  misc_feature (313)..(325): n is a, c, g, or t
cagtctcttccctcaggggaacatcccagaatgcatatcgatcagctctcagccaggcttcgacaatctcgcagcccccactaggtggacacattaatgatttggtttctcccctgggcagccaacctgccccagaggcaccagacctgggctttcagctttgggaccaggctgcccaaaggtactcctttatacacccggcaccttccacgaaagatggtacttcccaatcaagcccctatgatttgtcactatagatggaaatgtgtggcatgcacatgagttgaaannnnnnnnnnnnnnnnnnngaagnnnnnnnnnnnnncaactttgaggacataggggatgtcagtttcctatggaaaagacccctttgacccgttatttttataatcaaaatttgaagggaaaaaaatgttttagttctttcccccctcgttgggttcaactagattaaaaggctgattttcag

SEQ ID NO: 83970 - DNA, 2889 bp, Homo Sapiens
  misc_feature (159)..(171): n is a, c, g, or t
ttttttttattctgaaaatcagccttttaatctagttgaacccaacgagtggggaaagaactaaaacatttttttcccttcagattttgattataagaataacgggtcagaggtgtctcttccataggaaactgacatcccctatgtcctcagagttgnnnnnnnnnnnnncttcaaaaaaatgcataaaagaatttcaactcatgtgcatgccacacatttccatccccaccccaccctgccccaccctctacaggcacacatattcacacaccaaagggactccttcctgtaactggggaacagaatgtaaaaaaatccatccaagtggccaccgataccagaaataaccaaatgcatttacactcacaacatcagtcaactcacatgcacaaggagaagcgtctccaatcggagcttagagccaaaaattacaaatggcagagacttgagctatccataagataattttaaaaatccttccactggacactccccttcattacaaaagtatgcaaacaatcttgctataaatggaaaacaggcgtgtggctctctccctgggacatgagggcatagctaaaattccctgggtggaattaatgcctggaccattgctcctccctttcaggacaaaagggaaaggatgaagaggagcagcagggtagggacccacctcaggagcaggtggggcaccctggagctgcctcaggggctgggaacgtgttggcatgtgaccagctgatggaggagcacagtgtcaagtgggccacgatggctgtagagaaacccaagtgctctgcacccgtagggagtccagaaggtagaggtccacggacaggacaggcctggcctgctttgcttcctccacctaaggccttgggaccgatggcgtccgtctgagaggctgcatgattattttagggttgcaggaaggatgcttcccatctggacgtaagtgcacaaaccatgtctatctggatctcaaaagatgacttcccctttacacaacccccactccctgccactgcagatcccagcagagtggtgggagatcttggcagtgggaaccagaatgctgttgccacacagcacacaggctgaggcacattggtggagggttcagaggaacgaggagaagagaggaagaggaatctgtgacccgccttgtgactggtgggcagattcaagtctctaccgctgctgctgagcaactgggcatctgcttcttggaagaacaagaaaggggtggggtaaagacttgaggcctgggttctaggttgggcaggaagggatggggcagaagtcagggttccatctatagtgacaaatcataggggcttgcttgggaagtaccatctttcgtggaaggtgccgggtgtataaaggagtacctttgggcagcctggtcccaaagctgaaagcccaggtctggtgcctctggggcaggttggctgcccaggggagaaaccaaatcattaaatgtgtccacctagtgggggctgcgagattgtcgaagcctggctgagagctgatcgatatgcattctgggatgttcccctgagggaagagactgcagctctcctaggaggggtccccaagatcccctggactccccacccccttgcctgactctgttcttggggctccccagggaaaggggaactgcaacttcaggcagtgtaatttgtctaaaaagaaacacggggaaaagaggtagctgcaaaacatcgagccatcctctactttccccccacttcccacacaccctttgggacacagccagatttgggaccagattgagggccaaaggagacagggcactggaggcaaggctggcgatgcccagggtcctcggccattaggctgggtgtggcgtcaatgcatcttgcccagctggatcttcttccaggcctcagaggctgtgaagatgcatgagtccaggatgccggcgacggtgaaggtcccgccaatgatggcacagatcgtggtgatgaatctgtacagcggctgccgtctctctgtgtacttgaccgtgatggggctgaggtcgtagcggaaccagattgcagggatgatgcggcccgtgtggctgtaggcgacgtattccttgttggccaccgtgtactggtaggagtaccgctgcttgccactcttgtcctcataaaccgtgggcacaatcttcaggatgtagtcgtgggaggccagggggttggaggtgagtctgtctgctcccccgagagcattgaaagctccgtggatgttctggacctgtagcgtgtccccaaaggagagcttgtggatgacatgcgtcatgtctgggttctgtggctgggctgtggcactgtgtgtggacacgtggaagttgccggggaccttgttgatgctgaactgcccctcgaagcggcagcctgccccattgttcagcgggatcttcatggagttgtcgatgtggcccacttcgtgcctgcccatctcatcctgaatgtcaagcccaaccaactcgcagtgcagattgggtaaactgatgttcagactgacgtcgatcttgccaccgctgtccttgtctgggtcatcgacatagagctcgttcacaacttctgtcgttataaatccggtgagctccgagaggaagaggaagaggatgaagaggcagcagcagatggagataatggccccggtgtacgttggctgcgtaaggtccttgggcaccttcctgtagatgtcaaacctcctgaagtcaaagggcatcgtgccgccgccgggggtgggagcgctgcaggccaggcgggccgcggcgccgcgtgggtccgagcccgctgccaacgcctcctccggccgccccgcccccgcctcgtgccgaattggcgcgccgtcgacttcatactt

SEQ ID NO: 83971 - DNA, 598 bp, Homo Sapiens
agatatttttaaaatggctagctattgggcaccagtttttctgttatctaaaatttcacacaacttcattgtttttatttttatattatgagttgtccatcttaaagaaatatgagtaattctacatgtagtagaggtgtatgaagatcatataacaattaaacataagccagaaattaaaatgactatagacagcaagaattgagctaataatatgttttaactcttaacaccagcaagaagtcagtcatttattgaagttttagctactaagattacttggttttgattaccagtgaaaagaaaacacaatacaatcaggagttttcaaatttttgattcagtatttgaatttcttcttcataaatgtagttgaatttatcctagtatttttctttacctgaaggagggccatttatttttaatttcactacatttttctttgcatgattattaaaataaaaactgcctctgttgtgtttctcactggaggctggaatgaatgatcactagaacacaaaagagtgaatgatgacacttgaagtcaaagcagttgtactgatcaccagaaccaataaagacataaatggaaaaaaaa

SEQ ID NO: 83972 - DNA, 1700 bp, Homo Sapiens
  misc_feature (1118)..(1130): n is a, c, g, or t
cagtcgacggtaccggacatatgcccgggaattccggccattacggccgggggacagaggaagaatgcttttgaaaacagttcttacgtgattttatgtaacttaatttgccctggaaaggaaatgtctcgtctctggtatgggaaaacaagggagaagacatcaaccaattaatcataaatacactctgattactacaagggaagacataaattcaaagcaggttgctacagtgaaagcagacctggagtctgaatcttttcgaccaaacctaagtgatcccagtgaacttttactgccagatcaaattgaaaagcttaccaagcatcttccaccaagaacaattggctatccatggactcttgtttatggtactggaaaacatggcacaagcttgaaaactctttatcgaacaatgacaggtttagacaccccagtgctgatggtgattaaagacagtgatggacaggtttttggtgcgttagcatctgagccactgaaagtgagtgatggcttttatggtactggagagacctttgtttttaacattctgtccggagtttgaggtctttaagtggacaggagataatatgttttttatcaaaggagacatggattcactagctttcggtggtggaggagggagaatttgcgctttggcttgatggagatctctaccatgggaagaagccattcttgtaaaacgtttgggaatcgtacactttctaagaaggaagatttctttatccaagatattgaaatctgggcttttgaataaataaaatgctctctgtcttagcaggagaatggcccaaacctgacatggacaagcattgtttggaaagttcaagaagcaatacagtgtaacatgtcacttgtgctttaaaattagtctgtatcaccatttattacagttataattttggagtttatttttcaaatcatgttcttgtcccagagttctttaggttaacactagggactgcgtccatggtactagtataacagcttgggtttgttagaatttgggcaacattttgattataatgacaacttcattttcacatgttactcagttccctaataggatggtgctcttttgttgaacctgtattgannnnnnnnnnnnnaactatattgattcgtttactagaacagtctaattggggcattgaggaaatgaagactggatacttctgtatctgtgaagttggcacaggtaacatttggacatgttcatcttattcttaggaaggaaaaaatcacttgccaaaataatacatacttcatagaccactgagttctagtttttattcacactacaacattctctttaacgatgttgcaggtattctcaatttccttttaagaaaaatgaaatgtgaggagaattctggttgtaatagatgacagtacatatgatctgcaggtttgggcatatgctttcatcattaaattatctgataaagttacaagtcacaaaggagaatgagaacttaatgattctattggatttaatatattagcaagaaaacatactatttacatatgtgtagcttagtaaggcattaacataagtacaaaaactatgaaacagatgcatatttcctcaacatactgtgtcaggtatactgttttataatttggttgttttagccttattgcacaccaactcccaaaatataggttactcttgttca

SEQ ID NO: 83973 - DNA, 511 bp, Homo Sapiens
gtccagagaaatctgtgaagtccacaagtgtggaagggaaagggaagtgtgattaggctgggatacagaaggctaacagtacactttatatgagaagagcttagaggtcaggagagcacaatgctgaggggtttgtttggttttattttcccctctggaaacttggagaaaggaggacaggaaaagatgataagagggcaccattgtttggttttaaaggtccctccccaaccccccacaacaagaaagctcattttaatgagatgagagaaggggagaaagctccctccgttctgatgcttttgagcttatcagggacaccctgcagcagaaattccagctgatccttcagccttcagagttgatgaggtggggctcacacacatctggatttgaagaagaatcgtgggtttcaagaactctgtggtctcttaagcattggtattccacagctacacttccctgatactttgcactcagtaatgacaaaataaatatttgtagaatcgaa

SEQ ID NO: 83974 - DNA, 441 bp, Homo Sapiens
gggataaaaatttaattcaatttactgtagggtatcaacacatatttgagcagaagtcaatttctttgcactcatatataacttcatttccagttttacataaatgcaaataatcctttaaaagattttagacataagaaggcaaactttataagttatagctcataattttcaaattttcacaaataaaaatttaatgcaggatctatgatcttgcatgctattagttggttttcattcattttttaagtttcacaagaacttttattttctaggatactacacattcaaaaaacatctttataattacaggttatcttttttctacaaaaatagaattgctcaaaaatttatatcaatttgcttttatttttctataaatattttaatagagttgttaaatatcagaatgcctgatagaatcatttaaattaatccgtg

SEQ ID NO: 83975 - DNA, 999 bp, Homo Sapiens
  misc_feature (884)..(918): n is a, c, g, or t
  misc_feature (964)..(964): n is a, c, g, or t
ccaattcatatagtcttgtattatatacatattaacagtctatgcaatgaaaaataaagaaatttcataaaactatttcaaaactcagaacataaaaatgtaaagaaacaaaacatttaatgtacaatctactccatttggcaatgtgtactgagagataaaaaacctatctacaaacagaatataacaaaaggaaaatgtgacttaagaagtgatctcaggtccatagctcttcggttcttccaaatttgtagatcagagtgctaaaaaatataagtgcattttgaaaaaacacagctagtcccggataaacatcagtattttgggtaacatatgcaccaaaaagaatccacatggaagcaataagtgacccaaacatcaacatgaaaccaatgaaaagccaaactcgagcacctgttcttcctaaacagccgctttcatagctatcacctctcacctgagcattggatacagcatttatcatgaagaaagccaatgtggaaaatacaccacatgtgtgaaaggcatggttcaactgttctggcttaggatacaccacagctgcatcaatcattatccaccagcctgtaaaaaacaatatacctgcgacaacagatgccacagcatttcttctctcactccagtcaatacattcacattctggccaacgaaaattatctaggaagcctgccatttttacttcttaagcataaatttttcattaaatgctgtatcccagcttcctcaaacgcccacgccgacttcaggcgcgcgcgcaggaaggagactgctgcgccacaaccctgccggcgtcccgcggctccacctcagcccccggccgtaatggccgaattcccgggcatatgtccggtaccgtcgactgnnnnnnnnnnnnnnnnnnnnnnnnnnnnnnnnnnncgccgcttcctcgctcaactgactcgctgcgctcgtcgttcggaantacggcggctaggcccaattggtgatcagttggcg

SEQ ID NO: 83976 - DNA, 625 bp, Homo Sapiens
agagctatctggagattatgagtaagctgatttgaattttcagtataaaactttagtataattgtagtttgcaaagtttatttcagttcacatgtaaggtattgcaaataaattcttggacaattttgtatggaaacttgatattaaaaactagtctgtggttctttgcagtttcttgtaaatttataaaccaggcacaaggttcaagtttagattttaagcacttttataacaatgataagtgcctttttggagatgtaacttttagcagtttgttaacctgacatctctgccagtctagtttctgggcaggtttcctgtgtcagtattccccctcctctttgcattaatcaaggtatttggtagaggtggaatctaagtgtttgtatgtccaatttacttgcatatgtaaaccattgctgtgccattcaatgtttgatgcataattggaccttgaatcgataagtgtaaatacagcttttgatctgtaatgcttttatacaaaagtttattttaataataaaatgtttgttctaacttgtctgcttttttaaaaataatcttactgtccttaattctaattttttcctcatatttaaataaaaggccatttccacctaatcta

SEQ ID NO: 83977 - DNA, 864 bp, Homo Sapiens
gctcccagcggcccaaagaactgctgcccgtgcaagtggctggaaaagaccaggccgggcaggtgtccggcgcccaggggagacgcactgtctgtctgcaccaccagcggcgccaggccctgctccttgccctcggccgcctccttgcgcccctcgtccttcctccgagcttcggcgcgctccttctccaggctcctcaggccgaacgggccgtccccgccgctctcggccggctccttgcccctctcgggactacgccgctcccgggcgcgctcgggttcggtcaagcgagtggggctggcgctgtctggagccgggctgcggcctagcggcgcccccgcacgctcctcgctcaaccgctcaggctccgggtcgctgtccgcggcgcacgacttctcctcagctcgggcccggtgcaggcgcagcggactgggcgctgcgcccggggaggtgggtggttcccgcgcggggggagggtcgcacgacgaggcgtctgactccgcgccatcgcgctcgggtttgcagtgctcctcgtacaagcgtagagacggcagcgtcagctgcttccttttctcccgccggccgttcccggtgtcccggaagcccttggcaaacgggttgttgtcgatcttcagctgtgtgatcttgtcattctggtaggcagtgacggcgatgaagtcggtctccgggaacacgtaggtgcggaaggtgctgtaaggcagcttcaggatgtcgttggctcgcactatgtggaagcgcggctggtacttgtgcatggagtttaggatggtctcagaatgggcagttccttttaccctatgaaacaccacccccgttcgctggggccttgcatcccgggaattc

SEQ ID NO: 83978 - DNA, 877 bp, Homo Sapiens
tgcggccgcggcggcggcgtgcggcagcagcggccgaggcggggctgcacgtctcggcactgggcccgcacccgcccgccgcgcatctgcgctccctcaagagcctggagcccgaggacgaggtggaggacgaccccaaggtgacgctggaggccaaggagctgtgggaccagttccacaagctaggcacggagatggtcatcaccaagtccgggaggcggatgttcccccccttcaaggtgcgagtcagcggcctggacaagaaggccaagtatatcctgctgatggacattgtagccgctgacgattgccgctataagttccacaactcgcgctggatggtggcgggcaaggccgaccctgagatgcccaaacgcatgtacatccacccagacagcccagccacgggggagcagtggatggctaagcctgtggccttccacaagctgaagctgaccaacaacatctctgacaagcacggcttcaccatcctaaactccatgcacaagtaccagccgcgctttccacatagtgcgagccaacgacatcctgaagctgccttacagcaccttccgcacctacgtgttcccggagaccgacttcatcgccgtcactgcctaccagaatgacagatcacacagctgaagatcgacaacaacccgtttgccaagggcctccgggacaccgggaacggccggcgggagaaaaggaagcagctgacgctgccgtctctacgcttgtacgaggagcactgcaaacccgagcgcgatggcgcggagtcagacgcctcgtcgtgcgaccctccctccgcgcgggaaccacccacctccccgggcgcagcgcccagtccgctgcgcctgcaccgggcccgagctga

SEQ ID NO: 83979 - DNA, 162 bp, Homo Sapiens
  misc_feature (34)..(34): n is a, c, g, or t
tatttttttggtagcgacagggtctcaccctgtnggcgcagggtggtctcgaactccaagcctcaagtgagcctcctgcctcagcctctcagtgttgtattataggtgcatggcctcaagtattatttaagaaataattattaagaaatacattatgcggct

SEQ ID NO: 83980 - DNA, 960 bp, Homo Sapiens
cccaccccggcctttggcccatgccaagcaggagcctcccttaggaagagggccactgaccctggaacaagaaaggacgatgagggcaatgctcataaatctgaagccaggcggggaggcaccggaaaggggccaaagggaggctctcaactagcctcttacttccttcatggagcccaagaaggagcaggaacccagctcagtaggacgcccccaagccttggcaccagctgctttggggagggatctccctacaggaagcctggtgcaaacattaacttcgctcctaaagcacggaccagccgttggagcccccaaatccagtagggggtggactcatttttattctacatttttcattgcctcagtgtgtccctgccccccaccaccccctgccaagggtaatgtgtgaacagcagagttacagtggattggggggtgggaggagatttgtccaaatgacccaggcacactgctgttcatgccaggctcatccatatagacatataagtacaacacacacagacaagaggcaggcatctccatcccaaacaacatgattcttggcaccaagtagcaccagtgcccaagaaagaaatcagtatgatggggtaagatggggagatgaggaaacccttcagctcacagttatgcaggaagtcagaaacaggaggactcggggagcgagccaagcagtgtcttggacttaaatgcagacacccctccatcctctctctctagttgcccttcccaactccccactcacataatgaaaccaaggagtacatccattcatcagccctgctgccttccaattctcatagaaaatagaggaaggatgaaagggtctgcggacaatttggagaaagcatatctagtcagtgtcatggtgccatgggggaactgcaggaatcacactagccccaatgcccaaaatgacagggaagtgatccaatttta

SEQ ID NO: 83981 - DNA, 502 bp, Homo Sapiens
ttactttctttgtagctctaaccatgaaagtaaaagcaacaaaaatatcccccagtgaatccctagaatcatttaataatgtaaccggtatctctttatcctgcaggtgtacacttaaagcgttctgggaatatgaatcccttctgcaccctggaatcaccagtccagccatgcatggagctggggaaagcaggccctgaattgtctagagagacttggtggaggaggccacggcccgccttgtccctgccgggtcccggccaggtgtgtgtgtgccccagctcgactctcggtggtctccaggctgcagcagaaggaataccttggtatttgtttcattttagtgtccatccttacccttctggtctggtagagcctatggttattcttggattccacatacatgaaaagcgaagatttttctttgtttttatgcttaagctaacttcagttctgctttcccacaaaactacccccaccctggctcctgtccctggctgtc

SEQ ID NO: 83982 - DNA, 455 bp, Homo Sapiens
  misc_feature (204)..(212): n is a, c, g, or t
acagaaaaatagaataaaatgttgataaggcactgcctcttagaacacaaacagaatattgcaaatgcatttaacaaataggggtctcaagtgacttcaccctagaagaggagggagggatactgggtgggggtgactcttcactgattcttgtatattagcaattataatgtttgtatatgcaaaactgctagcttgattttnnnnnnnnncaaatctttaaaatctgctgcaaatttaaataattcccaaaatgaggaattctgtagttctgtgaaaaatttttttcttcagaatactaatattttgatgcatgtgtatcaccttattttgattaaatcttttccaattttgcaaacactacagtatactgcaacacaaaagattttatctgtaaacacaaagcccttcatctaatatttgttgctattgccaatttttcaatgaaatgacct

SEQ ID NO: 83983 - DNA, 489 bp, Homo Sapiens
cccttgtttttgtagaagactcagaggagaatctttcttatggctccctctgttgagattggaattggaagagaacttaattttttgtatttaaaatgcagtgtcatgcctataagcatttctcctatataggactgctttgctagtgtgccctcttgctgtgtcttacttcataaggagttgtatcttcccacctccatttcaatactgccggttaggacctaagtagaagagcagtaaaggctgattgacacacagggggatggagttggtccttgtccattctctcacccttgctgtgcatgtatcaatccttatcccagaaggtactatttagactgtatagactgatttagattacatactttagaggattaaggaaaccatagagtttgggccttggaactgttactgccttgtcctagagttgtcctgatcaggcttggggcctagttacagattagtcttaaagaattgcattaacttaaa

SEQ ID NO: 83984 - DNA, 908 bp, Homo Sapiens
  misc_feature (837)..(837): n is a, c, g, or t
cggaccggtccggaatttccgggatatcgtcgaccacgcgtccgcttagccagagcatctgagtgctcaagtacagttttacagtggctaaggatgtctcttgatcttttttctccggtgtgcgatcacagatgctatttctgttttattggtgattataccagacttctaatacataaatgaacgggtattggtgcctctttattttaaaaaatttgaagaaaagagccacctcatattcatagggtgtgtattttttgagtgtgagcatttaattgaaaataagaaagctatgaaggaaatgttaacttctctgtatcagctaatgcataaagacactaaaacccacaccacattttgtgggaaatgaggatcctgatcctcttttgtcctctccaggcagtctcgcaggttatgcaggttaagtgcagtcttctttatgctgcgattgatttccacctcagtggcttagcctttgggacagtggatactgcaacagccaagaactcttggttatccgcacaagctgctggtagactacattaaccctctggttttccagctcaacctctgataaagtggactgagagccacgctgctcagtctgtttcgtcaaccgactcaggttattttcagggaagggcatggaggcatagtttggctaggttcatcactaggatgtataaggtgacgacataaactaaatacctttcttgtcatccttaactatacgtactttatctctggtaacactacaatgctgtggtcttgcagggaatgttaacccaggcacccactccgaagattcggggtgcttccctaagccctcgtctaagntgctggcaaggtctcccgagcaggccacccctgcattgttttacaccttaaaccaagggaaaccaagactt

SEQ ID NO: 83985 - DNA, 657 bp, Homo Sapiens
agcgttaagattcagcaccgcgaggcatccactgtctatccaatgcagcctggtggttatccaagcaagcagactatgtagcacaagccacctgttggcgtgctgccctggagggcacagccacctaccggggggacatctacttctgcacgggttatgaccctcccatgaagccctacggtcggcgcaatgacatctggctgttgaagacatgagtgacccactgaaccaagaacttactggaagtgtgcctctgtgtctccttcctcgggggtaaggaggggacagtgcttcccaagttccagctgcaagtccaacttaaccaactttccttcaaagtcagttactgccaattttctgaaaaaagcatgttccatatactaagtctcttttctcacggtaggaaataatacagccaagatatgcagcatccttctcattgatgtagaaaattctgcgatagaccagaaaaatcctggcagcttttctccaggcatctgggtcactaaaaactgattttctaaaattattggatttgtattttgttattaagggggaaaatgtgatttgtgcctgatctttcatctgtgattcttataagagctttgtcttcagaaaaactaaaaataaaaggcattgacttaaacagctgagaca

SEQ ID NO: 83986 - DNA, 875 bp, Homo Sapiens
caaggtagcgaggcctgggtggcgaattcggcacgaggaagcaatgcccaaggtcgcaaagtatgcggggggcaccaatgacaagggaattgggatggggatgacagtccctatttcctttgctgtgttccccaatgaagatggctctctgcagaagaaattaaaagtctggttccggattccaaaccaatttcaaagcgacccaccagctcccagtgacaaaagcgttaagattgaggaacgggaaggcatcactgtctattccatgcagtttggtggtaatgccaaggaaacagactacgtagcacaagccacccgtctgcgtgctgccctggagggcacagccacctaccggggggacatctacttctgcacgggttatgaccctcccatgaagccctacggacggcgcaatgagatctggctgttgaagacatgagtgacccactgaaccaagaacttactggaagtgtgcctctgtgtctccttcctcgggggtaaggaggggacagtgcttcccaagttccagctgcaagtccaacttaaccaactttccttcaaagtcagttactgccaattttctgaaaaaagcatgttccatatactaagtctcttttctcacggtaggaaataatacagccaagatatgcagcatccttctcattgatgtagaaaattctgcgatagaccagaaaaatcctggcagcttttctccaggcatctgggtcactaaaaactgattttctaaaattattggatttgtattttgttattaagggggaaaatgtgatttgtgcctgatctttcatctgtgattcttataagagctttgtcttcagaaaaactaaaaataaaaggcattgacttgaacagct

SEQ ID NO: 83987 - DNA, 1080 bp, Homo Sapiens
gtggtaccggtccggaattcccgggatgccgccctgccaccctgccgccctgccgccctgccgccggtggtcgctgcccgtggtgctccgtcgcccccgccacctcacgtcctcccgtgcgtcgggagcgtctcggctacaacatgttgggcatgatcaagaactcgctgttcggaagcgtagagacgtggccttggcaggtcctaagcaaaggggacaaggaagaagttgcctatgaagaaagggcctgtgaaggcggcaaatttgccacagtagaagtgacagataagcctgtggatgaggctctacgggaagcaatgcccaaggtcgcaaagtatgcggggggcaccaatgacaagggaattgggatggggatgacagtccctatttcctttgctgtgttccccaatgaagatggctctctgcagaagaaattaaaagtctggttccggattccaaaccaatttcaaagcgacccaccagctcccagtgacaaaagcgttaagattgaggaacgggaaggcatcactgtctattccatgcagtttggtggttatgccaaggaagcagactacgtagcacaagccacccgtctgcgtgctgccctggagggcacagccacctaccggggggacatctacttctgcacgggttatgaccctcccatgaagccctacggacggcgcaatgagatctggctgttgaagacatgagtgacccactgaaccaagaacttactggaagtgtgcctctgtgtctccttcctcgggggtaaggaggggacagtgcttcccaagttccagctgcaagtccaacttaaccaactttccttcaaagtcagttactgccaattttctgaaaaaagcatgttccatatactaagtctctttttctcacgggtaggaaataatacagccaagatatgcagcatcccttctcattgaatggtaaaaaattcctggcaatagacccgaaaaaaatcctgggcagcttttttctcccaagggatctgggggtcacctaaaaaaactggatttttctctaaaattaattgggggaatttggcaacttttgggttac

SEQ ID NO: 83988 - DNA, 466 bp, Homo Sapiens
  misc_feature (387)..(397): n is a, c, g, or t
  misc_feature (438)..(438): n is a, c, g, or t
ttttttaaaaaggttttgcatttcatatttattatcagtgcttcaatatagaatgttttgtaatgattagcaacattgtaaacaccaccaggtttttccaacactaactgctagtcttttccagtaaatattttttccccagacaaaataaccaaacctaacacaatttcaagagatggtgataccatcagcataataacccaaattacaaaaatggcaatacttaaaatcatgcatattatttcaccatttcataaaacttattttaaaatttctacaaactttcccagtgtaaaagactcctcaaaagctgcatgataacattaaactacaaaattcactttgggaaaagtagggagttattttcctaattttggctttaaagannnnnnnnnnnaaatggggttaaaagatacggtgaggagtgtgttgagagangtggagaaaaggagcttccagtcaatgc

SEQ ID NO: 83989 - DNA, 781 bp, Homo Sapiens
  misc_feature (344)..(374): n is a, c, g, or t
gcatttcatatttattatcagtgcttcaatatagaatgttttgtaatgattagcaacattgtaaacaccaccaggtttttccaacactaactgctagtcttttccagtaaatattttttccccagacaaaataaccaaacctaacacaatttcaagagatggtgataccatcagcataataacccaaattacaaaaatggcaatacttaaaatcatgcatattatttcaccatttcataaaacttattttaaaatttctacaaactttcccagtgtaaaagactcctcaaaagctgcatgataacattaaactacaaaattcactttggaaaagtagggagttnnnnnnnnnnnnnnnnnnnnnnnnnnnnnnnaaatgggttaaaagatacggtgaggagtgtgttgagagaggtggagaaaaggagcttccagtcaatgcattcaccatatctgaaaatacttcagttatacaaagggaacacttcgagagtaaggatatattataaataagtctctcagcaagatgaacggatgaacagttcaattgcacccacaggagagaggtcttcttggagaatgcttgtttatagaatcttctgtaaaatagagttggctacttctaatgattcatcttgtactaaaacaatatcataagagtccatgtacttttctaaaagctcatccactctatcatttagatatccaattttcagaatgtgctcaacattggccactccatctgccattcttaagtctccttgggagatggagcggccgc

SEQ ID NO: 83990 - DNA, 1167 bp, Homo Sapiens
  misc_feature (46)..(46): n is a, c, g, or t
  misc_feature (90)..(90): n is a, c, g, or t
  misc_feature (820)..(1113): n is a, c, g, or t
tcccgcaattttctaagcatttcttggtctatctctcaaaacttgnatttttcagagtttatataaatggaaaaataataatttttatanttaattattaactacatttatgagtaactattattataggtaatcaatgaatattgaagtttcagcttaaaataaacagttgtgaaccaagatctataaagcgatatacagatgaaaatttgagactatttaaacttataaatcatattgatgaaaagatttaagcacaaactttagggtaaaaattgccattggacagttgtctagagatatatatacttgtggttttcaaattggactttcaaaattaaatctgtccctgagagtgtctctgataaaagggcaaatctgcacctatgtagctctgcatctcctgtcttttcaggtttgtcatcagatggaaatattttgataataaattgaaattgtgaactcattgctccctaagactgtgacaactgtctaactttagaagtgcatttctgaatagaaatgggaggcctctgatggaccttctagaattataagtcacaaagagttctggaaaagaactgtttactgcttgataggaattcatcttttgaggcttctgttcctctcttttcctgttgtattgactattttcgttcattacttgattaagattttacaaaagaggagcacttccaaaattcttatttttcctaacaaaagatgaaagcagggaatttctatctaaatgatgagtattagttccctgtctcttgaaaaatgcccatttgcctttaaaaaaagaagttacagaaatacnnnnnnnnnnnnnnnnnnnnnnnnnnnnnnnnnnnnnnnnnnnnnnnnnnnnnnnnnnnnnnnnnnnnnnnnnnnnnnnnnnnnnnnnnnnnnnnnnnnnnnnnnnnnnnnnnnnnnnnnnnnnnnnnnnnnnnnnnnnnnnnnnnnnnnnnnnnnnnnnnnnnnnnnnnnnnnnnnnnnnnnnnnnnnnnnnnnnnnnnnnnnnnnnnnnnnnnnnnnnnnnnnnnnnnnnnnnnnnnnnnnnnnnnnnnnnnnnnnnnnnnnnnnnnnnnnnnnnnnnnnnnnnnnnnnnnngctgattgtggatcttttcattctcattgcagaataatgttctattgtgggact

SEQ ID NO: 83991 - DNA, 491 bp, Homo Sapiens
  misc_feature (318)..(318): n is a, c, g, or t
  misc_feature (409)..(409): n is a, c, g, or t
gggatttctgcagagacagaaagaaacgcagctcttgactgcttttttgtaaacattactgtaagagttgtgataactttttattctactatgtatatgtatggaatagtattaataaatgaactagggaaggatgtaataaattagacatctcttcattttagagagaagatggaaacaacattgcttttcttttctcaaataaatatgtgtgaatcaaaagaaaaaacttttttcaagttaatacatggttcaggaaaacgaagaaacaagcaaagaagccaaaatcagagctaaggaaaaaagaaatagactaangtcttcttgtgcagaaacctgagtttcatgaagacaccccgctccagtagatctgggcacttggccaaagaaacaagagtctcccctgaangaggcagtgaaatggggtgaatcatttgacaaactgctttcccatagagatggactagaggcttttaccagatttcttaaat

SEQ ID NO: 83992 - DNA, 436 bp, Homo Sapiens
  misc_feature (20)..(20): n is a, c, g, or t
  misc_feature (279)..(279): n is a, c, g, or t
  misc_feature (339)..(339): n is a, c, g, or t
  misc_feature (374)..(374): n is a, c, g, or t
  misc_feature (388)..(388): n is a, c, g, or t
  misc_feature (418)..(418): n is a, c, g, or t
caagtttcagtagagctgangtagatggagttgcttgggaataaggaccatagagactaaaagaaaggtctaaggagcatattttgcagaggcccaagtccataataaactggaataacccttctttgccccaggttatttccatttccagatccggcactctagatactccttttattttctgggcctctaggatttatctcctgctttctttttcaatgctgtcacctattatttctgactaaggtttttctctttataaatccactctgaagatgnaattcttttttccctaaatcccttttgaaatatttctaacagatgacactaaatatgggnaagcatattgggaccaaaaatataccattctttgntcttctttcttccnttaaaaagttagttgccatgtttaaaaagnaaagtggacatgtggctc

SEQ ID NO: 83993 - DNA, 1055 bp, Homo Sapiens
  misc_feature (70)..(142): n is a, c, g, or t
  misc_feature (150)..(180): n is a, c, g, or t
  misc_feature (338)..(338): n is a, c, g, or t
  misc_feature (868)..(878): n is a, c, g, or t
aaattagcaggttgtggtggcatgcacctgtagtcccagctactcagaaggctgagacagaacttgcttnnnnnnnnnnnnnnnnnnnnnnnnnnnnnnnnnnnnnnnnnnnnnnnnnnnnnnnnnnnnnnnnnnnnnnnnntctgtctnnnnnnnnnnnnnnnnnnnnnnnnnnnnnnntaattctcagtgattggcaaatgatggcctgagggtcacatctggctggtgggcagtttttgtacagctgcaagctaaacatggtttttacatttttagagggttgtttgaaaaaaaacaaactaaacaacagcaagaagaatgtatgacaaagacancaggtggcctgcaataatttactaaccagccttttacaaagaaaagtttgctggcctctctgttctatcaaaaaccaactgagagagatagctactggaatataccaatgagtattaaacaagacaccactgtaatgtgccagtgccatcagcactactcatttctaaaatgaggcacttctgtttgaatatgtacatttccaaaacataattacatctggtaagtagtactaactctagccctttgaaattagacctgcacgtgaaatcatagcattcttaggggctgaagtcaataattacaaagcatttcagatgtcaatcattgagctcttcagtagttagtggtttaagaccatttacagtcttaaatattaataaaactcataatttaggtattgtcaataagaggtgatattgctgcattatttaaataacatctataaaaataggtttagacatcccaattcgttatactcagaagcaagaataactagttaacttagtaactacttaaaaatgggaaatgnnnnnnnnnnngtgcaaaactttagcaaaaggctttggaatgcaaagactggagcctcttagcaatcactcccagctggcataggcttctcctaataaagttagtctgcaatgattgctgtgggaaattaacagctgtctcttgtcagtgagcctttttataaaaaggatgacaggtccatgagcacc

SEQ ID NO: 83994 - DNA, 936 bp, Homo Sapiens
ggggagccactggacaaagcttctgtctctgtgtgtacatttataatgttctaaccaagtctcaaaccttgatgaaaaacacaaaatttttccataaacttatcagaagactcacttttctttctttcttggatagagaaaccattttctgacactaggtttacaatctcagtgtccttacaagttaagtcctaagctcacaggatcctccgagcatgtccatcacctgctctttggctaaggtggcagtgtacctctagatcaacctgggaacagtcacaagggagtgtgacttcttggccataataaactcactcgatagtgtttatgttattaatctgaatgcaacagaagacaaaagcacaggcatgcacacacacacaaccccaaaccactaaaaactacctaaacactgacttagtaaatagtaaaaaggtaatgttgggacttttaaaccttgaatccattagccaggcttgggatgaaaggaccatctaaaatcatgctagtctaaaccatgctcttccacacagctgtttaaaaaccactgggtatgaggaatatgctagaaagaaatgttaaaaatagattgttggctcacacttatttttctaataaataggaccattattactaccaggaaagtcttatttattttgcctgaaattggcttaaagaaagtctcatgacgggatgggatgggctgcgcttctcaatgaactctgaggcagaaatatttgccttggattctgtggattctttaaacctgtgtgctaataattcaaacaatgttgcattaattgtataagggtttttgtatagttttcaaacatctgtggtgtaatgatctttgttaaacatatattctgtaaagtgccatagtctttttttatgtgtagcatatttaaaaatatatatgtatattatacatacaaa

SEQ ID NO: 83995 - DNA, 1009 bp, Homo Sapiens
  misc_feature (33)..(33): n is a, c, g, or t
  misc_feature (75)..(75): n is a, c, g, or t
  misc_feature (107)..(107): n is a, c, g, or t
  misc_feature (147)..(147): n is a, c, g, or t
  misc_feature (163)..(163): n is a, c, g, or t
  misc_feature (606)..(606): n is a, c, g, or t
agctgttgtacgatttgatcaatgtatcgtttngcaatgctaggctgaaaatcagggctctccaaaaatctcaangaagaattcatatccccaactgtaattgttgngccaagaggccctcaagcgtgggttcatcctcttctggantcaaaatctggattancacttggaggaagtgtacgggaagattgttagcactgatcatttttactatatcagaatacgctgattcaacaattacaccacgattagttgaaacatactcaaccagttcattcagtgttgctcttttaatttctttgctcttcaagtctgaaacagagtccatgaaatcaaacagtatacaacactgctgcaacttctgacagaaaagctcttgttgttcatttgaagtggcatctttgagctggggcagcgggtgcagctctgcctggctgccctggctgcgaaactgcgacgaagccctgggaagcgcttctgcctctgcgccttgcggacccgatttccgggtgaagccgtccactttctccgaggccgagatggcggcgctggcagcccccgccggcggcgacgacgacgacatctccccggccctgacgcttggcnagctccggctgctgcttgcaaggcacgggcagcggcggagacggcaggaggaggcgggggagaggcgcggggtgctcgcgcccctgcgccccggccccacggccctccggccccgggacgccgccgagcttctcctcgccgcccgccaacgcctcacggccacatctcagcgctggaggttcctggtccccggcgcgcggcgagctcccggggctgacggagggaagggcgggggcggaggggggtgaagaagttgttgactctgggcgcgcagagcgggtggaagagagcccgaagtttagacaactgaggcgggggcacgggggtgcgggtgccgagcgcgcctctcgtcgcttctgcccccgtcgccagccagccggcaggccagcacctcagcggccgc

SEQ ID NO: 83996 - DNA, 611 bp, Homo Sapiens
  misc_feature (169)..(169): n is a, c, g, or t
  misc_feature (301)..(301): n is a, c, g, or t
gggcctggcagcaaggagcgataggaaacaacaatgtgttcagtcaagctgtccagaaccagcccacgcctgcacagccaggagtatacaacaacatgagcatcaccgtttccatggcaggtggaaatacgaatgttcagaacatgaacccaatgatggccccagatgncagatgagctctttgcagatgccaggaatgaacactgtgtgccctgagcagataaatgatcccgcactgagacacacaggcctctactgcaaccaagctctcaatccactgaccttctcaaaacagaagcangatggaacccagcaggtgcaacaggttcaggtgtttgctgacgtccagtgtacagttgaatctgggtaggcggggacccttacctgaaccagcctggtccactgggaactcaaaagcccacgtcaggaccacagaccccccaggcccagcagaagagcctccttcagcagctactgactgaataaccacttttaaaggaatgtgaaatttaaataatagacatacagagatatacaaatatattatatatttttctgagatttttgatatctcaatctgcaaccattcttcaggtcgtagcatttggagc

SEQ ID NO: 83997 - DNA, 584 bp, Homo Sapiens
  misc_feature (49)..(49): n is a, c, g, or t
tgagcatcaccgttcccatggcaggtggaaaatccgaatgttcagaacntgaaccccaatgatggccccagatgcagatgagctctttgcagatccccgggaatgaaacactgtgtgcccctgagcagataaatgatccccgcactgagacacacaggcctctactgcaacccagctctcatcccactgaccttctaaaaacagaagcagatggaacccccaggacaagaagacagaagagttcttccctgtggtgactacagactagaggaatgctctacaggtgcaacaggttcaggtgtttgctgacgtccagtgtacagtgaatctggtaggcggggacccttacctgaaccagcctggtccactgggaactcaaaagcccacgtcaggaccacagaccccccaggcccagcagaagagcctccttcagcagctactgactgaataaccacttttaaaggaatgtgaaatttaaataatagacatacagagatatacaaatatattatatatttttctgagatttttgatatctcaatctgcagccattcttcaggtcgtagcatttggagcaaaaaaaa

SEQ ID NO: 83998 - DNA, 533 bp, Homo Sapiens
ttcagtcagtagctgctgaaggaggctcttctgctgggcctggggggtctgtggtcctgacgtgggcttttgagttcccagtggaccaggctggttcaggtaagggtccccgcctaccagattcactgtacactggacgtcagcaaacacctgaacctgttgcacctgtagagcattcctctagtctgtagtcaccacagagaagaactcttctgtcttcttgtcctacaaaaagaaaatcgctgcactcattttgctcagggttctggaaagttcacactttaaaaataaaatcaaaattggaatggtcacgcctcctatagggttgccatcaatactgaaagtgagtatcattgctaatgttgccaagattgggagaagcccagtttcagagtctgggtatccagtggtaggttttaaaaaatacatgatatttagaaaactggtttaaaaccattctatggatgatttcagtaggataaaaaatctttatgatgtcactgaaaaattaaagggctttcaaccagtattag

SEQ ID NO: 83999 - DNA, 1248 bp, Homo Sapiens
  misc_feature (71)..(105): n is a, c, g, or t
  misc_feature (1089)..(1089): n is a, c, g, or t
  misc_feature (1123)..(1123): n is a, c, g, or t
  misc_feature (1226)..(1226): n is a, c, g, or t
gcactatgggcgctagggtcgtcataccgaacgacgagcgcagcgagttcagtgagcgaggaagcggccgnnnnnnnnnnnnnnnnnnnnnnnnnnnnnnnnnnncagtcgacggtaccggacatatgcccgggaattcggccattacggccggggactcacagctggaagttagaaaagcctcgatttcatctttggagaggccaaatggtcttagcctcagtctctgtctctaaatattccaccataaaacagctgagttatttatgaattagaggctatagctcacattttcaatcctctatttctttttttaaatataactttctactctgatgagagaatgtggttttaatctctctctcacattttgatgatttagacagactccccctcttcctcctagtcaataaacccattgatgatctatttcccagcttatccccaagaaaacttttgaaaggaaagagtagacccaaagatgttattttctgctgtttgaattttgtctccccacccccaacttggctagtaataaacacttactgaagaagaagcaataagagaaagatatttgtaatctctccagcccatgatctcggttttcttacactgtgatcttaaaagttaccaaaccaaagtcattttcagtttgaggcaaccaaacctttctactgctgttgacatcttcttattacagcaacaccattctaggagtttcctgagctctccactggagtcctctttctgtcgcgggtcagaaattgtccctagatgaatgagaaaattattttttttaatttaagtcctaaatatagttaaaataaataatgttttagtaaaatgatacactatctctgtgaaatagcctcacccctacatgtggatagaaggaaatgaaaaaataattgctttgacattgtctatatggtactttgtaaagtcatgcttaagtacaaattccatgaaaagctcactgatcctaattctttccctttgaggtctctatggctctgattgtacatgatagtaagtggtagcatgtaaaaagtaataatgtctgggacagtggctacacctggtatctancacttgggaggtgaggaggaggatactgagccanagtcgagatagctgggacatgagagcctgtcctacaataagaagaaaatcagcatcaggtggataactgtatccacatcgggagtgagtggagatatgaccangaggtggtgatgacagtaacac

SEQ ID NO: 84000 - DNA, 896 bp, Homo Sapiens
gccccagggagagcaggcctgtatggcgagattggcgcgactggtgatttcggtgacatcggggacactataaatttaccaggaagaccaggcctgaagggggagcggggcaccactggaataccaggtctgaagggattctttggagagaagggaacagaaggtgacatcggcttccctgggataacaggcgtgactggagtccaaggccctcctggacttaaaggacaaacaggctttccagggctgactgggcctccagggtcgcagggagagctggggcggattggactgcctggtggcaaaggagatgatggctggccgggagctccgggcttaccaggttttccgggactccgtgggatccgcggcttacacggcttgccaggcaccaagggctttccaggatccccaggttctgacatccacggagacccaggcttcccaggccctcctggggaaagaggtgacccaggagaggccaacacccttccaggccctgtgggagtcccaggacagaaaggagaccaaggagctccaggggaacgaggcccacctgggagcccaggacttcaggggttcccaggcatcacacccccttccaacatctctggggcacctggtgacaaaggggcgccagggatatttggcctgaaaggttatcggggcccaccagggccaccaggttctgctgctcttcctggaagcaaaggtgacacagggaacccaggagctccaggaaccccagggaccaaaggaggggccggggactccgggccccagggcaggcctggtgtgtttggtctcccaggagaaaaagggcccaggggtgaacaaggcttcatggggaacactggactcaccggggcggtgggcgacaaggccccagggaccca

SEQ ID NO: 84001 - DNA, 860 bp, Homo Sapiens
  misc_feature (711)..(711): n is a, c, g, or t
ccaaagtccagaagttacgcgtcacccttgctctacagccaaacatgcaggactctagtaacccgcgaaatgatgggatagcgttgcaaatccttaaaagagtcttaacgaaatcctggctgacattgacttctccactgcaaccatcgagttcattgtctcctaaaccttgccatggaggcctgtggcacctgagccagccattatcatcaccagcacttccatgagctacaagctggacccactgcagtcctcctgacacactgaaatcagagcctgcacacagagcagcagatgcttcaatgtaaaggtcatttccaggtccttgacaggcgtgcatctgggccagatccatggcaataaccttcaggttgaggctagagggcttcagatgggcagcttcgaatgacaggagcaaggcacaagaggccggaaagggagggtgacattttcagcatctataagatcaactttagaaacatttgggggttgacaaattcccatcaagctctgtggatcttgtacaactgctcaccaccggcttctcatcagcacatgattggtgcagggttctgaggatgattttgagatgttccctgatgtggtcttgtgaggagatttcatgacagatggcaggaagcttcgtggagagatttctgaagacactcctgagctcccaacaccgggcaactctcttccagaggatagtgnggtggagggtagaagagaggcaaagtcaggtttgtcctttcgatccccttcattctccttttgccaccgtaaaacaacttttgcttacagttagacaccagttttcggcagatgaaaatcctctgatttcaggcatttttgtcaattaa

SEQ ID NO: 84002 - DNA, 1902 bp, Homo Sapiens
catcctcatcaaaacatgcctggccacctggactatgcggcggccaatgatgttaaaggctcccggtgcattatcccccgcaccactgctgtcctcttgggcccaatgtagctcatcatgtcctggggaagaagtgaggagtgttcagatatcacgtacacagtctgtcttctcaggctttctccaggacttgcgggtctccaggaagatcttgaccagggacaggaggatggcacaccataggcaggaagagtgggatgtagatggcaaacttctggtcatcagggaaataaaggaggtggaggagtgacgggtcaaagaaggcaagctcagaggatgtcacagcttcctggctggcgacaaaggcagatgccaggtgcccagacgccaactcttctgccgacttctggacggcagctacagccttgtacacctcagatgccacgtcgtccttaatgacaatgttgctgatcttgcccagaagctgcgccagagaggtaagggtggtggtggctgtgaccaggttctccactgaccgagcccagagcagccggtctagctcccaggtcattagcccttcactcgtaggccctgaaagcaggcattttggaggcagctggggctgagcaatcccaaagagcaaccgcaactggtgccaggaacacctccatcacttcggcaccatgtccacctcgacttctcactggcaagcactgagggcattataggttttggagtcaaacattatataccataatgccaccccagcggggactatggaaggcattggtggccactggagcgccatccttgtcctgaatgtacagcggtgagtgtgcaagctcaggcacgtagagtagaaagttgagcacagggtacaaggaggcagcactggatcccagccgggactccactgggttgatgacatgggggaggctgtgcatgtccaaatagtagctggaggaagctgagtcaaagcggggattcacccccaacattgcatagtaaagaatctgagagtccacagagaagttgccagcggcaccgagggcattcaggaaaggttgcacatagcgccggacagccccctcaatgtcccagtagacatcatgggacttggggtctgggttgagtaaactgaaggtgatctcatagcccaagctggacttgagaggccgcctcttctcagcgctccacttgtcctctggaaggtggtcagccagagcagcagcaagcaacatcctcagtcaaagacatggcctgggccacctggactatgcggcggccaatgatgttaaaggcctcccggtgcattatcccccgcaccactgctgtcctcttgggccaaatgtagctcatcatgtcctggggaagaagtgaggagtgttcagatatcacgtacacagtcagggagccctccgcttgttcctgaggctcatctaacatggcttctgcctcttgcacactgcccgatgacagggcctcctcctcatggtccaaagccctccgataggccttctggaaacggcatttgattttcattttgtatttcagaggaatctctctttcatgcacaacggtgaagggcagcttctcctggtcgtccaggggcactgactcccgcgtaaacacgacagtgacaggcaccatgaggcggagctgaagggcattcaggccactgatctgggagtaaggcaacgaggcccggtaggtctccgtggtcttccaccagagcggtagccccagcacgatggccaccgcagcgaagaagagggcggcgcgcttgccccgggccacctctaggtgtgtagccgcagccccggcgccgccatgctagcttccggctgctccggcccctcgtgccgaattcaaccccaggcctcgtacctagcgataagcttg

SEQ ID NO: 84003 - DNA, 362 bp, Homo Sapiens
tgcggccgcctcttctcagcgctccacttgtcctctggaaggtggtcagccagagcagcagcaagcacatcctcagtcaaagacatggcctgggccacctggactatgcggcggccaatgatgttaaaggcctcccggtgcattatcccccgcaccactgctgtcctcttgggcccaatgtagctcatcatgtcctgtgggggtgagcaagagacagaatgcccatggctcagaaaagaaagccaaaaagcaccctggctcctactgttccgaatctgcccctttgccaatgaccaacaggtttgcacctctcttgagattcatgagctattaactcagcatttctgagctatgagtatata

SEQ ID NO: 84004 - DNA, 865 bp, Homo Sapiens
  misc_feature (854)..(854): n is a, c, g, or t
cgtagtttatgtgttcattagattcactgaaaaactgattgttaatgcttgtaacccttccttatatgatggggtattttatattcaggttcatgttaatctgcttcttatagaagctaggatgcaagcagaactcctttatgctctgagagccattacccgctatatgacctgatgcctttccttcattaaagatgattctggaatgatcagcagatatagtctacaagggggaaggtactaagccccaggaccaatggtagacaaaataattcagaaatccattgtgccatgattcctttagtttctgctatttttctgtggaaaaccactgctggcacaagcagtgactgtttggcagcttcaagtttagagctgtgaagacaggctgccattcacagtattttgctttttgacagtacaagatgctgtgtaactgttttaatacagcaaatagtaactctccaaatcctgttgcttttatgttaaataagataacaagaattggagcatgcaaagaatgggacttggataatgacttaagctttatatgtaaagaattttagaagatcttggtgctgctattcctgctggaggaatgaatagatggctgtttcagttaagctattagtaataaaagtgaacatggctactatctgagcctacatacataacttgtgtgatttcaaattaaacttgcattatgtgttaattttcttgcatctaaaaaagcatagaattcctactcacacagctcagcaacaaccattttgatggtaacagttaatttctttcattagttttttaaattcagggttctggatattaaattaaaatggcattcttaaagattntcttcaaaagc

SEQ ID NO: 84005 - DNA, 667 bp, Homo Sapiens
  misc_feature (653)..(653): n is a, c, g, or t
caaagttagagttggggctggcgctccggagttgctgggctcagcgcagctcccattcattaaggaaccagctgcggaggaaggtggccgagcgcccgcgctgcccactcgctcgctcgcgcactcagacgcgcgccacaacagcgcgccccaagctgcgcagctctgcaaaagtttctgctcgggatctggctctcttccccttggactttagaacgatttagggttgacagaggaaagcagaggcgcgcaggaggagcagaaaacaccaccttctgcagttggaggcaggcagccccggctgcactctagccgccgcgcccggagccggggccgacccgccactatccgcagcagcctcggccaggaggcgacccgggcgcctgggtgtgtggctgctgttgcgggacgtcttcgcggggcgggaggctcgcgccgcagccagcgccatgcaaaactacaagtacgacaaagcgatcgtcccggagagcaagaacggcggcagcccggcgctcaacaacaacccgaggaggagcggcagcaagcgggtgctgctcatctgcctcgacctcttctgcctcttcatggcgggcctcccttcctcatcatcgagacaagcaccatcaagccttaccaccgagggttttactgcnatgatgagagcatc

SEQ ID NO: 84006 - DNA, 530 bp, Homo Sapiens
  misc_feature (411)..(411): n is a, c, g, or t
  misc_feature (426)..(426): n is a, c, g, or t
  misc_feature (436)..(436): n is a, c, g, or t
  misc_feature (442)..(442): n is a, c, g, or t
  misc_feature (460)..(460): n is a, c, g, or t
  misc_feature (488)..(488): n is a, c, g, or t
  misc_feature (507)..(507): n is a, c, g, or t
  misc_feature (515)..(515): n is a, c, g, or t
cagacagatctggagcctctcttcattctcagtaattgctagtcccaagaactagaattgcaaatgggcacaacctatatccttcctgtggaagaggaggccactctcttgagctgaagttccagaagagcagttaatgttcaagagaaattgaactcaactcagcaacaaaggactctattttgaagagcaacatatcacaaagctaaatgtgattgtgccaaacacattaggtgcttatttggggtcatgctaggcctttatcaagtaactggaaaacttttcttgcagccacaatctcaatgtccgttagtaggaagataagaggggagaaaaagctgtagaacaaatgtttggggttccattgaaaactaatgtctgcaatattttctcctcacacttggaaacgtnccagttcatttcagnctgttgtganacagtntgaagggtttattattgnaaaataagtttgtttgtttgttatgttnggttttaatgtgcccttgnccttaatnccagtcttgtggagt

SEQ ID NO: 84007 - DNA, 1007 bp, Homo Sapiens
  misc_feature (832)..(832): n is a, c, g, or t
  misc_feature (836)..(836): n is a, c, g, or t
  misc_feature (871)..(871): n is a, c, g, or t
  misc_feature (876)..(876): n is a, c, g, or t
  misc_feature (902)..(903): n is a, c, g, or t
  misc_feature (909)..(909): n is a, c, g, or t
  misc_feature (942)..(942): n is a, c, g, or t
  misc_feature (950)..(950): n is a, c, g, or t
tagaggctgccttatgctgtctcatccagttcctttgcggtcctcttcttcagcacatgccaaagctgttcctcacggcctgtgagacaagagcatcttggatgtaggacaatggaagagttagatgccttattggaggaactggaacgctccacccttcaggacagtgatgaatattccaacccagctcctcttcccctggatcagcattccagaaaggagactaaccttgatgagacttcggagatcctttctattcaggataacacaagtcccttgccggcgcagctcgtgtatactaccaatatccaggagctcaatgtctacagtgaagcccaagagccaaaggaatcaccaccaccttctaaaacgtcagcagctgctcagttggatgagctcatggctcacctgactgagatgcaggccaaggttgcagtgagagcagatgctggcaagaagcacttaccagacaagcaggatcacaaggcctccctggactcaatgcttgggggtctcgagcaggaattgcaggaccttggcattgccacagtgcccaagggccattgtgcatcctgccagaaaccgattgctgggaaggtgatccatgctctagggcaatcatggcatcctgagcattttgtctgtactcattgcaaagaagagattggctccagtcccttctttgagcggagtggcttggcctactgccccaacgactaccaccaacttttttctccacgctgtgcttactgcgctgctcccatcctggataaagtgctgacagcaatgaaccagacctggcacccagagcacttcttctgctctcactgcngaanaaggtgttttggtgcaaaagggctttcatgagaanggacnagaagccatatttgccgaaaaggatnntcttangcatgttctcacccccaaaggtgtgggtggctngcaatcgnccccagtggttggaaaaactaccctttcagcccattggacactggtctggcaaccca

SEQ ID NO: 84008 - DNA, 1018 bp, Homo Sapiens
  misc_feature (18)..(18): n is a, c, g, or t
  misc_feature (59)..(59): n is a, c, g, or t
  misc_feature (107)..(107): n is a, c, g, or t
  misc_feature (140)..(140): n is a, c, g, or t
  misc_feature (143)..(143): n is a, c, g, or t
aattcaattgtcgttgtngtgccctgcgttgctccgcccaggggccagctggtccggancttggccgcacctgggagtcccttgctgtacgtggggtgggaagctgncccttccctcaccagccttcttgctctggggcnccntgccgtctgtccagaaggcctccccacactgtgtggagactccagcagacccagtctctgggttggggggcctgctggtctctgctgtgctggagcaaagcaggcacggaggtgactcagtgggtggtctggttccaggctgttcccctgacatgggctggcctggggacctaggccaaggccagcgcacaccaggcctcttggcgcagagcccccctgaggccagcctgggggctcggggccgtggaggggaaggcaaagtcctcaggctcgaacttgaactccaagtggccgggggcaagagagtcatcctcctggccagaggcctggggggccatgctgggcccagggcacactggggacgccaggctgggcttggctttggaagtggctgctgagctgtcagtgctggcgacagcagatggggaggccgaggcattccttgtggatcctgaggagccctggccttggcgatggtctttggcttccgcttccgtgtctggatgctttctttcttcatagccagaggccgcggcaccccgtgcagcttcatgtagaggccgcaggcattgcacacgggctccccctccgagttccgccgccacagcgtggtgttggtcgtgtggcagttggtgcagcagaggccggcgcggcgggacgaggacaggcgcttctgaggccgaacgagcggccggttgacgccattcatcttgtggtagaggccgcaggcattgcacaggtagtggccggtgccgtctcggcgccacagcggtgtggacagggccccgcagttgacacactcacgaccctcacccgggaactcctcccaagaagtcggacacgaaggtgggcctgcggcctgggagccgtgcaga

SEQ ID NO: 84009 - DNA, 511 bp, Homo Sapiens
  misc_feature (450)..(450): n is a, c, g, or t
ataataataaaaaagatgttttccctacaactcagacttttcatttgaactcggtccagcaaggaaaatataacccactcgaagtctttaaaacagaggaaatttaatataaagaattccactggtgacgaaagagcagagaagcccagaagatagtgaggcaaccctgataggaacataactaggaagccaagaccactcctatggttgcaggggtgatgggaaagctggtgtacttggacccagaagccaaagttgctgcacccaccttggagacatagacactggcagtaatacctcagggagaagaaagaaatctagggaaatatcctggcttctttccttctctctctcccctagtcttcctaccagtgtctcccattagccaaatctacctagaagccagaaaacaagggaacccctggaaatgtagcccataagataaagagnccaaaggaaatagtcttgagcagcagggagcccaaatgcagtgtgtatggtttattcactc

SEQ ID NO: 84010 - DNA, 707 bp, Homo Sapiens
  misc_feature (505)..(513): n is a, c, g, or t
caggtttccaaaggacacagcttatgtgcttttgtataaaaaacagcatagtactaatggtttaagtggtaataacccaaccagtggactctggataaatggagacccacctctacagaaagaacttatggatgctataacaaaagacaataaactatatttacaggaacaagagttgaatgctcgagcccgggccctccaagctgcatctgcttcatgttcatttcggcccaatggatttgatgacaacgacccaccaggaagctgtggaccaactggtggagggggtggaggaggatttaatacagttggcagactcgtattttgatcctgagagagtccaaaatgcactggtcacgaaacgtctaatactatgactgttaaaatgtcagactataacaaatatctatcttttatttttcattagacccttatacttcaagagaacacactcagtgcttgtttttattttcttgacacatttattaacaaaatgcatcatggnnnnnnnnntctacctcttaaaattccatttgcttttatggttagacatgcttgaccaaaaatgttcagaagaaaatatgtacctggtccctaattaagctgcgttaaatttggtagaagcatttaaatggtctatcttcagttttactgaacaaaaaatgtaatttatttagcattctttataaaagaattaatgctagagg

SEQ ID NO: 84011 - DNA, 1242 bp, Homo Sapiens
  misc_feature (1096)..(1096): n is a, c, g, or t
  misc_feature (1172)..(1172): n is a, c, g, or t
  misc_feature (1200)..(1200): n is a, c, g, or t
ggcgcgcacttggccccgacccccggacagcgtgctgtgctgtcagcctcttctgtcctccgcgcggcgtgcacttgctcccggcccctgcgccgggcggcggcggtggcagcgcgcaggcgcggcggattccgggcagtgacgcgacggcgggccgcgcggcgcatttccgcctctggcgaatggctcgtctgtagtgcacgccgcgggcccagctgcgaccccggccccgcccccgggaccccggccatggacgaactgttccccctcatcttcccggcagagccagcccaggcctctggcccctatgtggagatcattgagcagcccaagcagcggggcatgcgcttccgctacaagtgcgaggggcgctccgcgggcagcatcccaggcgagaggagcacagataccaccaagacccaccccaccatcaagatcaatggctacacaggaccagggacagtgcgcatctccctggtcaccaaggaccctcctcaccggcctcacccccacgagcttgtaggaaaggactgccgggatggcttctatgaggctgagctctgcccggaccgctgcatccacagtttccagaacctgggaatccagtgtgtgaagaagcgggacctggagcaggctatcagtcagcgcatccagaccaacaacaaccccttccaagttcctatagaagagcagcgtggggactacgacctgaatgctgtgcggctctgcttccaggtgacagtgcgggacccatcaggcaggcccctccgcctgccgcctgtcctttctcatcccatctttgacaatcgtgcccccaacactgccgagctcaagatctgccgagtgaaccgaaactctggcagctgcctcggtggggatgagatcttcctactgtgtgacaaggtgcagaaagaggacattgaggtgtatttcacgggaccaggctgggaggcccgaggctccttttcgcaagctgatgtgcaccgacaagtggccaattgtgttccggaacccctccctacgcagaccccagcctggcaggcttcctgtgcggtgtctccaatgcaacctgccggcgggccttcccgacgcgggnagctcagtggagcccaatggaaatccccagtacctggccagaatacaagacgaatcgtcccaccgggattgaaggngagaaaaccgtaaaaggcaccatatgtnagaccctttcaagaagccttccctggaaagaaggaaaatccc

SEQ ID NO: 84012 - DNA, 604 bp, Homo Sapiens
  misc_feature (15)..(15): n is a, c, g, or t
  misc_feature (22)..(22): n is a, c, g, or t
  misc_feature (55)..(55): n is a, c, g, or t
  misc_feature (82)..(82): n is a, c, g, or t
taaaaaccatctgtnattctanacctataaaaaaggaactgattatgagtagtgnacaccaaaggaattccagactgagggnacaacttaggcagagttatagatatcgcgaaatgtttagggaacaaagatcacctgaaaattaccaaacttacatgcaaactgtgaactcaccatttagggagcatcttgaatatgaaatatttcacagaaagaatactttaagagaaaggtgtttaagcagataagtgaatgtgtatcaaaaaaaagtttttgtgacaaccatgtgaaagatggtttctaaggaacatgaaactaagaacagaaaattaattcccaaatggaaaagaaaggaagagtgtttttaagaaatgttaaacagaatgaagccaggtacggtggcacacttgtagctagtcactcaggaggctgaggtgggaagatcgcttgagcccaggagttcaagtccagcctaggcaacacatttttttaataataaaaataaattaagaatagaatgaataagaattagtgagccgccacctatattatcatattttcactcccaagtgattaagagatcagccaagatcaggcagcctac

SEQ ID NO: 84013 - DNA, 557 bp, Homo Sapiens
cgcatttatctaactcttttgagattcttggaatatagcatatctgatgaaataaccaaggcagttgaagatgactttgtggaaatgcggaagaacgaccctcagagcatcactgctgatgatcttcaccagctgctcgtggtggctcggtgtctgtctctcagtgctggtcagacaacgctgtcaagagaacgatggctgagagcaaagcagctagagtctttaagaagaacgaggcttcagcagcaaaaatgtgtgaatggaaatgaactttaaagatgtaatacctatgaagagtaatgggcaaactgtagccacataattgtaaaattcagatattcatttataccacattgttttataggtaatttctatcacaaaccagtgacatttcctgaaatcaagcctggtaacacctgatgtttatatgatattcagtaaggacttttaccttactgatttcatggagcttttgaagtttgttttataataattatataaattagtaatgatgtaaaaaaagtatttgatattaaaagtttaatattgataatgtt

SEQ ID NO: 84014 - DNA, 1451 bp, Homo Sapiens
  misc_feature (1230)..(1242): n is a, c, g, or t
aggaaactgctggactgagaagtttcatccggcctcatgatgtcatgcaaggctcacagcaatatcaaaatgcaaagcaccaacaaaataaggctgtacaagggagagtgagcgataaacagaatgcttgagctgtgattctagaaacacaaacgtatttcaagtctaattggctctacagaacctagtcaggttttcgtttttaattggccaatctgggctcagtcttcgcacttactatgaaaaagttggataagaaagttggggcttgcattgagattacaccagtaggtagtcaagtactttattattgcttctgcatcttccaaagcatcatctgccgatagcacagtgattgcagtaatcacagcccatgtttcattcatatggtatcagcaattaagcagtattgcaaagaatgccaatgaacccacaccaacctgtttgacagtgtggatagatgtgacaattcatcctcccatctaacctcaaattatcagtaaaacttaaaatgttttttccaccaaaacactgagctggttacacagagacttggaacactgaattgcataatttttgtacatgcctttccttggcggggtatggagtgggaggcagaagacgggagacggggaaagttcaatctcccccatacagtgggaagtagcatctttacttttggaaaacctgtcaaaaccaaactttagctttctcagcctcagctaagactggaaagttaaattaaggtcgcaattgctagctagatggcattaaatgtcactaacctgaagccaaggatttaaatagtaggcttcctgcgtggttgaattccaaccctgttccaaagttcaaattatttgtttcccatggcaacttcctgaaacctaagtcagtgtttccgaaaactggccgatcagaacagccagggagtttagaaaaatacagactctggtttccctcagacttcatacttcagaatctcaaggatggaaacccaggatctagtcatcctggctgccacacacatttgagaactgaggatccaggctaatgcacatccagcctccactaaagaatatctttatggtctcgagtttcaaactctttctctttggggtaaggggtgaaagaaggaggctgatgtctgggcatccttctgacccttttcaggttcatagattcaaaaaatacatatattggggtcgccaaagctttcatcaggcatgaagnnnnnnnnnnnnncttctgcaaatccagtctttttgctgatcattatattttccattgggtaatatacatgagaagttatgttcagcacaggtttatgcctctacattgagaacttttaggacttaagagttttgtttgtttctaatcccattatttcagagggcagttaattgttttttaatacgatggattggggaacctattcagtacagttaaaaatt

SEQ ID NO: 84015 - DNA, 1577 bp, Homo Sapiens
  misc_feature (78)..(78): n is a, c, g, or t
  misc_feature (696)..(698): n is a, c, g, or t
  misc_feature (1419)..(1419): n is a, c, g, or t
  misc_feature (1435)..(1435): n is a, c, g, or t
tggccgcctaactaaaaaactcaatggccttgctgatttagaggcttgcattaagacgcttcatggccaaggcttttntcagccaagtctaacaaccctgactgctttcagtgctggaggggtgcttgcaggagcattgtgtaattctaatccagagctggtgagagcggtgactttggaggcacctttcttggatgttctcaacaccatgatggacactacacttcctctgacattagaagaattagaagaatggggggaatccttcatctgatgaaaaacacaagaactacataaaacgttactgtccctatcaaaatattaaacctcagcattatccttcaattcacataacggcatatgaaaacgatgaacgggtacctctgaaaggaattgtaagttatactgagaaactcaaggaagccatcgcggagcatgctaaggacacaggtgaaggctatcagacccctaatattattctagatattcagcctggaggcaatcatgtaattgaggattctcacaaaaagattacagcccaaattaaattcctgtacgaggaacttggacttgacagcaccagtgttttcgaggatcttaagaaatacctgaaattctgaaacactgcattcaactgggaattggaaacacactgaaatatttcatagtcttacttccaattgagttagcaaaaannnaattaataacttgagacttttaagttattaattttttaaaatgtgcttctccatctaaattttgcttagtctacatctcacttgcttatactattctctccattgatgcacatgcccattaacctaggaaagtagttttcaaatcatgctccttagaaggatgtggagtagagggaagggaaggattggtgatagcagagctccaggcctcccttccagtcagaacagttgagcagtttacaaattagtgtcctgcctctttgctagcaaatgcttttagacactgtggcagtgagtcatcctctaatttctatgactgcattttaagggaaaagataaaattcttccccttaaaattcgttaaagtttttgaataatctggggtcctaatgtgttctggtcatccctgattgatgctatctgaataaagttataagctcctataagcctaatttacttttaaacattttatttttttcaaaacatttgagaacctttcttaaagcggttacattcaagctacagaaatatcgaagaattaatgattgttcaccaagcagcatgtgtacatgaagctattacaaatgcttacaatcccactgaaatgccagtgtcttcatctcttcataaaggtgcctaacacgaggtatacagtatgttcagtacactggaatagcatgctcgttggaacaaagcatctatctctgaaagctgtttggcntgaaggaattctcgtntgtgttcaagtgagtccctctccctgtccagaaaatgcactgtatcaactttactgctttgcggagattggacttacttatctattagcggaagccgaatctatatgagttacaggtgtctcaaatcagacccgtaagtctg

SEQ ID NO: 84016 - DNA, 617 bp, Homo Sapiens
  misc_feature (466)..(466): n is a, c, g, or t
  misc_feature (544)..(544): n is a, c, g, or t
  misc_feature (550)..(550): n is a, c, g, or t
  misc_feature (580)..(580): n is a, c, g, or t
  misc_feature (587)..(587): n is a, c, g, or t
gcaattcctcctggctcagacccctccaggactctggcactgatctctcttggtctcggatttgaggaaataaaaatagaagaggaaaaacacagaactctccaaagctttggagtggctgcagccatcctggatggaggcagcatgcgcctgggctggaagaaccacggtcccttgactgagtctcggtgcttctccccgtccctctcagacacggttctcatggtggacgagatggggccggatcttaggcccgggattctgcagaatgcaaggctcagagcttgcctagctctgagtggcttggagactggtgtgaggactgagggtgtccacagatcaccaacccacaccggcagcctgagttggaagacagacccccctgcagccccgtctttgatggctgcctggaccacctgcaggagaagcccctcagaagatgggtccctggaacctttgcgcaggnttgctgaacctcaggagttcactcagcacatcgttcgctctcagctgccccagcaggagctgcgcagaaccgccttgnaggcgngctcagaggacacttcctcacttttataangaatcgngagcactctctcctcgctttggccggcaga

SEQ ID NO: 84017 - DNA, 477 bp, Homo Sapiens
  misc_feature (407)..(407): n is a, c, g, or t
caaatatggtcaatgggttttttttaacaaaggtacaaaaatcaatttaatggagaaaagacagtcttttcagcaaatgttactggaatagttgtcatccatatctaaaaaacaacacctcaacctcacatctcatacacagctgaacttaaaattgatcatagatctaagtgtgtgaaatgtaaaactataaacctccttgaaaaaatcatagaaaatcttcatcacctggacttgggcaaagactttttactctaaaagcgtgatccatagcagaaaatgttgataaattgaatttcatcaaaactaaaaatgactgctctgcaaaaggatgatgctaagagaataaaaaagacaagctaagattaggagaaaatattgcaaagaacatatccagtgtgtgttcncgaatatacagagaaatctcaaaactccacagggaagaaaaccagcccattggaaaatggggccaaatac

SEQ ID NO: 84018 - DNA, 450 bp, Homo Sapiens
aagcgcgacgtgggattaggggtccgcgcgcaacagcagggaaaataataatccggaacaggtaccgaagtggccagtttgaggggatcccccgttggtcagcgcggaactgcccgtgggtcgggctgggtcggcgcatcctgcccctctgcaccgcaaaaccatatttgccttgttcaaggtcccaaaaccgcttgcatcttcctcctaaactggaataactctcctttagtttggcgggtgaaataaatgctttgttggccccctgaaaagatgtgtctttgataattaaagagaatctcctcctcggtgtttatctaagcgattgtgcaaactgataaaaagtaggcactagcctgcagggaaaaagaggaaaggtgaagggagagatcttccacctcaaggaagtgcttccccatgtattaggctctctcagccttggaaaacccg

SEQ ID NO: 84019 - DNA, 432 bp, Homo Sapiens
  misc_feature (27)..(27): n is a, c, g, or t
  misc_feature (30)..(30): n is a, c, g, or t
caattaggtcctgaatggcatggaatntcntactcccaagctgacagcaagaagaaatcaaacctcatgatgtctctctttgagcctggcccagaacctctcccatggctagggaaaatggcacagttgggtcctatttcagatgctaaagaaaacccttatggcgaggatgacaataagagtccattccccctgcagcccaaaaacaaacgcagttatgcccagaatgtgactgtctggatcaaacccagcggcctgcacgacagatgtacacgaagattttaagaaatgcaaggaaactacctgaaaaaacacagacattctataaggagctgaacccgtttgcgaaaggccgctctaagcctttggtttcctgggacctggctgaaaggggtggctgacatgctggaaagggaatgcacactgctgcct

SEQ ID NO: 84020 - DNA, 471 bp, Homo Sapiens
  misc_feature (180)..(180): n is a, c, g, or t
taaggcaagagagggtggaggaaattctgcaggagacaggcttcctccagggtctggagaacccagaggcagctcctcctgagtgctgggaaggactctgggcatcttcagcccttcttactctctgaagctcaagccagaaattcaggctgcttgcagagtgggtgacacagccagggncccggcccaaacatgggcaagggtggagaacagatgcacgagaaatccatcccctacagccaggagacccttgtggttgactagggctgggagcagagaagaagcctggcgccctcggcctccccggcctttgcccttgctttctgaaaatcaggtagtgtggctactccttgtcctatgcacatccttttaacttgtcccctgattctgccccgccctgtcctcctctactgctttattcttttctcagaggtttgtggtttaggggaaagagactgggctctacagacc

SEQ ID NO: 84021 - DNA, 543 bp, Homo Sapiens
  misc_feature (287)..(287): n is a, c, g, or t
  misc_feature (486)..(486): n is a, c, g, or t
tttaaacggtcccctgggacttcaggtgaaggagtcagtccagttattactgtccgaccagtaaacgtgacagccgaaaaggaggtttccaccggcactgtccttcgctctcccaggaatcacctctcctcacggcctggtgcaagcaaagtgacgagcactatcaccataacaccggtcacaacgtcatctgctcgaggaacccagtcagtgtcaggacaagacgggtcatcccagcggcctacacccacccgcattcctatgtcaaaaggtatgaaagcaggaanagccagtagtggcagccccaggagcaggaaatctgaccaaattcggagccttcgagctgaagactcaagtctatggaaaattagaagctgaagaaatcttgcaagccagcagcaccaacctctctcggatggggggaaggggctgagggcagtgggctaagggggtatgttgtgcagatgctactgctgccgtgaaagngaaccttcatctgtttgtgccagctctttacatgtactaatttaagttttaaatatt

SEQ ID NO: 84022 - DNA, 833 bp, Homo Sapiens
  misc_feature (703)..(703): n is a, c, g, or t
cagtcgacggtaccggacatatgcccgggaattcggccattacggccggggggagctcattcttttcgccaaggctcacatgctccttgcctctgctctgtgcactcacgctcagcacacatgcatcctcccctctcctgcgtgtgcccactgaacatgctcatgtgtacacacgcttttcccgtatgctttcttcatgttcagtcacatgtgctctcgggtgccctgcattcacagctacgtgtgcccctctcatggtcatgggtctgcccttgagcgtgtttgggtaggcatgtgcaatttgtctagcatgctgagtcatgtctttcctatttgcacacgtccatgtttatccatgtactttccctgtgtaccctccatgtaccttgtgtactttcttcccttaaatcatggtattcttctgacagagccatatgtaccctaccctgcacattgttatgcacttttccccaattcatgtaggtggggccatccacaccctctccttgtcacagaatctccatttctgctcagattccccccatctccattgcattcatgtactagcctcagtctacactcacaatcatcttctcccaagactgctcccttatgttgtgtctccgaggggacttaaggaaccataagtgggggcaggtttggagagctgcttccagtggcatacttgactgagaattcctgnagcaaaaggaaggcacccttgactggcgggatcagacagatggcactatggggtgggaagtggtgtccctttcacactgtggttgtctctgcggaacggatctccccgaatctccatacaccagtgaaca

SEQ ID NO: 84023 - DNA, 786 bp, Homo Sapiens
  misc_feature (691)..(740): n is a, c, g, or t
ttgtaaccccgcggccaaccccctgtccggcagcctctccacgcactccctggagcagccgtatctgcaccagaacagccacaacgccccagccgagctgcaaggcatcccgcggtatcactcgcagtcgcccagcatgtgtgaccgaaacgagtttgtcttctctttcaacgccatggcgtcctcttccatgcactcggccggcgggggctcctactaccaccagcaggtcacctaccaagacatcaagccttgcgtcgatgtgaggctgccgccgcacgccctcctggtgcaggcaggcgggtcacagggaccctggaccggcacaagaaactgctttcttctcgaggtataaccgtcggcagaagaaaagggttccacctctccccaaccggagtttttggcaaggagtccccaatgcaaagacacagcgctgcggttggcacctccttcctcactccctcaaaattgttaagaaatgttagtggtgggtctgatctgactgcagccatcggtaaataaaacgtttttgatcctgttgaacccgcctgagacggtgctgtgcaggggaaagcccccgcacccacacaggaattctgctgaggtcccccctccttccggccaatggcagaagtgggggaaaatttttagaagaaaagcaaacatgtgagaccaatcattatcaaatacnnnnnnnnnnnnnnnnnnnnnnnnnnnnnnnnnnnnnnnnnnnnnnnnnnaaagaatgtcttggaatgcgcaagtctccctttagagccgtctttc

SEQ ID NO: 84024 - DNA, 541 bp, Homo Sapiens
  misc_feature (526)..(526): n is a, c, g, or t
ctggaaattgtacttcagacatttagagcagaattccaagaactcaaaagtgaaaagcaacaagcagctttcccaaagcgatacacttgctttggtcaccagaggaggacagagcttagagcagctgtggagaatctgaagcattctgcggagttcttaagcgctcccctggcaaacaaattgaagtgccaaacagcactcgctgcagggtatttttagagtcatagctgagagcttgttagctaagacccattgggctttcctcaccaaaaaaggaagtgttattccattactaagccgtcatggaagctacctctgcgcatcagacttcagaccttgaacaaacttaaaaccttcttggggagcccggacgtccaaagagatgtcttctgggaagccactgggcaaatttgccagggctccaggaaagggctctgggctcaggttgcagacagctgagaaaagatggccctgtcaagccaccctctctcagtctgaaaacatccaacatccccagaaggcttanctcctttttgaattg

SEQ ID NO: 84025 - DNA, 352 bp, Homo Sapiens
gtaggctaccctttaatgtgtctcatttggagatagaacagtgagcaggttgaccagctgctcttcatgtacttcttgcagtaaatccttcaaagaatgaagagtgaagacaattcattttccctcctggaatttttccttcttattattttgcttttttaaaggttgttatattcaggtataggcataagacattataaaagataaggggtatcatgtgagggaggaaatccgacaatccaaaaaatcttccatagaaattaaaaatcagaacttgggggcaaggtaggaggcaacacattctttctacagagctgtgacacatagcccaactgtcctcaaaagcaggaat

SEQ ID NO: 84026 - DNA, 749 bp, Homo Sapiens
  misc_feature (733)..(733): n is a, c, g, or t
gagacaaaagaggaaatactccgcgtgcgcttgtagaaggggagtcgtctccagctccgaaccccgggagtgttcatcagcggggaatctggctccgaattctctttttttctcccgccgattgctcggaagttggtctaaagcagaggttggaaagaaaggaaaaaagtttgcatcgagactggatttatttgcacatcgcagaaagaagagaatccaagggagaggggttgatgcaaagccgcgatcacggagttcagatgtgttctaagcctgctggagtgaccacacttccaagacctgatggaggccagagctcagagtggcaacgggttcgcagcccttgctgcagacgccccgtgacggtggcagacagcgtggggagcccgaccccagagacgccctcacccagcaggtacatgtcttgtctctggatcagatcagagccatccgaaacaccaatgagtacacagaggggcctactgtcgtcccaagacctgggctcaagcctgctcctcgcccctccactcagcacaaacacgagagactccacggtctgcctgagcaccgccagcctcctaggctccagcactcgcaggtccattcttctgcacgagcccctctgtccagatccataagcacggtcagctcagggtcgcggagcagtacgaggacaagtaccagcagcagctcctctgaacagagactgctaggatcatccttctcctccggngctgttgctgatggca

SEQ ID NO: 84027 - DNA, 391 bp, Homo Sapiens
taaccataagggacgaaaccagaagaattcctctgaccacttacaattaaaatattttgtcttctttaaaaaaataagtaaaggagaaatattttcctacaagagtactgaatttcaggaaatgggatagagcttctaaccaatgtattccgtcaagtaagataataacagctgacctgccaacagcattacagggagattctttgctcagctaacacatttctgtttttcaaaattgatgcttaattgtagctgttattctaatttgtgacatggaactaactcatgcttcaatcccttgatagagcaaaactcagaacaggttatgtaaaaatatagtctggctttagaatttgttaattcacctgctttgccacagaaaatggaggct

SEQ ID NO: 84028 - DNA, 389 bp, Homo Sapiens
  misc_feature (52)..(60): n is a, c, g, or t
atttggttgggaacagctgaatactaggaatatatcttgctctatagaggannnnnnnnngtatgtttcaagcttcagcctttaacctatacctttgtagtgcaccatatggtgtgtgactttcacaggacttcgcagcacctggttcacatgtggcactgaccgcgtcacatccacgcactcccaaaggccagaagtatctgaccgacctacgccactggaaacacacccaccgcaacctcaagaaccagactgtgcagagggcattgcgtcccaatctttagtccttgctgaatcagttctctaatattttacctcatttgtgttccacctctagattacttcaggtttttttcctttaaaattagttactaccactcaaatgtatt

SEQ ID NO: 84029 - DNA, 286 bp, Homo Sapiens
gttttttaaaggaaagaacttacaaagcgtttactctctggagaaacaaacaacaaaataaagagggcaaaaaatgctatctctaagttaaaagatgggtatgtaagaaaaacaaatccataaaagtgtgtgagggcagacattcttttaaaaagtgtcttggaattttgttttttcattctcactttagttaacttttaaatgatctggggatgacaggtatttttatattcatcattacaaaatgctaaattccacctttgggaaaaaataagccattttacta

SEQ ID NO: 84030 - DNA, 1109 bp, Homo Sapiens
tgacaatttctgtgttagtaaaaagatgtaaaataaagcttggtttaaaacactgttttttgaacacttccttgtttaattatttataccatgaattactagtaattgacactgttaactagtcctatttttttaaataagagcatttatgacacaaaaaattaaacagtgcagactgacatataaatcaaaacaaatgttctttacatgtttgctgttactgtagtaacacacatgtgtaaacttaattctcatatttttttcttgtgctggggttgtgtcctgggttcattctctaaaatgctgttcaccttagaccaggaaaaatattaaccttacagactctgtttcaattcatagccaaatattttcaaaagagtgactttgtaaaaatatgttccaatgacaaattgattcattatgatgggatcaattattccaaagacttcctgtctttattttcttgccatgcctaccttttagccataatacaacagaatcaaatattggccactgggaaaaaatattcaaagaaagaaagaatgtgaacagaacttatgaccatgatgattcaatgttttaccacaatgctttctaaaacagaagagtgtaaaaggatattcaaagtcaatttcctcagcgaggctttgcagaaaatgaggaaactagaaaaacaaaaatggcgggacattctacgggtgattttaaatgttgctatgttttatgggaaaaaatactttaccttttaaagaatcacaaagaattattggaaacccaaactctggaatgtttgcaaatttagttgagcttctgtgtaagttatgtctatataggtagccatgaagttgatgatttcttaaaaatctgtgccttatttgtgtaataaaagacacaatgaataattaatactcataggaacacttacgaagggaaaataaatcttggggactcaaaatcactaagctaaagggaaaagtcaagctgggaactgcttagggcaaacccgcctcccattctatccaaagacacccgtctgatcacctagataaatgcatacctgattgcctcacatggagagggtaatcagcaatgcaaaagaatgaagacca

SEQ ID NO: 84031 - DNA, 628 bp, Homo Sapiens
  misc_feature (141)..(153): n is a, c, g, or t
  misc_feature (412)..(449): n is a, c, g, or t
  misc_feature (494)..(494): n is a, c, g, or t
  misc_feature (562)..(562): n is a, c, g, or t
  misc_feature (568)..(568): n is a, c, g, or t
  misc_feature (578)..(578): n is a, c, g, or t
  misc_feature (581)..(581): n is a, c, g, or t
gatacaaacagtgatggaaaacacatgagcagtaacaagttttaatcttgctcctcagtactaacatggactaatctgtgggagcagtttattccagtatcacccagggtgcagccacaccaggactgtgttgaagggtgnnnnnnnnnnnnnaaatgtaatacctcctcatcttttcttcttacacagtgtctgagaacatttacattatagataagtagtacatggtggataacttctacttttaggaggactactctcatctgacagtcctagactggtcttctacactaagacaccatgaaggagtatgtgctcctattattcctggctttgtgctctgccaaacccttctttagcccttcacacatcgcactgaagaatatgatgctgaaggatatggaagacacannnnnnnnnnnnnnnnnnnnnnnnnnnnnnnnnnnnnnggacaactctctttttccaacaagagagccaagaagccatttttntccatttgatctgtttccaatgtgtccatttggatgtcagtgctattcacgagttgtacattgctcanatttangtttgacctnaancccaaccaacattccatttgatctcgaatgcttgatctttcaaaacc

SEQ ID NO: 84032 - DNA, 1497 bp, Homo Sapiens
gctggtaccggtccggaattcccgggatatcgtcgacccacgcgtccgcgcagcgcggcctgggctcccgcgtgtttaaaagtgcgcttgtggctgctgctgtcttaactcctgtgcttggcggacagacaggcgagatggcggcggaggtgttgccgagtgcgaggtggcagtattgtggggcgcccgacgggagccagagagctgtactggtccagttctccaacgggaagctacagagtccaggcaacatgcgctttaccttgtatgagaacaaagattccaccaaccccaggaagaggaatcaacggatcctggcagctgaaacagataggctctcctatgtgggaaacaattttgggactggagccctcaaatgcaacactttgtgcaggcactttgtgggaattttgaacaagacctctggccaaatggaagtatatgatgctgaattgttcaacatgcagccactattttcagatgtatcagttgagagtgaactggcgctagagagtcagaccaaaacttacagagaaaagatggattcttgtattgaagcctttggtaccaccaaacagaagcgagctctgaacaccaggagaatgaacagagttggcaatgaatctttgaatcgtgcagtggctaaagctgcagagactatcattgatacgaagggtgtgactgctctggtcagcgatgctatccacaatgacttgcaagatgactccctctaccttcctccctgctatgatgatgcagccaagcctgaagacgtgtataaatttgaagatcttctttcccctgcggagtatgaagctcttcagagcccatctgaagctttcaggaacgtcacgtcagaagaaatactgaagatgattgaggagaacagccattgcacctttgtcatagaagcgttgaagtctttgccatcagatgtggagaagccgagaccgccaggcccgatgcatatggtttctggataccctcatcaaatttcgagctcatagggtagttaagcggaaaagtgctctgggacctggagttccccacatcatcaacaccaaactgctgaagcactttacttgcttgacctacaacaatggcagattacggaacttaatttcggattctatgaaggcgaagattactgcatatgtgatcatacttgccttgcacatacatgacttccaaattgacctgacagtgttacagagggacttgaagctcagtgagaaaaggatgatggagatagccaaagccatgaggctgaagatctccaaaagaaggggtgtctgtggccgccggcagtgaaaaagatccaaactgggcaccctgtccctcccgctgcctccagcccagacctcagaccgcctggcaaagcggaggaaaattacctagacgcatggctttccaaaaaggggagtttttggctgccttcacagcccactgggcctgggccctatatcattttccaatttcttatgggcaggctttgtg

SEQ ID NO: 84033 - DNA, 453 bp, Homo Sapiens
  misc_feature (33)..(33): n is a, c, g, or t
  misc_feature (256)..(256): n is a, c, g, or t
  misc_feature (353)..(353): n is a, c, g, or t
gtcttctggaacttcaggcttgcaacaacacangggggtgggacagcagtgggtgctatgttgaagaaggtgatggggacaatgtcacctgtatctgtgaccacctaacatcattctccatcctcatgtcccctgactccccagatcctagttctctcctgggaatactcctggatattatttcttatgttggggtgggcttttccatcttgagcttggcagcctgtctagttgtggaagctgtggtgtggaaaanatctggtgaccaagaatcaggacttcttatatgcgccacacctgcatagtgaatatcgctgcctcccttctgggccgccaacacctggttcattgtnggtcgctggccatccaggacaatccgctacatactctgcaagacagcctgtgtggctgccaccttcttcaatccacttcttctacctcagcgtcttcttc

SEQ ID NO: 84034 - DNA, 611 bp, Homo Sapiens
  misc_feature (80)..(187): n is a, c, g, or t
tgagatcaagcgatcctcctctaagtagttgggactataggcacaggccaccatgcccagctaattttgtgtgcatgacnnnnnnnnnnnnnnnnnnnnnnnnnnnnnnnnnnnnnnnnnnnnnnnnnnnnnnnnnnnnnnnnnnnnnnnnnnnnnnnnnnnnnnnnnnnnnnnnnnnnnnnnnnnntaaactaccacacccagttatagtgaggagaattgacttcattccactggtaatggtgaaccattgaaggtttctgagcagaggagtgacatgacttcatttccacaagtctgggcacactgctgtttgtaatacatgattagctttattctttttgttaaccttactctatggcttacaccccatcctggtctcaaagcagaagtgtgaacctgagccctgtggccacacatactttccaggcttcacaaagcaggaagcagtggccttagctaggtaaactctgagctcatttaacagctttgcaccttctccacagaaaaggaagtgaggctttccagaacgatttgagaataagaggcagggcacaaggatggtacttaacaaacttctgtcacctaagcatggcaagaataagctgcag

SEQ ID NO: 84035 - DNA, 972 bp, Homo Sapiens
  misc_feature (11)..(11): n is a, c, g, or t
atttcggaacnggcgaggctttaacaagacttcacattactgtttctaaagcctacaaagttaacccagacatgaattttgaggtttttattcacaaagttgatggtctgtctgatgatcacaaaatagaaacacagagggacattcatcaaagggccaatgatgaccttgcagatgctgggctagaaaaactccatcttagcttttatctgactagtatctatgaccattcaatatttgaagcctttagtaaggtggtgcagaaactcattccacaactgccgaccttggaaaacctattaaatatctttatatcaaattcaggtattgaaaaagcttttctctttgatgttgtcagcaaaatctacattgcaacagacagttcccctgtggatatgcaatcttatgaactttgctgtgacatgatcgatgttgtaattgatgtgtcttgtatatatgggttaaaggaagatggaagtggaagtgcttatgacaaagaatctatggcaattatcaagctgaataatacaactgtcctttatttaaaggaggtgactaaatttttggcactggtctgcattctaagggaagaaagctttgaaagaaaaggtttaatagactacaacttccactgtttccgaaaagctattcatgaggtttttgaggtgggtgtgacttctcacaggagctgtggtcaccagactagtgcctccagtctgaaagcgctgacacacaatggcacgccacgaaacgccatctagtctgaatcccagcgtcggggctctgtgccagcttactcttcactccagggtcggatgccacgtgctacaggacatgggagctgctgcttgtgggaatctggtgcctgttccactagagacaaggggtagagtttctcatttggatgaaaaccccttcaactggtggtgtacaactgaagctactatatcttttttgaaaatggcaaaaaaa

SEQ ID NO: 84036 - DNA, 761 bp, Homo Sapiens
ggtcctgtacggtctggaattcgggatgtatccacctcccagaattttctacacatgcagaagattctgggagtgatgacatagttctgaaagctgttcctgtacaacgaaaatgagtgaccacaatacgcaaaggctggagaagcacaatgctgctgccaacagaccactagtccttagtccaaacaatgtccttactaaaacaaccagaggtggaacaactaaagttggatgctgtttccattacacaaagactttcaacatttctatgtctccattccacagtatcttcaatatcagccaaatcttcagcatctaacatccacacataaggagaagtgaaattctcagaagaaacaggcttagtccaggggtgttcattatctatttcttctccaatgcccttgttagttaaatcgtgcaaacaggcatactgcttggtggactgcatggtaatgtctttatttttccacgcagttgaagtaattttgcttgtagatgttttcaaaaagccactttgatgagatgtcagaattccaagagctctggaaatcttctctagggccacatctgtgattttctcacaaccagacagatcaagatgccgaagactctggcagcaaccaagccaagaccaactgtcaaatgcagaatctgaaatgtcagtctgggtaagatccagatgctccaggttaggacaaagctctaaaatctgcctaaccattttgctggaaactgcagagctgtatgctaatactaag

SEQ ID NO: 84037 - DNA, 976 bp, Homo Sapiens
ctgtgtacacacgtcgaaattagaccttaaatattacaatctagcagtatctggctggccagagtgggccggcccctgccagcatgtgggcacttcttcattaagtctattctattggcagctgacacgcgtgctgacagagaaaaatccagtgacttgttgctagggatttcacgactaatgtttttgcaagcatgtgtatttacaactctgtgtattaatttcctttaggagattttactctgaaatacagtttctttcttcccccgactatttgaaatctgggctaaatgaatgtgtaatgtaattgatgaataaaattatgtcagatatagttaaaaaatccaacaatttcagtattcgtgtttacgtaaatgcattttttttaacaaggattaagcaatgttctaacctagtactatacaaaattcaaaatggtaactggtgatatcaactattagatatgtaatgaaagttaaagtcttggcttttctgttacagataattcatttgggatattatttatcttccatttgaaatcaaaattaatgaaatgctatcagaatgcatggatgcagtgcattgcatataaatctaccaggctatggatatatatctatatatgtataaaacatattttggctcctgagctcttgaactctgacacacaaagaataaaaacgtcaaaaaggcagagtaactcagtgaaaaataaagttagccagcaacctcagacaatcttcggctgtatatccttaacgtttggtaacaaggtccattaaccggtgaaagccccttatacaattgtcacttttgaactttctaaaccaagtacccgactacgttctttgatcaagaaggtagaataataccttatttaatgctataaagctaatacgtgattaacacaacacaaaagggatattaaccacttactgaaagaaaacataataggacctactgcatcatttaccca

SEQ ID NO: 84038 - DNA, 516 bp, Homo Sapiens
  misc_feature (69)..(69): n is a, c, g, or t
  misc_feature (255)..(255): n is a, c, g, or t
  misc_feature (339)..(339): n is a, c, g, or t
  misc_feature (392)..(392): n is a, c, g, or t
  misc_feature (474)..(474): n is a, c, g, or t
  misc_feature (497)..(497): n is a, c, g, or t
caaaatcaattcagcagtgcagtgtgagatgcatgaatggtgggacctgtgcagatgaccactgccagntgccagaaaggatatattggaacttattgtgaacaacctgtctgtgaaaatggatgtcagaatggtggacgttgcatcggacccaaccgctgtgcttgtgtttatgggttcactggtccacagtgtgaaagagattacaggacaggcccgtgtttcactcaggtcaacaaccagatgtgccaaggnagcttgacaggcattgtctgcaccgaagactctgtgctgtgcaccattggacgggcgtggggcatccctgtgagatgtgtccangccaagcctcagccctgccgacggggtttccatccccaacatccgcactggangctttgccaagatgtttgatgaatgccaaggctatcccagggatatgccaaaggaggaaactgtaaccaatacagttgggcncttttgaatgcagatgcctgctngtcacaaacagagtgaaac

SEQ ID NO: 84039 - DNA, 844 bp, Homo Sapiens
aacctaggctaggtacgaggctgggtgtcgaatcggcacgaggcgggaagcgcagagtctccgggaccattatggcagtcaagtggacaggtgggcattcttctcctgtcctctgcctgaatgcaagtaaagaagggctgctggcttctggagcagagggcggagatctcacggcttggggaagaagatggaactccattaggacacacgcggttccaaggggctgatgatgttaccagtgtcttattttctccctcctgtcccaccaagctctatgcctcacatggagaaaccattagtgtactggatgtcaggtccctcaaagattccttggaccattttcatgtgaatgaagaagaaatcaattgtctttcattgaatcaaacggaaaacctgctggcttctgctgacgactctggggcaatcaaaatcctagacttggaaaacaagaaagttatcagatccttgaagagacattccaatatctgctcctcagtggcttttcggcctcagaggcctcagagcctggtgtcatgtggactggatatgcaggtgatgctgtggagtcttcaaaaagcccgaccactctggattacaaattttacaggaggatgaaacagaagaaatggaaggcccacagtcacctggtcagctcttaaaccctgccctagcccattctatctctgtggcctcgtgtggtaatatttttagttgtggtgcagaagatggtaaggttcgaatctttcgggtgatgggagttaagtgtgaacaggaactgggatttaagggccacacttcaggggtatcccaggtctgctttctcccagaatcctatttgctgctt

SEQ ID NO: 84040 - DNA, 968 bp, Homo Sapiens
  misc_feature (855)..(889): n is a, c, g, or t
ttaggagaaacctgtgaatgctcactacatactgaagattaagaaaaaatttaagtaaattttcactaaactgcaattaggatttgggaccccatgcaaatgtgcacaacagtaaaatttccgtatacattctatagatgtaggaagtttatgaattagattattttgtaaaatatatattatgtatctaatttgatttaatcacattacataggttgaatttgggggttgcttttaaagtgttgagagtttagtgtttatttttgtaatccaacaactttatccaaaaatgcagaaaatttttctggctggccaggaggataacatttcagtgttgataagtccattgactgtaacagcccaggaagcgtgctgcaggtacaatagaagagatgaccctctttgtgtagctgctttgccagttccagctgatgattgttcatcaacttttcgtttataaccactacgagtggctttcctttttccagagtctccaaacagcttcctgcacctgcgtgactaataacaagatctgctttctgaatgtcttctttcaaggaatccttgtacctgtaaacatccagagtaaacgactcagtactgaagggttcaggtaccaccgttcctctaccaatttgcaggataagtcggttgtaaccaaggctctcgatttttgcagactgtcgggcgccgacacacacgcaatgaggtcgtcaaagctggtggtccctacggtaacaaacacgcacttcatggcgcgggttcctcaagccctgatcgcaagggccggatatgacgcaactccccggccgtaatggccgaattcccgggcatatgtccggtaccgtcgactgnnnnnnnnnnnnnnnnnnnnnnnnnnnnnnnnnnncggccgcttcctcgctcactacttcgctgcgctcgtcgttcgctataccgactagcgccctatatgattgtatacattt

SEQ ID NO: 84041 - DNA, 186 bp, Homo Sapiens
tcttccttgagacactagaagcttgccaaagggccagcacgcttcctgggctgttacagtcaatggacttatcaacactgaaatgttatcctcctggccagccagaaaaattttctgcatttttggataaagttgttggattacaaaaataaacactaaactataaacactttaaaaccaaccccc

SEQ ID NO: 84042 - DNA, 479 bp, Homo Sapiens
  misc_feature (113)..(113): n is a, c, g, or t
  misc_feature (216)..(216): n is a, c, g, or t
ccatgtcttggctcaagtatattattaggatagtttcatctgtgtttccttttactttttaaacgcagctcctggaaaattttaaatgatgcctgtggttcccatgagccttntacagggcagcgctgtaaggaccaagcacaccagggacttagacgcactgataccaaccccactaagtgccaagcagctggcggccccacggcaccagcacanggccccagaggcgggttgaggctccaccaccacatcaccgcccaggcgatctcaggcagttatctaatttctctcagctctcatttcctcatctggaaactgggaataataacatctattttcacaggattactgagaggggacagtgaggtaatccatgggagcatcccagcctgctgcatgggacctggcaagtgctctagaatgttggtgattcttcctgaagatctgtaggagccactgtcctcacctgtgagagcggg

SEQ ID NO: 84043 - DNA, 1774 bp, Homo Sapiens
  misc_feature (60)..(566): n is a, c, g, or t
  misc_feature (789)..(884): n is a, c, g, or t
  misc_feature (888)..(910): n is a, c, g, or t
  misc_feature (1336)..(1345): n is a, c, g, or t
gtgagcgcgacgggccgcgccgccgacgcgtcgcgcgccgagggacccgggcgcggcgcnnnnnnnnnnnnnnnnnnnnnnnnnnnnnnnnnnnnnnnnnnnnnnnnnnnnnnnnnnnnnnnnnnnnnnnnnnnnnnnnnnnnnnnnnnnnnnnnnnnnnnnnnnnnnnnnnnnnnnnnnnnnnnnnnnnnnnnnnnnnnnnnnnnnnnnnnnnnnnnnnnnnnnnnnnnnnnnnnnnnnnnnnnnnnnnnnnnnnnnnnnnnnnnnnnnnnnnnnnnnnnnnnnnnnnnnnnnnnnnnnnnnnnnnnnnnnnnnnnnnnnnnnnnnnnnnnnnnnnnnnnnnnnnnnnnnnnnnnnnnnnnnnnnnnnnnnnnnnnnnnnnnnnnnnnnnnnnnnnnnnnnnnnnnnnnnnnnnnnnnnnnnnnnnnnnnnnnnnnnnnnnnnnnnnnnnnnnnnnnnnnnnnnnnnnnnnnnnnnnnnnnnnnnnnnnnnnnnnnnnnnnnnnnnnnnnnnnnnnnnnnnnnnnnnnnnnnnnnnnnnnnnnnnnnnnnnnnnnnnnnnnnnnnggcacgccggctccgtcgggggcggctcccgcgacggcgcccccacccccggctcctctggccccagtgggcgggcgcgctgcgctcccgcggccggggaaggccgcccagcccctgtccccccggtgggtgggggtctattgtggccgagtccggggcacaggggggtccttccagtctcatcatacaaacgggcaatcttggctgggtgcggtggttcatnnnnnnnnnnnnnnnnnnnnnnnnnnnnnnnnnnnnnnnnnnnnnnnnnnnnnnnnnnnnnnnnnnnnnnnnnnnnnnnnnnnnnnnnnnnnnnnntccnnnnnnnnnnnnnnnnnnnnnnntttcatttttgagtccagaggaccctcctattactcttgatttcatcttcagagtgtagttaaaaaattattttaaataattatttttttaaatcagttgtaggttcacagcaaaagtggacaaaaagaaatttctcatatatcccctgccctcacacatgcatagcctcccaccactatcagtatcccacaccagagtggtacatttgttacaatcaataaacctccattgacacatcattatcacccaaagtccatagtttacatgaagattcactctggtgttgtacattgtatgggcttagacaaatgtatgatgatatctacaattatagaatcatacagaataggttcactgccctaaaacctccccaaggcttaacctggttcatccctttcttccctaatcccctggcaaccactttnnnnnnnnnnttaggttcagggggtacatgtgcaggtaaactcgtgacaagggggtttgttatacagattatttagtgacccaggtactaagcctagtacccaatagttacttttctggtcctgtcccttttcccaccctccaccctcaggtaggccccagtatgttattcctttgtgtccatgttatttcactcccacttgtgagaacatggaatatttggtttcctgttcctatgttagtttgttaaggataatggcctccagccccatccatgttcctgcaaaggacatgatctttctttggcaaccactttttactggcgccatagttctttccttttctagaatggcatattgggaatcatataggtatggagcccttttcagactgggcttctttccacttattaatatggcaattaaagggttcctccatgg

SEQ ID NO: 84044 - DNA, 1007 bp, Homo Sapiens
  misc_feature (463)..(473): n is a, c, g, or t
  misc_feature (730)..(739): n is a, c, g, or t
gctggtaccggtccggaattcccgggatatcgtcgacccacgcgtccgcggacgcgtgggcgacccacgcgtccgctgttctacagctatggccgggccagctgcagctttccgccgcttgggcccttgtccggagctgcggccttaggttcgcttcctacggggcgcacggcaaatctcccagatgcctacgggaaggagctgtttgacaaggccaacaaacaccacttcttacacagcctggccctgttaggggtgccccattgcagaaagccactctgggctgggttattgctagcttccggaacgaccttattctgcaccagcttttactaccaggctctgagtggagaccccagcatccagactttggcccctgcgggagggaccctgctactcttgggctggcttgccttggctctttgagctcccttttgcttaattactgggttttctgggcagnnnnnnnnnnnaaagagttggagtaagaagaggattaaaaaggaaaggcaaataaccaaccacagagacagaggaagagataaaagggcggccgctctaaagtatccctcgaggggcccaaccttacggcgtacccagctttcttgtaccaagtgggccctatagggagtcggattataacctaggccctgcgccgccggttcaccagcgccgggacctgggaaaactggctagcttgggaatctttggtgaggggacattcagttcnnnnnnnnnnaacaccattggcaccccgtctacccccccgcagatcggtgaagcccctcgaggggaacgtaaacagacgtttttaaccccggccaatggggttagaagcccaaaatgcccggcaggcgtggctagccgacgcaacacctctcgggcctcccgccgcaaaccagggccgggtcgggcacacctgactcgtaggcgcccgcccgctagtggagcggcgatcttcacccaacgaccgtcgagtgccccgcgccacctatacaccacataac

SEQ ID NO: 84045 - DNA, 469 bp, Homo Sapiens; identical to SEQ ID NO: 6178
  misc_feature (414)..(423): n is a, c, g, or t

SEQ ID NO: 84046 - DNA, 443 bp, Homo Sapiens
aaattgtttaaattacccagattagtgattgtgtcaatttacacatgaggaggtggtattttaagggctcaacaaagcggcatttgacacaaaggtaatttctttgaagggggataaagaataaagatattattatcttcattattacagttcgagaagtggttgtcctgataagaattcatcccacacaaatattaacaccagcagtaagcagcaaattgtggcgaggagaggctagagggaaaagttagaagaaaagcaaagaaaagacgaagagacaagagacatgattccaataagctttaaatcaataggcaaacacttctcatttatgatccatcttgctacaggtggttatgtgagaagacacagtgtcgccaaagctgacctagtatttaggtccctagagggattgctgatctgctaagagaaataaccaatat

SEQ ID NO: 84047 - DNA, 902 bp, Homo Sapiens
  misc_feature (106)..(138): n is a, c, g, or t
gttccggaagccttggtaatccagattcggctaggaaaagacaagctttccagagaatgtttcagagaaagttacgtggagcgtgggcgtttcgcagactcctaannnnnnnnnnnnnnnnnnnnnnnnnnnnnnnnncttctggcaagtatgaggcaaggatttcacagaagaacttggagcaaaaattcccactgtcatagctataggctgtccagtcttgagggagctgcaggaacaggaaaaagagaccttcagagaagacatggcttccagaaaagagaatgcgaagagtgcaaacagagtgctaagaataagccagttggatgcacttgaactaaacaaggccctggagcagctagtttggtcccagtttactcagtgctttcatggatttaaacctgggctgttagctcgctttgagccagaggtgaaagcgtgcttatgggttttcttgtggagattcaccatctactccaaaaatgccacagtgggacagtcagttttgaatattaagtacaaaaatgatttttcccctaacctgagatatcagccacccagtaaaaatcaaaaaatctggtatgctgtttgtacaattggtggcaggtggttagaagaacgatgctatgattggtttcgaaaccatcatttagcatcatttgggaaagtcaagcagtgtgtgaattgcgtgattggacttttgaaattaggtgggctgattaattgtttgattttccttcagaggggaaagttggcaacttttgacagaacgtctcctaaggtattcattctgtatttaggaagcctcaaaaacatacgtgaaagttggcttgaatacatgaattaggaacttctctggcatggtttggtgaattcttgattgtctcttaccatttatcaag

SEQ ID NO: 84048 - DNA, 928 bp, Homo Sapiens
  misc_feature (323)..(411): n is a, c, g, or t
  misc_feature (685)..(685): n is a, c, g, or t
ggaccggtccggaattcccgggatatcgtcgacccacgcgtccgggcgggtggcgcatcaccggcgcggaggcaggaggagcagtctcattgttccgggagccgtcaccacagtaggtccctcggctcagtcggcccagcccctctcagtcctccccaacccccacaaccgcccgcggctctgagacgcggccccggcggcggcggcagcagctgcagcatcatctccaccctccagccatggaagacctggaccagtctcctctggtctcgtcctcggacagcccaccccggccgcagcccgcgttcaagtaccagttcgtnnnnnnnnnnnnnnnnnnnnnnnnnnnnnnnnnnnnnnnnnnnnnnnnnnnnnnnnnnnnnnnnnnnnnnnnnnnnnnnnnnnnnnnnnagcccgccgccgggctgtccgcggccccagtgcccaccgcccctgccgccggcgcgcccctgatggacttcggaaatgacttcgtgccgccggcgccccggggacccctgccggccgctccccccgtcgccccggagcggcagccgtcttgggacccgagcccggtgtcgtcgaccgtgcccgcgccatccccgctgtctgctgccgcagtctcgccctccaagctccctgaggacgacgagcctccggcccggcctccccctcctcccccggncagcgggggccccccgggggagccggtgtgggcgccccctcaccggggcagcctgcctcgtccttttttgcgcccggttagggggtccttctcctgcgacttgccggttctgcccggcgctaggacgcctatcagcttgttggagcttgaaagttgtttcacggcggaggatgtccctaacgcaaacaccgaggatcaggagattacaaaagcggagaaaggaaacaagtggagcgagggctg

SEQ ID NO: 84049 - DNA, 977 bp, Homo Sapiens
  misc_feature (261)..(349): n is a, c, g, or t
  misc_feature (674)..(736): n is a, c, g, or t
gggtccggaattcccgggatatcgtcgacccacgcgtccgcgtcaccacagtaggtccctcggctcagtcggcccagcccctctcagtcctccccaacccccacaaccgcccgcggctctgagacgcggccccggcggcggcggcagcagctgcagcatcatctccaccctccagccatggaagacctggaccagtctcctctggtctcgtcctcggacagcccaccccggccgcagcccgcgttcaagtaccagttcgtnnnnnnnnnnnnnnnnnnnnnnnnnnnnnnnnnnnnnnnnnnnnnnnnnnnnnnnnnnnnnnnnnnnnnnnnnnnnnnnnnnnnnnnnnagcccgccgccgggctgtccgcggccccagtgcccaccgcccctgccgccggcgcgcccctgatggacttcggaaatgacttcgtgccgccggcgccccggggacccctgccggccgctccccccgtcgccccggagcggcagccgtcttgggacccgagcccggtgtcgtcgaccgtgcccgcgccatccccgctgtctgctgccgcagtctcgccctccaagctccctgaggacgacgagcctccggcccggcctccccctcctcccccgggcagggggaaccccttcgggcagtcttcgtgggacccgcgcttctctgcctnnnnnnnnnnnnnnnnnnnnnnnnnnnnnnnnnnnnnnnnnnnnnnnnnnnnnnnnnnnnnnnttgtagtcccctccccgtgccccctttcaccccctcttcggacaatcgggcgtggcgcgcccccgaggccctccccccttttgccgcacttccctttcccgccgccgccgctcattccctcccgtccgtcgtctctcgccgttccgtctcgccccttcgtgtctctgtttcccccgttctcgacccgccttggacgcggctcccacctccccgcccgccggcctcgggagtatcaccccct

SEQ ID NO: 84050 - DNA, 775 bp, Homo Sapiens
  misc_feature (231)..(278): n is a, c, g, or t
  misc_feature (358)..(408): n is a, c, g, or t
aatataaatatacaacttgatttagttaaatataaatgaaatataaattgtggtaaatgatacaagaaattgatatataaaagagaaaaataaaagtaaaggatacattatataataaaatgtatagtgattatagtgaaataaattagatcaagataaaatatataaaagtaagttataaataaagaattgttaaccataatgtgatcaaaattataattttacatatcnnnnnnnnnnnnnnnnnnnnnnnnnnnnnnnnnnnnnnnnnnnnnnnngatttttcagtgacttgagaacatgtgtaaataaatgatgtttaatctaaagacagaataaaaaaatttaatgagatggnnnnnnnnnnnnnnnnnnnnnnnnnnnnnnnnnnnnnnnnnnnnnnnnnnngtaagaatggagtggccgagccggaggctagatgtcctcagggagctaggtcatagtcctagtcatcatattcctcctcctcttcttcctcctcgtcctcgggctccctcacgaactggtacttgaacgcgggctgcggccggggtgggctgtccgaggacgagaccagaggagactggtccaggtcttccatggctggagggtggagatgatgctgcagctgctgccgccgccgccggggccgcgtctcagagccgcgggcgattgtgggggttggggaggactgagaggggctgggccgactgagccgagggacctactgtggtgacggctcccggaacaatgagactgctcctcctgcctccgc

SEQ ID NO: 84051 - DNA, 1694 bp, Homo Sapiens
  misc_feature (1292)..(1336): n is a, c, g, or t
gtggaccggtccggaattcccgggatatcgtcgacccacgcgtccggcacgtgctccgtggctcccccctctacatggcccccgagatggtgtgccagcggcagtatgacgcccgcgtggacctctggtccatgggggtcatcctgtatgaagccctcttcgggcagcccccctttgcctccaggtcgttctcggagctggaagagaagatccgtagcaaccgggtcatcgagctccccttgcggcccctgctctcccgagactgccgggacctactgcagcggctcctggagcgggaccccagccgtcgcatctccttccaggacttttttgcgcacccctgggtggacctggagcacatgcccagtggggagagtctggggcgagcaaccgccctggtggtgcaggctgtgaagaaagaccaggagggggattcagcagctgccttatcactctactgcaaggctctggacttctttgtacctgccctgcactatgaagtggatgcccagcggaaggaggcaattaaggcaaaggtggggcagtacgtgtcccgggctgaggagctcaaggccatcgtctcctcttccaatcaggccctgctgaggcaggggacctctgcccgagacctgctcagagagatggcccgggacaagccacgcctcctagctgccctggaagtggcttcagctgccatggccaaggaggaggccgccggcggggagcaggatgccctggacctgtaccagcacagcctgggggagctactgctgttgctggcagcggagcccccgggccggaggcgggagctgcttcacactgaggttcagaacctcatggcccgagctgaatacttgaaggagcagatgagggaatctcgctgggaagctgacaccctggacaaagagggactgtcggaatctgttcgtagctcttgcacccttcagtgaccctagaagaatgattggacagatgtgagccatctggagcagaggggcactaacccaggctgacgccaagaatgaagtggcccactgcagccctggcgagcaggcttcttggatggacagtgctgagacccccatatcccagagtccccagcctccctcaggttactctgcaccccacagatggtttgatggctgtgctggatactggaaggggaggggcaggactcctgggagaacagcacttctttcatgagacctttgttactcgggggggttacttggggccctgtgccctggaccgttttctggggggcatgccagcccgcccctaatcattttatnnnnnnnnnnnnnnnnnnnnnnnnnnnnnnnnnnnnnnnnnnnnngccaagggaacacctctcctgggggcttttgacccctcccctccccctggtccaagcgaagggcaaatcttgggggccccccctggggccccgggcacccttttcccgcggggaaccaccgctgaaaattccccagggtcagaggcttccctccttgtttgaccccttgggagaaaggtgggggcaaagtttcaaacctaccgcgcgttgaaggggaaaccgactgccgttccgccagaaagataagtggacactttctgacccccccaccggggaacaccccagccccgatcctttttcccgtggggagaacactcataaaaacacgggggggccgcatgcccattgttctggggga

SEQ ID NO: 84052 - DNA, 855 bp, Homo Sapiens
gagccaaaagggggcttgcccgaagaggccttctgtggaagggaggcagagcggagcctgggagggcaatgggtcaagcctggcctgacgccccttcagcaggggccctgggccagcagtcagttttcatcagaacccttcagaagtggcccagagaggccttgcctgaggaaactgtaggcctcagggtgagaagcagggaaaagaggtctcaccatacaggatgacccccaatggaccagaggtccaacgcgggctgtcatactgccgctggcacaccatctcgggggccatgtagagggtgggagccacggagcacgtgcttctcatcccacggggaaatgtgttgtgcgaaaccacaagtctgccagttttaggtggggcttctccaaggagctcagtagaatgttctgtggcttcagatccaggtgagagatattccgttcatgcaggaattgcagggcgctagctaattgctgcatgaagacacgcgccaccttctcaggcagaatcctgcgggtatggatgaagcgagacaggtcgccccctgcgcaaaactccatgatgaggtagatattgtcactgtcccactgaaagtctttcagctgcacaatgtggggatgtcgaatgcccttgaggatctcaatctccgtgaggaggttctccaccgatgccttgttcagacttttcttggctacacactttatggctaccacttcacgagtgtccttcttggcgtaggccttgtacaccgtggcgtacgtgccacatgcccaggcgctcggtgaggatgaagccgtccaggcgcgggggacacccagccgggccccgccatcccggccgcctgcgcccgcg

SEQ ID NO: 84053 - DNA, 686 bp, Homo Sapiens
tgctgagagtgtagatgtttcctgggcaatgtctatgctgagagtgtagatgttcttcgagatggaactggacctgcaggtttacgacttcgcctacttgctgcaggttgtggacctggcctattagcagatgccaagatgcgggtatttgaacgttcagtgtattttggtgattcctgccaagatgttcttagcatgcttggctctccagcacaaagtcttctataaatcagaagacaagatgaaaattcattctccttcccctcataaacaagttccatcgaagtgtaatgactacttttttaactacttcactcttggagtggccatcctctttgatgcgaatacacacaaagtgaagaagtatgttctacacaccaattaccctgggcattataatttcaacatttatcatcgctgtgagttcaagatcaccactaggccataaacgaaagaacaacgcagatggtcagacagaaaacatgcacgacctacagcaagtgggacaacatccaggagctcctgggccacacctgggcaaaagcccgaagagcacagcaacaaggccatacatccccaaaacaacaccaaacacatagggaacaaaatcagacaaggtcatcaagcgaataccgtaggcggtcatgccggaccacacatgccgacgggaaccaggatggccacaa

SEQ ID NO: 84054 - DNA, 1001 bp, Homo Sapiens
cgccaagaaatggcagggcactcccatagggccagtttgagaagagtctcctgacaagtgagtgtggctctctgcggctatctaccagcctggagccttaactccccaggccctgaacaggggcatgaaaaagggctgcctgacagggtgaccaggagctgtgacctgtaagccaagggcagccaggaataaatactgggaactcacgctctctcctgtgattggccagcaccactcccccaccctgacgttgagtgaagacaaatggaagccagaagtgtggtgagctaccagacattccatgcagcccgctgagaagccacgtgagtggggacagggctaaaggctaggcagggacagggctggctgtgtcccgaggctgctcctccggccctgacttcaggccctcagcccagtcgactcccacaacctcgcaattgggcagcatctcctccaccaatatctgagtgaggccagggttggacacggcagggaggtccgagatgtccagcctgcggaggttcggaggttatccaggccctcgtagttgatgtcacagtcaccggcatccacagcttcgacaggcacttcacagaaattccagaactcctgagagaaatggccatacttatctggcctgatccactccttgtctcgaaacttgactgcgcctccctgcttcaggatgaaaaaggcacctgcgccgtatggaccatgttgcttctccagccaggtgtaagatcgatttttctcatgcaccttgtacatctccctttggagcaagtaatccctcagagcctccacatcgtagaaatagttggtcaggaactggagtattgtccttttcttcttctgattgccctctggggccactgccgcacccaggcgatggatgcccctgatacgcccattccacatgggggcgaccaggcgcaggacgcccagggagccgccatctgctaagtttccctcgtgccgattaacaccagcctgtactgcca

SEQ ID NO: 84055 - DNA, 1111 bp, Homo Sapiens
  misc_feature (891)..(891): n is a, c, g, or t
  misc_feature (931)..(931): n is a, c, g, or t
aacttagcaagatggcggctccctgggcgtccctgcgcctggtcgcccccatgtggaatgggcgtatcaggggcatccatcgcctgggtgcggcagtggccccagagggcaatcagaagaagaaaaggacaatactccagttcctgaccaactatttctacgatgtggaggctctgagggattacttgctccaaagggagatgtacaaggtgcatgagaaaaatcgatcttacacctggctggagaagcaacatggtccatacggcgcaggtgcctttttcatcctgaagcagggaggcgcagtcaagtttcgagacaaggagtggatcaggccagataagtatggccatttctctcaggagttctggaatttctgtgaagtgcctgtcgaagctgtggatgccggtgactgtgacatcaactacgagggcctggataacctcctccgcctgaaggagctccagtccttgtcgctgcagcgctgctgccacgtggacgactggtgtctcagccgcctctacccactggccgactcgttgcaggagctctcgctggccggttgcccccgcatctccgaacggggcctcgcctgcctccaccacctccagaacctccgcaggctggacatctcggacctccctgccgtgtccaaccctggcctcactcagatattggtggaggagatgctgcccaattgcgaggttgtgggagtcgactgggctgagggcctgaagtcagggccggaggagcagcctcgggacacagccagccctgtccctgcctagcctttagccctgtccccactcacgtggcttctcagcgggctgcatggaatgtctggtagctcaccacactttctggcttccatttgtcttcactcaacgtcaaggntggggggattggtgcctggccaatcacaggaaagagcgtngattccccagtatttattcctgggctgccccttggctaaaggcacagcttcctgtcaccctgtcaggcagcccttttcatgcccctggttccaggcctggggaaggtaaaagggctcaaggcttgtttaataccggccaaagagccaccacctcttcttggtcaggaaaaatcctcttca

SEQ ID NO: 84056 - DNA, 1207 bp, Homo Sapiens
  misc_feature (1)..(1): n is a, c, g, or t
ncagtcgacggtaccggacatatgcccgggaattcggccattacggccggggcactctggctggggaaggcatgagtgacagacccacagcaaggcggtggggtaagtgtggacctttgtgtaccagagagaacatcatggtggctttcaaaggggtctggactcaagctttctggaaagcagtcacagcggaatttctggccatgcttatttttgttctcctcagcctgggatccaccatcaactggggtggaacagaaaagcctttaccggtcgacatggttctcatctccctttgctttggactcagcattgcaaccatggtgcagtgctttggccatatcagcggtggccacatcaaccctgcagtgactgtggccatggtgtgcaccaggaagatcagcatcgccaagtctgtcttctacatcgcagcccagtgcctgggggccatcattggagcaggaatcctctatctggtcacacctcccagtgtggtgggaggcctgggagtcaccatggttcatggaaatcttaccgctggtcatggtctcctggttgagttgataatcacatttcaattggtgtttactatctttgccagctgtgattccaaacggactgatgtcactggctcaatagctttagcaattggattttctgttgcaattggacatttatttgcaatcaattatactggtgccagcatgaatcccgcccgatcctttggacctgcagttatcatgggaaaattgggaaaaaccattggatatatggggttggggcccatcataggagctgtcctcgctggtggcctttatgagtatgtcttctgtccagatgttgaattcaaacgtcgttttaaagaagccttcagcaaagctgcccagcaaacaaaaggaagctacatggaggtggaggacaacaggagtcaggtagagacggatgacctgattctaaaacctggagtggtgcatgtgattgacgttgaccggggagaggagaagaaggggaaagaccaatctggagaggtattgtcttcagtatgactagaagatcgcactgaaagcagacaagactccttagaactgtcctcagatttccttccacccattaaggaaacagatttgttataaattagaaatgtgcaggtttgttgtttcatgtcatattactcagtctaaacaataaatatttcataatttacaaa

SEQ ID NO: 84057 - DNA, 478 bp, Homo Sapiens
  misc_feature (23)..(23): n is a, c, g, or t
  misc_feature (46)..(46): n is a, c, g, or t
  misc_feature (133)..(133): n is a, c, g, or t
actctgtttgtagcccttgatgntgcggccagtgcggaccggctgntgagcacgtagttagggtccaggtcgtctccacccttgaggttttcatggttgaggtcagtcttgtgcttgtcagtgggtttgtagncccccgtggcgatccgagatgatggggtcaaagagttccttgaaaacttcggtaggactcctcatcaccagccacgcagcccacggtcatgatgaaggggtgacctgggttgtccactcctgtctggatgacatcgtctacagtgaagccagatggagtctccttgtcccgcagcttcttgtagagttcaagggtcagtaccttggccatgtggttgttatgtttgctgaggtcggggtactcctcctcaggcttgtaattcagcttgaacttgttgtgggtgttaccgaatggcatggtggcggtgtaggaaacctggctgggctgggctgaaggggggctgtc

SEQ ID NO: 84058 - DNA, 467 bp, Homo Sapiens
gaatctgcctcctaatgatttttttcaggaaaacctgtttggttatcctcattcaaaagcactggacagagaatgttactgtgaatagagcacatattactctttttagcaacctagcatgatgccaacaagactattcttgaaagagcaaaggttcctgtaaatttaattagggctagatttgagctgcttgtaagtcacaggttttccagatgtctgccaacaagaaatgactcatactgtgatgataccttttgctttgccttgtggacaatgtgggtttttgaaatttgcacccttcaaacaatgatttatcagagaaaggggtctgttttcaaaaaagattctgtaatgaattttatgtgtggcatatacttatttcttgagagaagattttaacttattgtttttattttatggttacatatgatgataacctgctattattaaactttttctaaaaagtg

SEQ ID NO: 84059 - DNA, 455 bp, Homo Sapiens
agcaacaccatttcagtcacaccttcaactatggcaaatattgtgaaaggcctgataccctcagaccagagtgggttcagatggctccaactctattttctaaatttattccaaacattctcctccggcggtggaatctgaactttctgaatatgctgctcaagatcagaaatttcaaagagaacttatacagaatggttttacaaggggtgaccagtcccggaagagagctggggatgagttggcttataatagctcgtcagcatgtgcaagttccagggggtacagatagtgaatgtattgaatatgctttccttcctgaaaagaggacacactggagctgcagagactgtattcagagcacagtgggggctgcacacactcaggagctctgtcacaaagctgttcatggaagaggatgttggacttcttacttggtttgtaattttaaaaca

SEQ ID NO: 84060 - DNA, 1034 bp, Homo Sapiens
agctaggtagaggctcccgctgtaatcggacgagggtctgccctggagtaaccagaagaacacagctgtgcgcgcccacaggctctgggggcgggagaagataagtcgcaaggagggggcgggacctacacctcaggaaagccggagaattggggcacgaagcggggctttgatgacccgcaaagggcgaggcatgcaggaggtggaggaattaagtgaaacagggaaggttgttaaacagcaccgtgtgggcgaggccttaagggtcgtggtccttgtctgggcggggtctttgggcgtcgacgaggcctggttctgggtaggcggggctactacggggcggtgcctgctgtggaaatgcctgcccgcgcgcttctgcccaggcgcatggggcatcgtactctagcctccactcctgccctgtgggcctccatcccgtgccctcgctctgagctgcgcctggacctggttctgccttctggacaatctttccggtggagggagcaaagtcctgcacactggagtggtgtactagcggatcaagtatggacactgactcagactgaggagcagctccactgcactgtgtaccgaggagacaagagccaggctagcaggcccacaccagacgagctggaggccgtgcgcaagtacttccagctagatgttaccctggctcaactgtatcaccactggggttccgtggactcccacttccaagaggtggctcagaaattccaaggtgtgcgactgctgcgacaagaccccatcgaatgccttttctcttttatctgttcctccaacaacaacatcgcccgcatcactggcatggtggagcggctgtgccaggcttttggacctcggctcatccagcttgatgatgtcacctaccatggcttccccagcctgcaggccctggctgggccagaaggtggaggctcatctcaggaagctgggcccgggcctatcgtgccccgttacgtgagtgccagtgcccgagccatcctggaagaacagggcgggctagcctggct

SEQ ID NO: 84061 - DNA, 802 bp, Homo Sapiens
ggggtgggcagacgatctccactttgcagaggctgctcttgtgagtggagctggtggtgagggagtaggagaggcctcgcatcatcctggcattcaggcccttagccatggagaaggacttgaggtggcttcttaaggtactggggagcgggagcttgtccaccagatgcacaggtgtgcaggacacgatggtgcggcagcagaggtcttgcaagctcagtaccttgctcggcctcccgagccaattcatcctgtgccgcagcagcactatcctggccagctccgtgaaagactctatgatgttgaaattgcacagagggctgacctcaaagaaggtcacacccaggcgctcggcgtaggcctgggcctgctccctgggcacctgcctcttgaatgccagatgtaggcgattccccaccaggattttagggacaccaggggcatgttcctcaatcttcttaatccatcgatccataccctcgaaagaccagcggtttgcaatgtcatagaccaggatcacaccctgtgcaccacgagagtaggagcggaatatggtacaaaatcttccctgccccgaagtatcccagagctgcagcttcacccgccgcccgtccagcaggatggtggtcgtcttgtagtcgatgcccgccgggtggccgtacggggactcggccgcgccatcctgcaggctcgccaggatctcgcccttgcccacgtcgctgtcgcaccaccagcaggaactcgagcagaaagtcgtaggcccggaccggctgcccagggcgctcatcgtgacggcccggcg

SEQ ID NO: 84062 - DNA, 535 bp, Homo Sapiens
  misc_feature (390)..(390): n is a, c, g, or t
cgtctgcaaagacggtctttccaaacgaggtcccatgctgaggttctgggtggacatgaactcgtggggggttcctcgacccagagcacccacattacgacgacaacaaaatctcactgaagtaacccatgctcctcgcctttctcctgcccgctagcatgcccccggagtccccaagatcctggtggggaaccgcctgcacctggcgttcaagcggcaggtgcccacggagcaggcccaggcctacgccgagcgcctgggcgtgaccttctttgaggtcagccctctgtgcaatttcaacatcacagagtcattcacggagctggccaaaatcgtgctgctgcggcatgggatggaccggctctggcggccgagcaagggtaggcccangggctattccgggggccacctctgccctccagatgccgaggtgggtcagcggccccctggataagtgtctgcctcccgggacccgtctcaaggccactgtgtccgttctcagagcaaggcatttgagagaagtaatgactacagc

SEQ ID NO: 84063 - DNA, 756 bp, Homo Sapiens
  misc_feature (126)..(126): n is a, c, g, or t
  misc_feature (377)..(432): n is a, c, g, or t
agctgatataaataagtctagctctatatccccaaggtctaaaagtatggtcagagtgcgatctgaagcgtgcttgataattcttactaacacagattagggtataggcatctagagatgcactgntccactgtaaatactataatgagagccacatctgtaatttaaatgtttctagtaaccacatttttttaaaagtaaaaagaaacccatggtatggatttaaatatattttatttaacccaatagctcaaaaacactatcatttcaacataggatcaatataaaaattattaatgagttattttactttttttcatattaggcctttgaaattcagtgtgtattaaacacatctcaattcaaaccatcaccannnnnnnnnnnnnnnnnnnnnnnnnnnnnnnnnnnnnnnnnnnnnnnnnnnnnnnnatctatactcattccttcaaatacattactctgttaatctcaaagtgtggccaactcccatttacttagaggctgattatctagtttgtagttcctcaggcctctaatttatttttgctttctgctttattgatcttttgcatgtcccccaaagccagaatctgctcatggaggaaggaaggctaagaactgtccttgaggaacttcatcagtaactctggtaaagcatcctgtggagggagaggagagcccagtcatttgcttagatggtgttgtgggatcacctgcagattaaagctactctgcacagactcgagtaagaaa

SEQ ID NO: 84064 - DNA, 664 bp, Homo Sapiens
  misc_feature (191)..(493): n is a, c, g, or t
  misc_feature (515)..(549): n is a, c, g, or t
aatatcctgcctgcccatctgctgatatttgcagcaatcaaaagcagcaagaacagcagtcctctgccttatttccactttccaaattgtccatgagtgcacctaattggtggtacctaattcccatccagaactctagctgccatggagggaagcattttgtgcaatatggcgcaaattatgggtgcgtnnnnnnnnnnnnnnnnnnnnnnnnnnnnnnnnnnnnnnnnnnnnnnnnnnnnnnnnnnnnnnnnnnnnnnnnnnnnnnnnnnnnnnnnnnnnnnnnnnnnnnnnnnnnnnnnnnnnnnnnnnnnnnnnnnnnnnnnnnnnnnnnnnnnnnnnnnnnnnnnnnnnnnnnnnnnnnnnnnnnnnnnnnnnnnnnnnnnnnnnnnnnnnnnnnnnnnnnnnnnnnnnnnnnnnnnnnnnnnnnnnnnnnnnnnnnnnnnnnnnnnnnnnnnnnnnnnnnnnnnnnnnnnnnnnnnnnnnnnnnnnntgtatatgtgacagaaggatannnnnnnnnnnnnnnnnnnnnnnnnnnnnnnnnnngaagacttgggcctttgttagcaactgtaatgatatacttccagtttgtccaagagataaatattgatgtattctgtatcatcactggctttcgagatgattttaagaaaacttg

SEQ ID NO: 84065 - DNA, 566 bp, Homo Sapiens
  misc_feature (556)..(556): n is a, c, g, or t
gcacgaggccaaaacatagagagcacaggttgatgcaagaggtggaaatgttctccatatcaagatgtggcccaaggggttaagtgggaacaatcattatacggactcttcagatttacagagaacttacacttcatctgttccacctctcctgcgatagtcctgggtgctccactgattggaggatagagccagctgtctgacacacaaatggtcttttcagccacagtcttatcaagtatcctatatgtattcctttctaaactgctactcatgaatgaggaaagtctgatgctaagatactgcctgcactggaatgttaaacactaaatatataacaagctgtgttttcctaagctgagatctgttgaataatgtttacattcgtcccccggggaaatgtatgctcagccaccattcaagagatgactgagaaggagatggtaagttcaagaagactgattgcacctgggacccaggccctttctttgggatccagtcccagccttcatccatgtgattaagatccaggccgctgaagttccccaaggaaatnatcttccact

SEQ ID NO: 84066 - DNA, 444 bp, Homo Sapiens
  misc_feature (214)..(214): n is a, c, g, or t
  misc_feature (422)..(422): n is a, c, g, or t
ctggaaggaaaaaaccttataggactccattaaatttaaacagtgacagaacggacaggcagtgtcccataagcaaacaacacacagtctgaatccaaatcggaataacagctcaaacactactagggttctacacagagttaaactgagtatctgctatgacttttcattgttctcacttcatgacaagcaggagagcttctggaagggaagncccggttaggctttataaacataggttatgtttcaatgtgtttaacatgtaaaattacatgtaatttttggtgatcctggaagtagcaacacaaattaatggagattacaaagccccctccactgaattcctttttatatagtttgggtttcagcctctggtctataactcctattacactactggggcaaatcgctttctgcccttnccaatgtcaaaaataagcaaga

SEQ ID NO: 84067 - DNA, 821 bp, Homo Sapiens
  misc_feature (217)..(217): n is a, c, g, or t
  misc_feature (375)..(375): n is a, c, g, or t
ctttacctgaaggattaagtgaaagcttttggagttcatgatgttcagtatgatcagttaaccttaacctctgagcatcctgaagcaaaatctaaataatgcagctattaccactggtggtccaggctctggtgaagccctctgagcccaggaggaagagaaagcattgtccagaggtaggaacacagtctgggagcccagagctctgggaggagtngggaaaatgctgcttcctgctgcttgcttctaggcacctgcttccgccatctcacttaccatggctagagatgggggtgagactggggaaggacaaaagcagggaacagataagggatggaaatcagaagggaatatagaaagaactctggatatgcnagaaatgccggtacctgagcattttgtatcaatgggagtaccctctgtaactgctcagtaggttacaaatgaagagtccaccagtattagaaacaatttaaacttgccagtaccaactgggatgtgtgccttcaatttgaaaattgtatgttttattttttaaatttggttaacagcattaatttatagagtatttgatgtcatttatggttcccgaggtgtttccaacacaattttggatcagctgcctgtttgcaaaaacataatatatttctgttaaacagttcttcacctaacagcatattgctcttataactggtagagctgtttcaaaggaagttggtttctggtccaagttttgacctaaaccatgtccatcttctattaccagcacttacaagcactgtgaaaactgatcatgacaaataagtaaaatttgctacatt

SEQ ID NO: 84068 - DNA, 718 bp, Homo Sapiens
  misc_feature (29)..(29): n is a, c, g, or t
  misc_feature (631)..(631): n is a, c, g, or t
cctcgcacccgcagcctcgcgcccgccgncgcccgtccccagagaaccatggagtctggcagtaccgccgccagtgaggaggcacgcagccttcgagaatgtgagctctacgtccagaagcataacattcaagcgctgctcaaagattctattgtgcagttgtgcactgctcgacctgagagacccatggcattcctcagggaatactttgagaggttggagaaggaggaggcaaaacagattcagaatctgcagaaagcaggcactcgtacagactcaagggaggatgagatttctcctcctccacccaacccagtggttaaaggtaggaggcgacgaggtgctatcagcgctgaggtctacacggaggaagatgcggcatcctatgttagaaaggttataccaaaagattacaagacaatggccgctttagccaaagccattgaaaagaatgtgctgttttcacatcttgatgataatgagagaagtgatatttttgatgccatgttttcggtctcctttatcgcaggagagactgtgattcagcaaggtgatgaaggggataacttctatgtgattgatcaaggagagacggatgtctatgttaacaatgaatgggcaaccagtgttnggggaaggagggagctttggagaacttgctttgatgtatggaacaccgagagcagccactgtcaaaggcaagacaaatgtgaattgg

SEQ ID NO: 84069 - DNA, 447 bp, Homo Sapiens
ccaaaaaatacaaattagtaacattccagttattaaatgtaacaactgtcacaatcacctcatcatctccccacatttatttttaccttctccaacctctcaaagtattccctgaggaatgccatgggtctctcaggtcgagcagtgcacaactgcacaatagaatctttgagcagcgcttgaatgttatgcttctggacgtagagctcacattctcgaaggctgcgtgcctcctcactggcggcggtactgccagactccatggttctctgcgagaaaaaaacacacacatgcttgtataaactataaagcaaaatgtcaatctggcatttaacttgctaaattcattagacaactgattcacagggatttttttctaagtagattttgtttttaaacagggaagtggggactagggaataaaatatgtacagaattagcattatt

SEQ ID NO: 84070 - DNA, 462 bp, Homo Sapiens
  misc_feature (38)..(38): n is a, c, g, or t
  misc_feature (197)..(197): n is a, c, g, or t
  misc_feature (374)..(374): n is a, c, g, or t
ggggatatccgggctcagtatgagaccatcgcggctangaacatttctgaagctgaggagtggtacaagtcgaaggtgtcagacctgacccaggcagccaacaagaacaacgacgccctgcccaggccaagcaggagatgatggaataccgacaccagatccagtcctacacctgccgagattgacgccctcaaggnacctaacgattccctgatgaggcagatgcgggaattggaggaccgatttgccagtgaggccagtggctaccaggacaacattgcacgcctggaggacgaaatccgggcacctcaaggatgagatggcccgccatcttgcgccgagttaccaaggaccttgcttcaacgttgaagatngccctggatgttggaagatttgcccaccttaccggaagctgcttggaagggaagaggagagccggattcaatctccccattcagacct

SEQ ID NO: 84071 - DNA, 549 bp, Homo Sapiens
  misc_feature (532)..(532): n is a, c, g, or t
gaaaaaccactgccagaccaggccttctttgtccttcataatatgcactccaactgtgtttcatttgaatgcaagactgatcctggagtgtttataggtgtaaaggataatcatcttgctctgattaaagtagactcttctgagaatttgtgtactgaaaatatcttgtttaagctctctgaaacttagttgatggaaacctgtgagtcttgggttgagtacccaaatgcctaccactggagaagggaatgagaggataaagaaagagacagggtgacacctaagggaaattgaagagtgcttagcatgtgtggaatattttccatattatgtataaaaatattttttctaatcctccagttattcttttatttccctctgtataactgcatcttcaatacaagtatcagtatattaaatagggtattggtaaagaaaccggtcaacattctaaagagatacagtctggaccttttactttttcccctagtttcagtccagaaaagaacttccatatttagagcctaagggncactgaaggaaaagagc

SEQ ID NO: 84072 - DNA, 458 bp, Homo Sapiens
aactgtctgatttaggatcctacatggacttggtatatagtgtcacttacttgtaaatcagatttttaaaattggaagcaactctgtgatcatctagtccatctagtctacacccttccttttacaaatgaagaatccaagagccagaagctcccagacatcctgactcaatgtcctatatttgttgtatagcctcctttgtggaagttatgtatgcatttgacttcacttaatctaagacatctattttccttgaactcttgataggtctgctggtttcctcaagggaatccaatctagctggattttaatctctttgaattgtgtcctcagctataaaagttttagctgaggttttaatggctgcacttaagtaaatctaacagatataccagggggtgttccaattacatacaccattaaagggctttatgtgaggatttttaaaaattaccatt

SEQ ID NO: 84073 - DNA, 763 bp, Homo Sapiens
  misc_feature (60)..(60): n is a, c, g, or t
  misc_feature (708)..(708): n is a, c, g, or t
aattcggcacgaggcggcacgagggtactctggatcccttcccctgctttgacccccagnactttgctccatctattattgcttctccatcctggatccttgacatttgtcaccccactggccttctcaggtgcaatcagtaaaaatgctgagaactcttggatcttaatcttcatgactgagttttttttagttgtatagttatcatctgcctttcttcactttgcatttcttcttgaatccattgcagattgacttccactcccactccttcactaaaagggctcttaccaagataatctaatgggtacattttagttcctatgtgatttggcctttcgatgtcaatcatcactcccagccattgattttggtgacccacttccctgtgatgatcttctgatctagtttctcaggttccttcgctggtcctttttctttccctgcccctgacatattgacatttcctggagttggttttgtccttgattcattctcatgtcattctgcacacagtctctgcatgaactcaggcagacccttcatttaatgaccaccttagggctgatgattctcaaatctgtattccccgatcttgcatttgagctccagccccactcatcctctcggatgttctgcaggcccagcaaactcatcatgtccaaagtgaaactttttctctttcctgtctcctctcctctgatctgntctttcttggaacaccacccaagaacgtcacctcctccatcagattgtgagctcc

SEQ ID NO: 84074 - DNA, 1062 bp, Homo Sapiens
gcacagatgaagcacctgaccgtacagatgatggcatatgataagctggttcagtgcccaccggagtcatttgatgtgattctggatgaaaaccagctggaggatgcctgtgagcacctggctgagtacctggaggtttactggcgggccacgcaccacccagcccctggccccggacttctgggtcctcccagtgccatccccggacttcagaaccagcagctgctgggggagcgtggcgaggagcactccccccttgagcgggacagcttgatgccctctgatgaggccagcgagagctcccgccaagcctggacaggatcttcacagcgtagctcccgccacctggaggaggactatgcagatgcctaccaggacctgtaccagcctcaccgccaacacacctcggggctgcctagtgctaacgggcatgacccccaagaccggcttctagcccaggactcagaacacaaccacagtgaccggaactggcagcgcaaccggccttggcccaaggatagctactgacagcctcctgctgccctaccctggcaggcacaggcgcagctggctggggggcccactccaggcagggtggcgttagactggcatcaggctggcactaggctcagcccccaaaaccccctgcccagccccagcttcagggctgcctgtggtcccaaggttctgggagaaacaggggaccccctcacctcctgggcagtgacccctactaggctccattccaggtactagctgtgtgttctgcacccctggcaccttcctctcctcccacacaggaagctgcccactgggcagtgccctcaggccaggatccccttagcagggtccttcccaccagactcagggaaggggatgccccatttaaagtgacaaaagggtggccgtgtgcggcaccattggccatgacggacagaaaccaaggtcccctgagccaggcaccaagttcctgaccagtcacggcgactgcttttggccatccagggccctccagtcacctcactgcccatacatttgacatgacgacattcaaaagccccc

SEQ ID NO: 84075 - DNA, 1313 bp, Homo Sapiens
  misc_feature (221)..(221): n is a, c, g, or t
  misc_feature (223)..(223): n is a, c, g, or t
  misc_feature (959)..(959): n is a, c, g, or t
  misc_feature (1277)..(1277): n is a, c, g, or t
aaaaattattttgaaggtacgggctatgctcgagttccaactcaaccacatgctcccatcccaacctttggacagacaattcagaccaccgtggatagaggcttgctgttctttgcagaaaacggggatcgcttcatatctctaaatatagaagatggcaagctcatggtgagatacaaactgaattcagagctaccaaaagagagaggagttggaaaacncnataaacaacggcagagaccattcgattcagatcaaaattggaaaactccaaaagcgtatgtggataaatgtggacgttcaaaacactataattgatggtgaagtatttgatttcagcacatattatctgggaggaattccaattgcaatcagggaaagatttaacatttctacgcctgctttccgaggctgcatgaaaaatttgaagaaaaccagtggtgtcgttagattgaatgatactgtgggagtaaccaaaaagtgctcggaagactggaagcttgtgcgatctgcctcattctccagaggaggacaattgagtttcactgatttgggcttaccacctactgaccacctccaggcctcatttggatttcagacctttcaacccagtggcatattattagatcatcagacatggacaaggaacctgcaggtcactctggaagatggttacattgaattgagcaccagcgatagcggcggcccaatttttaaatctccacagacgtatatggatggtttactgcattatgtatctgtaataagcgacaactctggactacggcttctcatcgatgaccagcttctgagaaatagcaaaaggctaaaacacatttcaagttcccggcagtctctgcgtctgggcgggagcaattttgagggttgtattagcaatgtttttgtccagaggttatcactggagtcctgaaagtcctagatttgaccagtaactctcntcaagagacatgtgtcccctggggagcgctgcagtttaaacaaaccacccttttctaaggttgcttaaagggttctaccaggtttaacaagaccaaagacttttcgtatcaacccagctggttgcaggacacaccagtggcctccccaaggagcgtgaaggtgtggcaagatgcttgctcaccacttcccaagacccaggccaatcatggagccctccagtttggggacattcccaccagccacttgctattcaagcttcctcaggagctgctgaaacccaggtcacagtttgctgtggacatgcagacaacatcctncagaggactggtgtttcacacgggcactaagaactc

SEQ ID NO: 84076 - DNA, 802 bp, Homo Sapiens
  misc_feature (23)..(24): n is a, c, g, or t
  misc_feature (42)..(42): n is a, c, g, or t
  misc_feature (121)..(121): n is a, c, g, or t
ccgcacagaattctctgggtgcnncaggaggctgcgcagggnccgataggattcatcagagccagccagaagctcttggataaaggacaagtggctggagacaggaccctggcagtatggnccagcagagagagaaggtcggaggtcaacagtggctggtcactcaggagggcaactgagagaaacgagacgatggttctaggggaggcagacactgtgttcacaaactggttgagagaggtgggatccatgagggccaggcgtgtgagaaggctgatgggcagctccacttgcatcaacggaagatggtagcagcagacctgcagcagatgggctgcaacttctgagtccctgaggtcggccaagacacctataaggaggtcagcatccatgtccagcgcaaaggggaagcaaaggagctggcagacagagagcaccacgacagggagaaactcagacccatgaggcgcctggcgcagttgattcaggaagctggggcaaagcagatgcttcaggatggacatgaggatacttccatgctgggacaggcagctcaggcataactggggctcctgggtaaaggtggccatggccaggctcagcagggctgccatgccctggggagaaatcagtgtccagtctggctcagggcttggtggacaggatagcgaaagctccccttcctgtgcagatgcctcctcggggagcctcaggaccatggagaagcggtgccacaaaacggtccacatttctgaactggacatatccctgattaggctagccttcccctgctagagataaa

SEQ ID NO: 84077 - DNA, 969 bp, Homo Sapiens
aacgggtgatgcggttgactgaagcacacctgatttctgtgctatgtcatgcccaccatctctgggctacaaccactgtgagcatggctgtccccggcactgtgatggcaacgagagctcctgtggggaccatccctccgaaggctgtttctgccctccagataaagtcatgttggaaggcagctgtgtccctgaagaggcctgcactcagtgcattggtgaggatggagtccagcaccagttcctggaagcctgggtcccggaccaccagccctgtcagatctgcacgtgcctcagcgggcggaaggtcaactgcacaacgcagccctgccccacggccaaagctcccacgtgtggcctgtgtgaagtagcccgcctccgccagaatgcagaccagtgctgccccgagtatgagtgtgtgtgtgacccagtgagctgtgacctgcccccagtgcctcactgtgaacgtggcctccagcccacactgaccaaccctggcgagtgcagacccaacttcacctgcgcctgcaggaaggaggagtgcaaaagagtgtccccaccactcctgcccacccgcaccgattgaccacgccttcggaagacccagatgctgtgatgagtatgagtgtgcactgcgaactgtgtcgaactaccacagagagcgtgtcacccttgggtactatggagctcaacgcgacaaccaatgactgtggcatgaaccacaaaccaccatgactatcccagacaaggagtagtgtccacgcgagagaacatctacacctgctggagccaagtacaaggcgagggacgggcatgacaaatagtgtgcaaccatggaaccggaacatggaccgagactgacagtgagtggagcctccagagatgagaccagagcatcgcaaaaaagcccatgtagcaggacaagcgtgtcacggacgaagggaaacaataaactgatctggcatgacg

SEQ ID NO: 84078 - DNA, 1767 bp, Homo Sapiens
  misc_feature (1595)..(1608): n is a, c, g, or t
  misc_feature (1697)..(1697): n is a, c, g, or t
tgcggccgccccagggcgcggcccggaggaaaccgggtgacggtggtgctcggtgcgcagtggggcgacgaaggcaaagggaaggtggtggacctgctggcgcaggacgccgacatcgtgtgccgctgccagggaggaaataatgctggccatacagttgttgtggattctgtggaatatgattttcatctcttacccagtggaataattaatccaaatgtcactgcattcattggaaatggtgtggtaattcatctacctggattgtttgaagaagcagagaaaaatgttcaaaaaggaaaaggactagaaggctgggaaaaaaggcttattatatctgacagagctcatattgtatttgattttcatcaagcagctgatggtatccaggaacaacagagacaagaacaagcaggaaaaaatttgggtacaacaaaaaagggcattggcccagtttattcgtccaaagctgctcggagtggactcaggatgtgcgaccttgtttctgactttgatggcttctctgagaggtttaaagttctagctaaccaatacaaatctatataccccactttggaaatagacatttgaaggtgaattacaaaaactcaagggtatatggaaaagattaaaccaatggtgagagatggagtttattttctatatgaggccctacatggaccaccaaagaaaatcttggtagaaggtgcaaatgcagcactattagatattgattttgggacttacccttttgtaaactcttcaaatttgtactgttggaggtgtttgtactggtttgggtatgccacctcaaaatgttggagaagtgtatggagttgtgaaagcttatacaactagagttggtattggtgcctttcctacagagcaagacaatgaaattggagaattattacaaacaaggggtagagagtttggtgtaactactggaaggaaaagaagatgtggctggttggacctcgttttgctcaaatatgctcatatgatcaatggatttactgcgttggcacttaccaagttggatattttggacatgtttacggaaatcaaagttggagttgcttacaagttagatggtgaaatcatacctcatatcccagcaaaccaagaagtcttaaataaagttgaagttcaatataagactctcccaggatggaacacagacatatcaaatgcaagggcgtttaaagaactacctgttaatgcacaaaactatgttccgatttattgaagatgagcttcaaattccagttaagtggattggtgttggtaaatccagagaatctatgattcaactcttttaatgattgccagtaatgcaagaaacactccttgagagggaggggcaaaagactttcttaaatatttcatttatgacctgcaaattcaagaataaagacacttgaagtaagttttgaagcccctacagttgttttccaagtcttttccggatggatgccctactggtggagattaacctttgggcatatttccagtggtcagcttttcttttagctgggaatttgccacaatcattttgctggctccctgcctggctcctcatgggcggcccacgnnnnnnnnnnnnnncaacggttctaaccaaacagtaataaacccccatggttgggtctgggaaatccaaaaaggacaaaattcacctctttcaaatggaaagnttttctccctctcaattaacttggggccctttgggcggcggcctccctttaaaggtttctttacccgccc

SEQ ID NO: 84079 - DNA, 533 bp, Homo Sapiens
gcggatgcggcggcggcccggcagggaacatgccggcggttgcagccgagggcgcggacccggagatggtaacgcgggcaggtgttcgacgtggggccgcgctacaccaacctctcgtacatcggcgagggcgcctacggcatggtgtgctctgcttatgataatgtcaacaaagttcgagtagctatcaagaaaatcagcccctttgagcaccagacctactgccagagaaccctgagggagataaaaatcttactgcgcttcagacatgagaacatcattggaatcaatgacattattcgagcaccaaccatcgagcaaatgaaagatgtatatatagtacaggacctcatggaaacagatctttacaagctcttgaagacacaacacctcagcaatgaccaatatctgctattttctctaccacgatcctcagagggttaaaatatatccattcagctaacgttctgcaccgtgacctcaagccttccaacctgctgctcaacaccacctgtgatctcaaggtcagccag

SEQ ID NO: 84080 - DNA, 922 bp, Homo Sapiens
tgggagctcagatgatgatgatgttagtagtttggaagaagaacaagaattccacatgagaagtaaaaacagtttacagtactcagcaaaagaacatggaatgcctgaaaagaagaatccagctgaagggaatacagtatttgtttataatgataaaaagggcaccgaagacccaggagactcacatcttcagtggcagctcaatctccttacacacatagaaaatgtgcagaacgaagttaccagcaggatggacctaatagaaaaagaagtccgatgttctggaaagctggcttgatttcacaggggagtaggagccaccagatcctcttgcaagatttgccccaacttaaaccgccacattaaaacagctcctaatttgacatggggcaaagtacagcagatagcaactcttttgctctgtatgacaacagtgaacacttaatggaaagaatgtggctttcttcagtcaaagcatttttattatccacgtgatggctaagtggataatttaaacagcttagtaatgtctggtcattcactgatttgtgatgtcaataggatggcaccttggacaagaaaaactgaagaacaactttatcaaggaagctagtatttaaaaaccaaattcatgagcaagctgcaaatgagaatgtgtcatatgccaaggaacaatgaagtagaatataatgtatactaagggatttcaagttctcagaattttcgagtagttgcttacgtgaagctcaagatacctgtagaaagaaatatggtatatcgtataagttcctaatagcaaagatctatggtgtattaaatccagccacttggccaaacaacaaaattgtcacggacattctacattctggagaactctacaggggttgctctaagtaactgtcttctccagcagtagatccag

SEQ ID NO: 84081 - DNA, 877 bp, Homo Sapiens
cagcggcttcgcgcagaggtggaagaaacccgagacgttccgaagtcaacgcaagcaaaggggagtgcgggtcggggaggaatattcttttggaaacgtaatattggccttggggctctccagccctttgggacttccaatgggatcttagaagcagccgaagcagcgtgagggcggcagcccagggccagccacgatttgaacgctctgccttgcagctcttctggaccgaggagcccaaagccctaccctcaccattcaccaggttacagttcttatccgcatgaatacacatggctctgttacgaaaaattaatcaggtgctgctgttccttctgatcgtgaccctctgtgtgattctgtataagaaagttcataaggggactgtgcccaagaatgacgcagatgatgaatccgagactcctgaagaactggaagaagagattcctgtggtgatttgtgctgcagcagggaggatgggtgccactatggctgccatcaatagcatctacagcaacactgacgccaacatcttgttctatgtagtgggactccggaatactctgactcgaatacgaaaatggattgaacattccaaactgagagaaataaactttaaaatcgtggaattcaacccgatggtcctcaaagggaagatcagaccagactcatcgaggcctgaattgctccagcctctgaactatgttcgattttatctccctctacttatccaccaaacacgagaaaagtcatctatttgcgacgatgatgtaactgtacaaggtgataatccaagaacttgtatgacaccaacttgagccctgaggccacgcgggggattctcagatgactgggatgtggcctctgtcaggacata

SEQ ID NO: 84082 - DNA, 555 bp, Homo Sapiens
  misc_feature (50)..(50): n is a, c, g, or t
  misc_feature (152)..(152): n is a, c, g, or t
gaacccgctagcagtccgagtggtgtctgggagccaccaaccaaatactnaatctctcaaccagaagtgtacgtggctgcgcagggggagtcgctagaggtgcgctgcctgttgaaagatgccgccgtgatcagttggactaaggatggggngcacttggggcccaacaataggacagtgcttattggggagtacttgcagataaagggcgccacgcctacgagactccggcctctatgcttgtactgccagtaggactgtagacagtgaaacttgggtacttcatggtgaatgtcacagatgccatctcatccggagatgatgaggatgacaccgatggtgcggaagattttgtcagtgagaacagtaacaacaagagtaagtaactgcccggctccgatggtccccgagagaggagcatggagggaagttctgcctgtcacctgtcttcttgtcgactcttctgcgccatgctgtgtcccgcggcccttgcctttccccgctgtgtctactttcctgactttcaaacctgagaataaaccagtgttgctgcac

SEQ ID NO: 84083 - DNA, 599 bp, Homo Sapiens
ttgtttaagtgcacgttaaacattgtcagttgtgtattttcattttatttaaggttcaccataagaaataggattaagcttttcaaagccggcaagttgaactatttatacttaccaggtaatgtattgatgagtaccttattccatcgtttgcgacattgtagctatactaaaatggagtcatacttccataaacttaaacaacaaaaatgtccccatctccattttaacatgtagtacttttacagtgtatagtcaaaggcaagaatgtgtgtgttttaacatgaatgacttttaaagtgttcagtaagaggcaggattttcaaagacccaaacttaacctttgatgtgtcaaaacagctcttgggtattagagcacctgggtccttaatacaattttccgggaaaattgcagtttttcctacgacatttaaatgtaatagaaggctgtggtgtggctctgaaggtttctaacacaattccaacatctgtagatctttgctatagaatagtcaccattccctactttactgttactacacttattgctattacatcaattttacttgaactttaaaacttggaagagatattctaaa

SEQ ID NO: 84084 - DNA, 610 bp, Homo Sapiens
  misc_feature (101)..(114): n is a, c, g, or t
  misc_feature (288)..(288): n is a, c, g, or t
  misc_feature (296)..(296): n is a, c, g, or t
  misc_feature (302)..(302): n is a, c, g, or t
  misc_feature (307)..(307): n is a, c, g, or t
  misc_feature (328)..(328): n is a, c, g, or t
  misc_feature (345)..(345): n is a, c, g, or t
  misc_feature (354)..(354): n is a, c, g, or t
  misc_feature (381)..(381): n is a, c, g, or t
  misc_feature (393)..(393): n is a, c, g, or t
  misc_feature (402)..(402): n is a, c, g, or t
  misc_feature (429)..(429): n is a, c, g, or t
  misc_feature (442)..(442): n is a, c, g, or t
  misc_feature (465)..(465): n is a, c, g, or t
  misc_feature (467)..(467): n is a, c, g, or t
  misc_feature (499)..(499): n is a, c, g, or t
  misc_feature (501)..(501): n is a, c, g, or t
  misc_feature (505)..(505): n is a, c, g, or t
  misc_feature (525)..(525): n is a, c, g, or t
  misc_feature (533)..(533): n is a, c, g, or t
  misc_feature (545)..(545): n is a, c, g, or t
  misc_feature (556)..(556): n is a, c, g, or t
  misc_feature (571)..(571): n is a, c, g, or t
tctaaactggtagctatttcaaatatttctgagcaattgagttatacaaattaacatacaagttagaggtttccattgtatacttcccagcaaaaaaagannnnnnnnnnnnnnctgtgaggagattgaaagaagaggttggttttcctgtacccgaattaaatatattccattgattatcactttcttcccattctttggatgtcagagacctgttatttggcttaaaaatacattacagaaaacttcatttctttaaattaggatttcttaagtaagggccaggtnagacccancctttnctganttacttctcatgcattagaantcttaaaatggatgttnatatcctantggccttgtcttatggttgccttttanagcaagtcacanggtggtggnttctctgtctgggtgatgcctgcgtantcatttgatttantctggaaatgggacttttctgtncnagggccacgatagtgaaatattttcaagcttngnggancatatcttctgcagctaccntagctctnccagtttgtaantgcacaagccnccataatacaatatncaaaggaattaatgtggctatgctccaataaaaacttta

SEQ ID NO: 84085 - DNA, 646 bp, Homo Sapiens
  misc_feature (541)..(541): n is a, c, g, or t
  misc_feature (621)..(621): n is a, c, g, or t
gtagcaaggagaagcccactcactgctccgagtgcggcaaagctttcagaacctaccaccagctggtcttgcactccagggtccacaagaaggaccggagggccggcgcggagtcgcccaccatgtctgtggacgggaggcagccggggacgtgttctcctgacctcgccgcccctctggatgaaaatggagccgtggatcgaggggaaggtggttctgaagacggatctgaggatgggcttcccgaaagaatccatctggataaaaatgatgatggaggaaaaataaaacatcttacatcttcaagagagtgtagttattgtggaaagtttttccgttcaaattattacctcaatattcatctcagaacgcatacaggtgaaaaaccatacaaatgtgaattttgtgaatatgctgcagcccagaagacatctctgaggtatcacttggagagacatcacaaggaaaaacaaaccgatgttgctgctgaagtcaagaacgatggtaaaaatcaggacactgaagatgcactattaaccgntgacagtgcgcaaaccaaaaatttgaaaagattttttgatggtgccaaagatgttacaggcagtccacctgcaaagcagnttaaggagatgccttctgtttttca

SEQ ID NO: 84086 - DNA, 1153 bp, Homo Sapiens
aattcttcagagagttgcttactattcctgtagccagtgactgttatagtcctgaatccggtgctgccaggacttctggagggaagacacactgcccatacccacttcatggaatacctgctgccatcacatccaggaaaggagtctggtcccagccgggcctcccggtccaccagcaaaacgcaccaacttggtaaactaaaggcaatactcatggtgccacatcagttagggtctccaggacactctcattagcacagtcaaagcccgcgtgggccaggattgtggccactgcctggtagaggagctgccgacaggagtgccagctgagttcagtcacaggttcccctttcccacgataaaagtcactctctgggtcactgtgccggatctggaatggtgcattgggattcttacaatctaaaggcaggaggtcatcagggagaggaggtgacccagggcacgagggaagaggttcactctcttcagtttttacaccttctgtctgctgctgattctgggcctgagctgtggcaataaggttgcgaagacgtcggttgtgctgaatcaactgaatcgtatggatggtgagactacatggctctgaggggatgtccagcatagtggggggcttcggcttgttggctgagggttggtgcaggggtgggtcatggacttccaccagacggaactcccgtgggagcaaatcgaaggaacttctgttggtctggcttgatgatattggtatctctccccagtatctttgcagattcattgtccatatgtctcttcaagttcaacaaacatttatcaaatgccaggcattctgtgtcggtcaaagactgataatgtgagatccttgcccgaaaggagcacgaagaacaggcacggagcccaaggaatgcccaagtccctccaggggtttcctcggtcacggtccgccggcgcaggcgccaatcacagggtcctgaggtcgcctgacgttcagggcagccggaagacggggaggtctggacctgaaccgagacaaggaggtaccacactattcactgctgcgtcgcagagcgggctgggcggctgtctggacctcgagaggcctgaggcaaggatcgcgtcagaccccgaaagctggtttgttgattagtgatctccc

SEQ ID NO: 84087 - DNA, 323 bp, Homo Sapiens
  misc_feature (59)..(59): n is a, c, g, or t
  misc_feature (90)..(90): n is a, c, g, or t
  misc_feature (96)..(96): n is a, c, g, or t
ctatacataaaacatttatacctgttttcatttttttacattaagatgtaaacatcctnttatccaaaatagccagtgaaaaaataaaancaaaancaaagtaagcctttaaaaatagttggtgaggagttttcaagtgttcttgctgaatgtatccgaataccaaacattgtaactcgtcaattcaatgacaaggaggtagctcctgaaccaaactggtgcgagctgtgtcaatacagagcaaaatctcaattaaccagaatgctccaacttccctatttacaagaaaattctgttttaaccattagtttagaaaacctttc

SEQ ID NO: 84088 - DNA, 951 bp, Homo Sapiens
  misc_feature (15)..(15): n is a, c, g, or t
  misc_feature (400)..(421): n is a, c, g, or t
  misc_feature (568)..(590): n is a, c, g, or t
  misc_feature (593)..(603): n is a, c, g, or t
  misc_feature (845)..(845): n is a, c, g, or t
  misc_feature (872)..(872): n is a, c, g, or t
  misc_feature (914)..(914): n is a, c, g, or t
  misc_feature (939)..(939): n is a, c, g, or t
caattactgaaaaanaattgacagctagtgttttttaccatccgtcattacccaaagacttgggaactaaaatgttccccagggtgatatgctgattttcattgtgcacatggactgaatcacatagattctcctccgtcagtaaccgtgcgattatacaaattatgtcttccaaagtatggaacactccaatcagaaaaaggttatcattggtcgttgagttatgggaagaacttaagcatatactgtgtaaacagtgccatacatttctaaaatcccaagtgtaggaaaaatatgcagacatacagatatataggccaactattagtaataatatgaaatatacttaaagagcttttaaaactttgtatttttgtacaaaatatttgtcttttacaannnnnnnnnnnnnnnnnnnnnngtcattttaccgacataatacatggagccaaagaaaacaataatggtactaataaaaactcctagggtttcctgtcagatttaattctacccagtggcaaagaattttttcaattgtggctttaaaaaaataattaaatatacatgnnnnnnnnnnnnnnnnnnnnnnnttnnnnnnnnnnnaatgtttcatttcctcagaggaaccaatcacttggaatgtctagaaatatccttgcagattttgccagtgtcaatcaagcctgcacacatgcacagtgaagcgggctgtgctgccttgagcccatcaccagccaacattcttgacgtgtgcctgaccagacacagaagaaatgggcaactcaagacgtgcttccactttcattttggtgggagtcggggaggtgtgggggatggagaggcantgttgggaagggcactgaactggctantggaaggcctgtgtcatggctgactatgactgtcttggcatnagatcctacagagccacattactgnaggaacgtagcg

SEQ ID NO: 84089 - DNA, 1012 bp, Homo Sapiens
  misc_feature (893)..(906): n is a, c, g, or t
cagtcgacggtaccggacatatgcccgggaattcggccattacggccgggcaatgacctcactccagattccagagcagtgaaaccagcagaccggcagatggctcagaacaacagccggccagagcttctggacccggagcccggcggcctcctcaccagccgaggtttcatccgcctcccagtgctgggctatatctatcgagtgtccagcgtgagaagtgatgagatctggctctgagccgagggcaagacaggagtattctcttggcctctggacaccctcccattcctccaaggcatcctctacctagctaggtcaacaacgtgaagaagttatgccactgccacttttgcttgccctcctggctggggtgccctccatgtcatgcacgtgacgcatttcactgggctgtaacccgcaggcgcacaggtatctttggcaaggctaccagttggacgtaagcccctcatgctgactcagggtgggccctgcatgtgatgactgggcccttccagagggagctctttggccaggggtgttcacatgtcatccagcatccaagtgtggcatggcctgctgtatgccccaccccagtactcccacagcaccttgtacagtagggatgggggcgtgccctgtgtggggggacagggagggccccggccttggattttccccccctcctatgctatgtaacccttggttccctcagggtaaaatttaaggaccctgcctaacctgtgccgaaaccccattgggtccttttggaaaggaaaacccaaccccctgaacccaagcagttacccgggcccaagaaccaaaccgttctcttttttgcggtggccacaagttcctctggcccccttaacctttcttaaccggtttcgggnnnnnnnnnnnnnntttcttggggggaatttcccaagggggaaccccccgtgggggaatcctcctcccctatagtaaacttttccagttggggggcactataaacatattttttccttac

SEQ ID NO: 84090 - DNA, 1083 bp, Homo Sapiens
aacctacggctaggtacgaggctgggtgtcgaattcggcacgaggcagcgctctccgcccagcggaagttttcgctgggcaactgagaaggtcgctgtcaagatggagtttccaacccagtaaatccaagggccagaccgtgacctcataaagcatgatctccttctgtccagactgtggcaaaagtatccaagcggcattcaaattctgcccctactgtggaaattctttgcctgtagaggagcatgtagggtcccagacctttgtcaatccacatgtgtcatccttccaaggctcaaagagagggctgaactccagttttgaaacctctcctaagaaagtgaaatggtccagcaccgtcacctctccccgattatccctcttctcagatggtgacagttctgagtctgaagatactctgagttcctctgagagatccaaaggctccgggagcagacccccaacccccaaaagcagccctcagaagaccaggaagagccctcaggtgaccaggggtagccctcagaagaccagctgtagccctcagaagaccaggcagagccctcagacgctgaagcggagccgagtgaccacctcacttgaagctttgcccacagggacagtgctgacagacaagagtgggcgacagtggaagctgaagtccttccagaccaggacaaccaggccattctctatgaagctgcacccacctccaccctcacctgtgactcaggaccacagaagcaaaagttctcactcaaactggttcttgggtgttacccagcctggggaggagccttcagtcggccctggatgtcagcccaaagcattgtgctgtcaaagaggtctgtgctgcagggtggcctgccggctgctggatgccctggagttcctcatgaaaatgagtatgttcatggaaatgtgacagctgaaattatctttgtgggatcagaggaccagagtcaggtgacttttggcaggctatggcctccgccttccgctattgcccaagtggcaacacgtgggccctaccttggaagggcagcagaagcccctcccgaggggggggaccttggaggttca

SEQ ID NO: 84091 - DNA, 1034 bp, Homo Sapiens
tataaggtctaggtaacgaggcctgggtggtgaattcggcacgagggggcactgagaaggtcgctgtcaagatggagtttccaacccagtaaatccaagggccagaccgtgacctcataaagcatgatctccttctgtccagactgtggcaaaagtatccaagcggcattcaaattctgcccctactgtggaaattctttgcctgtagaggagcatgtagggtcccagacctttgtcaatccacatgtgtcatccttccaaggctcaaagagagggctgaactccagttttgaaacctctcctaagaaagtgaaatggtccagcaccgtcacctctccccgattatccctcttctcagatggtgacagttctgagtctgaagatactctgagttcctctgagagatccaaaggctccgggagcagacccccaacccccaaaagcagccctcagaagaccaggaagagccctcaggtgaccaggggtagccctcagaagaccagctgtagccctcagaagaccaggcagagccctcagacgctgaagcggagccgagtgaccacctcacttgaagctttgcccacagggacagtgctgacagacaagagtgggcgacagtggaagctgaagtccttccagaccagggacaaccagggcattctctatgaagctgcacccacctccaccctcacctgtgactcaggaccacagaagcaaaagttctcactcaaaactggatgccaaggatgggcgcttgtgcaatgagcagaacttcttccagcgggccgccaagcctctgcaagtcaacaagtgggagaagctgtactcgaacccatggtggcatccttactgcatgggttcggtgtccaccaggacaatacgttctggtgtaccagctggggagaagctcagtcggctggttaggccaaagattgtgaaaagttgcttgaggtggcgcggggggagccggtccctcgatgagttttggaatgcatgcaattgggccacacgaagagagtgagataagatgagaa

SEQ ID NO: 84092 - DNA, 984 bp, Homo Sapiens
gggtccggaattcccgggatgcagcgctctccgcccagcggaagttttcgctgggcaactgagaaggtcgctgtcaagatggagtttccaacccagtaaatccaagggccagaccgtgacctcataaagcatgatctccttctgtccagactgtggcaaaagtatccaagcggcattcaaattctgcccctactgtggaaattctttgcctgtagaggagcatgtagggtcccagacctttgtcaatccacatgtgtcatccttccaaggctcaaagagagggctgaactccagttttgaaacctctcctaagaaagtgaaatggtccagcaccgtcacctctccccgattatcccctcttctcagatggcgacagttctgagtctgaagatactctgagttcctctgagagatccaaaggctccgggagcagacccccaacccccaaaagcagccctcagaagaccaggaagagccctcacgtgaccaggggtagccctcagaagaccaggcagagccctcagacgctgaagcggagccgagtgaccacctcacttgaagctttgcccacagggacagtgctgacagacaagagtgggcgacagtggaagctgaagtccttccagaccagggacaaccagggcattctctatgaagctgcacccacctccaccctcacctgtgactcaggaccacagaaggcaaaagttctcactcaaactggatgcccaggatgggcgctttgtcaatgagcaaaaattcttccagcggggccgcccaagcctcctgcaagtcaaacaggggaaaaaaactggtactccgacccccactgctggcccatcccttacctgcttggggtttccggcggttcccccaggaacaaaaaaccgggtttcttggggggttacccagcccctggggggagggaaccttccaatcccggcccccgggaaatgtcaaacccccaaagcaaggggccctgtc

SEQ ID NO: 84093 - DNA, 931 bp, Homo Sapiens
  misc_feature (41)..(75): n is a, c, g, or t
  misc_feature (143)..(255): n is a, c, g, or t
  misc_feature (275)..(401): n is a, c, g, or t
taacgacgagcgccgcgagttttgagcgaggaagcggccgnnnnnnnnnnnnnnnnnnnnnnnnnnnnnnnnnnncagtcgacggtaccggacatatgcccgggaattcggccattacggccggggcaccatgcccagccaannnnnnnnnnnnnnnnnnnnnnnnnnnnnnnnnnnnnnnnnnnnnnnnnnnnnnnnnnnnnnnnnnnnnnnnnnnnnnnnnnnnnnnnnnnnnnnnnnnnnnnnnnnnnnnnnatgcgccaccatgcccggcnnnnnnnnnnnnnnnnnnnnnnnnnnnnnnnnnnnnnnnnnnnnnnnnnnnnnnnnnnnnnnnnnnnnnnnnnnnnnnnnnnnnnnnnnnnnnnnnnnnnnnnnnnnnnnnnnnnnnnnnnnnnnnntcctctgctctaaaattggtgtttgggtgatcagaacgcaggtagccaatgggaagagcacttctgagtgataactaaagcagtttggtggccttttcacattctccaatgttcaaacatattttccactttccattttctctttcacctcattttgcctctctatcccccatccctgcttatttcttaagcccattgatggcacgtcattaaattgtatttagggctaatgagtcattgttccttaatatcgttttcaatatgccacaagtttcaggacacatttaaaattttctaaaacaatatcctaatcaatattgactaatttgcgccacattcccaagtctaactcagcacacactgccagtctttccccaatatctgtctcctctcaattccccacagagctttataaacttgtaatcacagatatctcactctgtcattgttaatctaagaatgaagcactgactttaatacgggttactaagttcaaccttctaatagtaggctctaggatccgcgatccg

SEQ ID NO: 84094 - DNA, 777 bp, Homo Sapiens
ctgaaatgtagataactgctttttgacaaagagagccttccctctcccccacccctgtgttcttgggtaggaatgggaaaaggggcaacctacaaagattgttggggcaagggaagtcacaagctttcggatgggcggtggcttttcacaaaacatttagctcatcttattctctctttgtcctctctcccctcctgcccgcccgcaccctggaattgccactcagttcctctgggtgtgcacatatgtttggagaaatagaggagagaaaagagggccacgtaactgagagcttacagtgccaatgccgtttgtgttctggccagagtggagtgcgcagccctgactcccaggcgctgagattgttgcctggttacccaggaagctgctgttccggctgcccagcctttctctgagccagcggatgcacagtccgtggccttcttcaggcttattgatgatgctttttgcaaatgttgaatcatggttctgtttctaagttggatcttttttgttttctccttgccaccctaatttgacatcaaaattctctcttgtgcattgggccctgggtcattcaaacccaggtcacctcattccccttctctgttcacacctaatgtcttgaagagtaggtagcagcagtgtgggctgaacctaggccagcttgcttagcgggtcaccctgctgtgaagtcctggcaggtgttggtaatgtgtggaaatgcagtcagcaagtttgctggggagtttgataaaagtataaaacaaaacaaaa

SEQ ID NO: 84095 - DNA, 1454 bp, Homo Sapiens
ttttctttccctattaccacctggttccacccaaatttggagtaaaaagtgggactttggtgagaagaatttatgtttggatggcccagggacctctttttgggggcatttcttccctaagtggaaataccgcaaccacataaggggagtaggggaggtaatacagggaagctactctttccagctcagaaggagttgatgaagcccatatatgcattcaagaagcccatgggatcctctagctgtggatagtggctaatgtggtcatccagaatcgacactgtggaccgcggcagcgttttcctgtacagctccaaaaactctggatagggatttacaggatccaatggcccatagataaaatgaatggggatagttacagaggcaagagctcccacccagcgccttctgaacttcttcctctgattgatgtactgtaagagactgtcaatgactaagttcccgtcattgttggggatccctgcccacatgtcccacagctcactctcagagggccgagtatacggcccaaagactggggtgagacctcgagagaatacaaagaagttcatcagtcgtgtgaggatgggtgacagcacacctccatctttgagtagcttttggagaaggagtggacggtgagtctcaggaaagatacctccatttgacagacagagactctttatggtaagccgaccagatcgattctgcttgtacctgtagagaagctcctgagcaacaatatctccatagtcatgagaaagaaggttgatcctgcggttctggagccccagatgccgcaaaagcgcttccacgatgctggcctgctcaaatatggaatagtgatgtggtctcggtttgtcactgaagccaaagcctaagaaatcaagggcaatcacccgatgaaacctcaaggtcagaccttcccaaatcttgtaccagtcgtagctggatgttggaaaaccgtgtaaaagcacaactatctctggacttccaaccacacccacagagtcttggtagaagatacgcagtcccttgtaagtgaaaaacttgcctgaagacttccatgagtgaagggcaggggagagctgagggggtgggatgtgcaggtacgcagcaagcaggggcacggccagcagccccacctggacccaccactccctcatcctgcggaggcgatctcggcgcaccatggccgcgttatcccatgccgcccgccgcagcgttgcagagcaccgggcgccgcagagcccgcagccgtgcagagctggccagcagcgggggcgcagcccgcagcccacagcccgcgcagggcggcgccgcgccgggcagctacagccactccggcgtgcgctgcggcactgcgcttgcgaggcgcagctgccgcagaggagatgccggggtgtgctgcctcgtgccgaattcaccacccagcctcgtacctagcctatctt

SEQ ID NO: 84096 - DNA, 161 bp, Homo Sapiens
  misc_feature (15)..(15): n is a, c, g, or t
  misc_feature (26)..(26): n is a, c, g, or t
  misc_feature (43)..(43): n is a, c, g, or t
aattctcctgctcanctcccaaatgntggattacaggtgtgantactgcgctggccaagttttttacaaatatttttcttttggtggaactcatctgtgcactctctggtgtgtttttccacctttgttgggtcttggcttaaaatatcctcatgtgggct

SEQ ID NO: 84097 - DNA, 1487 bp, Homo Sapiens
  misc_feature (1403)..(1403): n is a, c, g, or t
  misc_feature (1409)..(1409): n is a, c, g, or t
  misc_feature (1440)..(1440): n is a, c, g, or t
  misc_feature (1451)..(1451): n is a, c, g, or t
  misc_feature (1457)..(1457): n is a, c, g, or t
gggattgaggaacatggcgttgctggtgcgagtccttaggaaccagactagcatttctcagtgggttccagtatgcagccgattgatacctgtgtctcctacccaaggacagggggacagggctctgtctcgcacttcccagtggccccagatgagccagtcccaagcatgtggtggatcagaacagattcctggaatagacatacagctgaataggaagtatcacaccacacgtaagctttctactaccaaagattccccacagcctgttgaggagaaggttggtgctttcacaaagataatagaagccatgggattcacgggacctttgaaatacagtaaatggaagattaagattgcggccctgcgcatgtatactagctgtgtggagaaaactgacttcgaggaattctttctaaggtgtcagatgcctgatacattcaattcatggtttcttataaccctactccacgtctggatgtgtctagtccgaatgaagcaggaaggccggagtgggaagtacatgtgtcgtatcatagttcattttatgtgggaggatgttcagcagcgcggcagagtcatgggggttaaatccctatatcctgaagaagaacatgatcctcatgacaaatcatttctatgcagcgatcttgggatatgatgaggggatcctttcagatgatcatgggctggccgctgccctctggagaaccttcttcaaccggaaatgtgaagaccctcgacatcttgaattgctggtagagtatgtgaggaaacagatacagtacctggactccatgaacggggaggatctgcttctgacaggggaggtgagctggcgccctctagtggagaagaatcctcagagcatcctgaagccccattctccgacttacaacgacgagggactttgatgggctgggccctccgcacggcccgccagctggcttcgaggaacctccaggagagaagtgcctgttggtccaggaccctgcagaaagtggcctgaactgacctctgaacagcatctgtcaaatacctggccccatttgtgttgagtttcctcttagtgtgcccaggagtctgatctgctggggtacagggctgggagaacccctagctctcccggggtgtcctctcccttaggggaagccccgagtgagagtcccccagcacacactccccaaccccctccagcaactacatgtgactgatagcttttcccaaaggccaaggaagggatggtgtaggttcaaaagggaaaccccccagggcctgctgtggcctaggagcagattgtaatgctgccgagtccggtcggtgaccacgcgttgtccctcggctttcagccatggggttgagttggccattaaaagaaacagagacttctctgccatggcctntttatncagggattagaaattgctgagatggtggacncataatgaggnacggcntcagttagagacggagaaaggaagagctgg

SEQ ID NO: 84098 - DNA, 1124 bp, Homo Sapiens
agtcgagctcggaccctactgtctcgatcgttaggagcattatctttgaaggtaaaacatagtgtatcattgtgtaaactcccaggcttgatgtagcagaagagatcatttctggaggcttcagcaatggaatttagcattataagagagattggacaaaccagtccaaagtggtccgagttcttaaatccaggtagggaactcactcttctttcttctctggacctaattgggcattgggctttagtgagaccacagaccaggcccgtctctcctgtaggcttttaattcaatggcaactctatttcaaagaataaaagcctttggagagttgcggcagttctgggggcgggctcaggagagtccatagatcagccgtaactggaacgtagaatctacgtctgcctctgaatggacttcccacctcctctctcttgctctgatgcttgcctctgggcctctccatgcccaaggtggtctttcatccttgacaggctggtaatgtgctggccacctccagctcctgcatcgagtctgtaaaccagagctggttctcatggccttcgtcacgataccaggatacggaggggagcccagggccatccatacccaccccagggtaacggggctggcctggcattagtcattatttagtttccaggccaaccatccagatagagattccctctttcctttgagcagtgctctcaagagctccgtgcctgtccacaatgacctagagtgcatcctgctcattgtcagtgtagcccctcgcccctatattcatccaggatacttggaagtgctaaaataggaagggattcggctttcaactttgctaccatcttccctgaagcaggaaaatgaacatggacttaaatgttctttgaaaaaacccaagttttaagatttgctgtgtgatgaagtgacagggagggccggagtcagcaggtgccagactttctgttctgtctgccatgggtttgtccagctcaggtagctctaggagcaccatcctgcccctagcagagcccaggccttgccctcatgaagcatcattgaaatagcaggagcatgttgatttcttggttaggttgcatatataaccgacttcgagaacatat

SEQ ID NO: 84099 - DNA, 384 bp, Homo Sapiens
accattgtatatttgtacaaaaagtttttaaagttatactaacttatattttctatttatgtccaggcgtggaccgctctgccacgcactagctcggttattggttatgccaaaggcactctccatctcccacatctggttattgacaagtgtaactttattttcatcgcggactctggggaagggggtcactcacaagctgtagctgccatacatgcccatctagcttgcagtctctttcggcgtttcgctgtctctcttattatgactgtgtttatctgaaacttgaagacaagtctgttaaaatggttcctgagccgtctgtaccactgccccggcccctcgtccgccgggttctaaataaagaggccgaaaaatgctgca

SEQ ID NO: 84100 - DNA, 420 bp, Homo Sapiens
  misc_feature (252)..(252): n is a, c, g, or t
  misc_feature (289)..(289): n is a, c, g, or t
  misc_feature (338)..(338): n is a, c, g, or t
  misc_feature (350)..(350): n is a, c, g, or t
  misc_feature (369)..(369): n is a, c, g, or t
  misc_feature (405)..(405): n is a, c, g, or t
gggaaaactggattaataataggaaaaggaggtgaaacataaaaagcataagccagcagtctggtgcaagaatagaacttcagagaaatcctccaccaaatgcagatcctaatatgaagttatttacaattcatggtcctccaaccccatatgctccccagggatgggaaaatgcatatccacactggcagcagcaggctcctcctgatccagctaaggcaggaacggatccaaattcagcagcttgggctntctattacgctcactattatcaaccagcaagcacaancaccaccagcaacccctgcaggtggaccaactacaactcaaactaatgncaaggggtcagnagaatccagccccagctgncaaggttgattattccaaggcttgggaagagtactncaagaaattgggtca

SEQ ID NO: 84101 - DNA, 404 bp, Homo Sapiens
  misc_feature (30)..(30): n is a, c, g, or t
  misc_feature (40)..(40): n is a, c, g, or t
  misc_feature (44)..(72): n is a, c, g, or t
  misc_feature (74)..(74): n is a, c, g, or t
attaataaaaatggtttttaggaaaatccnggatcaaccngaannnnnnnnnnnnnnnnnnnnnnnnnnnnnancatggtattttcctccaccacctgttccactgaataacatttcaggtattttcttcatactgctattggaccaaccctccatccacaacacctggcatttcttatgcaaagctggattactctcacagtttatcatgaagtttgaatttgcagaatccattatcaagacaatatgcaagttttgctgaattctatatgtgaagtaattgaagactggtccaaaaaaaccatcttgtgaagcttgatccttaagtggtaacagcaagggctctaattcttcaagagtatagagtccaggaacttcacctgaagacaaaaggctatagatca

SEQ ID NO: 84102 - DNA, 475 bp, Homo Sapiens
tcactgagcaagatgttgcaagccaccagagctattcccaaaagaccctgattgcactggtcacctcgggagccctgctggctgtcttgggcatcactggctatttcctgatgaatcgccgcagctggagccccacaggagaaaggctgggcgaagacccttattacacggaaaacggtggaggccagggctatagctaaggacctgggacctccactgaggctcagggaaaggacagtgtgaaccgaggggctcaggaaaacgggaccggccaggccacctccagaaacggccattcagcaagacaacacgtggtggctgataccgaattgtgactcggctaggtggggcaaggctgggcagtgtccgagagagcacccctctctgcatctgaccacgtgctaccccacactgctggcaggtgacactctcatatacgccccccattttccagggactaccaagtctcgaactt

SEQ ID NO: 84103 - DNA, 239 bp, Homo Sapiens
agcattgttatgctaaaatagagaaaaaaaatcctcatgaaccttccacaatcaagcctgcatcaaccttctgggtgtgacttgtgagttttggccttgtgatgccaaatctgagagtttagtctgccattaaaaaaactcattctcatctcatgcattattatgcttgctactttgtcttagcaacaatgaactataactgtttcaaagactttatggaaaagagacattatattaat

SEQ ID NO: 84104 - DNA, 1269 bp, Homo Sapiens
  misc_feature (1121)..(1121): n is a, c, g, or t
tattataaggatcactggagtccatctgagcctctggtctcagttctctgctccgcctatggcaaattatttgtatgtattgttctttttttgggaactgaaatgtgatgttgagtgttttgtaatattagccataattttcaaaatcattttctaattcattgaagattaaacattatctttgtatgaagtcaaaatgaatgtaattgtccaaatccattattatgttcaaaacatgacactctaacagaagtaaactgttgctgcatatttaatactattttctctttacagacaagttgtacaattgtgtttatctcgccattaatagtgagggaaatattctctctcgtgctaaggagacaggctcacatattgagggagtgaccggtgcccgcgagacagaaagaacaatgtcagccacatcaggaccgctggggcttcgagtctgccctaatttgggtttgtctaggagctccagcctgatcttggattgtcaggcgtctctcaacactgccagccacctgagatgctgaccagcagtgaaggctgcactagttttctacactacaggaattactgttgatgatttttgctgttgtttcatgaatgtgccgagtgacttctgactctgccagcatctttgacctctgactctgcccgcgtctttgtttggcctattgaggtttagcgttttaaccttaactgttgttttggacttgaactttctctagccttgaaaatggagtgaacaggaggcaaagccacgcgtggtttgtgttggtggtatgttccacaaatggaagagatcattgcattttgctttggtaatgagtttacagagagtgggtcatctttgaagcatcaaatcctgatcaaatgctcaagctggaccgagctgcaagcctgccttggacaaagaatccctctgttcactgtggtgggaaagatcacactacatgcctgttgattggctcagtcactctgtgtctgatctaaacgtcattcagccctagaagcatgaattgcttcaaattattgtcaacttgttctcttccattttcattcaaattaactttgactcctggaaagtattgagtcttcctttcaaggaccataanggtacatcagttatcttgaacattctgacgtgtaaaggaccataaggtacatcatttatcttgaacattccgacgtgtaactcacagccgaagcactccatccccagaatttgttgtctggggaaactttaagatcctctaggaagct

SEQ ID NO: 84105 - DNA, 1034 bp, Homo Sapiens
tcgggctagggtagcgaggctgggtgtcgaattcggcacgaggcctgagtctgcttctggcagttgggtccctcatcgggtatagtcgttctccaaatgataagtccatcaatgcccttcggatgactgttacaggattttttattggtggaccttctaatatgattagttctgctatttctgcggacttgggtcgccaggagctcatccaaaggagcagtgaagctttggccactgtcacaggaattgtggatggttcggggagcattggagctgcagtgggccagtatttagtgtctctgatccgggacaagctaggatggatgtgggttttctactttttcattctcatggagacaggctcacatattgagggagtgaccggtgcccgcgagacagaaagaacaatgtcagccacatcaggaccgctggggcttcgagtctgccctaatttgggtttgtctaggagctccagcctgatcttggattgtcaggcgtctctcaacactgccagccacctgagatgctgaccagcagtgaaggctgcactagttttctacactacaggaattactgttgatgatttttgctgttgtttcatgaatgtgccgagtgacttctgactctgccagcatctttgacctctgactctgcccgcgtctttgtttggcctattgaggtttagcgttttaaccttaactgttgtttgggactgaaactttctctagccttgaaaatggaggtgaacaggaggcgaagccacgcgtggttgtgtcgggggtatgtcccacaatgggagagatcatggctttgctcggaacgacttacgagaggggcccctggagcttcaatccggccaaggcaagctgcacggagtgaagccgctgacaagaccccgtcacgggggaaaatacccatcgggaggccaccggtagtaaggcaaccaaaggagtcaaggcagctcccataaacggcgcgaggcctgggcagaatgaacggggaagaacagcgacaccccaggcacgccaacgcga

SEQ ID NO: 84106 - DNA, 408 bp, Homo Sapiens
tttaagaatcagattcttttattagcatctgcttgtcttcatggcttttctgccaaaaacacacacaagggcttattatttgctccagatgccattattatgaacttaaggaaacttcaaacaggccctctttgccccagaggttgaaatccaggattaacagacttacaggagggactcaagaaacactagtttgaacaagaccataatgaggatggccagcagcactgaagggtgttcagagagagaacgctgatccttaggaccgacagaaagaaaaatgatgagaatgaagatgagaaattagtcaacatgaaagactgacttcaacatttactttaaaagtagctacaaatgagaaaggaaatttgctggcatgctgatggtgggaggcaggaggcaaaagtg

SEQ ID NO: 84107 - DNA, 885 bp, Homo Sapiens
  misc_feature (91)..(128): n is a, c, g, or t
gtgtttctgtcagttccggctgtttgttcgggaagtggatccgccgctgccggagcagcccgaagggagctgcggatcgcgaggccagtannnnnnnnnnnnnnnnnnnnnnnnnnnnnnnnnnnnnnatggcccgggactacaaccacctcttcaagctgctcatcatcagcgacagcggtgtgggcaagagcagtttactgttgcgttttgcagacaacactttctcaggcagctacatcaccacgatcggagtggatttcaagatccggaccgtggagatcaacggggagaaggtgaagctgcagatctgggacacagcggggcaggagcgcttccgcaccatcacctccacgtattatcgggggacccacggggtcattgtggtttacgacgtcaccagtgccgatgtcctttgtcaacgtcaagcggtggcttcacgaaatcaaccagaactgtgatgatgtgtgccgaagtattagtgggctacataagaagtgacgaccctgagcggaacggtggtggagacggaagatgcctacaaattcgccgggcagatgggcatccagttgttcgagaccagcgccaaggagaatgtcaacgtggaagagatgttcaactgcatcacggagctggtcctccgagcaaagaaagacaacctgggcaaaacagcagcagcaacaacagaacgatgtggtgaagctcacgaagaacagtaaacgaaagaaacgctgctgctaatggcacccagtccactgcagagactgcactgcggtccctcccccagcccgaggcccacggaggttcctcgggggacagtctcagtttcgtgccgttatttaaagaattctctccatgtttttgtatcgggaggtgccatcggat

SEQ ID NO: 84108 - DNA, 701 bp, Homo Sapiens
  misc_feature (587)..(602): n is a, c, g, or t
attgtcacaggaaataaatggtaccagaagtccctttcctgttctgtctcttcattgtaatggaagtttcagttgggcatgagcctggagagatgtgactgtctacagttctatttgtatatataaaaagaagactgaaagtcttttgacatggatattgtgaatggtatgaacttttaaaccatattattgatgatgaaaattatttcctgggaactcagtaggaataataccgtattaaggaataatactgtaccataaaacatcatgaaaccctagatatgaaatcccctgaagtctgtaatcatggtggttatgttttgtctattcttttgctgtttgtgcctcataaaaagagaatgaggtcttctgctagagcttcgtattgctttggaagttcatctgtgttttatttctccctgaagccctatctttatggcttacttgtaacatgaaagtagtagatgctgccagaaaatagtgtcctcaatattttaaaacaatgttgacatgttttgttcaagtcagcaagctctatgtgagtctcaggaagtgaattaaatttggaccttatgttttactcttgnnnnnnnnnnnnnnnnggaatgttcacttaatgactctctcctgactcaggagaagaaaccccttgtggaaggacagcttggtgatccggcaattctctgggttcccaaagaatg

SEQ ID NO: 84109 - DNA, 636 bp, Homo Sapiens
  misc_feature (138)..(138): n is a, c, g, or t
  misc_feature (418)..(418): n is a, c, g, or t
  misc_feature (586)..(586): n is a, c, g, or t
ttcatagatgttctgccacacaaagcaacttggggtgtaaggataaggcaaaagctccaatcccatttttcagttctcctaggatgcacccctcagggagcctggccagagttccgaggctcgagagcgtcagctgtntgctttattttccatcaaagccctctgagaagtgagacctcagcaattccgggagccacatagagacagacttggcaagggaccccctggttctgagccagtagctgccatctggaaattcctcttttagcctctccttagaggtgaatgtgaatgaagcctcccaggcaccccgctgaatttctgaggccttgcttaaaagctcagaagtgggttagggcatttggaaaatctgggttcacatcataaagaacttggatttggaaatgttttctaatangaaacaagttgctaagtgtaaccgtattataccttgatggtgggtcatttcccagtcctatttcccagttctattattttaagaacctagtcagttccttaagattataactggccctaaattaaaataatgcctctcgatgtcagattttacctgtttgctgctganaacatctctgcctaatttaccaaagccagaccttcagttcaacatgcttc

SEQ ID NO: 84110 - DNA, 2367 bp, Homo Sapiens
gggggccgggaaaacttcctcaaacccccttggacacaggcataccctttcccccggtcttctctacatcctcagcaggagtgaagagcaaggccagcctacccaactttcttgaccacatcattgcctcagtggtagaaaataagaaaacctcagatgcttcaaagcgggcctgcaacttgactgatacccagaaggaagtgaaggagatggtgatggggttaaatgtgctagatccccatacttctcactcctggctttgtgatgggaggcttctgtgtctccatgaccccagcaacaaaaacaattggaagatcttccgggagtgttggaagcaaggtcagccagtgctggtttcgggggtacataaaaagctcaagtctgagctctggaagccagaagcctttagccaggaatttggagaccaggatgtagacttggtgaactgcaggaactgtgctataatttccgatgtgaaagttcgggatttctgggatggtttcgagatcatatgcaaacgactacggtcagaagatgggcagccaatggtgctcaaactcaaggactggcctccctggggaagattttcgagacatgatgccaaccaggtttgaagatctgatggagaaccttcctctgccagaatataccaaacgagatggcaggctcaatctggcctctaggctacctagctacttttgtaaggcctgatctgggccccaagatgtacaacgcctatgggttgataacagcagaagatagaagagttggtacaacaaatcttcacttagatgtgtctgatgctgttaatgtgatggtgtatgttgggattcccatcggggagggtgctcatgatgaagaggtactcaagacaattgacgagggagatgccgatgaggtgacgaagcagaggattcatgatggaaaagagaagccaggtgctttatggcacatctatgcagccaaggatgcagagaagatccgggagctgctccgaaaggttggagaagaacaaggccaagagaacccccctgatcatgacccaattcatgaccaaagttggtacctggaccagaccctccgtaagcgactctatgaggagtatggcgtgcaaggctgggctattgtgcagttcctaggtgatgctgttttcatacctgctggagccccacaccaggttcacaatctatacagttgcataaaagtagcagaagactttgtatctccagaacatgtaaagcactgtttccgcctgactcaggaattcaggcatctctctaacactcatacaaatcatgaggataaactgcaggtgaagaacatcatttaccatgcagtgaaagatgcggttggcaccctcaaggctcatgaatccaaactggcaaggtcctaggcatggagaaactccaagctcctctgtgaagcaggtctttcactcacaacacttaacagggaacggcagggctctttgctggagcagaggcccttcacccagagccagtgtggtcagtattccaaactctccagccactctcttctacgctgcctcaacactgaaggttgacacaggaaagtcgtactgttcacacacacagtttgagactccaagccaagagtgccacatccctatcctgtggccttttggaaatccaaattgcctgaacatggcggggctttcctgcacattctcctgatttgagattcacgggcacacctttcttttcttttcctcttgtgcctagttaagtgggaatgtgtttggagataggggaaatcacataactggtacaagtatggggtaattgcttaaacatgcctggtggaagtctgatagcgtctctgcacgtgacctctgacaaagcccatcccaggagacggggtgaagctattccccacactctcctgtgaacactggagtcttgcaagacccagggagaacccactgcttttcccaggaggctccaggattaggaaatgtgtgtatttagtgaaaaataggtttgtagtgaaatagttactatttcatgaaagtagatatttttagaatttttgaaataccacagttgttttcctggattataaggaaaggcacattacatttagtcttcctttcgatataaaactctttgaagaaatatgatttttagaaatcagctacccattatagcacaaaatcagccaaagcagaatttttaaaaattggcttttttaggattctttttctccccctcccatcttagtcttaccttgagggaacagtcatatgagaaggaactttgtcacatctaagctgtggtgtgttccccatgtgtgtgtacaacactggtgactccaggagccattttcacctattaccagtgttccctg

SEQ ID NO: 84111 - DNA, 460 bp, Homo Sapiens
tttcgttttctaagttctttattgcccaagcatataaggggagcacagcacaaatggctgccatggaaagtcgtgcttccccagcataagaacagagccatctttgagccatgggaagcctcatttaatgagacctttttccccccttttaaatctgatatgttatcgcacttagggttttgttttattttggcttttaaggttgagagtgggctgaacgccttcataatgggggcggaggcgggagtgagaggagaagggagagagctgttctttttctaatgactacacctgaaaagtatcaagagacatctttgccaagagactgtagcagccagctgccccccgtggagcaaggtttaaagacaaaattaaatggcacctctgtttaagatctgcttgtgtaaacaagactcgtttggggaaaacgacccgggaggagagcatctgtgatcaaaat

SEQ ID NO: 84112 - DNA, 407 bp, Homo Sapiens
gagaggtcataagcagtggttttggccataccgtattataccatatacatcagtaagagctcatcttggaacctgttttgcagtttcaaaaattaaagacctacatcacacggttgatgtgaagaaagctttatttttcaaatgagtatttaatgaaagtatacataaccaatgttgggtatacagatgcttctcaacttatgatgggtttaggtccagataagcccactgtgagttgaaaataccaaaagtcaaacatcatagcttagcctaccttaaaagggctccgaacactacattagcctacagttgggcaaaatcgtctaatacaaagcctattttataataaagtatgttgaatatctcatgtaatttttgaagattacattgaaagtgaaaaacagaaa

SEQ ID NO: 84113 - DNA, 491 bp, Homo Sapiens
  misc_feature (285)..(285): n is a, c, g, or t
  misc_feature (318)..(318): n is a, c, g, or t
  misc_feature (340)..(340): n is a, c, g, or t
  misc_feature (442)..(442): n is a, c, g, or t
gaagcaaaaagccatcaaaaatcaaaagcctttttaagaagaaatctaagtgaactggctgacttgatggaatcatgttcaagtggcatctgtaaactattatcccccaccctccactccccaccttttttttggtttaattttaggaatgtaactccattggggctttccaggcccggatgccatagtggaacatcccaggaagggcaactgtctactggtctgcttaatttaagtgactatatataatcaattcatcaagccaggttattactgaaaaatcanttgaaatgagacaggtttacagtcaatttctgnctaatttaatttctgctttggntccccaagtgaatgtatatgcaacatttttggttggaaaagccacgatgggacttacaaagcctttaatgggactccgtaagcccagcaatggggctttggnaaaaaatttcctgggtttaaccgggggcatccttccctaaccttttcca

SEQ ID NO: 84114 - DNA, 819 bp, Homo Sapiens
  misc_feature (610)..(622): n is a, c, g, or t
acatcagtgaatctggtaaatttatcaatgggtgatccattcatcttcaataaggccttgaaagccgtggaaggatgtaaaatatggtctctagacaataatccttgagtgggtgaaatgttgcaaaaaagaaatgctcctgaatgcgttgccaattcttcttggcattccctgctccgtgcatgctttccacttgatggaggctggattcaatcacaggagtcagggcatcaaattcttcaacacttaacactttacacacagtccagagtttcttaagagcaactaaagcatacagtcgaacactaaaattgtgattgaaacaccactgcagcacaactataagggcttgcttcagaattagtttctgaaaagaaaggcaaaaaattcctcaaaacacagacatggaccattttactctcacttgtatgacacaaaaaaagtacacgaatgatacaactgctcctagtaaaacttcttccactggctttgctaccagagcctctcattcttccctcctggtcaaatgcggtgcacaggcatttgcaatttactcaaggaaaaacacattctcccagctctagttttcattaatgctgcagtacatttnnnnnnnnnnnnnatactctagtacctgagttaacttgaaaaaagtatgttttatgctaaccattatacaaccaaaatgtttttcaaatggagcctccatctcctattatcttaatttgtgctgagaaagtcagaaatagtcttcaagagtcccacttctgatggcttgaaaatgctcctagagcaagataccacacaaagtgctgtcct

SEQ ID NO: 84115 - DNA, 598 bp, Homo Sapiens
cctctaaatatatggggttaattcatagaaacaactggtaatttaaattacatattcatagtcgtggcctacgtggcatgagcatgtttttatggcttctaaccgggatggaaatctatgactttttataacagtcatggagtctgttccaaagggaactctggtgggtaagtattttggcatgatggtactcaagggtatcaaggtttaacaattggacttttttccattgggaaagcatatgtgattaactagcatgggatggcttctggacctggctggtcaggtggtaggtctttttcttctaatataataaccaggggattaatggaaaatcaaggttccatcctcagacaagaggtaaaggttcacacgattcttcccatggtctggtgccagaaaagaaacctattcaggatataagttaagctaatttagtaatcctagaatggtcctctgagagatttagatggatggggccacttcacagtagcagccaactcacgggagcacctggggcaacgctagtgggactttttggtagtgagtgtgttgatcatagaaaatggtagatataagggaataaaccttgaggata

SEQ ID NO: 84116 - DNA, 300 bp, Homo Sapiens
  misc_feature (42)..(42): n is a, c, g, or t
cttctaggaaaggtggagtcggtagtgagaagccggagtgangaagacccctgagcggatggattcattcattttctgaatttcctatgtgaggacagtattagagcccagtgaggctttgagaggccccaaagatgagcgccaacagcagcagagtgggccagcttctcttgcagggttcagcgtgcattaggtggaagcaggatgtggaaggggctgtctaccacctagccaactgcctcttactcctgggcttcatggggggcagtggggtgtatggatgcttctaatctttttggc

SEQ ID NO: 84117 - DNA, 750 bp, Homo Sapiens
  misc_feature (287)..(357): n is a, c, g, or t
  misc_feature (531)..(540): n is a, c, g, or t
ttctaacattttactgactaaaatctctgctaattatgtaatctactttgtggctttaaaatattggatactttgattttaagactactttaaatgaaaagaacctaatggaataccataaagccagagtttttccacacccaattacagtagaagagcacccctatatccaggcaaaagcaaaaggccccactcttcagtcactcatattgcttctccagagagcactgtggagtcacctctcactgatatactaacatgtggcatctttgtggcttcataggcannnnnnnnnnnnnnnnnnnnnnnnnnnnnnnnnnnnnnnnnnnnnnnnnnnnnnnnnnnnnnnnnnnnnnnaaacatggtgtggtgcttactttaacaagcttacatttatcccctgtaattgggttggtcatgctttcttttcaattcctactgatttgttccaagaagcttcttggaataaaacagaagccagaataaatgcatttgtattcccatccctaattctacttggtttccagaagnnnnnnnnnntcagaataagactatctcaaagtattaaagaggatctaaaccctacatcaatctaaagcatttagacaaatgcatttttagacaaaagcatttagacaaatttcatttgtctacaacatggaaaaaacaagttaagaagtagagcacctctcagcccttactacattctaaaacaaactagccacgtagtgggtcgggatcctctaggac

SEQ ID NO: 84118 - DNA, 539 bp, Homo Sapiens
  misc_feature (37)..(37): n is a, c, g, or t
  misc_feature (43)..(43): n is a, c, g, or t
ctactatgggatttccaccatggtattataatcttcnccatgnggccttctctagtagaatgtgagctctttgaggccaaggtctattaaattggttggaaaaattcatggttatatcctcaaagcctagcacatagtaggtactgaatgaatgaatgaacaaggggtgccaggagactgctactcccagtccttcccagaaactgcctagggctttgagtcattttatgaagctaggtcttaatgcggtaggcaacctcccagcgtcacttatgaacgctgacagaagagtgttttcatgtctataatcaagaattccagatacattccttttactgaaccttgaattgatcctaagattggtagtaaaggtattatgttacctcctaacagcactacaaagtacctttttttatcagaaaaaaattttaccattaggactcaatttgaagtactaatgcttctcaagttctccactatgagagttaccctgtattagaccgttacctataagaattaaggggtaaagcactaaacag

SEQ ID NO: 84119 - DNA, 1419 bp, Homo Sapiens
  misc_feature (787)..(787): n is a, c, g, or t
  misc_feature (1266)..(1266): n is a, c, g, or t
  misc_feature (1343)..(1343): n is a, c, g, or t
  misc_feature (1405)..(1405): n is a, c, g, or t
tctcgcgcaagagtgacacacaggtgttcaaagacgcttctggggagtgagggaagcggtttacgagtgacttggctggagcctcaggggcgggcactggcacggaacacaccctgaggccagccctggctacccaggcggagctgcctcttctcccgcgggttggtggacccgctcagtacggagttggggaagctctttcacttcggaggattgctcaacaaccatgctgggcatctggaccctcctacctctggttcttacgtctgttgctagattatcgtccaaaagtgttaatgcccaagtgactgacatcaactccaagggattggaattgaggaagactgttactacagttgagactcagaacttggaaggcctgcatcatgatggccaattctgccataagccctgtcctccaggtgaaaggaaagctagggactgcacagtcaatggggatgaaccagactgcgtgccctgccaagaagggaaggagtacacagacaaagcccatttttcttccaaatgcagaagatgtagattgtgtgatgaaggacatggcttagaagtggaaataaactgcacccggacccagaataccaagtgcagatgtaaaccaaactttttttgtaactctactgtatgtgaacactgtgacccttgcaccaaatgtgaacatggaatcatcaaggaatgcacactcaccagcaacaccaagtgcaaaagaggaaaggatccagatctaacttggggtggctttgtcttcttctttgccaattccactaantgttgggtgaagagaaaggaagtacagaaaacatgcagaaagcacagaaaggaaaaccaaggttctcatgaatctccaaacttaaatcctgaaacagtggcaataaatttatctgatgttgacttgagtaaatatatcaccactattgctggagtcatgacactaagtcaagttaaaggctttgttccgaaagaatggtgtcaatgaagccaaaatagatgagatcaagaatgacaatgtccaagacacagcagaacagaaagttcaactgcttccgtaattggcatcaacttcatggaaagaaagaagcgtatgacacattgattaaagatctcaaaaaagccaatctttgtactcttgcagagaaaattcagactatcatcctcaaggacattactagtgactccagaaaattccaaacttccagaaatggaaatcccaagcttgggtcctagagtggaaaaaccaccaaattcagntccggagtatatgccattagtggttttgaaaagattccttaatagctggctggtaaatactgcttgggttttttacngggggacattttatcatttattagcgcctgaagagcccacatatttggtggatttttaatancccatgatcctgcc

SEQ ID NO: 84120 - DNA, 858 bp, Homo Sapiens
tccacacccctactggcttccaaactttatggatgttttcacatggtctatgccttttgagagggaaaaagtcacagagatgctggtaaatgtgctcaacatatgctctgatgacgaactgatttctgatgatgaagcagaaggaagcactacagttcgtaaggagatcatcaggaataagatcagagccattgggaagatggcacgggtctttccaattcttcggcaagaaagtgagagtgtgctgactctcaagggcctgactcccacaggcacactccctctggcgtcctctcaggaggcaagcagactatcgagacagccatcagagggttctcgcttcagcacaagatccggagttttgaagaagcgcgaggtctggaccgaattaatgagcgaatgccaccccgaaaggatagcatacacgctggtgggccaatgaaatctgtaacctcagcacactcacatgctgcgcacaggagcgaccaagggaagaaagcccattcatgacttagagtcctgccgtggctcaggtggatctaaaactcaagaacaaattctatttatttattattggaaaatgaaaagcaactcaaaacaacttcaacgtggaggtgcatttataattcagtctgcatttattctgtaaaaaggtggctgttttataaattcttttaatttatgttcaatatatataaaaagtgcatctgttttgtttttcccttttttctccataattttaagaaatgaatctgattgttgtcaacacatttgtgaagtcttgtgctataaaggggaacttcccctaataaaagggccttggaaacctcaaacctgggtttctgacttgaaaaaaaa

SEQ ID NO: 84121 - DNA, 828 bp, Homo Sapiens
ctcccatactcaggacttgttgcgcacgagcttgaaacttcttctggccagtcttgggggcttcttcatccgagttttcccctgttggaacgagcacgagcagcttttcttctccttttgagtccggccgtgtcgttgtgcctttgcctggaagagctgtcatagtcacttgactcaagctggtttctccttgagatcagcctcaaaacgggccaggtctgtgtccagccgccgaatgtgtttgtccaccatctcataggtctgcatggcaagctgcaccttgtcgtcaccaaattccttgcacttgccataggcttcctggatctgtttgagaagggccaatttttcctcggagctcaggctgcgggcactactcatatactcagtggccaacttgtcaatttcagccttcaggtcattcggcaggcagttctcagggaactatgtccagggtttttgatgatgttcaccttttcatgtgtaaactcagagtaacttaagacacagcttcatgtatctcaaaaccagtctgttacatccttgaacatggctacatagaatgaagacaagactacagatccttcagtgggtatgggaatagctccaacagacatctttgaagaaaccaagtgaatgccccaatgcagccaaatttgctcaatgttccaggctggagatggtatctaatgcttcctctgttctttggtctaggtccctcatgagctgaaagtttctctgtaattcaaagggaaggttttcaatactgtccagataatgttccaaatacatccccgcagccatctcgaagcaaacaaagcaacttccgat

SEQ ID NO: 84122 - DNA, 919 bp, Homo Sapiens
cggaattggaaaagggagagaagggatgacagcactgtgccatccactcctccctgacccctggccccagcacaggcattcctctgcccactagcccaagtcaggggatgtgaaagaaactgtgttggaatccaaggcccttatctatttcttcttccgttcttgggagcagcgtgggcaaaaccatttcccccgaggcttggttgtcagccccacacaggcaaaatggaaccactcaatggaacaatcagggttgtcacagccaatcatctctccataggagacctggtgacaaaggcaataggtgggttcgttgggatccacaggcatatccaacacatcagaggggtggacactgccaaaggtcactgagggcatcccatactcaggacttgtgcgcacgagctttaacttcttctgggcagtcttgggggcttcttcatccgagtttttccctttggaacgagcacgagcagctttcttctccttttgagtccggctctttttgcctttgctggaagagctgtcatagtcacttgactcaatctgtttctccttgagatcagcctcaaaacgggccaggtctgtgtccagccgccgaatgtgtttgtccaccatctcataggtctgcatggcaagctgcaccttgtcgtcaccaaattccttgcacttgccataggcttcctggatctgtttgagaagggccaatttttcctcggagctcaggctgcgggcactactcatatactcagtggccaacttgtcaatttcagccttcaggtcctctgttctttggtctaggtccctcatgagctgaaagtttctctgtaattcaaagggaaggttttcaatactgtccagataatgttccaaatacatccccgcagccatctcgaagcaaaacaaagcaacttccgat

SEQ ID NO: 84123 - DNA, 1112 bp, Homo Sapiens
  misc_feature (989)..(1009): n is a, c, g, or t
  misc_feature (1039)..(1039): n is a, c, g, or t
ctggaccggtccggaattcccgggatatcgtcgaccacgcgtccgcttgtctcggcattccgggctcgaaggctgtgcggtctgccaggagctgcggcccgtccggcccgggctggcatgggttggaattggagcctatcccccaacccgaaggctaacagcatcatgtggttactaactgttcctcattcaccggttgatgcctcccagaaaaaaacgccgccagccttcccagaaagccccgctgctgttccaccaacaaccactggagggccccaaacacagctgtgcatctacacagcttcccatcactcacactcgacaggtgcccagcaagcccattgaccacagcaccatcacttcctgggtatcacctgattttgatacagcagcaggaagcttgttcccagcctaccagaaacaccaaaaccgggcgagacactcaagtcgaaaacctaccacctccaagtttccacatctaacttttgagagtccgcaatcttccagttcagagacattggggatccccttaatccgagagtgccccagtgaatcagaaaaggatgtttccagaagacccttagttccagtgctcagtccccaaagctgtgggaacatgtcagtgcaggcacttcagagcttaccttatgtgttcattccacctgatatccagaccccagagtcatcatctgtgaaggaagaactcattccccaagatcagaaggaaaacagccttctaagctgcactcttcacactggcactcctaatagcccagagcctggacctgttctggttaaagacacccccgaggacaagtatggaataaaggtcacatggaggagacgacagcacctgcttgcttacctcagggagagaggggaagctgagcagaagccaattcccttggtgaaaagctgactgccatcagtaatctcaatagaaaagagatatgttttctggagtcataaaggaattcaattccctaggnnnnnnnnnnnnnnnnnnnnngagatgtaataattgctctgttgccccagnctgggagtggcaagtgggtatgatcctcacctttactggcaaccacccactttccctgggggttcaagcggat

SEQ ID NO: 84124 - DNA, 402 bp, Homo Sapiens
gcaggttgggtttttatgatagtgcaaggaatgactcatgcctctgagcttctaaactgaagctgctgtaactaaaggaatctgaaaagaacaaccctgaagcagaggcctttattgtcttggttgccagtagtaccttgttttgccatgtagcagacaacacacaaaataatgcagttgtggtgtgccatgctatgtgcacagccccttggattactttgttttaaaaagcatcagagttgggggtactttagggaaacctttgcttaccttgttttgccagtgataagagcagtgggttggagggcacttggccagttttctgttcagcttttcagtgaatgtacccctttaaggttcagacttaaacttccttaaaaagtggcgttgttcatagaaaaa

SEQ ID NO: 84125 - DNA, 637 bp, Homo Sapiens
  misc_feature (23)..(23): n is a, c, g, or t
  misc_feature (61)..(61): n is a, c, g, or t
  misc_feature (93)..(93): n is a, c, g, or t
  misc_feature (116)..(116): n is a, c, g, or t
agaaaggaagggagaagtcaagntctttctgcttccaggggaacgtaagatgggccccagnagggacaagctatgagggaaccagcgcagtanagagatgatgccgggcccacccnaaagccatctcagtgcctggtccagacttaaactccacgttctcagggctcccttttcgaaacttcacacaagtagtatgtgccgacatctgctggggtgatgctacttgatgcggatggaaaagtccatgttgtttctctttgtgaggtctgaaactgttgttaccctggggaagtggccttctttttgattgtagattaattctcggcctggtccaactcctctgaaccacaggacgggtcccacgggaagcagggagatcacagtgcagtgcagagtagctgtctatccaaagcgtgaccaacaggagcttctcaggctgaatcatctgtagctcctcctcacctgccacttctgtaagtcccagcagtagagtcagaagcaggaaaggaccaggaggatggggccaggaggctgggacaggcattttggagacctcagaagcctgctctgttcaaacgtctgttctccccggccgtaatggccgaattcccgggcatatgtccggtaccgtcgactg

SEQ ID NO: 84126 - DNA, 1153 bp, Homo Sapiens
aggatccccaccccgcgttctcagcggcggtatttgagccctgctccttcgggtgggctgagaccttcaggtcatggcttttgctgaccgctggctgcccgtcatgctccacctggcaggtgagcttcacatcatccctgtgggcagatacattcaccaggagccagctcatccagttgtaggtaccatccttgttctctgtaacggttgaggccgtttctgtccgggacacgtttccattctccaaccaggtcagctgtagtctctgggggtagaacttcctcacctggcaggtgacattcacctggttctctgccctcacgggctgttgagtaacctccaaggtgggtggaactcggatggtctcagacaagttggcagtcccacgaagagggtccccctgcaaggtgacgtgggccacctcgcagatgacttgagagtgaacgtcctcgcgggtcagcaccaccttggctgtgctgtggatgctgtaggacacgctctctcctacggggtccacgttggtctggaagtctgagagctcattcccatttttgaaccatttcagggtgatgtctctgggtgagaagccgtgggactcgcaggtgaagctcactgtgtgctgaggtgtggccctcgccgcagggcccgataccacgggggcagagggtttggcacgcacagacagctcagtgcctgctccagacttaaactccacgtcatcggggctccctttccggaacttcacacagtagtaggtgccggcatctgctggggtgatgttacctgatgcggatggaaaagtccatgttgtttctctttgtgaggtctgaaacagttgttacccgggggaagtggccttctttttgattgtagattaattcccggcctggtccagctcctctgaaccactggatgggccccacagggatcagggaggtcacagtgcagtgcagagtggccgactctccagctgcaactgatacggacttgtcaggctgaatcacctgcagctcctcctcgccagctacccctgtgagtccccccagcagtagcgtcatcagcaggaaaggactaggaaggtggggccaggaggctggcacgggcattctggagaccttaggagcctgctctgtccaaacgtctgtgctgggaa

SEQ ID NO: 84127 - DNA, 664 bp, Homo Sapiens
  misc_feature (345)..(345): n is a, c, g, or t
  misc_feature (514)..(514): n is a, c, g, or t
  misc_feature (520)..(520): n is a, c, g, or t
  misc_feature (563)..(563): n is a, c, g, or t
  misc_feature (615)..(615): n is a, c, g, or t
  misc_feature (626)..(626): n is a, c, g, or t
  misc_feature (649)..(649): n is a, c, g, or t
gacaaaaacaaaaaccctaccagaaaccagaagtagagagatttaccatataacttatggactttgaaatgtctgtccttttaaggcagcagggaggcctgggtgcgacatgcttggcttggccttcacggtcctggagggaggtgaggctggccttggaaggcgtgccctggagaggtcttgggtgaaaacttgaccttgaagaaaccaatcacaaaagcggcgttgggtcagggctaggcttagaggtgaagcataaacatggaaccatctcaggaagctccgcaacgcctcttccgaggtcctcacttccaggaagcctgtccttgcaagattgcaatcagncgttcctgctttttcattggtcattaaattctgtaagaaacccaattgtcatttagctcccaagtgtaaattttgggtcaaggagacaagaataataatgggaatctcggagttccgacaccatagtgacgtttcagcgtccctctgaattgtggctacatcagcgaanaagtcngcgcttgaattggaatttgaaggttaattttaaccatggaatnattttattagaaggggaaaatgtatgtgaaaagtcccaattgggtaattccncccaaagttgngtccccttgggaatgggtttgantttaataattaaacc

SEQ ID NO: 84128 - DNA, 454 bp, Homo Sapiens
  misc_feature (22)..(22): n is a, c, g, or t
  misc_feature (24)..(24): n is a, c, g, or t
  misc_feature (203)..(204): n is a, c, g, or t
  misc_feature (208)..(212): n is a, c, g, or t
  misc_feature (215)..(215): n is a, c, g, or t
  misc_feature (217)..(217): n is a, c, g, or t
  misc_feature (219)..(219): n is a, c, g, or t
  misc_feature (349)..(349): n is a, c, g, or t
  misc_feature (366)..(366): n is a, c, g, or t
  misc_feature (423)..(423): n is a, c, g, or t
  misc_feature (444)..(444): n is a, c, g, or t
cgtggagtacagttccgggagnanaggaccttcctctgctatgtggttgaagcacagggcaaggggggccaagtgcaggcatctcggggatacctagaggatgagcatgcggctgcccatgcagaggaagctttcttcaacaccatcctgccagccttcgacccagccctgcggtacaatgtcacctggtatgtgtcctccanncccnnnnnaancntntgctgaccgcattatcaaaacccttagcaagaccaagaacctgcgtctgctcattctggtgggtcgactcttcatgtgggaggagccggagatccaggctgctctgaagaagctgaaggaggcttggctntaaacttgcgcatcatngaagccccaggactttcgaatattgtcttgggaagaattttgtggagcaaggaagangggtgaatccaaggccttttnagccctgggg

SEQ ID NO: 84129 - DNA, 2277 bp, Homo Sapiens
  misc_feature (2040)..(2040): n is a, c, g, or t
  misc_feature (2164)..(2165): n is a, c, g, or t
  misc_feature (2244)..(2244): n is a, c, g, or t
ggcttttggagggctctgtgggctggcactaagcctcctaaaccagcgtacaaatgagttagcgagttcagcgagagtcaggccaccacctgcctttctgtttggctgtcactgtgggcaacaccatcctccaagcagctgagcatgggctgagtgacgtggggagagaggccgttctctgggctccgtggggctggagccagctcagcatgtggtgcctgtggcaaaaatgctgcagtggaccctgcgtgtcctgggcatgggtggaatcagagacttgctgtccaagtcagaatctcagcttttctcctttctcctctaccctcctctcaggtacctgtgtgacaaggtcgtccctgggaacagggttaccatcatgggcatctactccatcaagaagtttggcctgactaccagcaggggccgtgaccagggtgggccgttgggcatccgaagctcctacatccgtgtcctgggcatccaggtggacacagatggctctggccgcagctttgctggggccgtgagcccccaggaggaggaggagttccgtcgcctggctgccctcccaaatgtctatgaggtcatctccaagagcatcgccccctccatctttgggggcacagacatgaagaaggccattgcctgcctgctctttgggggctcccgaaagaggctccctgatggacttactcgccgaggagacatcaacctgctgatgctaggggaccctgggacagccaagtcccagcttctgaagtttgtggagaagtgttctcccattggggtatacacgtctgggaaaggcagcagcgcagctggactgacagcctcggtgatgagggacccttcgtcccggaatttcatcatggagggcggagccatggtcctggccgatggtggggtcgtctgtattgacgagtttgacaagatgcgagaagatgaccgtgtggcaatccacgaagccatggagcagcagaccatctctatcgccaaggctgggatcaccaccaccctgaactcccgctgctccgtcctggctgctgccaactcagtgttcggcccgctgggatgagacgaagggggaggacaacattgacttcatgcccaccatcttgtcgcgcttcgacatgatcttcatcgtcaaggatgagcacaatgaggagagggatgtgatgctggccaagcatgtcatcactctgcacgtgagcgcacctgacacagacacaggctgtggagggcgagattgacctggccaagctgaagaagtttattgcctactgccgagtgaagtgtggcccccggctgtcagcagaggctgcagagaaactgaagaaccgctacatcatcatgcggagcggggcccgtcagcacgagagggacagtgaccgccgctccagcatccccatcactgtgcggcagctggaggccattgtgcgcatcgcggaagccctcagcaagatgaagctgcagcccttcgccacagaggcagatgtggaggaggccctgcggctcttccaagtgtccacgttggatgctgccttgtccggtaccctgtcaggggtggagggcttcaccagccaggaggaccaggagatgctgagccgcatcgagaagcagctcaagcgccgctttgccattggctcccaggtgtctgagcacagcatcatcaaggacttcaccaagcagaaatacccggagcacgccatccacaaggtgctgcagctcatgctgcggcgcggcgagatccagcatcgcatgcagcgcaaggttctctaccgcctcaagtgagtcgcgccgcctcactggactcatggactcgcccacgcctcgcccctcctgccgctgcctgccattgacaatgttgctgggacctctgcctccccactgcagccctcgaacttcccaggcaccctcctttctgccccagaggaaggagctgtagtgtcctgctgcctctgggcgcccgcctctagcgcggttctgggaagtgtgcttttggcatccgttaataataaagccacggtgtgttcagggttncccccccactaatcaaacctcatccacccacacattccgatccccagaataacacaacacactgaacataatctccctctatactcaagacgccgcgccccgtgcttatatcttaaccacacannggttttttgttgggggccttcttgggcctttaagaaatttttctaaaaacccttctttttggggggcggcgggcccccnagggggaaaggagacaaggggcacaaaacgtgt

SEQ ID NO: 84130 - DNA, 305 bp, Homo Sapiens
acggcaccccggcaactgcttcggatggccagtctaccgccatctcccttctcacgggaattttcagggtaaactggccatccgaaaatagcaacaacccagactggctcctcactcccttttccatcactaaaaatcacagagcagtcagagggacccagtaagaccaaaggaggggaggacagagcatgaaaaccaaaatccatgcaaatgaaatgtaattggcacgaccctcacccccaaatcttacatctcaattcccatcctaaaaagcactcatactttatgcatcccaagcattgccg

SEQ ID NO: 84131 - DNA, 1442 bp, Homo Sapiens
  misc_feature (37)..(37): n is a, c, g, or t
  misc_feature (1278)..(1278): n is a, c, g, or t
  misc_feature (1311)..(1311): n is a, c, g, or t
  misc_feature (1373)..(1373): n is a, c, g, or t
  misc_feature (1412)..(1412): n is a, c, g, or t
  misc_feature (1419)..(1419): n is a, c, g, or t
ggggggatggcggacgcggaaccccactacacccccncacgcccgctggggccggaccgggattcttcggaatcgtcgaccccgcgtccgtcttcccatccgcggacgcgtgggcgtgaatgcgcagtgggtgcgtcggccacgaccttttggccaggttagggagggggcgacgctgagatgggggcggcggcggcggaagcggatcgcactctctttgtgggcaaccttgaaacgaaagtgaccgaggagctccttttcgagcttttccaccaggctgggccagtaataaaggtgaaaattccaaaagataaggatggtaaaccaaagcagtttgcgtttgtgaatttcaaacatgaagtgtctgttccttatgcaatgaatctacttaatggaatcaaactttatggaaggcctatcaaaattcaatttagatcaggaagtagtcatgccccacaagatgtcagtttgtcatatccccaacatcatgttggaaattcaagccctacctccacatctcctagcaggtacgaaaggactatggataacatgacttcatcagcacagataattcagagatctttctcttctccagaaaattttcagagacaagcagtgatgaacagtgctttgagacaaatgtcatatggtggaaaatttggttcttcacctctggatcaatcaggattttcaccatcagttcaatcacacagtcatagtttcaatcagtcttcaagctcccagtggcgccaaggtacaccatcatcacagcgtaaagtcagaatgaattcttatccctacctagcagatagacattatagccgggaacagcgttacactgatcatgggtctgaccatcattacagaggaaagagagatgatttcttctatgaagacaggaatcatgatgactggagccatgactatgataacagaagagacagtagtagagatggaaaatggcgctcatctcgacactaacacatgttaaaaggacattgtttttatagggtcattttaagccctttgactaagttgatatgggaaatattttgttgaaaaactgtacagagcagctttacaagttgtcacatttctttataaattttttttaaagctacagtttaatacaaaatgaattgcggttttattacattaataacctttcacctcagggttttatgaaagaggaaagggttttatgcaaaaagaaagtgctacaattccctaatcattttagacactttaaggagggggtgaaagttgtatgataaagcngatattttaattatttggttatccttttggtantgccagaaatttcctgctagtgaatccagaaaacctccaggttgacagtctaaatgggcacnggtattttagttaatccaaaatgaaccttccagtgatcnccttacnaaccttccatttgggaagccaat

SEQ ID NO: 84132 - DNA, 1095 bp, Homo Sapiens
  misc_feature (821)..(871): n is a, c, g, or t
  misc_feature (913)..(962): n is a, c, g, or t
tgggttatcaaagggccaaaattcaaaccaaatccgccggtttccagtgttcccagtcatccgagtgcttcgtggaatgtatagttaacgtgcacccaagttaattgagggacctgccctgcgaatagtttgcccaaagagttgacctttgaaaggggagtccattttcagaatagggtgtcttaaaaaagaatagcacttgttagaccaatctttttggttttcaacagaattaagcacccttaacggggtgtaaaaatgctcctttgactcccaaacagtgtaaaccattaagtataattcgttcttaaataacctctccccatcctgagtatttcaaacaaagaccctctgaagaacacaacccttccctcaccagaaaaatctagcatataagcaaaaggatggtctataaaagtggaaaatggaaataaatcgtaaagtgatttctaagtaaggaggtggagtaaagcttaaacactgtcagtacccctagtgaagacctggacctgggtagttagtccttagagatcaaggttagctcactacaaaagcactctacatgtcctcagcatcttcaaaaataagtggctcaaaattccttaagcacatgtagccatagttaaagcactaaacttgttatttcaggaaatactatgctctggctccaagtcttacatcctttttgaccctttagccacatgtccttcacgagaaattttaagctattgttaatactcccatatatcacacttactctacctttatttgggttttacatacaagcaatctgcactttgattttaaaaaagttctaaaannnnnnnnnnnnnnnnnnnnnnnnnnnnnnnnnnnnnnnnnnnnnnnnnnntattcgcaggtgcaatcatcatggcacattacagcctcgagnnnnnnnnnnnnnnnnnnnnnnnnnnnnnnnnnnnnnnnnnnnnnnnnnnaatagtatatacagtgccactgtaccctctatcctacatttttaaaagctcaccattaaatagtactaattattatagaaaatagtcacagacattataaacacactactgtttcatcttacctctttgtctg

SEQ ID NO: 84133 - DNA, 478 bp, Homo Sapiens
  misc_feature (293)..(344): n is a, c, g, or t
  misc_feature (379)..(379): n is a, c, g, or t
gagaatttcaggcccggagtgtactactcccaaagcttccacttccgcgaacagtttcacaaagtcaggatccactcctctgcctctttccggtggaacctcaagttccgataactcatggacaatggatgcctccattgatgaggttgtacgtaaagcaaaactgggaacaccttcaaatatgccccccaactttccttatatctcttctcccgtcagtgtctcctcccactcccgaacctctccacaaggtgtatgaggagaaaaccaagctgccttcctccgtggaggtnnnnnnnnnnnnnnnnnnnnnnnnnnnnnnnnnnnnnnnnnnnnnnnnnnnncagagagatagggagagggaaaaagacaagaacanggacaaaagtaaggagaaggataaagtgaaagagaaagagaaagacaaggaaactggcagggaaacaaagtatccctggaaggaatttcttaaagagga

SEQ ID NO: 84134 - DNA, 1043 bp, Homo Sapiens
  misc_feature (17)..(17): n is a, c, g, or t
  misc_feature (60)..(60): n is a, c, g, or t
  misc_feature (77)..(77): n is a, c, g, or t
  misc_feature (211)..(211): n is a, c, g, or t
aggaggaggattatccnccttggaaatgcaacatcaatgaccgggaagttccaattaatnaagcagctgacagatcnccttgtgaacacaaccaagggaaatccacataagaggagcctccgtaaagtccttggtcttctaccaggaactgtcggaaacccatttctggttgttctcgctgctttacaattgtgagctccattgaatatgncctcttttgtgggataatacccattatcatttctgagttgttgagagtatgggtttcccaactttcagggcagcaatgtcatatctgtgttgatatgtgcaaaagatggcacattaaatattccttggatcagttctggtgggctgcttactcccaaccacaggaacatgtgtagaccattagccagtaagaatattccttcttctgaaagacgggactcagagcaacgaacggcagcaggtaacattgtactcttgacatctaacgtgtgtatgggcagaagttgtgggtagaagaaaagctgagagtcagccacacccatggtcatgaccagctgtctctggtatgctcgttcatcagttgagatctctggtctgctgagtagtacacagtttttcaacaagcaattcatgtacactggcaatactttcatggaatctggtagaataagctggcttgctgcagaaggacttgcacaattcttccggtaacatgccaacatatgggcagtctgattaactagaatttcccggatgaccttcaaaggctggtggagaactgctttaaaagctgacttggcaaagaagttgataagagcatctgtcctcacagctcttataaagatcagctagctgagagctgcagtttaagccaagattgtgaatccgaagtcttctttgaccactgattgtcgtgtaaagcacagcacactggattaaggctccactgtcttcactgagtttgtcatcgtgcttgaactccacggtcactgccttgtcacaatcgatggcagccatttctacatcggtggtgttgttcatcaagattccac

SEQ ID NO: 84135 - DNA, 680 bp, Homo Sapiens
  misc_feature (125)..(174): n is a, c, g, or t
actaattagagcagtgtcttcaactctgactacaaattagaatcactcaaagagcttttggaaaaacaagcatggctccatcttccagaaatttagacttaattgttatgaggtggattccatannnnnnnnnnnnnnnnnnnnnnnnnnnnnnnnnnnnnnnnnnnnnnnnnnatttaaaacaattattaaattattaatgacttatggtggtcttgatttaaataaattatttaaaattcaaatacatgagcactttttatgtaataggcacagttctaataataaggtaattttttaataaaaatcattggataacattgatacatttttatcatttgaattatataaatttattaaaatattactcaaacttctattatagtctgctgtcacaaaagatttcctattaacttttctgaactaccctccacttgatactatggcaaaagagagatcacactcagaaacttttccttaagaaagatacatggagagagcctaagaattttaagaattcattttcaagtcacagtacatgaggtattctccatcttttatctggagtcacaagccataacctaagaactgaaattaggcattgtttttggatgcttaacagaatctcctagatcaagaccaactcccactggtatcagtgcttgctttaaacaacctaa

SEQ ID NO: 84136 - DNA, 585 bp, Homo Sapiens
  misc_feature (14)..(14): n is a, c, g, or t
ccaaaaccaaaacnccgtatggaaagaggcttctgacctaggccccccctttctagcagtgtttggcacctgataacaattgacgctgggggagggagccagcttgaccaaggtccacatgaagcagccttgagatttttcgcccacttccatttctcctcagcatcaaaggaaagtgcatggtaagaagtgaatcagacagcgagggatctatgcagttatcctgtgaatgtgtggcaaagccatcaggacgcaaacctcctgtcttgagtccagagctgtgtgctttaagatttgaccccagtaaagacagaatccttcaggctcgtcccttcccaaacctaaggggctgtccttggccactttcaacttgaagctgttgagcagtctttaggatatgtaacagcctattttttggacgatataggaaccacgacctcttaagtctcttagttctcctactttatacccatgaggtagaggcaggtgcactccagtgaaggagaagcctcaattcaggttgtactttggatgaaacatcccctcaaggcgtagaggaaggctgagagattctgcccaggctcg

SEQ ID NO: 84137 - DNA, 454 bp, Homo Sapiens
  misc_feature (348)..(348): n is a, c, g, or t
  misc_feature (412)..(412): n is a, c, g, or t
  misc_feature (425)..(425): n is a, c, g, or t
agcaaggcatctgcgaggagaatgccatcgctctgctctcggctgcggtgaagtatgatgcacaggatttagaagaattctgcttcaggttttgcataaaccatctgactgtagtaacacaaacatcaggttttgcagaaatggaccatgatctcctgaagaactttatcagcaaagcaagcagagttggagcctttaaaaattgatcccatctgcaggaaagtttttgagccttcccatttcccctgcaaaagccagagatgaatcacttctctttaattaatagtatgtatgatgagctatgtttggctgagtacttgtaactgtcagaagaaggatggtggtgangtggtctttggtctgcctaaacccagagttttatggtaagaaagccattgaatggttcctgatncaggatgtggccnaagggtccaaggggaaaaaaatttgggaa

SEQ ID NO: 84138 - DNA, 1136 bp, Homo Sapiens
  misc_feature (113)..(113): n is a, c, g, or t
  misc_feature (205)..(205): n is a, c, g, or t
tgggaatggtatgagcatgtctgaaaccaggaaagccaacctgactggctgttttgtgggcccgcaagcttgccaatcccagcttggttgaacaagtgggacaatccaactcntgctttcaatcaactttctttgctgacatctcttctgcctctctactcctcggaatacgggctgaagtccagacaggaaagtgcatgtgaanccacctcatctgcttgccagggagatgtgggaggttcttcccattactctgagatgagggggtctcgtccccacattgaaggggtgggaggttgggcatcaggaccatttcataggccttccttggctcttcactgtgttgtagcttcctcagtttgaaacgtaccccagaaagacagggataacatgtgaggatctaaggacagaaagtccagggttcatatggacagcacttagatgacccatccttggggtttctcagtccctgctctggtgcctgcatgcaggtaatgggcagagactgtacttcccaacatggcagcatccagaatggcctctaggtacaggaagtgagggtctgagggggagggagccagcccctcccgtagtctgtgctgatgccaaacccaggtgtgaagggggttacagccagtctccccagtctcccagtggctctggctattaataactcagccacttccttcttcctttcacccctgccactctgcagggtgtgggcagtcagcgggagagtggagctgcctggcaagaagggcagataccctttttctctctctgtttaggattccccccagggctggtgaggggcctggctgcctcagtgggcatcctcaatggaggactcaacactgaagtgagcctgggcatctgggggcctcttccaaggggccagggaagactcagccccccagttctggcccacacagcccgggtacacagtggcccttaggaactgtggggaggactctgggaggaagaggtagggaaggcaaatgaggactggggttttctttcttgtttaaaaatacaaaaaggaaatgacgtgttaacattagtgagtataggcaggtgtggaagagtcaaggtccactctctggagcagggcagtggcccagggtggggtcagatga

SEQ ID NO: 84139 - DNA, 584 bp, Homo Sapiens
gatcccaccagctgaggaaaaccaggtgctggcctttccttaggaacttcaggaaaaattctgtgtgttagagtgtaacttgggggtgatgcccagctgacactgtacagacagccttgcttgagctctttcctgctcattctgtggctggccattggcatcacctgttaacccctggtgtcttgaaccttgttttttcttaaccggtttcttggtttccttttttatatctccccctgtggatatttgacttcttgaactgagtgcttttcaattaactatatttcatctacacctttctttctgaaatgtgctttataagtgtgtatataatgacatcctaattaaattagtaagtgccttgtagttaacattacacaagtaaatgtagatattaaagctttaatgtaattgtcatttcccagatatgtgcatttttaacattggatgcaatgggtaatatacacgacaaggatctttgttcgcagtcagcctctttgtaaagcacttttccttatttgttcagagttaacccagatatcatcacagcaacatcaccatcaggatctaaaaccagacaagag

SEQ ID NO: 84140 - DNA, 1057 bp, Homo Sapiens
  misc_feature (97)..(132): n is a, c, g, or t
  misc_feature (395)..(395): n is a, c, g, or t
  misc_feature (524)..(544): n is a, c, g, or t
cggtatttcactgagaacgcaaattctgtcttttcttgatttcggctgttttcagtattttggaggtatacatttacttaaattcagtattactcgnnnnnnnnnnnnnnnnnnnnnnnnnnnnnnnnnnnncctaggggacaagcatgggtgtttgatttcagaaatcagtacctggcgagatttttgtctcaaaaccgactatttgaatttcaagaactgtgctgcgaagacactctgagaacatttgcaagtcaggggcattttccttgacccttgactgatgctatgcggacgacctgatacattttcttaatggacaatgttcaagccaggtacccatgcttgatctgtcttcacaccagacctcctcatattaaaaggaaaaataaganaaaaaatgtaagaaatcacatggctatttagtttcatgcacagttgcaatattttcttcaaaaataaaactctgtacaaactttggggcccgattcataagaaaaagaagtttgctattaacacgggannnnnnnnnnnnnnnnnnnnnggtctaaatttgaaattacttgcttcccaaattaaataaatttcatctcatttttttccctaaaccagcacccatctgccttttattccccaaagagttacctttcccagattagggggatggtatgtggggagcagatagcggaaatgcttagaaagataagggggaccacccacagctggtcgtgagaacagggagacagtgtgtgggggtgggacctcatctgtgtgcctggtatcctgagttttacatgtagatgcattcgcctatttgattcagaaaaataaactttcccaaaatgtgtctgaaccacaagagcatacagtggaagttgctacctctaatctaaccagagcaccttcatggtggaagacacccaccaggtcatacaatgtgaacttttgtatctctgcagtggtttcaaggacaaaatagtgtccaatgtattgggccatttttcctgctgttttatactcaattctcaaaatgaaaaaagctttaattaccttttga

SEQ ID NO: 84141 - DNA, 321 bp, Homo Sapiens
  misc_feature (18)..(18): n is a, c, g, or t
ggaataaaacaccaggtntgtttgtagatgtcttaggcaacactcagagcagatctcccttactgtcaggggatatggaacttcaaaggcccacatggcaagccaggtaacataaatgtgtgaaaaagtaaagataactaaaaaatttagaaaaataaatccagtatttgtaaagtgaataacttcatttctaattgtttaatttttaaaattctgatttttatatattgagtttaagcaaggcattcttacacgaggaagtgaagtaaattttagttcagacataaaatttcacttattaggaatatgtaacatgctaaa

SEQ ID NO: 84142 - DNA, 1060 bp, Homo Sapiens
cccaaacagatacagattcactaagggagctcacctcaaatgcaaatgagttcatgacccagagatccaacctaaacattgcttcttaaaatcaagctcaacggacacacatgatgaaacctcacaattgaacactcttacatcccatagtcacctttccataaccagttcaaaataaactactgtcttttaataggatcttttcaggaacaccataattttggtgctttttcaaggtgaaattgtgctgttatacctaagatgtttaataaacagaggaaaaccaaaagtttcaaataagccaatgtgtgatggatttggcctaaagtagataaagcaaattccactaagtcctgtaagagggttgacttgaagaaccacttcttccagtcatatatagtagatatgatgattcagcagtcataatttaggaaggcaacagtatactatacatgtcattattttcctcttaagtttgcatttatagaagaaggtggtgggggacaatttaaacttgagttctcaagttctaccttaatgaaataaaacaccattggataagtagtggagattctaatttataaaatattcaccttcatcaaatttctttcattatcaacttttcacggatacttctaaattactattctttatgcacttaaatcttaagagaaatcttgactaacctagaatatttatctttacataattatcatttcaacaggtttaatatacgttaaacttattactttgatttatcttgaagttaaaaaagtcatcaacgcaagcacacaaacaaaagtctgaaacaatcttaattattccttcacagtaaggctactaaactagcaactaaggcagcacttaacaatccccaggtcagcatctttaattcacgatggggcctctccattcatctcacaattccccaactatcactgctcctgctgtcagaagattgttgatacatggcccaggagagatgctgccaacttcccctttccaagttcagaagttcctctaatcaaaaatgaagagaagaccaaaaacgacaaacttt

SEQ ID NO: 84143 - DNA, 824 bp, Homo Sapiens
cggcgcctcgggccatgaacgtctgtgtctgcaccacggctgcccgaggcagcacaggacgtgtggagccgttgtcgatctcggcaaagacagggatgacctctcctgcgggtgtagcccttagcggtcgatcttgtggccgaaaggcagactaggccacggtttacagtaccaggatcgggcaaccttttcccgagcccccgcttgaggtgccagcagggctggcgtgttgatgtccacaggctcgatgacagtgaacaccttccttgcccggcgtgctgggacccagggccggtgcagggtggccttgatacagtagcggacactaccgtgtttgccctcgaaggatgtcaccagggtcgggggcagctggaagctgaacaggaactcatggcgcccaggaggcagcgtcgtggtctccccggtatctggcgccaggagcgtggcgcggtggctcacgacctccacgcgttcactgtagctctgcgtgtaagccgtgctcgagcccgcgctgcgcgactcggtccagtgcacgtgggcgcggccccgcgcgcgcagcctcagggcacccacacgcgcggcgcttgacagctccagcagcacccggcccgccacggcctggccgccgctaaacacgggctcgacgcccgcggtcagcgccgtccaactgcaccgagaacgctttcaccttgtcgaatagcatcgcgtccggggtgcgaacccacgacaggcggaacctggcctcgaactcgcgaaccggcagctcaagatgccgacagctgcagcctcagaacgcaaaatcgccgtcaacgcgcaggcgcgct

SEQ ID NO: 84144 - DNA, 635 bp, Homo Sapiens
  misc_feature (93)..(93): n is a, c, g, or t
  misc_feature (175)..(175): n is a, c, g, or t
taaaaacaagggcggtttcaagaaatctataagcttccttctgctgtaagaacttagcactctggctccttgcttcctttaaaactcactggnagatctggaaaagggagctgagacctctctcttaaggctgattttaccttcctgtccctcatgaaagaacggctggaggacngggaataggacctggccagccattttccaaggacacaagctggatccagacaggaagcagcgggcaagtagattgctttctccccagataggtttgtttcacaatatatttaatacaagaatggtcagcagccactgtgcagttataacaaaattagccatagggtatctggagaaatgtacacaggcagcctcagctggagtcatgcgagccaactccggcctgctcgggtagggcctgtgcctgctgcccagtcagctgtgggtggtcacacggccaggactggatggtgcccgtggcagggcggtgcacaagggctcagaggtgctgtacaggaggagccagtcttccaacagtacacaaaagcacgctgtcctctgctctgccccccctgcggactcagcagcatgtgtgttcatttattttattattattttttgagacagagtctcactctgta

SEQ ID NO: 84145 - DNA, 781 bp, Homo Sapiens
  misc_feature (20)..(20): n is a, c, g, or t
  misc_feature (31)..(31): n is a, c, g, or t
  misc_feature (45)..(45): n is a, c, g, or t
  misc_feature (53)..(53): n is a, c, g, or t
  misc_feature (272)..(272): n is a, c, g, or t
aaacgtccagtcaccctggnagccagagttncagtggctgaaaancggccatngcactcaatctggggtgacagattgagacatcatcttcttggctccaagctgcactctggctttgcctttgagtcacgtggcatttcttggtacgatgaccggttctgtcgagtaggcactgcttcagccctgttttgtgagaagttccagtacgtaatgctcctccacacaatacataccggattcaatacttcaggaagacaacccagttgacaacngacaacagtttgcagttaaatgctcttgtctttcagtcttccctaatttctctaatattgccaaattttctttttcaattccttcatcctccaactttttcccactaatgggctctgctttcatctcgtagtgatctaagtcttctatatcctgtggagggggctggtgaaggagttttcagtcccgggcaccctgggctgtgctgaaagcctctgcgtcacactgcgtgagttagctgggaaagagagctcccactgttctcttttaacccttgtccttttgtaccacagcaattgctttcctggagatcagaaccgtggctgggtttaacatcatctttggaaatcttttggggacggtgcctgtgctttgcacaggacgaggtggcagctggcttgcctgctggcctgcttcctggagataggatgctcagacccaccgctgctcttcaggggtcgtggaaggaattaatgcacttcctcctgtccccccccggtgaccggctacg

SEQ ID NO: 84146 - DNA, 949 bp, Homo Sapiens
aattaggctaggtacgagggctggttgtgaatcggcacgaggggcggcggcaaaatggtcggcgcctgaggagcgggatctaacccaggagcagacagagaagctgctgcagtttcaggatctcactggcatcgaatctatggatcagtgtcgccataccttggaacagcataactggaacatagaggctgctgtacaggacagattgaatgagcaagagggcgtacctagtgttttcaacccacctccatcacgacccctgcaggttaatacagctgaccacaggatctacagctatgttgtctcaagacctcaaccaagggggctgcttggatggggttattacttgataatgcttccattccggtttacctattacacgatacttgatatatttaggtttgctcttcgttttatacggcctgaccctcgcagccgggtcactgaccccgttggggacattgtttcatttatgcactcttttgaagagaaatatgggagggcacaccctgtcttctaccagggaacgtacagccaggcacttaacgatgccaaaagggagcttcgctttcttttggtttatcttcatggagatgatcaccaggactctgatgagttttgtcgcaacacactctgtgcacctgaagttatttcactaattaaaacactaggatgctcttctgggcatgctctacaaacaaacctgagggatacaggggtctcacaaggcttttacgagagaacacctaatccattcctggccatgatttatgctgaaaggatcgaaaggattgactgtggtggggacggctaaaaggcctcattcaacctgatgaactcattaacaatgactttatccatgatgcttacagatttacctgtgtcagaagcctaaaagggaaaagaaaccaaccatgtggaacacacggatagccacggctttcaggac

SEQ ID NO: 84147 - DNA, 748 bp, Homo Sapiens
  misc_feature (413)..(413): n is a, c, g, or t
  misc_feature (529)..(529): n is a, c, g, or t
  misc_feature (723)..(723): n is a, c, g, or t
gagcattaatcaagtctgatctgcgaagacacaacataaatataggaattacaaatgttgatgttaaagctataccagctgacagtcccacagaccaagaaccaaaaatggttatgttgtccaagcagtcagaatcagcaatttgaagagaaaggcaaagttactgtcctgtagtaattggggacaatgtgatcatccttggagagagatgtgagcaccaaggctgggtttgtatgtggtgggggaataaacacacttacttgaaaattaccatatgaactctaaatgcataattattattttgcttaattgttaaattaagggaaattttcttaaaattcttctgtttacatcatgttaacactactgtttatctaattagtatcccggtttttagtctcatattgtatctngaaagtaagcttcttgacgtttactttttaaaagtcgatgtttttcttttttggaggaaaatggaagcctagaagaccttttaaagtgataatatggggtgttcagtccccataangatataataggtcaagcagtttatatattaaagtatccagtggaactaaatgtacaatatattcctaattggctgcccttttcactgtgctgaccagctgttcaagccacttcagtttgagtacaacataccaacatgacactactcacccacaaaggacagcattgggatcaggctttcagatgacctctaanatttttcccatttattggactcttg

SEQ ID NO: 84148 - DNA, 1784 bp, Homo Sapiens
  misc_feature (77)..(89): n is a, c, g, or t
  misc_feature (133)..(146): n is a, c, g, or t
  misc_feature (386)..(406): n is a, c, g, or t
  misc_feature (1399)..(1419): n is a, c, g, or t
accaatattaatcacgtctgagccaaggagctggcccattggtcattcacttctgctaaaaacaggtttttgtgacnnnnnnnnnnnnnaaatttaaatcactgtgtttggtatttttctgacaaaattaagnnnnnnnnnnnnnnttatttgtgggcaaatgttaaatttttttgtttccccttttacctcaattgtatcatagtactgggtttttttgtttgttttattgtgtggccaatgtctttgggcatgatgctatctaatcattgttaatgtgagaacatttctgaagatgggaaagacaaattatgtagctcacaaactggtttattatatatatggataaaaaacttttttcattgtggtcttaacacttttatatnnnnnnnnnnnnnnnnnnnnngtcccactgaactctctcttccttctccttttctttccttccctctccagagatgttggtttctacagcaaccctagatataaaattgtggctttaaaaatgcatgaaaccacctttaattatccagaatgaatagatttgtcttttcctcaccaccttccctccaaaacatgacataaacaatattttttgcacttgtgatccttggcccctttccccattctcaacaccatccatccctctggacaaaggatcatacaggtgttattagcaagcaagagatactgaagcgatcaaacagttttagggtggaagccattcccagtttgagtcttcatcctgtaagcccccaggggcagtccctgctttactgaacttcatcctgttagatggagagcatgcctgtttaagggattactggtcctacagccaggagctaattgttcaagaagtgttgaactttaaaaagacaagaccacttgttgaaatccagcgtgctctgtggctttcccctatttctcttaatacttagggaagaatctgacaggaagaagcgcacaggggtgtgcacaaagaaaatgacatgaatctttatttttcactgccagcttcaaggaaagaaaattttttctacaatttgcatgagggatttttttaattgtatgtactcatggttgtaaaccaaaacgtactgtaccgtacagagaaaaggagcaaaaaaccaagtcttctgtttatcctgaggctttccacaatgttcccctcctgtgagccaaggaggcaaactgcacaagcttgtaaatggttcgtctttaaaatgtacataagtggaacatttaataaaatgaggggaaatggatttataaacttgttttttttctaggtgaccctgtttaataggctttcacagactggggaatgctcaagatgtgatgggcctggtggtacaggtgtgacatttgttaccacccatttctcccaccccaccctgcnnnnnnnnnnnnnnnnnnnnncatcccccagcacactataatatagtgaactggaaaagtcccttccagaaacagcttggccagctttgtgaacctttgacatctgaaaacaaccaaggatccatctgggcttctcttccccagctttttgcctgatgccattttattgacagacaatggactttgaagtcagcctttgcctttgagaaagttcaagaactatggttggtcacgtctatctacaacctaatcctactctttggtagtctctgcagcagccacagccttagcagagcatggggttcctgtcttctgcacacgattgactttcttgatgggtaattttttttaagattataccaacagtggatcagctgggttttggc

SEQ ID NO: 84149 - DNA, 1409 bp, Homo Sapiens
  misc_feature (857)..(896): n is a, c, g, or t
  misc_feature (900)..(900): n is a, c, g, or t
  misc_feature (1114)..(1164): n is a, c, g, or t
cagtcgacggtaccggacatatgcccgggaattcggccattacggccgggatatacaaactggagtgtggagcagcttcctgcagaacccaaggaattaatctctatgattcaggtcgtcaaacaaaaacttccccagaagaattcctctgaagggaacaagcatcacaagagtacacctctactcattcactgcagggatggatctcagcaaacgggaatattttgtgctttgttaaatctcttagaaagtgcggaaacagaagaggtagtggatatttttcaagtggtaaaagctctacgcaaagctaggccaggcatggtttccacattcgagcaatatcaattcctatatgacgtcattgccagcacctaccctgctcagaatggacaagtaaagaaaaacaaccatcaagaagataaaattgaatttgataatgaagtggacaaagtaaagcaggatgctaattgtgttaatccacttggtgccccagaaaagctccctgaagcaaaggaacaggctgaaggttctgaacccacgagtggcactgaggggccagaacattctgtcaatggtcctgcaagtccagctttaaatcaaggttcataggaaaagacataaatgaggaaactccaaacctcctgttagctgttatttctatttttgtagaagtaggaagtgaaaataggtatacagtggattaattaaatgcagcgaaccaatatttgtagaagggttatattttactactgtggaaaaatatttaagatagttttgccagaacagtttgtacagacgtatgcttattttaaaattttatctcttattcagtaaaaaacaacttctttgtaatcgtnnnnnnnnnnnnnnnnnnnnnnnnnnnnnnnnnnnnnnnncganagacagacaaagagagagaattctttccagtgaaactaaaaagcttttgctttttcccttggcttttatggaagaaacaataccttttacattacaactggtcaacagtaccccgcccggacctggcttttaaaaatcccaaacactgggccgaccaacccctaacataatcaaggcccctttttctgtcccccccacaagtccttatacctannnnnnnnnnnnnnnnnnnnnnnnnnnnnnnnnnnnnnnnnnnnnnnnnnnttgcaaccctatgttattactcaattgtccctgccgagcagaccctgcatcctcagccttcgtactaacaatagattgcaagtcgcacctcatcccacccattctccgtacccacatttccttatttcctcgcgacctccacgcgtgcatatcctttatcctaacacgcccgccgtctatttataccacacgcgcgcacctccaaccttgttgactcaacccccgtgtcgcctcgcgccacaccg

SEQ ID NO: 84150 - DNA, 1228 bp, Homo Sapiens
  misc_feature (50)..(228): n is a, c, g, or t
  misc_feature (934)..(943): n is a, c, g, or t
ctggaccggtccggaattcccgggatatcgtcgacccacgcgtccgaaannnnnnnnnnnnnnnnnnnnnnnnnnnnnnnnnnnnnnnnnnnnnnnnnnnnnnnnnnnnnnnnnnnnnnnnnnnnnnnnnnnnnnnnnnnnnnnnnnnnnnnnnnnnnnnnnnnnnnnnnnnnnnnnnnnnnnnnnnnnnnnnnnnnnnnnnnnnnnnnnnnnnnnnnnnnnnnnnnngatctggcggatgaaaataaccagaatgaaaatagctagaaaactcagcaagcaggaagctccctttctcacccttttgttcccttgccgatagaatcagtcactattagaaaaaatgaaagacgctctgtttaaaacaatgatgacagcagtacttaatatgtatttcgaggtgaacttatatagattgagagaggctgcatttggcagactgatgtataggaagacccatttgtttctagcttctccctgcagggaaaatgctttcgtcattatagcctctttacacagactggccattctagtgaaacaggtggtaaacctttgggctgcccagaaacattttatctgttttcactttacctagggaaggggaaagattagcgggtcatccaaaatctgtatgtaagctatcttcattttcttccccaaccttctcctcctgggaaacacaaatgctatctcatctgacaaaaggttttagaggataaagctgaaaagattggattgggatctttttgtggcttggggcggagccttttgctaaaatctcaagaatgctgctttgagtttagctagggtggctctcagaactggggtgcctggcattctcagcatttctcaggggcctcccacctctgacaactgcagtgttagctaatacatacccttgagcatagaactgaatgctggaattcagagccannnnnnnnnncaactgtgaacatggtacaattttactgcaatttccctttgaactttcttggcactgtctggaatcttacaaattcattaggcttctctttctggactaagctactcttcatccgagatgagtccagtatgtcctggcctcaaagcaataaggccgagaactcccggccccacgttcatgcctcaaaagggccttcgtccggccccgcacagccccttggccggcaggggcccaaattagggccgccggccacggtgccacaaaccttttcggaccccacagttt

SEQ ID NO: 84151 - DNA, 307 bp, Homo Sapiens
gaatgtccccccaccaaattcgtatgttgaagcaaccaccaacgtgataggtgaggctttaggaggtgattatgtcatgagagctccatcctcattaatggatttagtgcctttataaaggggctcaagggaaccaattacctcctttttgcccttcgattcccttccaccatatgaggacacagcaacaggccccgtcctagaagctgagactgggccctcaatagatgataccagtctgccagcacgctgatcgtgggcttctcagtcttcacaactatgagaaataaattcgtacttttaaatt

SEQ ID NO: 84152 - DNA, 1403 bp, Homo Sapiens
aagcgaggcctgggtggcgatttcggcacgagggtagcgggagcccggccggagctgggtctggagacgccgtggcagcctgaacggagtgtgcgacggattgggaggtttgtctacagattttgagcgttcgaagttgacccctgactaagtatactttgctgctccctcagcctttgaaaaaatgtctgtcacatatgatgattccgttggagtagaagtgtccagcgacagcttctgggaggtcgggaactacaagcggactgtgaagcggatcgacgatggccaccgcctgtgcagcgacctcatgaactgcctgcatgagcgggcgcgcatcgagaaggcgtatgcgcagcagctcactgagtgggcccggcgctggaggcagctcgtggagaaagggccccagtacgggaccgtggagaaggcctggatggccttcatgtccgaggcagagagggtgagcgagctgcacctcgaggtgaaggcctcactgatgaacgatgacttcgagaagatcaagaactggcagaaggaagcctttcacaagcagatgatgggcggcttcaaggagaccaaggaagctgaggacggctttcggaaggcacagaagccctgggccaagaagctgaaagaggtagaagcagcaaagaaagcccaccatgcagcgtgcaaagaggagaagctggctatctcacgagaagccaacagcaaggcagacccatccctcaaacctgaacagctcaagaaattgcaagacaaaatagaaaagtgcaagcaagatgttcttaagaccaaagagaaagtatgagaagtccctgaaggaactcgaccagggcacaccccagtacatggagaacatggagcaggtgtttgagcagtgccagcagttcgaggagaaacgccttcgcttcttccgggaggttctgctggaggttcagaagcacctagacctgtccaatgtggctggctacaaagccatttaccatgacctggagcagagcatcagagcagctgatgcagtggaggacctgaggtggttccgagccaatcacgggccgggcatgcccatgaactggccgcagtttgaggagtggtccgcagacctgaatcgaaccctcagccggagagagaagaagaaggccactgacggcgtcaccctgacgggcatcaacaagacaggcgaccagtctctgccgagtaagcccagcagcacccttaatgtcccgagcaaccccgcccagtctgcgcagtcacagtccagctacaaccccttcgaggatgaggacgacacgggcagcaccgtcagtgagaaggacgacactaaggccaaaaatgtgagcagctacgagaagacccagagctatccaacccggacctcaatgcaacccggacctcaattt

SEQ ID NO: 84153 - DNA, 452 bp, Homo Sapiens
gcagattgcccagggcccccaccatggaacggcctcttttggatggaggtggcgcccactcacctgctgggcttactcggcagagactggtcgcctgtctggttgatgaccgtcagggtgacgccgtcagtggccttcttcttctctctccggctgagggttcgattcaggtctgcggaccactcctaggcaacaggtgccgaggaagagaaaccaaaggttcactacttgctggaagccacgtctgtcctcagttcctgcccagcgagcctgcagttggctctgtgcatctgatgtgtagactcagggccccagctctccctgggttcccagaagacctcaggctccccatgccccacttatgaacccaaacgacctggagcccctcctcactgttcaaagcaggggctcatcaggggatctggaggcttgcacctctagggttaaggggc

SEQ ID NO: 84154 - DNA, 650 bp, Homo Sapiens
tcaagtaaaagatattttcatataagagaattttatgtattcttcttacttgattcatcaacagattatgaagcctagcagtgttctggcaaaacctttttaacttgcctagaacacagaagggatgttgccctttttaaggttgtagatcttttcagagtcactgtgggtcattctcaaccctttgcagttctgcaagctcacatatggtgcaagaggaaatgctggtatgactctgtgcattttcttgcccccaaacaggaacaagttgatttcctacattaaaatggaaggtaagatgtgactatggaagagaagtacaccaggggtgtttctgcatgtgaaatatttgtcataagttaaaaacccatcatggaataactgtttgttgtgatcagcatgtttttatcacacatgggcactggttttgtgagcacctggcttgatagtggtggggcggccaatgtgccagcgcccgcctactgagcattcatggacattggaaatcagcgaacaccacagacacaccgaatcagctgatgcacggtcatgttctggggtaaaacctgttcattatccatgtccacatttgtatagttatcactagactaaaatgaagatgcaaataaatattttaccctgtgttcatg

SEQ ID NO: 84155 - DNA, 974 bp, Homo Sapiens
  misc_feature (550)..(550): n is a, c, g, or t
ggaattctcgggatatcgtcgacccacgcgtccgatcgtgccaccgagggcaggaaagaagagctctttgccctctactctgctcatgatgtcactctgtcaccagttctcagtgccttgggcctttcagaagccaggttcccaaggtttgcagccaggttgatctttgagctttggcaagacagagaaaagcccagtgaacattccgtccggattctttacaatggcgtcgatgtcacattccacacctctttctgccaagaccaccacaagcgttctcccaagcccatgtgcccgcttgaaaacttggtccgctttgtgaaaagggacatgtttgtagccctgggtggcagtggtacaaattattatgatgcatgtcacagggaaggattctaaaaggtatgcagtacagcagtatagaatccatgccaatacagagcatagggaaaggtccacttctagttttgtctgttactaagggtagaagattattgctttttaaaggctaaatattgtttgtgggaaccacagattggttggggctgaacangcaagcacattgcctgcaatgtggtaccgtgaattgcttggtacaaaaatggccagttcacgcacggacagaaggcactttatcgtagcccgacttcccttacaatggcacaccactatacttccagaccgtgagcgtgcccatccgtccgtgggacacatttggagcctgctccgacggcattacgccgtgggtcacccgccctttccccgacgtgcaatcttgttccattcttcacaacgttttcctgccggcctgctcttgctaacactcttttcctttcacggtgttctacgccctcaacccccaccgggggccggtgccactttttcgtgcttcccaaattagccgatcaaaatgcaccgggattcacttttcgcgcacactccgactccgtggtccatcgcataggggcgcgccgccc

SEQ ID NO: 84156 - DNA, 823 bp, Homo Sapiens
  misc_feature (567)..(567): n is a, c, g, or t
  misc_feature (780)..(780): n is a, c, g, or t
ggcctgggtggcgaattcggcacgaggggcctgcgcctccctcggctcctggcgcgggcctcggggagaggggtggaagatgtctatggatgtgacattcctggggacgggtgcagcatacccatctccaacccggggtgcctctgctgtggtccttcggtgtgaaggcgagtgctggctctttgactgtggggaaggaacaacagacacagcttatgaaaagccaacttaaagcagggagaattaccaagatcttcatcacacacctttatggagaccatttctttggccttcctgggctcctctgcacaatcagcctgcagagtggctccatggtgtccaaacagcctattgaaatctatggccctgtagggcttcgggactttatctggcgaaccatggaactctctcacacggagctggtcttccattatgtggttcatgaactggttcctacagcacatcaatgtcctgcagaagaactaaaagaatttgcgcatgtgaatagagcagacagtcctcccaaagaggaacaaggaagaactatcctgttagactcagaacatnactcataccttctgtttgatgatgaaccatttgttgtaaaagcatttcgcctctttcacagaattccctcatttgggttttcagtcgtggaaaagaaacgcccaggtaaactcaatgcacagaaacttagagaccttggtgttccaccaggtccctgcctatggggaagctgaaaaatgcaatttctgctggatctggaaaatggggggtacnattttctacccacagatgtcttaaaaaaagcctaatgggtggg

SEQ ID NO: 84157 - DNA, 470 bp, Homo Sapiens
  misc_feature (22)..(22): n is a, c, g, or t
  misc_feature (40)..(40): n is a, c, g, or t
  misc_feature (68)..(68): n is a, c, g, or t
  misc_feature (99)..(99): n is a, c, g, or t
gaaaagttacatgtaccagttngttcctgccagtatgtgnttagtggttcaagggagccattgtcccnacccatcaagccacttgttaaccatccagtnaactgtgaaaaatgttgggactatatataacagatcatgcacagggaatatatgaggataatgaaatttccaataatgcgttagctgggatttggggttaaaaaatcatggaaacccaattattagacggaatcatattcatcatggacgtgatgttggtgtgttcacatttgatcatggcatgggttactttgaaagttgcaatatacacagaaataggatagcaggctttgaagtaaaagcctatgctaaccctacagtggttcgatgtgaaattcaccatgggcagactggaggaatatatgtccatgaaaaaggaagaggacaattcatagagaataaaatctatgcaaacaactttgcaggtgtat

SEQ ID NO: 84158 - DNA, 232 bp, Homo Sapiens
cctggtactccacccacttcacaggggtggtgagaatgaatggttacaggcatgtaatgtaattgaggcagctctcagcaggaagtaagcagtcagacaacacgtcacttattcaatagcctcttggatctttggtttcttttttttgtaagacggggacccaaacctctttgtccctggattgtagacaactgggtggcatgagagttattaaaaatcacagtgccccagc

SEQ ID NO: 84159 - DNA, 948 bp, Homo Sapiens
  misc_feature (466)..(466): n is a, c, g, or t
cctggtctctctaaccgcgccagtgtgcctccgactcggaacggcttcctgcgtgccggggcagcgagggccgggggcggcgggcgggatgagtgcgtgtgtgcggtggagcggcgcggatgctgcggacttgccgggacgccacggctacgccgccgagttctccccgtacctgccgggccgcctggcctgcgccaccgcgcagcactacggcatcgcgggctgtggaaccctactaatattggatccagatgaagctgggctaaggctttttagaagctttgactggaatgatggtttgtttgatgtgacttggagtgagaacaacgaacatgtcctcatcacctgtagtggcgatggctcgctgcagctctgggacactgccaaagctgcagggccactgcaagtctataaagaacacgctcaggaggtgtatagtgttgattggagccaaaccagaggtganacagcttgtggtgtctggctcatgggatcaaactgtcaaattgtgggatccaactgttggaaagtctctgtgcacctttagaggccatgaaagtattatttatagcacaatctggtctccccacatccctggttgttttgcttcagcctcaggtgatcagactctgagaatatgggatgtgaaggcagcaggagtaagaatcgtgattcctgcacatcaggcagaaatcttgagttgtgactggtgtaaatacaatgagaatttgctggtgaccggggcggttgactgtagtttgagaggctgggacttaaggaatgtacgacaaaccagtgtttgaacttcttggtcatacctatgctattaggagggtgaaattttcaccatttcatgcttctgtgctggcctcttgctcgtatgattttactgtaagattctggaacttttcaaagcctgactctcttccttgaaacagtggagcatca

SEQ ID NO: 84160 - DNA, 941 bp, Homo Sapiens
cagtcgacggtaccggacatatgcccgggaattcggccattacggccgggggtccttggaaaggcttgacctaagcaacaatgatattagtagtcttccctattcattggggaaccttcatttgaaatttttggcattagaaggaaatcctttgagaacaattcgaagagaaattataagtaaaggaacacaagaagtcctaaaatatctacgaagcaagatcaaagatgatggacctagccaaagtgagtctgctactgagactgccatgacactaccaagtgaatccagagtcaatatacatgccatcattacattaaaaatattagactatagtgataaacaagcaactttgattcctgatgaggtgtttgatgcagtaaaaagcaacatcgtcacttctattaacttcagtaagaatcaactatgtgaaattccaaaaaggatggtagaactgaaggaaatggtttctgatgtcgatctcagttttaataaactttcctttatatccttggagttatgtgtgcttcagaaattgacttttttagatctcaggaacaattttttaaattctttgccagaagaaatggaatcactggtaagacctgcaaacgatcaatctttcctttaataggtttaaaatgctacctgaagttctatatcgtatcttcacacttgaaacaattctgattagtaataatcaggttggatctgtgggacctcagaaaatgaagatgatgggaaaatctgaccaacgttggaccttcaaaaataatggacctctttaccaaattcccaccagaagctccgggtaatttgtggtaaacctttaagaaaccatttacctacctgggaatgggaaaaatccccatttcccgaaggtttcccctccgaagcccaggccccctaatttaaaattggaaaaaaggggaaaaacaggc

SEQ ID NO: 84161 - DNA, 690 bp, Homo Sapiens
gaaataaccaaattgaagaaataactgaaatttgtttcaatcataccagaaagatcaatgtcattgtactacgttataacaaaattgaagaaaataggattgctcctttagcctggataaatcaagaaaatctagaatccattgatctctcctacaacaagctctatcacgtccccgtcctatctacccaagtccttgctgcacctagtactccttgggaaccagattgaacggatccctggctatgtgtttggccacatggaaccaggcctggaatacttgtacctgtcatttaacaaacttgctgatgatggcatggacccgtgtctccttctatggggcatatcattctctgagagaattatttctgggatcacaatggacttaaaatctataccacctggggataccaagaaatgaaagcactacattttctgaggctgaacaacaacaagatacggaacattcttccagaagaaatttgcaatgctgaagaggatgatgactcaaatctggaacatcttcatcttgaaaacaattatattaaaattagagaaataccatcttacacattttcatgcataagatcatactcaagtatcgttcttaaaccacaaaacatcaagtaattccaagttttccttttgctgtttataaactttactcatgtatttgtagtagctgcatttg

SEQ ID NO: 84162 - DNA, 647 bp, Homo Sapiens
  misc_feature (99)..(99): n is a, c, g, or t
tccgttcagagtataggactaacaggctccaaccagttttccagtggttgtgtctcctaggaatcagcagttgcaaacagtaacactccaaacagtgcncactcacaacagttaaagccagcacagatccatcagcaggtactggatctcagaagtttattttacaagccattccatcatcacagcccatgacagtactgaaagaaaatgtcatgctgcagtcacaaaaggcgggctctcctccttcaattgtcttgggccctgcccaggttcagcaggtccttactagcaatgttcagaccatttgcaatggaaccgtcagtgtggcttcctctccatccttcagtgctactgcacctgtggtgaccttttctcctcgcagttcacagctggttgctcacccacctggcactgtaatcacttcagttatcaaaactcaagaaacaaaaactcttacacaggaagtagagaaaaaggaatctgaagatcatttgaaagagaacactgagaaaacggagcagcagccacagccttatgtgatggtagtgtccagttccaatggatttacttctcaggtagctatgaaacaaaacgaactgctggaacccaactctttttagttaatataccaaagcttatgaataatt

SEQ ID NO: 84163 - DNA, 608 bp, Homo Sapiens
  misc_feature (33)..(33): n is a, c, g, or t
  misc_feature (88)..(88): n is a, c, g, or t
  misc_feature (569)..(569): n is a, c, g, or t
  misc_feature (573)..(573): n is a, c, g, or t
cctggcatccactgtgaggggtacttgataaanctctgtatagcgctccacaatgtgtttctgggtggccgtttaggtgggattttcncatttggctgttaactgtcacccttggaatcctcttctctggtccctctgctaagcttcctgagaagtctcgggaacacacgcttggtgactgtgggccttttgaacaggaaccggctcaggcttgggtgcagcagatgctctttgcagagtcatattcaaagagcctgtacaacccttaatcttattctgggcttcaagatgagtcattccttgtgcatttattccatcaatgctgagaaccacatcgcctattcttacatttgcctgggctgccttgccgccatcttttagactagagattgtcagaggcatgttgaaatccttaccgccctgcagccggaaaccccaaggagctgggccaaccagtgacacactgtagttgctcatggttctaatggctcaaagtccaatgacagaaaatgaaatatgctcgggtccggcgcggcgcggggctgctccgcctcagacaagggctgacnagtnactcggggtgagggcgccgtccccaccgcccgcgg

SEQ ID NO: 84164 - DNA, 458 bp, Homo Sapiens
tcaaatatccagcaattaaagactcatgagaaaaacagaatagcatattagatgtaacagtttaaaatggattgcaaatcaatgtcagacttaaatagaaaatatttattatcacctcatttctaccaataatttcagatgtttaatgggactttgaaaagataggaaaaaatagaaatgaaaatttatctcaccgtttaatactgtgaatactatttggagggtccctggtcagacatttaaatatcaaacttaagaactgacatggagcctttgattagtttatatacaggatctgaatatttacacacatagcacactatagcaacctcttgtaaaaaatccatgaagatagaattccaaccagtggtatattcctattaaaaagtaaattggctggggtgtgggtggctccatgcatgtaatccccagcactttggggaggcccgaggcaggag

SEQ ID NO: 84165 - DNA, 563 bp, Homo Sapiens
  misc_feature (22)..(22): n is a, c, g, or t
  misc_feature (39)..(39): n is a, c, g, or t
  misc_feature (291)..(291): n is a, c, g, or t
gattaaaaaaggccttggcaanagttccaggcatcattnccaattatcccatggaatcattataattttccatggtctcatccctgccccattctattcttaatccccctcccaccaaagtagaaagtattgattgccaaagtcaaaagtttaggtgaggaagctatttacaaataaagtttccctgcaatgcttattttatcccctcctagtgttcacagattgcatcacatcagatttgaaagtaaaatggctgttattttctatttttaatagttatcatcagtgttngtgctgccgagcattaaaacaacatacacaaagatatgagatgttaggataatcccccaaacctttattataaataactcaaaatcagagccaaactggctggtattctatgctttatcctttccctagcatcagtcaagggtcctggaacaaagatgagtaactattaaaatgtaagaagcctatcatattgaaatacctcatatgcttggtattttctactatcactttaaaatcactaaaattctgaaacagacattaagatttgggaa

SEQ ID NO: 84166 - DNA, 594 bp, Homo Sapiens
ctgagttccattctgggtttgctgtagtttggttgggattattgttggcattacagatgtaaaagattgactagcccataggccaaaggcctgttctagttgaccaagtttcaagtaggattaagaggttggttgaggggtgcagtttctggtgtaggccaggtaggtagaaagtgaggaacagggttgcctcttggctgggtggagtctctgaaatgttagaagaagcgctgaagccttgattgatagttctgccccttgttgccctggggcttatctgattatgggacgagggtagaaagtaagaagcacttttgaatttgtggggtagaacttcaacaataagtcagttctagtggctgtcgcctggggactagtgagaaagctactcttctccctcttccctctttctccccatggccccactgcagaattaaagaaggaagaagggaaggcggaggagtctataagaaggaatcatgatttctatttagcagattggatgggcaggtggagaatgcctgggggtagaaatgttagatcttgcaacatcagatccttggaataaagaagcctctctgtgctgaaaaaaaa

SEQ ID NO: 84167 - DNA, 443 bp, Homo Sapiens
ctggggccttggggtaaccaaatagtgggaaaatgggttaactgggtgctttgcttgctgggaactggttagtaatcgcgcatttaggtcaaagcccctccactggggttagtccaagttaggtgtagaagggacaagcctgttccaagggtggtccatggtaaaataatgagaattgtattcagggaggagcatcaggccattggatctggtggttttgtcttgattttccagtttcacctgcaggctgttcaggggctgtgggtaccacacctgacattttgaacaattccaattaatccgcctgccccgcagaatgctgggcaccggggacgccagacgccgggtctagttgtactggcagaggaaagggaaaggaaaggaggcagggaagggagacggagaggatttttcaagttataaacaaagtaagcgcgcggaag

SEQ ID NO: 84168 - DNA, 840 bp, Homo Sapiens
  misc_feature (37)..(37): n is a, c, g, or t
  misc_feature (245)..(245): n is a, c, g, or t
  misc_feature (544)..(581): n is a, c, g, or t
gagacccaaggcttgaagactattttcatatagcatngaaaaacccactatgagagcatatttaactgccattggtggcttgggagtgtactgtgccacaggattatgcatagctactgttaggtaccaagactgttatacagttttaaattgattgtaactgagagcataacagaggtactacccagcccatgcaaaataactaaaaattactgagtcactgtgctgaatacttcattcctggngaaaaccaaaggcagcagtaactaaatcaagccaaacaggtgaccaaactttctcctcaaagatttgtgagcacagtgaagtctgaggtatacctttatccattaaatctgtgtgccattgcaagatattaccatttgagaatatacgccatcacaatggtttaaatcttttgtatattagtcattcatatattcttatctacccagtctcttgatttttgaaaagatttcacctacagtagaatattacagaaacaaaatataaatgcatgtctttctaaatgaaacttacatagacnnnnnnnnnnnnnnnnnnnnnnnnnnnnnnnnnnnnnncaggcagacaaagcaggaaaacggccattcaaatgtataataaaaaactaaaaattgactatctccagaaaactatgaagcgcctcaactaaaaggaatgcataatgaaattctaatctaatacaggtcaaaaatgtaaaaaggttataaaccttaacaggaaaaataaaacaacttttactggccattcctgttgaaatgagaatcataaagtaacagaaaagtggctacaaacccacttagagcaccaaacagagag

SEQ ID NO: 84169 - DNA, 525 bp, Homo Sapiens
gtcatcgagctcggtaccagttcgacggagactctctttacgtctcccaggaatacaggaggcgtaaagagagacaacgtacagagatagatgaatggaaatgggtaagggaggtgttcattcacatccatctaactgcaaaatacaaaagtaagaagtcattgacatgaagcaacgacgaccaagacgttctcagatctaaaggtgaatgatctcagtcagcctggaaatgcacaaggtggaaaaataacataaaaaagccataagaccttgaagaacatcaatgtcaaagataaattctaaagtcccagagaaaaaagaatgggaatcaaattgacctcagactatacgtgagaaacacggagagccagaaaactgtgatgttccatcctcagagtttgaaggaaatatttgaaggctgaattttacatccagctaaactatcaaaggcatgcaaagtccatgttattcttaggccttcaaggcctcggccatttttctacagaaaagcctgattttaaaatg

SEQ ID NO: 84170 - DNA, 1103 bp, Homo Sapiens
ttggggggttacacagggggtgttagaagggggccccaagcgaggaaggcacgccattgggtggaaagggcgcgggttgtattaatagggaaaatgtgtggttttcgtaaccttgttacggattgcgctggagaaaaatcgttggtgggtaaggggataagcggtggagaaaaatggtgaattcttagggcatcagggggacccggaaaggatgccttcatggcgggttggtgccagggggggaatgcgcttccagccggccggagcttggtggaaattggggggaaggccgccccttcccacagaagcaggatgttttcccattaaagatgtccccggggtagggtaggcgtatccgatggcctcagctctggggttcaagtccatcatgtgggcgcagaagagggttgatatagttcctggctctggttggagtggtccctgtgtaccccccctcattctggcccagaggaagaagagcagttggtggaacaggcagtagcatgagcagccgggcttggtcatgaggctcctgcagaggtctgagaggccgcagggctcgctgctgtccgtcccggttcccagcagctgcaccaggcacacgtcacttctctcctctgagaatgagtcctggggcccgaacgtggggtacaccaaggaggcatcagtgtggatccaggcatgtgggagcttccaaaacccgggctggagggtcagctggaactctcttaggtacttgggatcactcagcttgaggtagtggagggatctctggatggcagcctccagcttctcccccagcatccccacgcgcaggctcagcggctgcagcaggggctcctgggcccacttctcccggacactttttagctgctcttccagcactcggacccccaccatgccatccaggttgatttcaggcagcctctgttctaggaagacggtggctctctccagcgcagacaggatcaggtctgcaatggtggctttactttcagcagtgtccagcccaggcagtgaggaggaccacagcggtggcagtgctgtcagtaagagcaggagcagcagccccaggctggccatggccggcctctgctcactgc

SEQ ID NO: 84171 - DNA, 436 bp, Homo Sapiens
tgtatccacgcatggctggcgcagaagaggttgatatagtcctggctcctgttggacgtggtccctagtgtgtcatccccatcattctggcccagcaggaagaagagcagttggtgggacaggcagtagcctgaccaggcgggcttggtcatgaggctcctgcagagcgtctgagaggccgcagggctcgctgtctgtccgtcccggttcctcacgtcagctgcaccaggcacacgtcactttctctcctctcacaatgtagtcctggggcccgcaacgtgtgggtacacctaagcaaggcatcagtgtgtgatcccggcatgctcggaacttccggaacccgtgcgtgcattgtcagctggcaatccacgtcatgccactgccctcctggccttactaggtttgcttcctgttttacgaatcattggatcatcca

SEQ ID NO: 84172 - DNA, 1688 bp, Homo Sapiens
  misc_feature (833)..(833): n is a, c, g, or t
  misc_feature (1549)..(1609): n is a, c, g, or t
cgcttccggggtcgggcgccttgatagctgccggctccggcttccacttggtcggttgcgcgggagactatggcgtcctcctctgttcccaccagccacgtgtatcggcgtgcgacagcaggccccggcccaggtttcggcttcgcctccaagaccaagaagaagcatttcgtgcagcagaaggtgaaggtgttccgggcggctgacccgctggtgggtgtgttcctgtggggcgtagcccactcgatcaatgagctcagccaggtgcctcccccggtgatgctgctgccagatgactttaaggccagctccaagatcaaggtcaacaatcaccttttccacagggaaaatctgcccagtcatttcaagttcaaggagtattgtccccaggtcttcaggaacctccgtgatcgatttggcattgatgaccaagattacttggtgtcccttacccgaaacccccccagcgaaagtgaaggcagtgatggtcgcttccttatctcctacgatcggactctggtcatcaaagaagtatccagtgaggacattgctgacatgcatagcaacctctccaactatcaccagtacattgtgaagtgccatggcaacacgcttctgacccagttcctggggatgtaccgagtcagtgtggacaacgaagacagctacatgcttgtgatgcgcaatatgtttagccaccgtcttcctgtgcacaggaagtatgacctcaagggttccctagtgtcccgggaagccagcgataaggaaaaggttaaagaattgcccacccttaaggatatggactttctcaacaagaaccagaaagtatatanttggtgaagaggagaagaaaatatttctggagaagctgaagagagatgtggagtttctagtgcagctgaagatcatggactacagccttctgctaggcatccacgacatcattcggggctctgaaccagaggaggaagcgcccgtgcgggaggatgagtcagaggtggatggggactgcagcctgactggacctcctgctctggtgggctcctatggcacctccccagagggtatcggaggctacatccattcccatcggcccctgggcccaggagagtttgagtccttcattgatgtctatgccatccggagtgctgaaggagccccccagaaagaggtctacttcatgggcctcattgatatccttacacagtatgatgccaagaagaaagcagctcatgcagccaaaactgtcaagcatggggctggggcagagatctctactgtccatccggagcagtatgctaagcgattcctggaattttattacccacatcttttgccttaagagactgcctgggttctctctgaggttcaaggtggtggggctcttgaaacacttggcgggaaatgtgggggaaaattctaacccccccagttctccttctttctttgggctaaatttcaggctgccggccttcctttccttccagaataaactcccctcctggtcgaagtaagggcttccttcctgaccctccctgaaaattaattnnnnnnnnnnnnnnnnnnnnnnnnnnnnnnnnnnnnnnnnnnnnnnnnnnnnnnnnnnnnnaccataagaaaggcccgcctttttgcggtattttttaaaagaggttaatctgggggggacttcctcccgcccaaaggtc

SEQ ID NO: 84173 - DNA, 692 bp, Homo Sapiens
  misc_feature (389)..(406): n is a, c, g, or t
gagatggacgagggcggctgctctgtggggaggggcctgccgcctccctggcagccccaggcccccggccctgtggatgggacagccagtgcagagggcagagagccctccccacagtgtggcggttctctgagcgaggagagttagggccaagaacgtaactctcccaggtgacacggggggagacgagcaatgcagcactctaggaagcctgctaggcgcccttccctggctcacccggggagcccactctgcttctgtgctgtgggccccggggttgccagccctgcagtgtgagtgaacggttatttaggactcacctggcacttgccctgtggcttaagaacaagtagaagcttaaacttctgaaagtgcttcccggggaagannnnnnnnnnnnnnnnnngtggggtaaaggcgggggggtgtatgtgggcttttgccacgtttttgaattgttaaaaaaatacacattttacagcaaagcaactgtgtacggaaattagaagaaagcaggccagatttaggcgtgggtagagtaagggagtcctcgggtcatagggggaaatgggttcagagaataaggttaatagaaatcagggagtttggtaagaaggggagaagagtgtcacttcaggaaagaggcagtagagtggcgggtcctaaaggcacagaacacagcagatatgtgc

SEQ ID NO: 84174 - DNA, 1150 bp, Homo Sapiens
  misc_feature (85)..(119): n is a, c, g, or t
  misc_feature (163)..(415): n is a, c, g, or t
aagactgttgatcactatagggcggcttagctctgtcgagccgaacgaccgagcgcagcgatgtagtgagcgaggaagcggccgnnnnnnnnnnnnnnnnnnnnnnnnnnnnnnnnnnncagtcgacggtaccggacatatgcccgggaattcggccattacnnnnnnnnnnnnnnnnnnnnnnnnnnnnnnnnnnnnnnnnnnnnnnnnnnnnnnnnnnnnnnnnnnnnnnnnnnnnnnnnnnnnnnnnnnnnnnnnnnnnnnnnnnnnnnnnnnnnnnnnnnnnnnnnnnnnnnnnnnnnnnnnnnnnnnnnnnnnnnnnnnnnnnnnnnnnnnnnnnnnnnnnnnnnnnnnnnnnnnnnnnnnnnnnnnnnnnnnnnnnnnnnnnnnnnnnnnnnnnnnnnnnnnnnnnnnnttttaatttaatccttctgtagaaacaggcattcagaaccattccattgatcttaataaagctgctctttactgtttctagtcaaaaatgagacttcgatcaaaccataagattttatactgcagatagtcagcttcaccaaagccgcagaggaaacatgtcgagatcaggcttcctgcttgatagtctcttgactaccattaaaacgaatattgggaggtcatgaaagtcattggtaggccattagcattgatatctttaaaacatctaccctaaaccatctgctatggacccataataagaggcctgttgtatatgaaattgtctagaattcaggtgcaggtctttgccggttaagtaagggagcaacacgtaaaatgggagaggagtggggtgtactcacttgcctcctcttttgtcctgatttaaccagcatttttcaaccctgggaaaatttgcagaatctaagttgattgtaatgattttgagctgcagcagctttaactcttaccctttttccacatagttatggtgtttgagttggaaagaaacaactataggtagctacacgtacataattatctctttattcacaaagggtatagtaaaattgattgtaaataactttctaagtgccaatattcaaaacttttggattaaaatgtatttttcaccgtgcatttactttggatgtatttatttcatttaaacaatttaaatggggctctttaaccc

SEQ ID NO: 84175 - DNA, 1224 bp, Homo Sapiens
  misc_feature (1195)..(1195): n is a, c, g, or t
cgagtgcggtgtcgctccagctcagagctcccggagccgccggccagcgtccggcctcccggatcgtctctggccggcgccctcgccctcgcccggcgcgcaccgagcagccgcgggcgccgagcagccaccgtcccgaccaagcgccggccctgcccgcagcggcaggatgaatgatttctggaatcaacgaatatggaccaggtagcccctgtggctaacagttacatgagggacactcaagcgccagccagcctttgacacctttgatgggtccctgtttgctgtttttccttctctaaatgaagagcaaacactgcaagaagtgccaacaggcttggattccatttctcatgactccgccaactgtgaatcgcctttgttaaccccgtgcagcaaggctgtgatgagtcaagccttaaaacgctaccttcagtggcttcaaaaaggaacagcggcgcctgggcattccaaagaacccctggctgtggagtgagcaacaggtatgccagtggcttctctgggccaccaatgagttcagtctggtgaacgtgaatctgcagaggttcggcatgaatggccagatgctgtgtaaccttggcaaggaacgctttctggagctggcacctgactttgtgggtgacattctctgggaacatctggagcaaatgatcaaagaaaaccaagaaaagacagaagatcaatatgaagaaaattcacacctcacctccgttcctcattggattaacagcaatacattaggttttggcacagagcaggcgccctatggaatgcagacacagaattaccccaaaggcggcctcctggacagcatgtgtccggcctccacacccagcgtactcagctctgagcaggagtttcagatgttccccaagtctcggctcagctccgtcagcgtcacctactgctctgtcagtcaggacttcccaggcagcaacttgaatttgctcaccaacaattctgggacgcccaaagaccacgactcccctggagaacggtgcggacagcttcgagagctcagactccctcctccagtcctggaacagccagtcgtccttggctggatgtgcaacgggttccttccttcgagagctttcgaagatgactgcagccagtctctctgcctcaataagccaaccatgtctttcaaggattacatccagagaggagtganccggttgaagcaagggaaaaccagttata

SEQ ID NO: 84176 - DNA, 744 bp, Homo Sapiens
cttcggcacggaggtcccagcacatggagggatccagacaaatacacaagagatgaccacagcaggagctttactgagcacagagcgaggccgcacaccactcagctcctgcccctccacctgcccttctctccccacctgcccctgccccagcacagcagatcctcagaatccaaaaagagaacctaacttccatgttttattaatggcttataatattttatcacatcttcagaaaacactatgcagaagataactgtagagcaagacatctatttagggtgagtgagtcacagtggagatctgggagggagaccctgtaaccctttcattccaagaaaagaaaggtcgatccaaagaaggggaccccaggcctggatattgggattacatgaaaggggttctggggcatcaggggaatgggtccctctccctacatcctcccggggctgtgcttgggaggacagcagctgggggaagaaaagtcggggtccacagagatataagggggctgagaactatctgtgtcttgcttcttgctggtctgcacaaggcagctctcaaactgtggagaacatggtaatgaccagatcccgctcagccgctctcagcctttacacctagagcattatgggcagcccatcaccatcccctaccttcaaatccaaagatccgtacagcccaaagctgctccctggcctcaactcctgttggcatcaggccccaagggaagctgtgagcacg

SEQ ID NO: 84177 - DNA, 902 bp, Homo Sapiens
  misc_feature (13)..(13): n is a, c, g, or t
  misc_feature (24)..(24): n is a, c, g, or t
  misc_feature (35)..(35): n is a, c, g, or t
  misc_feature (81)..(81): n is a, c, g, or t
  misc_feature (111)..(111): n is a, c, g, or t
gatggatggcaangttctttggcnctttgggcagncttccctatctatctggcccactaggcggacggttacgatatttcngttttggcattggatgctatctgccaaacngcttttcctaatggaaaatgcagtcctgtttaaaccctttgatttacggactacttggtaccatgctggcttcattaccaattttggaccattttttaccatagtgaagacccccaaacatatcagtgaaacatgacaagatcataaagaacagtatcataatataatttagtcggctttttacaggggcaaaccaattttgaaaatatctcatttaaaactcagacccaattcactgagtaatactttttaatagcttcctcagcacactatttcccatgcattaaaatatgataaaataatctatccactgcccatcggtcttgtaaaaaaggaagtctgaatacagagcccacaacactaaaattgtttttctagctacaaagtatagcatcatcaacacagacacgatttggactccctgacaggtggattggaaaacggtgtttaaagagaagagaacattttaacataaatgtcattaagaatcccaaaggccttatttgtactacacaacttcagatgatagaagcagcaaaaggctgcagaacgtacatgggactctcaattaaatacaaggttcacataaacactctgaaatatacagtaatatgcatttttctttgtacccatttctgaaaaatgttctacattaaaagtctcacttttggctagtttctaaatgaccaatcaacccaagaatcatattttgtcaattcttactttatacattataataatcccggccgtaatggccgaattcccgggcatatgtccggtaccgtcgactg

SEQ ID NO: 84178 - DNA, 629 bp, Homo Sapiens
  misc_feature (75)..(131): n is a, c, g, or t
  misc_feature (378)..(460): n is a, c, g, or t
ctggcaagggtctgcccttgtggctggtgttgggggtgtgcagcttaagaaggctcctggccgggcgccggtgcnnnnnnnnnnnnnnnnnnnnnnnnnnnnnnnnnnnnnnnnnnnnnnnnnnnnnnnnngagtccttttctaactgagcctatttttctcttaggtacaaatggaataagtgacaaactctaatttgtagaaacattttaggccatgtataagttacactgattttagcactaagctatatttttatcacagatgggtcaccttaaaagaaaactaaggagatggaatgaatctgaaatctttctaaatacaaggtagttaacaccatactcaagcagaaattataatcctgtatttagagatacnnnnnnnnnnnnnnnnnnnnnnnnnnnnnnnnnnnnnnnnnnnnnnnnnnnnnnnnnnnnnnnnnnnnnnnnnnnnnnnnnnntcatagacagcactgtatttcagtaggaaatatgcaaggaggaggagaaacaactgtcttgctgagggctagacgtgtgctctgaagaatggtgttccattttcagaagaccacatgacacacataatttctctactcaaaaggaaagatgcgtaaagtatacacatcc

SEQ ID NO: 84179 - DNA, 909 bp, Homo Sapiens
  misc_feature (747)..(747): n is a, c, g, or t
  misc_feature (795)..(795): n is a, c, g, or t
  misc_feature (806)..(806): n is a, c, g, or t
  misc_feature (819)..(819): n is a, c, g, or t
  misc_feature (824)..(824): n is a, c, g, or t
  misc_feature (832)..(832): n is a, c, g, or t
  misc_feature (863)..(863): n is a, c, g, or t
  misc_feature (895)..(895): n is a, c, g, or t
aacagaagggtatcagagtggaggacctagattacgctacctgtgtttgaaaatattgcgctttgcctaaccttcggtggaatgtattgtttcagcatattctatgtataaaaaagtttaaagatgtcttcaaagaagactagagtctttaagtcacttatagctatattttactacaaaatttgtgtataaagatatatttaagtgttttagataaatttaagttactccatatgaaatgtttaatttcagctactgtgaattctttcgatcagtcctttgcttttttaaaaaattcttttccatcgtgttaaaaagaaaattagctattaggagatattaaaagattgatgtcttagaaggacagggttaaaaccttctgtaatatatttaaatatatatttttaagagagatgctacattgccaatgattttataaataatttaaaattaatttacaaatttatagatgcaaaccaaaagatctttttaaaagagagagagaggaaaaaaatcaccttttatttgtttgggtctcattgtcagaattattattcagatcaagaaatctgtgtcgataaaacctaatctcatattggagagtgaatgtcgttaagtatttctgaaatgtttctaaaaaatgaacatgaaaaaacataaggtattttctccctaagcttctcattacagtatttccaaattgcttcacactttaccagtttttaatacgaagtacaagctcctacnttttataacgtgtactaccaagttttccttaaaaagtattggttggantttcagccggnactcctggtatcngcagncctttggnaattccggcaggctacaccccttaatttgcngaggccattttggtggttggttgatgccgaanccgttggttaaaag

SEQ ID NO: 84180 - DNA, 967 bp, Homo Sapiens
  misc_feature (925)..(925): n is a, c, g, or t
acaagtaattggtcccatttatttagattaaaagggtaaccgagggttattgttcctggaagggctttaggtaagtttatccaaggggggtgaacaaatccattccggaaaaaggtatttaacatagctgttttaacaaatgaaaaaaagacgtaggaaaaatgtttagatgtctttttgtgatgttatataaaattgtagatgactgtggtaaatgtgtaattatgtccattatgcttcaaagttgagttttcatctttgactccaaaatgtcagagggaggccgctctaaactaaaaataacgaaaggttgccaagtattaatactagttacctccctcttttcgtagtttttgtcatgtctgtcaacttactcgattgtgtggttgcattcagaatatttgaagtttcttacgtagacagaaataataaaaatattaactaggaaaaaacagtatagcaccaagccagtatttggtatctctctctagagcgagcaagagagggagagaggaggaaaaaatacacataatacaaacatacatgcatgcacacatacatacatatgtatacacacacataatttgaaaactgattggcacttcaacgatgctgaaattgtttttaaattgaagtttctttcttccacaaagcagccgtttctattcaaatggaaattcagtaccagagaataaatgtctatgtagtcatactgaatttagatagataagggctacagcatactaaatcgacaaccaaatttgtcatgtgactaaaccgttacttcagatgaagcttacattactgttttctgcttgtgtattttctgtagagtacttttacacagattggtaaagttcaggtttcagagaactgcttttgtgcagaaaatttaggttccttttttccaccctttttggccagntaaaccttaatggaaaaagccaagaaaaaaattatcctgaaa

SEQ ID NO: 84181 - DNA, 892 bp, Homo Sapiens
  misc_feature (791)..(791): n is a, c, g, or t
  misc_feature (818)..(818): n is a, c, g, or t
  misc_feature (827)..(828): n is a, c, g, or t
  misc_feature (840)..(840): n is a, c, g, or t
  misc_feature (860)..(860): n is a, c, g, or t
  misc_feature (865)..(865): n is a, c, g, or t
gcggccgcggcggagagcaactcccgagaggtgacggaggatacccccgacggggcgcccgcgctctgccccagccccgaggcgcggtcgccggagccgcctgcctaccgcctgcaggactttgacacgctggccaccgtgggcactgggacgttcgggcgggtgcacctggtgaaggagaagacagccaagcatttcttcgccctcaaggtgatgagcattcccgacgtcatccgcctgaagcaggagcagcacgtgcacaatgagaagtctgtcctgaaggaagtcagccacccgttcctcatcaggctgttctggacgtggcatgacgagcgcttcctctacatgctcatggagtacgtgccgggcggcgagctcttcagctacctgcgcaaccgggggcgcttctccagcaccacggggctcttctactctgcagagatcatctgtgccatcgagtacctgcactccaaagagatcgtctacagggacttgaagccagagaacatcctgctggatagggatggccacattaagctcacggactttgggttcgccaagaagctggtagacaggacttggaccctctgtggaacacccgagtacctagcccccgaagtcattcagagcaagggccacggaaaggccgtggactggtgggccctcggcatcctgatattcgagatgctttcggggtttcctccgttttttgatgacaacccgtttggcatttatcagaaaattcttgcaggcaaaatagatttccccagacatttggatttccatgtaanagacctcattaagaaactgctcgtggntgacagaanncaggcgatttangaaacatgaaagaacggggncgaantgatgttgaagcatcattcggtggttc

SEQ ID NO: 84182 - DNA, 899 bp, Homo Sapiens
  misc_feature (350)..(381): n is a, c, g, or t
actcagcttcaaaccactagaggaataaggaagaggacctggaaataactcagattgtgacagtcccttctttgagacaaacacaacagaagtgcacaaagcacttaagagtttccaagggagattggatttcaaataaattagaccggaaattgtgaacccaacccaattttcaaggatttctcaatcttgtctgcaagctgaaaaacagacctagctggaaagtgaaaagtgctcactcagggtaaaaagaatggaaaccattaatgtgattagaagaggggctttgaccgtggtcttgaatctttaaacgccacatgcaggtattagagaagatataaacctgaagnnnnnnnnnnnnnnnnnnnnnnnnnnnnnnnnccactccaacatactgaaggagtttaaccttttatgtagtgggtaaatcttgtttccaatgaattatctacagtgcagtggccagaagaaagtaccactgtaagacagcgtggtttgctaaagcagcaatgaaaactggaaaactacagtagttatagcttttaaaataccctgccaacttgtccaagatctaaagacctgaagatgctagaatgccacacaatgtagctgccagcaactgaataccccatcggttcattctgcgtggcctctgctcccttctcccctccctcagagtggctgttggagtcctaaccatggctggccagcaccagcaataacttctcaggacagttctgcaaggctactgacccacctttaactgggagcagtggctactctggaagttctaaggacataataggtttgaagtgcttcttttgcagtaaaactgtattatcactcgattgtgttagcaatatcttaattaaccattgttcagcaatttctagaggccc

SEQ ID NO: 84183 - DNA, 444 bp, Homo Sapiens
gcggccgcgggcgactcctggtacccccgaggccccgcgaactcaccttcacaaagctgtcggcgtccgggaagcctggcagcaccatctctccgtcggatttggttgcgctggtcgccgacaggaccctgggctcccgggtaagctcctgaagaaagcgtctagctccaactgtgcttcctccctccagtaccctctgaactcctccaagcagacgttgtttcctgcagacatcgctggaaccattctggttaacacagagtgggaactcagtacacatttgtgaagtgaactcctggaagagctcttgtgagggaggcaccgaattatcaggcagctcaagagatagattcactctcctgaaattagagatgggatgcccttaatacaattcattccacccattaagtcttcaataaatgttcagcatatccagttaaaaaa

SEQ ID NO: 84184 - DNA, 1229 bp, Homo Sapiens
ttgtattaagggcatcccatctctaatttcaggagagtgaatctatctcttgagctgcctgataattcggtgcctccctcacaagagctcttccaggagttcacttcacaaatgtgtactgagttcccactctgtgttaaccagaatggttccagcgatgtctgcaggaaacaacgtctgcttggaggagttcagagggtactggagggaggaagcacagttggagctagacgctttcttcaggagcttacctggcgcatgcgtggtgcgcacgcgtcccgtctcctcggccgacaagctctcgcgagacgagccgtgcaggctgaaaaaatggcgccacccagtacccgggagcccaggtcctgtcggcgaccagcgcaaccaaatccgacggagagatggtgctgccaggcttcccggacgccgacagctttgtgaagtttgctcttgggtccgtggtggcagtcaccaaggcatctgggggcctaccacagtttggcgatgagtatgatttttaccgaagttttcctggcttccaagcattttgcgaaacacagggagacaggttgcttcagtgcatgagcagagtaatgcagtaccatgggtgtcgcagcaacattaaggatcgaagtaaagtgactgagctggaagacaagtttgatttactagttgatgccaatgatgtaattctggagagagtgggtattttactggatgaagcctcaggtgtaaacaagaatcaacagcctgtcctccctgccggcttgcaggtccccaaaacggtagtgtccagctggaaccgtaaggcagcagaatatggcaaaaaagcaaaatctgaaactttccggctgcttcatgcaaaaaatatcatccgacctcagctcaagtttcgagagaagattgacaattccaacacaccatttcttcctaaaatcttcatcaaacccaatgctcagaaacctctccctcaagctctctctaaggaaaggcgggaacgcccacaggatcgtcctgaggacttggacgtcccccctgcactggctgatttcatccatcagcagagaaccccagcaggttgagcaagacatgtttgcacatccttatcaatatgaactaaatcacttataccccagcagatgcagtgcttcaaaagccacaaaccccagttatacagacctatagaagagacaccatgccatttcatatccttcctggatgaacttctggta

SEQ ID NO: 84185 - DNA, 449 bp, Homo Sapiens
gtgacagttgtcctgatgtcagcaaccctaaccagtctgatgtggataatgatctggttggggactcctgtgacaccaatcaggacagtgatggagatgggcaccaggacagcacagacaactgccacaccgtcattaacagtgcccagctggacaccgataaggatggaattggtgacgagtgtgatgatgatgatgacaatgatggtatcccagaccctggtgccccctggaccagacaactgccggctggtccccaacccagcccaggaggatagcaacagcgacggagtgggagacatctatgagtctgactttgaccaggaccaggtcatcgatcggatcgacgtctgccccagagaacgcagaggttcaccctggaccgactttcaggggctttaccagacctttggtccttggattcttgaaagggggaatgcccagattcg

SEQ ID NO: 84186 - DNA, 734 bp, Homo Sapiens
  misc_feature (52)..(52): n is a, c, g, or t
  misc_feature (142)..(192): n is a, c, g, or t
  misc_feature (684)..(684): n is a, c, g, or t
accccctgaccttctctgaagatggtacaaggggaaaaacctgtcttgggcnaggttgggggggattcttctggtgagtccccagcccaccctgagtaacacaaccagataacagtcattttacacccaggtgcacatgagnnnnnnnnnnnnnnnnnnnnnnnnnnnnnnnnnnnnnnnnnnnnnnnnnnnctgggctgagctctcttccagggagggtccggggtccagtcacagtatgaggtcctctctcttctggaatatcatcccagtagtgggcagcagagagtacccaaacctccccaagccctcggcatggcagacacggcagccggctgggctacccctccccaacacactagattactatgtcaaatagaccggcaaaagggaaaggtgcacactcaggtccctgaagagcaaagaagtgggacacggccggctcaagaagttcatggttataagactcaggtattcataaaagggctagggctaagctagtagcacagaaaagccgttaaggggatcacagcagaatacacagggcagaagagaagagtgggcagcaggggaacggagtctcaaggtgaccaatagagagcacaacattctcaaatagtcctggaggggctgattccggggagtagacagcagagggccagaacatctcccaggggtccttgnggggaaggatgacttcacttagtttgaggggtgaagagccactgagctgg

SEQ ID NO: 84187 - DNA, 922 bp, Homo Sapiens
cccggaggatgctgctgagccccggcactgcctggctgcgagcacatgatggcgatacgggaaagcaaagtgtgccttctcggggacactggggttgggaaatcaagcatcgtgtgtcgatttgtccaggatcactttgaccacaacatcagccctactattggggcatcttttatgaccaaaactgtgccttgtggaaatgaacttcacaagttcctcatctgggacactgctggtcaggaacggtttcattcattggctcccatgtactatcgaggctcagctgcagctgttatcgtgtatgatattaccaagcaggattcattttataccttgaagaaatgggtcaaggagctgaaagaacatggtccagaaaacattgtaatggccatcgctggaaacaagtgcgacctctcagatattagggaggttcccctgaaggatgctaaggaatacgctgaatccataggtgccatcgtggttgagacaagtgcaaaaaatgctattaatatcgaagagctctttcaaggaatcagccgccagatcccacccttggacccccatgaaaatggaaacaatggaacaatcaaagttgagaagccaaccatgcaagccagccgccggtgctgttgacccaagggccgtggtccacggtacttgaagaagccagagcccacatcctgtgcactgctgaaggaccctacgctcggtggcctggcacctcactttgagaagagtgagcacactggctttgcatcctggaagacctgcagggggcggggcaggaaatgtacctgaaaaggattttagaaaaccctgggaaaacccaccacaccaccacaaaatggcctttagtgtatgaaatgcacatggaggggatgtagttgcatttttgctaaaaaatataataacagacaaaagg

SEQ ID NO: 84188 - DNA, 1138 bp, Homo Sapiens
  misc_feature (65)..(82): n is a, c, g, or t
  misc_feature (111)..(138): n is a, c, g, or t
cagcttcgggggaatcactttaatgctgttaacggcaagtctgtaaaaggttcaggacaaagttnnnnnnnnnnnnnnnnnnaattataaaactaacagctggtagaatcnnnnnnnnnnnnnnnnnnnnnnnnnnnncccagctacaaaatactctggggagatgcattataatttaaaatatataatattgcacaaacaaccaaaaggttaattaaactaaagaaataattacaaagagaaaaaccccatcccgtcaaaaaaaagattcagcattctctccatcccaccccctcactgaaggtttgaagtggaagtgacctcactctctcggtgtccctgacccacgatccctttcactcattggtgagcacaccagattaggtacaagaatcaccagagcagcatcgtgaagcaccaggctctccagagattcctgcagcccctcattcccccagaggtgcagctttaccagagtggagggtgagagcacaaaggctgggtctgtcttcaggaagaagagcttttgcagaagcctgatgagagtttcaagttcacccccaggatagcccttccagaagcagaagggctgaggcggagaagctaggcttaccagagttgtaagtactcggctttgatcaccgctctgtaccgctggtagctgttttgtgtcctaaactacaggggagttgaggtgggtagctggttggacaaggtatcctgccaggcaacacacagaagggcctgaagtagccccctcccttcttggggaggggaagaaacgcaagagcgaactcctgcaggtggcacagctgggctaaggacttgggtgcatctgacatgaagaagccctgggaaggcatggggacagaccagcgtgggctggaggaaaggaaggaggtgggtcagggtttggtctctggattctgaaccccaaaggagcctttccaggaatggaaaatgcctgggagggggagagtcccaagagaggcaaatttcccagagataagtgcctcttacccactgggataggaaccaaaatgtgttcactgtccctgtttagccaagggtaggtggcatggccctcccccggccgtaatggccgaattcccgggcatatgtccggtaccgtcgactg

SEQ ID NO: 84189 - DNA, 695 bp, Homo Sapiens
gccactgatctccttttttccctcgctgtattactccgtaagccacgtttaggggtatgtaaagtcccaaccctccagtctctgaagtccagacgtataagcaacacctcggactctctttaaaccagttttagttcggagttgctttccatgattaacaagcgggtccatatggaatatttgctggtagggatgcctccagaggactggccacattttgcctagataaagatgcacttagagatgaatatgatgatctctcagatttgaatgcagtacaaatggagagtgttcgagaatgggaaatgcagtttaaagaaaaatatgattatgtaggcagactcctaaaaccaggagaagaaccatcagaatatacagatgaagaagataccaaggatcacaataaacaggattgaactttgtaaacaaccaaagtcaggggccttcagaactgcaattcttactccctttcacagactgtccggagtctttgggtttgattcacctgctgcgaaaaacattcaacaaattgtgtacaagataaattaatctcactatgaagatttgaataactagacattatttatgctgccaaactcatttgttgcagttgtttgtaatgtctagtggggcttcatcatcctgaaaagaaggagacagggatttttttaaagagcaagaaagtcacaatatta

SEQ ID NO: 84190 - DNA, 1081 bp, Homo Sapiens
  misc_feature (193)..(193): n is a, c, g, or t
aagcccgagctgcaggtgtgcgtgttctgccggaacaacaaggaggcgatggcgctctacaccacccatatcctcaagggccccgacgggcgagtgctgtgtcccgtgctgcgccgctacacgtgtcccctgtgcggcgccagcggcgacaacgcgcacaccatcaagtactgcccgctctccaaagtgccgncgtcgtccgcccgcccgccgacccgcagcgccagggacggcccgcctggcaagaagctgcgctgaaggcccgggctcccggccgcccagggtcgccgccgcccctcgcaccgctaggtctgcgcaccatctcgcccccgccgtggggaggcgtgcggctcagcggtcggctcgacatgggacgtcgtcctggtggtttttgaaaagcagccgaccgtgtggagtacttccgtgctgaacgattgggactagacgctgaaatccccatttgtcttcagtttctagtttgcacatccagaacggcgaaggctgggtgtgtattccactaactgaaatatggcaacttagaggcgctgtttatttactgtatacgtcgacctattttagatgcgcatcagtatgaaattgtctcaatcttggatgtttcattttatgaatggaggcactttactaggtctagaatatttttttaaaagcctctgaactgagcttaaaactggcgattttatgaaatgtcggcaaaatgactattttattgtttgaagcgagttaatattctcagttgtctttaaaaatcagttactctaattccaggtgaagcaagccgctggtagcatcacccttatgagaagtgaaggttttgtaaactttccagtattaatttgggcgggtattccccgcttgtggcttgtttctgtcctagctggaggtgtaaaatgcacaatgtgtagcaggtagaatacagctccttatcgttctatgtaccaggtattttattactgaactagcaactagccttttccacctttaaaagttgtgccaagtcataatcatattgtgtataacttggaaatggtgctgtttaaaaaaattgtgtatttatacagta

SEQ ID NO: 84191 - DNA, 1214 bp, Homo Sapiens
aattcccggaaggattatctggcaattcattcctccaaccccatcaaaattttttcctttggaaaaatgacaactggcaactcacaaaagagttaatcaacttacgttaaaataagggagggcttctcaataatgtttccccactagaaaactaagaaattgcagtgatactcagtgccagtaattaagtggtacaatatcataaaaattcgaaacttggacgcagggtgcgtcacacccagaaaagattgttatacatttataagcttgtgctttcacactttataagcaacacaggttagtttccacttcagttttcatttttagtgagtaccgtgcatgttgcatgagggacggtcatcaaacagtctctcttacgcagacttcagtgtttcgtcagagccgaaaaagaaacagccttctctttttctctatgaagattctctccactttgggaaaacaatcttctatgcaatgaaggtcttgtggaactatgtaaacaaatcatacaactgaatagaattttagaggtcaatcaggaactagaagaaaaccatggtgtggatgagcccagcagttcccttccccacaacgtctgcctccaggtgacccttcaacagcacacaggcagcacgaacttcacactcagcaatctgctcttcctatttccccctttcaaacaggagacttatttttctctgtaataaagcaagtagtatttcaggggatctggcagagggaggctcaggaccttctggcgtaggaagttcactggggggtctggctttgtttccggcggggtcttctcttcttcttccctccgttcctcttccaagtcttcacagctgttgtcatctgaggggttggaaatccgactggcaaagacttctttgtccaaaaagacaatcgtttccattcgacggcggcgaactctccttcgtttaaacctgggggtgttctttagtccgtttccgtttttgctcacagtttcctgatgaataatctttttaatggtgccccggatggcgatgcgagccaagtcctggaggctgcgaactgccactggtggtaactggacaagtcttgattttcctgactctgaatggcagggctggatcagaggagcaaaagaaacagcaagaatctttttggtttcccaagctgaaggacctgtgcgtgttatcttagtcaactatcccagagacaaaatgagc

SEQ ID NO: 84192 - DNA, 716 bp, Homo Sapiens
tgcggtggcgtggtcgcctctggctcgcacgttgtcagtgtggacaaaggatgcaaagctgtgctgtgggcacagtactgacggggctctcagggctgggaggaccccagtgccctcctcagaagaagcacatgggctcctgcagccctgtcctggcaggtgatgtgctgggtatagcatggacctcccagagaagctcaagctatgtggcactgtagctttgccgtgaatgggatttctgaagatttgactgaggtctctcttggcctggaagaataacactgaaaaaacctgacgctgcggtcacttagcagaggctcaggttcttgccttgggaaacactactagctctgaccttccatacctcacttgggggagcacagggccccgctggatcacatcaccaacggcagtgccaaaatcagcccccacatcaaggtggtgttctctgtgctttctctcgtccttccaaagtcggttctggcctaacgcatgtcccaacaccttgggttcatttgcccggtgaactcactttaagcattggattaacggaaactcccgaactacagacccctccctggtgggttgcatgaatgtgtctcattactgctgaaatgtcctcacatctcttccactgttcttcagagctttctggctctctttccccacaaaattccgacacatttaaaaatctccgtgtggctttaaaaaatggg

SEQ ID NO: 84193 - DNA, 342 bp, Homo Sapiens
  misc_feature (183)..(191): n is a, c, g, or t
ctaaggaaagaggggggaaggaggaggaggagaaggatgagaattggctttaaaatttctttccttttttcttttcctcatttcccctgaaattcacccaagccagaccatcacaccttgcaatatataatttttgcagctttttttcttaaaaaataaataaccccccaaaatggccttttnnnnnnnnncacccagcaggtaccatgctaagacaacatcacatgcttaaaagggtccttaacagtgggagggagaggagggcagggggcttgtttgtttatctgttttgtctgtttggaactgacaagggacaaggtgagaggaagagagaaaagaacc

SEQ ID NO: 84194 - DNA, 892 bp, Homo Sapiens
ggggagacacaagcgagaggatcatggcggatggccccaggtgtaagcgcagaaagcaggcgaacccgcggcgcaataacgttacaaattataatactgtggtagaaacaaattcagattcagatgatgaagacaaactgcatattgtggaagaagaaagtgttacagatgcagctgactgtgaaggtgtaccagaggatgacctgccaacagaccagacagtgttaccagggaggagcagtgaaagagaagggaatgctaagaactgctgggaggatgacagaaaggaagggcaagaaatcctggggcctgaagctcaggcagatgaagcaggatgtacagtaaaagatgatgaatgcgagtcagatgcagaaaatgagcaaaaccatgatcctaatgttgaagagtttctacaacaacaagacactgctgtcatttttcctgaggcacctgaagaggaccagaggcagggcacaccagaagccagtggtcatgatgaaaatggaacaccagatgcattttcacaattactcacctgtccatattgtgatagaggctataaacgctttacctctctgaaagaacacattaaatatcgtcatgaaaagaatgaagataactttagttgctccctgtgcagttacacctttgcatacagaacccaacttgaacgtcacatgacatcacataaatcaggaagagatcaaaagacatgtgaccgcagtctgcggtgtaatccgtaaatttcaaatgcactgagtggtggaaaagctttcaaatacaaacatcacctaaaagagcacttaagaattcacagtggagagaagccatatggaatggcccaaactggcaagaaacgctttttcccattctgggctcctatagctcacaa

SEQ ID NO: 84195 - DNA, 1327 bp, Homo Sapiens
acagtaccatacggtctaaggtagcgaggctgggtggtgaatcggcacgagggcatggtaggaggaacgtaccaactgcggaggcggggggtgcgcgcgaagacccccgcaggctgcgcttccggaagtaacccctgacgcatcccggaatccagagcgcccactacggcctttggccaggccccctgggcgcgttccgggagctcaggcctgcggcgctgggagaagcacgctggccaacaagttgggtggtgggcacgcggcccaggggtcaggggccgccaggcggcgggcggcggggctgcggctcttacctgccgaggaggcgccggctctgcggtgcggagttgcgccggacttcccagcttggccagtggctccgcaggctgccggctccacccctcagattcatttggattcaaggttggctctcaacagtgccagctgcactgtcatcctaaagtacttctgtggaagagaacatggtggtgtcactgttgtaccagtgatgacacaaaatcccagatctacctgacgggcctgcgagggttgaagattgtgaagcaatagcctaagggactggctggcttcgagcagggcatcggaaccaggcctcctggcactggcctgggtagagccagggcgagcaccagctgacccccagtggaaccctgtgacagtcctgccagggcccaggccatcccaaccgacttccatctcatggaccctccagcggagaagccgggagaggctggcggactgcagatcacaccccagctgctgaagtcacgcacaggcgagttctccctggagtccatcctgctactgaagctgcgtggcttgggactggctgacctgggctgcctgggagagtgcctgggcctggagtggctggacctatcaggcaacgcgctcacccacctgggcccgctggcctccttgcgccagctagctgtgctcaatgtctccaacaatcggctgacgggcctggagccactggccacctgtgagaacttgcagagtctcaaatgccgcaggcaacctactggcaaccccgggccagctgcagtgtcttggctgggctaccgtgcctggagtacctgcggctccgagaccctttggcccggctcagcaacccgctctgtgccaacccctcctactgggctgcagtccgggagctgctgcctgggcctgaagtcatccaccgtgaacgtgtgattggggcgtggtaatgagttctaccaactgtgcccgagacctggaacagcttcctttgcgtccccacctccagttccagggcccccaaagaccacccggagggccccat

SEQ ID NO: 84196 - DNA, 639 bp, Homo Sapiens
  misc_feature (17)..(17): n is a, c, g, or t
  misc_feature (48)..(48): n is a, c, g, or t
catcagggagtcagtangcagagtggttaagggtataagctgggcatntggcagagagaccgattctggctgtgctctctactggttgtgggtcactgtgcacagtgctgaacctctccgtgcctcagttttctcagctgcaaaaggaaaagcctccttttgcctacatcaaagagttgttgtgtgaatcagtgatacgcctgcctggaaaggcacagtgcctgatacagggacatgcaatgaggtggaagtgcctggtttagacacagcagcagtgaactcccaaatgagtgcctaagcctgctgctgtccctgcgtgctgtgatgtgacatctctttgcccagctttccttctttctttaaaagataccaccaggccccgaaagagccatgagaaggaaggagtggaatatcactttgtgtctaagcaagcatttgaggccgacttacatcacaacaagttcctggaacatggtgaatataaggaaaatctgtatggaaccagcctggaggccattcaggctgttatggccaaaaacaaagtttgtttggtggatgtggagccagaagcactgaaacaactgaggacctcagaatttaaaccctatattatatttgtaaagcctgcaattcaggaaa

SEQ ID NO: 84197 - DNA, 464 bp, Homo Sapiens
gaaaaatgatttgtaaattgagggtcatagttcagcatcagtttcatcttctgggattattgttcaagaccagcctctaatgggaggtgaaacggtacgatggtctcaacacctttcttctgaactgtaatacatatcacaaaaagtacatccataattcagggcaattgtcagtctttttagagaaggggccagggtggaacaatcccagtgagtaaattatttctcagcgtggacttctctgcatgtcgggcttagggtcaccagccgggcagggtggaaggagcttgcctctttgagaaaccaaggagtcccagtgatctgttaccatttggttatgacttctaaagagccaaatgctattccttcaagcctgttttgcaggcagaaaataccagcagtgtcatttaggggttcctttgatgatgactactgctgttaactgacctcagcattaaaaaaaa

SEQ ID NO: 84198 - DNA, 233 bp, Homo Sapiens
aaagttcctcctcagctttagggaattaatctacttctttaattattatctccacttgaatttttcatgactgcttcaaaatcattgtttagggtttatgccatcctctccctaaaactggttccccttcccaacttatctgttacttgatattagtattccacagaccttaaaaattcacattatgattttaccgtctatctcctttattacgcactacggtgggttcaact

SEQ ID NO: 84199 - DNA, 1539 bp, Homo Sapiens
  misc_feature (1436)..(1445): n is a, c, g, or t
aaaataggctaggtacgagccctgggtgtgaattcggcacgagggcggcggctcagttgctgccatggagtcagccgggctagagcagctcctacgggagctgctgctaccggacaccgagcgcatccgtcgggccacggaacagctccagatcgttcttcgggcccccgccgctttgccggctctctgcgacctgctagcctcggcggccgacccccagatccgccagtttgcggccgtgctgacccgcagacgactgaacacccgctggcgacggctggcggcggagcaacgggagagcctcaagtccctgatcctgacggccctgcagagagaaacagagcactgtgtgagcctcagcctggcccagctctcagccaccatttttcgaaaggaaggcttggaggcctggccacagcttttgcagctgcttcagcacagtacccacagcccccacagcccagagagagagatggggcttttgctgctaagtgtggtggtgacctcccggcccgaggccttccaaccccaccaccgggagcttcttcggcttctgaatgagactcttggtgaggtgggctctcctgggctgctcttctactccctgcgcactctgaccaccatggctccctacctcagcactgaagatgtgcctctcgctcggatgttggtgcccaagctgatcatggccatgcagactctgatccccatagatgaggcaaaggcctgtgaggcccttgaggctttggatgaactgttggagtcagaggtgccggtcatcaccccctacctctctgaagtcctcacattctgcctggaggtagctagaaatgtggccctgggcaatgcgatacgcatacgtattctctgctgcctcactttcttggtcaaagtcaagagcaaggccttactgaagaatcgtctcctgccacccttgctgcacacccttttccccattgtggctgctgagcccccaccaggccagttggatcccgaggaccaggattcagaagaggaagagttggagattgagctgatgggggagactcccaagcatttcgctgtacaagttgtggacatgctggcactacacctgccccccgagaagctctgtccccagctgatgcccatgttggaagaggctttgcggagcgagagcccataccagcgcaaagctggactcctggtgctggccgggctgtctgaccgaactggcgaccacatcaggcagagactgctgcccccactgctgcaaattgggtgcaagggcctggaggaaccccctcccaagttgtacgcaatgcctgcccctggttgcccctggggccagttctccaaaaaactacagcccccctaacagccagttattccaagggaaggggatgcccccggcttcctcccctaatttgaaatccggtgccctctttggaaaccannnnnnnnnntagcccaaggccttgcttttgccctgggaaaaattttgggggaagaacctaaggggccccagggggcaaacccttaccttttcggaaccttatg

SEQ ID NO: 84200 - DNA, 2001 bp, Homo Sapiens
tgagccaccgcaccatgcagcaggcggagttctcatccgcactttccagagggggaggcaggctcaggaaggccaggccaccggcccaggaccccacactagagggcacctccaagtttgccaccctggagatgaaccccaagagagcccagaaacggccgaaggagacgggcatcatccagggcaccgttccctacctgggcacgttcctcaccgacctggtgatgctggacactgccatgaaggactatctgtatggcagactcatcaactttaagaagaggaggaaggagttcgaggtgatcgcccagatcaagctgctgcagtcggcctgcaacaactacagcatcgcgccagatgagcaatttggggcctggttccgggccgtggagcggctcagcgagactgagagctacaacctgtcgtgcgagctggagcccccatccgagtcagccagcaacaccctcaggaccaagaagaacacagccattgtcaagcgctggagcgaccgccaggcccccagcactgagctcagtaccagtggcagctcccactccaagtcctgtgaccagctcaggtgtggcccctacctcagcagcggggacatcgctgacgcgctcagcgtgcactcggccggctcctctagctcctacgtggaggagatcaacatcagcttcgtcccggagtctcctgatggccaggaaaagaagttctgggaatcagcctcacagtcatccccggagacctccggcatcagctcagcctccagcagcacctcgtcctcctcagcctccaccacgcccgtggctgccacacgcacccacaagcgctctgtctcagggctctgcaactccagctccgcgctgccgctctacaaccagcaggtgggcgactgctgtatcatccgcgtcagcctggacgtggacaatggcaacatgtacaagagcatcctggtgaccagccaagataaggctccggctgtaatccgcaaggccatggacaaacacaacctggaggaggaggagccggaggactatgagctgctgcagattctctcagatgaccggaagctgaagatccctgaaaacgccaacgtcttctatgccatgaactctactgccaactatgactttgtcctgaagaagcggaccttcaccaagggagtgaaggtcaagcacggagccagctccaccctccctcgcatgaagcagaaaggactcaagattgccaagggcatcttctgagggcatcctcccagggtctggctggctggtagccaagcacttatggaccagagtggcccaggccagctgggcgccttcctcccacctgccagcccagggtaccccagactccagtttcatcctgaacctctcccgctgctgggattgacgcctgccattggtcaggctgacctggcctcccgtggaccactcgctgccttaggtgccttctgctctctggaaccagaggactagctgacttttgccaaggagcagtgccaacgggcatggcatggtgccctgcctgcccccgggcgccacctctgtacacttccctgacaccttcccaggtgtgggtcactgccacctgtgcccatgggcaccccagagcacccactgtgaccactgcagttctctcatgcccacaggcactggcctgtgaccttcgcaggggtcccggcccctcccaccactctagcctttctcaggctgcaccaaagattccatcatcagggccaactgagagtgagggagtctcacccaccgcttaccccagccctcccctgggagcagagagagaaaccctcttcatggaccagactctgcacccggtgagtgaggacagtcccagctgagtcccatcgatgttgaatctcatgccactgcaagtgccattcaccactgcgtcctgggctttacgagaccatgcaagacgggggttagtgaggaaggaggatttggggtgggggtgggctgattgaatatttgtataaaaagc

SEQ ID NO: 84201 - DNA, 1107 bp, Homo Sapiens
  misc_feature (1087)..(1087): n is a, c, g, or t
ggtggatcaatatattacatagatatgcagaagttcgcccttgcgaatgaaagataatgatcttcttgtaactgaactgtatcatgatccttcaaatgatgctattactgctctgagtgtttacctcacacccaaaacaagtggcagtggtaactggatcgagatcgcctatggtacgagctctggagcagtacgagtgattgtacaacacccagagacagttgggtcaggtcctcagctttttcagactttcacagttcaccgaagtcccgtaacaaaaatcatgctatcagagaagcatcttgtatcagtctgtgcagataataatcatgtccggacgtggacagtaacacgattcagaggaatggatctctactcagccaggttctactcctttagcgtcattcaagatactatccctggaggagacagaaagtcatggtagctattcctctggaaatgacataggaccttttggagagcgagacgatcaacaggtgtttatccagaaagttgttcccatcaccaacaaactatttgtaagactctcatcgactggaaaaagaatatgtgagatccaggctgttgactgtactacaatatcctcatttacagtgagggaatgtgagggatccagtaggatgggctcaagaccaaggcgctacttgttcacaggccatacaaatggcagtattcaaatgtgggatctgaccactgctatggatatggttaacaaaagtgaagataaggatgtaagtggtccaacccgaagaagagctactcaaattactcgatcaatgtgatttgagcacatctcgctgtgctactcctaacatcagtccagcaacttccgtagttcagcatagccacttacgagaatcaaattctagccttcagcttcagcaccatgataccacccatgaagcagctacttacggttccatgaggccttacagagaaagtcctttattagcaagggcaagaaggactgagagctttcacagttatagggacttccagactattaatttgaacagaaatgtagaaagagctgtccctgaaaatggtaacttgggtccaatacaanctgaagtgaaaggggcaaca

SEQ ID NO: 84202 - DNA, 3166 bp, Homo Sapiens
aggcaattggtgacatgggccgtggcggacaactgggtaccgacaggccggtcacgtgggaaaggaactgatccccatgctggcccactgatctggcccaccaccccgccataactccccgattgacccatgctctccggtccggctctccgcccacacatctcgagcacgcaggccacgcggggggcacatcaaggtgacacaacaaaagtttaaaattaagggggttggggaagataagataaggttttatatttacagactgttccatgtgtttgctgctggggaccccaagcacacaggttggggcctgtgccctaggcagggtccatatggcattaaagggagagcagcaaggggctgttggctacaggtgcagggacatccatggagactatgtacaaaggaggggatgcccccagctcagcccccagtatgtggcatgaactggctcatgggggtggtggcgcatgtacggagagctgccccacttggagtgtccccacctgcccctttgctgagggtgccctagaaggcgaggggctgggagtgatgccttgcaggcccctgctcactaggaggggggagatgctatatacagaggggaggtgcatggaatgtgggggacagaagctcctgcccccccacctccccatccttaggggctcgacaggggtgggcaccagggcacctggctgccagggagtgtggcagcactaagggcacttgtgccagtggctctgttggggtggggattaatgtctggagtggcccagctcctatggccagtgaggtcctagggtgcaggtgagggtgtggggagagaggtcactgcttcttctctcgggtggtgatggtgaccagctgcttggcagccttggcgatgtcataggcgcactggatcacctgctgagtcagcagctggaagtccactggggcgccgggctctgggggcactgtcttccggcactcactctgcagccggtaggcgctggcgttgagcagccgcagtgagctccgcactggctccagggctggcctctttgggaagagggaggccatctcggtcacagccaaatggatcttctctgagcagggcacgaagctgtcatgcttgaactcctgggctgcccgcaacagttcctgaatgttcttggtgacctgctctgtcttcaagatgacatcctctgtgctgggaagcccaggatctaggtctccatccaggctttccagctctgggtggaagtcttcctctttgcccagctctagaaacctcttcccttccagccccagcagtgggtccccacttttgcgtgttctcatagtcactgtcggctccactgcccgtggcgggaaagcttgctcgtgtgggcggcttccctcctgggagcaggacagcagcggggaggagggagtgaagggcacagctgaggcagacacccctttccggatccggtaaaggccagcagggacgtgcactgaatagatggcgtcgtcctctagctcagtgctgtggaaaggctgcagccgcgtagtgagctcgtccccaggggggccccaaaagggcttcagggcagagcccaggttcatacatggaaaaggcctggcgatccctgcggtgtgtgctcccgcctggcgccatgggtgtgtgttccgcccgttcactggggagtggaggtgtgggcaccggccctggaggctgccggagctgcaggttctccgcctgcagcttgtggatctctcgctgcagcctccggagctcgtcgctcaggctactgttgaccttcatgagctgctgcacctttgcctccgatgtagccagggccttcttcagctccaggtactcctgcagcgtcacagccccgtcagacaagtccgaggagtccatgctccgggcccggttgctccgagtggcgccggtgctgcgcaggggctcctggtctgtgtcctcgtcagaggccacgctgtcgtagtcgtgttggtcgtcgaggtcactctggctccgcagagacagctcgaggttgtctgtggggctgctcaggctcttgccctgctgtctccgcttggcctcactgagaatgtcgatgatcaaggtggcaaactctcgggcattaaagcgggccagcttttgtcgcccctgattccgcgtggctgagtattccgggttaacaggcaggaagggcacagcactgcgctctgtcaccagagtgctgtggttttgggtagccagccacactgcatcattttctcttcgatccacctcgtcatacacgtccatggcgagttcctcaaaaagccggttgctgagcgcctgcagcttcttcttagcagctttggccaattcggataagtcaaggctctgagacatgcacttttgccgagatctgtcagccatctgtgggatgatgtaatgcccattcttgtgatccggcttgcgtccacagaggtagaaggccagccggtcagtgagctcatattggcactcaaccagcctttccgccagctcatggtgccccgcctgcctggcatagtcaatgggtgtgcggccattaacatcaggggagccagggtcagccccatacactacaagcagctcggcctgcagtgtctgtcctgccttggcagccacgtgcagaggtgtggtgcccttctctgggtggaagaagttggcctgggcacccagggagagcaggcgcagacatgtctccaggttgcctgtccgcacgctcgagtgtagttgcttgctgaggtctttggcggtgactccatcatcgtcccggcagggaagcttgtgcacaaatgccagcatctggtacttggccctgatgaactctgacttgatggggtggactttgtcttgggggttggctttacgccggccgctctgcacttgtgcggggtccagcagggagtgctcccagatggagttggccccgttgctggcaagcgtgtgcaccatctgcagcagcgtgggaggccaggcgctgtggcgaaggtgcttgacaatggagatgtggcgtcccaggctccggtgcacgctgcagcactcgtcacacaccagcacacccctgctgatggatgcccagccagggtccggggcgctgcagtccgcacacacctccgctcgcggcccctttcgggacatcctcagcggcgacgcggccgc

SEQ ID NO: 84203 - DNA, 1047 bp, Homo Sapiens
  misc_feature (206)..(206): n is a, c, g, or t
tcctcttctcccattgttatctcatgggttggcccttccgaggtcccccttggagtcccactgcccttctaagctccttagagggaaggctgggattgatcctgccagccctggctcactagagggggagatgctatatacagagggagtgcatggaatgtggggggacagaagctccttgcccccccacctccccatccttaggngctcgacaggggtgggcaccagggcacctggctgccagggagtgtggcagcactaagggcacttgtgccagtggctctgttggggtggggattaatgtctggagtggcccagctcctatggccagtgaggtcctagggtgcaggtgagggtgtggggagagaggtcactgcttcttctctcgggtggtgatggtgaccagctgcttggcagccttggcgatgtcataggcgcactggatcacctgctgagtcagcagctggaagtccactggggcgccgggctctgggggcactgtcttccggcactcactctgcagccggtaggcgctggcgttgagcagccgcagtgagctccgcactggctccagggctggcctctttgggaagagggaggccatctcggtcacagccaaatggatcttctctgagcagggcacgaagctgtcatgcttgaactcctgggctgcccgcaacagttcctgaatgttcttggtgacctgctctgtcttcaagatgacatcctctgtgctgggaagcccaggatctaggtctccatccaggctttccagctctgggtggaagtcttcctctttgcccagctctagaaacctcttcccttccagccccagcagtgggtccccactttgcgtgttctcatagtcactgtcggctccactgccgtggcgggaaagcttgctcgtgtggcggcttccctcctgggagcaggacagcagcggggaggagggagtgaagggcacagctgaggcagacacccctttccggatccgtaaacgccagcaggacgcctcgtgccgatcaccgcgcggcctcgtacctctag

SEQ ID NO: 84204 - DNA, 694 bp, Homo Sapiens
  misc_feature (22)..(22): n is a, c, g, or t
  misc_feature (340)..(348): n is a, c, g, or t
  misc_feature (381)..(425): n is a, c, g, or t
taaataatatcaaggctcaatntacacctcactttagttatttaggaaagaaaaaaaataacctttatactagcatttcacactttcttactgactttagaacgtcttctgatttaggtggcaatcacttgcctagttgtacttagggcaatattaataaaataatgaatgtttctgcaagaaataatatataaagattaatttcctctttaattttaccaatcagaatattaaaaatactacatcattgttttagatgaaattccccatttaaatatattatacataagccaaattttagaaatagctccttgtatcactgtacaattttgggcctttnnnnnnnnngctcaattttaagtttgaatataatgtgcagtnnnnnnnnnnnnnnnnnnnnnnnnnnnnnnnnnnnnnnnnnnnnntaagtattatccttattgtgaactttattatgcttctgaaatttctccatcatttcaaatttacttcaataaaaatttccctatattttgtgaattgcattttcaaatcagaagtaatgttacaaatttctgtctataataaaaaacaaaatattcacgctttattaataatcctaattagaaaaggatgcaattaagagctggcatagctaacataagcataagaaaggtaaacttttcttgaattaaaaaaaggaaatactttaatg

SEQ ID NO: 84205 - DNA, 469 bp, Homo Sapiens
  misc_feature (352)..(352): n is a, c, g, or t
  misc_feature (359)..(359): n is a, c, g, or t
  misc_feature (406)..(406): n is a, c, g, or t
  misc_feature (454)..(454): n is a, c, g, or t
gaattgcttatctacatacaatgcctggaaggaaataaatgtaatggcccgtagcagttggccttcaggtatcaagtttaagtccctttaagcagaacagcaaattgagcacagaatgaactggtttcatggtagcgtactgcaattagatgcaagaatagggaaagcagggtgcttcaattggtgacacaattagtatagcactgggggacttctctttccacttcttcaactccgcctgcattccgctggctgaagagttgatgacatccctgaaaaatcttccctctcttgtttctctgatgccacctctgtgttctcccgcctcaccgggccacacttccctttaccntcccaanacttttaactcctgagttgtccccaaacttggtctccatcaacctancccctggttggcccagcttcccccaggcctggtttccccttcttgaanacggggaactcttcc

SEQ ID NO: 84206 - DNA, 604 bp, Homo Sapiens
gggccacggggactgaagatggcgccgcgaggtaaacggttgtcctccaccccgctggaaatcctgttctttctgaacgggtggtataatgctaccctatttcctgctggaacttttcatatttctgtaataaaggtgtcctgctaccatatccaacagctaaaccctagtactggatgtgggtgatgcctcctcctttatcttgggaattgaagtaattccccctgttttttggtacaaagggaaacctctgccagcgaaagatgccactcagtattagcgtggccttgaccttcccatctgccatgatggcctcctattacctgctgctgcagacctacgtactccgcctggaagccatcatgaatgggcatcttgctccttcttctggtggctcagaagcttttactttgaaggtgctcaccttgggctggctttctccaagtatggacacgaatttgaaagtacagaatttcagccagcagcccatcaggctgaccccgcacatattgcttctggtactttagccacaccagtgagaattggtggggcaagttgtcctgagagagtctgtttagcttgtcttcagcacacacatttgtgc

SEQ ID NO: 84207 - DNA, 969 bp, Homo Sapiens
  misc_feature (683)..(728): n is a, c, g, or t
cacagatacctgactggtgtggggtatgcctggtactgtaataggagcctaagacagcacacctaccttttcaggatttagaacctaaaattagaaagagaatcccagctgtcattgttccttccccagaagctaagagccagcctcagagcctacccaggagctgtgaaggggcaagggtcaaactgactcactctaccaggaggagaccaggttgcagtggcgtaaggccccctggtttctctggccacactccaaggcaccacagtgctgccagtgaaggacagctgacacccagccagggaaaccattctagtctttacttctgttgggcttccagggcctgtcctggacttgtcagcatccagactgccatgtcagctatcccagtagctgagctccaaggactcaggcagagggactcagggatggggactgccaggggcagttggcaaaagtccaagtagagattacacccagcacaccattccttccaggagcagtaggtgggaggtttgacccagagaagccaatccttgcattccaggagtggcctgtgcctcccacctcttccttcccactgccaaaggcctgtgttgagaaagatgtcatgcaaaggacgacggtggccaactaaagcaagtcttccttccaccctgtggacctgcacttgagccacaaannnnnnnnnnnnnnnnnnnnnnnnnnnnnnnnnnnnnnnnnnnnnngctcatgaggctgatcctgtgggatagtggcctccacgtgtatcattacagctcggcctgtgggccctgttcctttctagcctcccctgtgacctttccttagctcagatctgtgactcttttggccccaggcctgtccctccagtgtcctcctgtcttggaccagaaccctggggtcagacccgtctcgtgtagctgccatcaccctgcgggctcctccggagaattccccgggttccag

SEQ ID NO: 84208 - DNA, 377 bp, Homo Sapiens
  misc_feature (106)..(106): n is a, c, g, or t
  misc_feature (246)..(246): n is a, c, g, or t
  misc_feature (301)..(301): n is a, c, g, or t
tcttgggctcctcctcactacacttccccccaaatagaggcttggtgcgtgtggctggtgggaaaccctgtctgtgaacccatggcacctcaggcccccaggttangagtcccctgaggggactgtagggcccatggctgaggggcacctggagagagtggcccaccagccactgcctccatctgtctcactctcccaccagagccctgcccagggttccctccctggcctgggccaccagcccantggtccatgaggtgccctcagagactggtgaccagctgcatctgcccgtccccantcgggccctggcccctcaaggcctggggctgccaggtagccctcgtggctaggacgccgcacctggtagtagccct

SEQ ID NO: 84209 - DNA, 537 bp, Homo Sapiens
  misc_feature (437)..(437): n is a, c, g, or t
  misc_feature (483)..(483): n is a, c, g, or t
  misc_feature (494)..(494): n is a, c, g, or t
  misc_feature (499)..(499): n is a, c, g, or t
aaaaatcctagaactgaagagtcttcctttggtatatgtgcaggaagatagttgtatatctctgttccacaaagaacgcaacacagtctctaaactttttggtgtaagcttctagccttgggtattttccagtggggaatgtttaaaaatatttgaccaaaccaaagactttttgcctcttatagcaagcataaagactgtactgcctggcttttgtattccttcagacattattgtaaatgtgcaactcctcttccctcttgtaaacctttataagatgtctgccaccccaagcttttgtcttgatagttttaaattgatgccatgaaatttcttagtttccgttccctttctctagttatctctttccttatgtcacctcatttcccatcatcttgtcactaatgatgaatgatcattacaaattggtatgctgncaaatttggataaatgtgccaaacaaaggaggatatcagtgccagncaattttgtgnatggnaagttatgatacatatgcttgagaatagatgtagagat

SEQ ID NO: 84210 - DNA, 1199 bp, Homo Sapiens
  misc_feature (966)..(1039): n is a, c, g, or t
caggagagggacaatggaagctgccccgtccaggttcatgttcctcttatttctcctcacgtgtgagctggctgcagaagttgctgcagaagttgagaaatcctcagatggtcctggtgctgcccaggaacccacgtggctcacagatgtcccagctgccatggaattcattgctgccactgaggtggctgtcataggcttcttccaggatttagaaataccagcagtgcccatactccatagcatggtgcaaaaattcccaggcgtgtcatttgggatcagcactgattctgaggttctgacacactacaacatcactgggaacaccatctgcctctttcgcctggtagacaatgaacaactgaatttagaggacgaagacattgaaagcattgatgccaccaaattgagccgtttcattgagatcaacagcctccacatggtgacagagtacaaccctgtgactgtgattgggttattcaacagcgtaattcagattcatctcctcctgataatgaacaaggcctccccagagtatgaagagaacatgcacagataccagaaggcagccaagctcttccaggggaagattctctttattctggtggacagtggtatgaaagaaaatgggaaggtgatatcatttttcaaactaaaggagtctcaactgccagctttggcaatttaccagactctagatgacgagtgggatacactgcccacagcagaagtttccgtagaacatgtgcaaaacttttgtgatggattcctaagtggaaaattgttgaaagaacacatcgtgaatcagaaggaaagactccaaaggtggaactctgacttctccttggaaactacatatggccaagtatctactttatgcaaagtaaaaaggcacaactcaaatctcagagacactaaacaaacaggatcacttaggcctgccaaaccacaacacaacacgcaccnnnnnnnnnnnnnnnnnnnnnnnnnnnnnnnnnnnnnnnnnnnnnnnnnnnnnnnnnnnnnnnnnnnnnnnnnnggaggcttcaattccctgtcttaagaatcctcggtactcttacttccttcttttaaaatttcatattcctcactcccctattccaaatttcccttctaatcgggcattcattactctgtaggcccatcttgtacacacctagaatcagcgttaaaaagat

SEQ ID NO: 84211 - DNA, 1545 bp, Homo Sapiens
  misc_feature (21)..(21): n is a, c, g, or t
  misc_feature (130)..(130): n is a, c, g, or t
  misc_feature (154)..(154): n is a, c, g, or t
  misc_feature (1170)..(1170): n is a, c, g, or t
  misc_feature (1494)..(1494): n is a, c, g, or t
acagtgttaagctgtgaagtntctgcgcccggaaagcctcccgggaagttggtggaccaaggacgtgcagcctgcccggttaccaacaatcgccttttgggccccgtggtggatggcgacgtggtccccngatgaccctgagatcctcatgcangcatgggagaattcctcaactacgacatgcttcatcgggtgtcaaccagggagagggcctcaagttcgtggaggactctgcagagagcgaggacggtgtgtctgccagcgcctttgacttcactgtctccaactttgtggacaacctgtatggctacccggaaggcaaggatgtgcttcgggagaccatcaagtttatgtacacagactgggccgaccgggacaatggcgaaatgcgccgcaaaaccctgctggcgctctttactgaccaccaatgggtggcaccagctgtggccactgccaagctgcacgccgactaccagtctcccgtctacttttacaccttctaccaccactgccaggcggagggccggcctgagtgggcagatgcggcgcacggggatgaactgccctatgtctttggcgtgcccatggtgggtgccaccgacctcttcccctgtaacttccccaagaatgacgtcatgctcagcgccccgcgcatgacctactggaacaacttcgccaacactggggaccccaaccagccggtgccgcaggataccaagttccttccttaccccagccccaatcccctccccacgcaagctggcgtcgcacccacattttccaccagcagacggagaaaagaagcaacacctggcgcccttatggccccttgcaaggccacctccccctggccgtgcccaccaacactaaccccgccgcccccaccccacaaggggatgccgccccactttccttgaggactttcgggggcggacttttctcgtagagtaacacactccatacctccgccatgcccctcgaaagagcgcgcgcgccgtggctcaaacccaatggcgtgagagagagatacgcatggccgcgaaggtggagaacgcagagaaaccgatgtcgcacggataaatggataggagacttcactcgggtctctcactttaccacccccccaaacacacgcacgcccaatacaaggcggggcccacagaaccaggngttgtgtctcccctctgctgcacttgcccccctcctctcccccggacacttgtacacgctttacattccacccccggggccggtcagaccgacgcgcgccgcctcaattgcactcaccacaccgtggagggtagaacactaattttgggtaccccatagatctccaatatgtcctgtctcgtcgctgcactacgaagggaacgcgaaaaaggcgtacactaaaacactcacacgcccgcccgccccgcgacgcccgatccatccctcactaacaatcacaccgtcccctctctactctactacctcctcgattacccccgcctngtccgcgcccacccgacagcctatcacgccacgcacgctcctctctatcat

SEQ ID NO: 84212 - DNA, 762 bp, Homo Sapiens
  misc_feature (73)..(73): n is a, c, g, or t
caatgcagaaaatccaatgtatcattccatagcagtatctttacttgtcaatcctaatctaaaatgtattgancaaaaatcttttaataaattccaatatcttatttttaaccactactgctctgcagcagtaattgaagttccaacctgagaactaagaatgtgataataaaatgccaagggctctatcaatcttgaactgaagacacttaagcttctttcctactggcatcaagtgcagtacattagagaaatgtgagcaatcccagaaagtaccctgagatcaacagtaccacctgccacaattggaaacccttaactgtaaaatctctgttctaattattttataaaagttctattgcacatttaatattgttaaaatatttgcaaacttgtaggaattctctgtataaagggctttaaacttattcagctaaatgcttcctcatcaccagcaaaatgttcctaatgaaagaaaagcatatccatgaatgtctaagcctgaagaataaatgatttcttatggacacagccaattacaatgcaagaattaaaagttcacaatttgacggaaaaaattcttgagcaaatgtaattcctcagcagtctgcttcagggagatgagcaggtttcctttagatgttaatacatagtacattatgtttaagggggaaaaaagatcaatgcaaacctaagtcatcaagttcaatcttttttttaaaatgtagctacaacaaataagcaaatataaagcttaatctc

SEQ ID NO: 84213 - DNA, 520 bp, Homo Sapiens
ggtcctttcacagggcggctggtgtcccttaggtgcctcaggaaccctgaagctgggctgagcatgatgctgctgccagaacccctgcagagggcctggtttcaggagactcagagtcctctgtgaaaaagcccttggagagcgccccagcaggctgcacttggctcctgtgaggaaggggctcaggggtctgggcccctccgcctgggccgggctgggagccaggcgggcggctgggctgcagcaatggaccgtgagctggcccagcccgcgtccgtgctgagcctgcctgtcgtctgtggccatgcccatcatgggctcctcggtgtacatcacggtggagctggccattgctgtgctggccatcctgggcaatgtgctggtgtgctgggccgtgtggcttcaacagcaacctgcagaacgtcaccaactactttgtggtgtcactggcggcggccgacatcgcagttgggtgtgctcgccatcccctttgccatcaccatcagcaacgggttctgcg

SEQ ID NO: 84214 - DNA, 514 bp, Homo Sapiens
gggcctcttaggggccagagcgggcaggaggttggataacaaaaatagagcatcagcaaccctttccaggtagaaattccagcgggagttcaggttcccaagcaatttcacgtacatggctggtaagtgactgatctttccccccgcttggtagcctcacagatgagtcttggatgcattcacagtcatttctggtctgtgcaccaaaggatgcattcagtgacctatgaaaaaccctactgaagggtccagagaccctggtgctcaccttagcctttgtctttgagcaaataacttaccttcttccttcttatgcctgggttttctcacacttaaatctgtactactgtttgccaatgtctgatgtgtgtatccctggttcacaagaagattttagatggtattcaaattaatattttctatttagttatatatttaatgtataatataaaaatatgattagcatattgacctgtagtttgatagatgttctgtctaggataaagctaactgt

SEQ ID NO: 84215 - DNA, 777 bp, Homo Sapiens
  misc_feature (225)..(539): n is a, c, g, or t
  misc_feature (666)..(717): n is a, c, g, or t
aataaaagaactgagaaagactataccatgaaagtgcataatagtgaagaaaaaaatgaagttcccttgccgttagccaggtgcatgcaaatctttttatctgaatgtagaaatgcaaaaagtaccaggagaacatttctgaaagtagtcaagtatgttttaacatttatctccttataatatgcaaactgccaaactggagttatgtttttagttggtaattgnnnnnnnnnnnnnnnnnnnnnnnnnnnnnnnnnnnnnnnnnnnnnnnnnnnnnnnnnnnnnnnnnnnnnnnnnnnnnnnnnnnnnnnnnnnnnnnnnnnnnnnnnnnnnnnnnnnnnnnnnnnnnnnnnnnnnnnnnnnnnnnnnnnnnnnnnnnnnnnnnnnnnnnnnnnnnnnnnnnnnnnnnnnnnnnnnnnnnnnnnnnnnnnnnnnnnnnnnnnnnnnnnnnnnnnnnnnnnnnnnnnnnnnnnnnnnnnnnnnnnnnnnnnnnnnnnnnnnnnnnnnnnnnnnnnnnnnnnnnnnnnnnnnnnnnnnnnggtatctcttaaatctcattctagtttgctagaatcaagattactaaggagttgaaacaaaggtagaagaatccctactataatatcccaaattatgttttcaaagctaactcattcctttggttcnnnnnnnnnnnnnnnnnnnnnnnnnnnnnnnnnnnnnnnnnnnnnnnnnnnngaccgcgtatgcggccgcaagcttattccctttagttgagggttaattttagcttggcac

SEQ ID NO: 84216 - DNA, 481 bp, Homo Sapiens
  misc_feature (289)..(289): n is a, c, g, or t
  misc_feature (314)..(314): n is a, c, g, or t
  misc_feature (353)..(353): n is a, c, g, or t
  misc_feature (372)..(372): n is a, c, g, or t
  misc_feature (414)..(414): n is a, c, g, or t
  misc_feature (453)..(453): n is a, c, g, or t
tccttccatccaattcctggcttccccgctgccaactctgctctctatgtctccagtttaaaggtgccccctggaaaaaatgtaacaattccctcacctgtgactggtacctgacagccaccacaccggggcagcaatggctaacggttgacaaagacaatttctttctctctccaaaaccaaacagccttcatcaactccctagccaagactccctatcaggcccttacaggtgccgctctggctggcagttacccaatttgggaaaacgaaaataccctatcatggntacctaccttcacctacaactttgntgtcacccccagttctcttttgtgtgatacaactgatanttggctaccagcaactggnaaggaactgcacctggtcttcaggtccaacaataacatctancccctaccaaactatctaattctgagaaccttatccttntcaccagaagaataatgggcttaattta

SEQ ID NO: 84217 - DNA, 618 bp, Homo Sapiens
  misc_feature (177)..(187): n is a, c, g, or t
gttttaactcaatacatatttattgagtgcctactgtgtgccaggtgcaccacactagatgcaacggatactaacagtaaataagatacggtccctgccctcagagcttacatttcaacagtttaaagtgcatctcaggtatttcagataacagaagtaattctaccactctcaaannnnnnnnnnnaatgcaagacacaacacaatcataggccagagttataaaatacaatgttagaaagaaacgtttggtatcattcgtccagatcccattttacagaaaagaaactacaggagtggccatttgcacctatgttctgatttcaagtttggtgttttacccattgccaggcctctcataaaacaatattcagatttgccatgtatatatcaatatccaaacgctggtagtatacctgtgcagttgtctcctgctagacaaggaccatataatttatagcttatttaagtgtccactttctttatcccagtcctattctttgtgataaaccagagggatcaggcgtaaccaagtgctgaactttggggcaacttcatgccctaggattcaagatggccagcggctacatgccgggtctgcctgccaggaccttactt

SEQ ID NO: 84218 - DNA, 1026 bp, Homo Sapiens
  misc_feature (941)..(950): n is a, c, g, or t
gtacggctaggtacgaggctgggtttaaattcggcacgagggcgtgacgtgggggtaccgagatctgcgggagcagcggtcccggcttcagttctagcctacccggcagcctggacgggagcaaggcgagaggtgctgccgcctcccgtcgcccctgcgctcagaggtcccgaaccagcccagccgctgcctcttgccgctccgcctttggagtgaggagggcgcagcccgcgtcagaacttagagggccaggcagggtcgcgcgcatggcctgggcgggctcgcggcgggtcccagctgggacgcgcgcggcagccgagcgctgctgccggctctcgctcagcccgggcgcgcaaccggccccgcccccaggccctctgccaccgccgcgaccaatgaggtttctgacctcctgcagcctcctcttgcctcgggctgcccagatcttggcggctgaggctggcttaccttcgagccgttccttcatgggatttgctgctcccttcaccaacaagcgaaaggcttactcggagcgtagaatcatggggtactcaatgcaggagatgtatgaggtggtgtccaacgtccaggagtatcgtgagtttgtgccctggtgtaagaagtctctggtggtatccagccgtaagggtcatttgaaagcccagctggaggttggctttccacctgtcatggaacgttacacctctgcagtttccatggtcaaacctcacatggtcaaggctgtttgtactgatggcaagctcttcaaccacttagagactatttggcgattcagccctggtattcctgcctatcctcgaacctgcactgtggacttttcgatttcctttgaatttcgttctctgctgcactcccagctggccaccatggttttttgatgaggttgtcaaaacaaatgtgcctgcctttgacgcccgggnnnnnnnnnnagttgggccaaaaccaacattcgccggtgaactgaagatcctggaggggcaccacacatgttagggaggggaatgg

SEQ ID NO: 84219 - DNA, 502 bp, Homo Sapiens
  misc_feature (22)..(22): n is a, c, g, or t
  misc_feature (43)..(43): n is a, c, g, or t
  misc_feature (65)..(65): n is a, c, g, or t
  misc_feature (75)..(75): n is a, c, g, or t
  misc_feature (344)..(344): n is a, c, g, or t
cacaacatcggacagaaccttntgaaagctcattccttccttntgttcctggggaccaggacagnacgcccctgnatttctacttctcagggccgaaacccgacctctgaccctccacccactccggtgacctgcacgctaagttgggtggtctctgactaaaacagcttaagccaagaattgggactcgactcccaggagacctagggagaattcccttcaggctgtttcaggcaggaaggaccagggaggctcactccccaggcagctgacaggcatggagggaagagccaaggacaggagaggcttccaaggctccaagagcagcagaggaaggggcctancacgtggtggccatggacctggctcggctcatgaggaagacgtgctgccactgccacctcaccctgtgcggaggagactgtgcgaagtcttcacagccagcagcagcctcgatacgccccgagtgcctttcatatgtatatatgagagagagatatac

SEQ ID NO: 84220 - DNA, 1122 bp, Homo Sapiens
cccaagcccatggagccagcatgcccccggcccccacagctttccgttcctctggagcgggggcccccggttatcgccccctgccgaaatctagtgcctgacttgggtatgatggttctctctcagcgtcaggtcctcatgccggcctggctccttcctcgccccattccggtctccttccaagccctcaccgtgccatctgaagaactcatgtccagtgtcctaaattgtctcatccgtccctgctccccgtgcctctgcaccccaagggaggaattaggggttgtctcccccctcccaatttccacttcacataatggaacagcttttggccttttccttcttgaaggtagaagagatgagttcagagcgactggggaggtggagcagtcgtttggagaggcttcggacagggctcttctggggcagtgggctaggcttgttcagacacagcatggatgccgtccgaaagatgctgtggatgctcttttctgaggtgaaagctgagccttccaggtagatttctgcacccagctgctttgctattgcacaaccctgctcataggagatgggcgcctgcttctggtgggacagctccatcagagtactcaggtctgttcgcaggtctgtcttgcagccaatgagcaaaacgcgggtgctgggacaataatctaggatttctgtcctccacttcttgagtgcgctgtccactgtctctggacggctgatgtcaaaacatagtaatactgcatccgagtcgctgtagcagagtggacggacattatcgtagtagggagatcctgaggtatcccagagactaagctccaccctctgttcctctgtctccaaacaggctgtgtaattttcgaacacggtgggcacataggtctctggatagcaatccttcgctaacacttgcaacatcgcggtcttcccacactgcacgtccccgaccagaacgagcttacatctggccacgactggctggggggcccgtctctccttcatggttgcagtgtccgcgggacttgaacttcgattcagaagggagggttgcgccaggtgcgtctcagcacgccaatcaagccagattccctatcccgggaattccggaccggacca

SEQ ID NO: 84221 - DNA, 504 bp, Homo Sapiens
caccaggcgcacttctggggcagtgggctaggcttgttcagacacagcatggatgccgtccgaaagatgctgtgggatgctcttttctgaggtgaaagctgagccttccaggtagatttctgcacccagctgctttgctattgcacaaccctgctcataggagatgggcgcctgcttctggtgggacagctccatcagagtactcaggtctgttcgcaggtctgtcttgcagccaatgagcaaaacgcgggtgctgggacaataatctaggatttctgtcctccacttcttgagtgcgctgtccactgtctctggacggctgatgtcaaaacatagtaatactgcatccgagtcgctgtagcagagtggacggacattatcgtagtagggagatcctggtgtaggccagaaagagctgatggtgagccatggtgttttccttcccctataggcctaagccctaaagtcctgcggaataccatctctcaagaagtgcccctagtc

SEQ ID NO: 84222 - DNA, 642 bp, Homo Sapiens
agtagccaagcctccactgccaattgttgaaggcagtttcagatcgccaccttttgaggtacatttctttaagcacaagagaagtagaaatggcctttgccttgtctccagtggtttgtccctctggtgcctcagcagataccagagcttattcttatgaccatttggaagtagtcctcaaagtaaagatcaagaaaaaattggattctttttccattttctcataatagtagcctagtcaacacaagactcccataaaatatgactcactattggggagccatactattttataagcttacttcctgctgacaaaactagctttcctcaaggaaatataaaggaggggaaagtcacatagtgttaggaaaacattcctgtgttttgaatacgatgaatccataggatagagaaaaatctgcttgttctattctgagagttctctgagatatcccttcactctgcttggcatttggccattgatattcaacaggtcactgaccaagcttttctaaatttttcagagagagttacttaccaataaggtctgttcttaaacctacctagttgattttcatatctttccataaagtgtcatgattctatcatagaccctgacttaacattgtaaggactatgagt

SEQ ID NO: 84223 - DNA, 591 bp, Homo Sapiens
  misc_feature (514)..(514): n is a, c, g, or t
  misc_feature (523)..(523): n is a, c, g, or t
  misc_feature (529)..(529): n is a, c, g, or t
  misc_feature (563)..(563): n is a, c, g, or t
ctgtacatctatcgacatggtgaggtagagcatgtttgggaggaaagacgttgaatcccatttggtgacagtgagcttgaggtgctgccagaacactgcactgaagataggaggagactgtaggaaatacaagataggaaaggtctccactgaaatgttaactctttctctctaaacggccatccaggcctcaatgtctgcagtttctgatctgtgattatgacttatccaaatcttacatttcttaaaaatagtcatagatgaagggaatcacagttgatagttatatggtgacattagtggcttaaattctaaataactagaaactgtataataggcaaaactgtgaggcaaataaaatgcttctcaaactgtgtggctcttatggggttaatttgatttggacctgtattaattcttatggctgctatactaacaaattaccacaacttggtggtttaaactacacacatttatccccttctgtctggaggccagagtctaaaatgagatnaatggctgnagtccntgggcaagccatgtcactggagctccatgagganccaatcagtgttccggtagccaccatca

SEQ ID NO: 84224 - DNA, 1366 bp, Homo Sapiens
  misc_feature (429)..(438): n is a, c, g, or t
gggtccaagaaggcgtcgacccacgcgtccgtttcggcagaaattctgaataactggaaactgtataataggcgaaactgtgaggcaaataaaatgcttctcaaatctgtgtggctcttatggggttgatttgatttggacctggattaatttcttatggctgctataactaacaaattaccacaaacttggtggtttaaaacaacacacatttattctctttctgttctggaggccagaagtctaaaatgagattcactgggctgcagttcactgggcaaggccatgctcctctggaggcttccatgatgcatcccatattcagtgtttcccgagtaagcctgacccatgcaggtctgcagttttacctcaacaggcttttgcactcagtggctctctcctgtggtttctatctgaaattctcttcannnnnnnnnnaataactgctttattgagatataattcacatgccacacaattcacctatacagtatacaattcagtagtgtttactatattcagagttgcgcaactatcatttttctcacccccaaaagaaaccctatgcccgttagtattcactctgttttctcacaactctacgtaaccactaatctactctccatccctatagatttgcccatgcctacacatttcatataaatggaatcatacatgggggccttttccactgagtatattttcagggtgcatcccagctgtggcatgaatcagcatctcattcctttttattgccaaataatattctatcatatggatatgtcgcattttatgtatccattcatcagctgatggacatttgggttgtttgtactttttggctaccatgaataatgctactatgaacttttgtgtacaaatcttatgtggacttgttttcatttctcttggatgtatattcctaggagaatggctggattatacagtaactctttcctcataactttgcatatcaaaattatatccatctttcagaacccaaattcagtgttatttccaaagtgttccaacatctcccactcaaaatgaatcttctccctagtactcccattgtttagtacctaattgttcttaccagtttgtcttagagctcagtcattcctacacagcacttttcttcattatactgctaatttcattacactgtaagagtggggacaagctgttcttcttgtataccagaaagtagtgagtgcactgctgtgaagaaagcaggaactcaaaagttaagaattttgaatgagcctataaaatgtgtctaataaataataatgttcattttcaaatctcaacaattaaatgtttaacaaataacacttgaaataaatgtttattagaaaaaccc

SEQ ID NO: 84225 - DNA, 879 bp, Homo Sapiens
  misc_feature (752)..(752): n is a, c, g, or t
gggagacgcaagatggcggacagtgcggaactaaaggaagaagagtgggagagaagaagtccatcagcattttagtggagtaaataatgaaattaaatgggaagagaaaccgtaattataaaagttactatgagtgttagtgtcacatgaaaagaaaattccctagaacccttccttcagagttttctgcaaatggttatgagccttagagtttctgaactccaagtactgttgggctacgccgggagaaacaagcacggacgcaaacacgaacttctcacaaaagccctgcatttgctaaaggctggctgtagtcctgctgtgcaaatgaaaattaaggaactctataggcggcggttcccacagaaaatcatgacgcctgcagacttgtccatccccaacgtacattcaagtcctatgccagcaactttgtctccatctaccattccacaactcacttacgatggtcaccctgcatcatcgccattactccctgtttctcttctgggacctaaacatgaactggaactcccacatcttacatcagctcttcacccagtccatccggatataaaacttcaaaaattaccattttatgatttactggatgaactgataaaacccaccagtctaggtaagattattgtatgatagtatttggttacttttgcaggatgaattttcgttttaggcttttactttgacccagtttattatccataatgaaattttcatttgatagtaacagctgnataataatgaagatctttcaaatttagataaaatcaaatatataaaagctgtctttcaggaaaaaaggtagtatagtgatggttactgacaaagtaaatattaaaaagtttcaagaatataaaactt

SEQ ID NO: 84226 - DNA, 462 bp, Homo Sapiens
aacaaacactggacattaccatttgaactagcattccataagttaacattaaagaaccagccagtcccattcacccttcccctttcacctggtataagcaaatgaaatcgtggtgaccacagcagcaaaaatggtctgacaatgatatgcaataggctgggcatactggttgagtttcaaatatatttccagcacacaggcaatccttaggcgttaatatgaaatcaagatttggatcttgatgcgaacaatcttatccttcacacagtttcattctattcctgatgcctccctttgaagagtagttgagagtcatctagggctatgactaccactcgggtagcaggactcattcctttaataggatcagcagtgagttggggtacttgggaatggagccatcggggttagggaaagaggaatgccttaattcataagatattcactaatttttacataaag

SEQ ID NO: 84227 - DNA, 1634 bp, Homo Sapiens
  misc_feature (145)..(145): n is a, c, g, or t
  misc_feature (160)..(160): n is a, c, g, or t
  misc_feature (586)..(631): n is a, c, g, or t
  misc_feature (910)..(920): n is a, c, g, or t
  misc_feature (1146)..(1147): n is a, c, g, or t
  misc_feature (1154)..(1154): n is a, c, g, or t
  misc_feature (1190)..(1190): n is a, c, g, or t
  misc_feature (1193)..(1193): n is a, c, g, or t
  misc_feature (1250)..(1250): n is a, c, g, or t
  misc_feature (1329)..(1337): n is a, c, g, or t
  misc_feature (1352)..(1352): n is a, c, g, or t
  misc_feature (1454)..(1455): n is a, c, g, or t
  misc_feature (1536)..(1536): n is a, c, g, or t
  misc_feature (1573)..(1574): n is a, c, g, or t
cgtgcccactcgctgggccttaggctggtgtatgtggggaagttctaacggctctcctggtgggaaggggatgttgctctgcttgtattcagttggccatctgtagctaccctgttcttcccaactctcctccctagctagagcnccagccctgggaacncggggctttacgtctgcttgaaggtgaggacgtgactcccacatgtaatcaggagaaagggacagaggaagccccagcccccactgtggctatcctgactccagtggccacatctcaggtgccaggggctgtgggagcttgtgccgtccttggccaaacaccccgcaggcaaagatgcacccctgctgatggagagccttctgcttctgccctctggccctctaccataccacttccccagccagaaccggcgtgcagctaggaggaatgggttgcacggcggagggggtgaggtgggaggcgtctcactgctctcagggttcaggtagaatgttgctggttttgaagctcacctgttgtggagtgttctaatcagttttggctttctgagtttttgtggaattaaagtgctgctgctgcgacacnnnnnnnnnnnnnnnnnnnnnnnnnnnnnnnnnnnnnnnnnnnnnnctatacatcggataccaaaagaaagccctgcagcccggcgggaagagcggcacccaacaccggcggggccgcgctttaaaaatcctccggggggggcccggcgttcatgtgggcgccaacgtttttgggaagagaggggggccgcccagggggggcggcgttttacaagctactcgcccgcgcggccccttttttcattcaccccccaacacgggggaaacaacaggaacgggcggcgggggctttcttagcggagggggacattgctacgtttttgtnnnnnnnnnnnaatactctatgggggaacctatcgccctcccccgccagagggtgtctccgcccccccgtgcgtggagcgaacaaacaaaagaaatacttttctcaaagcggggaaacagcaggctgcggagccaaaaaaatagaaaaccgccccggacacaatacgcgtttttctcgcggtttcgtatatccacgaaaagaatataagtgggcccccccttgcctcccggacgagnngcgatanaagatccaagacatcttctctttgtcgcgggcagcncgnaaaagtcggatgtgttccatgatggcggccccccgcccggaaggcagcggtgcgggncgcggccgccggaggaaggtgacttttctaaataagaaggatacacagcggagtactgtgctgtgggcaccacccttannnnnnnnnatgacgaaaagggtnaaggcaccgacgggacgggcgcacccacccgcgaaggaggaagaggacccttattattattattttgaagggggagaggccccctccttttttcgcgcttcnnttacttatctactggcaggcaaaaaaaggagccgcggttgtcactcccccctttgttgaagcagggaaaaaaacaggctcnacggggggggccgtggaagtgcacccgcaagattttnnatttttttgccggacgaaagcgggcgcgggccaacgacactctacttgttgtccccgccc

SEQ ID NO: 84228 - DNA, 992 bp, Homo Sapiens
  misc_feature (17)..(17): n is a, c, g, or t
  misc_feature (174)..(174): n is a, c, g, or t
ctgagcccgccgggcgncagctttctcccagagctgaccgccacgcccgtggtgcagtgcatgctgcgcttctccctctcggccagcgccaggctccggaacctggcacagatcttcctggaggacttctgctccccccgccaggtggccgaggcccgcagccggcaggcgcanctctgccctgggtatcccactgccgaggagcgtggccccacggcagcgctgatccatggagactgcgagaccgtggcacccctactgctggggaccacagtcctgatgtggacgcagggaacggggagcacatactgccccattggtgccttttcagccatctgaaaggcgggttctttcagcaggacaggcatttacactgatgaaacgccactgggagtgaggaagccagactccagagacacggagaagatcaaactggagctgcgttcataggctggcactctcaatcctacatcaggtgccaccaccaccagactcaggccctggtgtaagaagcggccaagtgcctggacccagaggctttgcaggacagtgttctcaggagctgggcctgaggcttaggagagctgccttcgctgcaggaaatcagggattatcccttaacagaagtgtctggagtagttttcaggtataggaatgagatgcctcgtggtgaaaggatctcacccctgggaagatgtggtgccccctccagggctctggaggatggatgcctcccccagggggctctcccagcctgggcaatttggggcctggtgggaatggccaacctgggataaccctgtgggccccaagcatttggactgtgcccaccccaggcccttgcctggtttaggcacccatgggacttccaagaattggaaaaagggtgggctccccggcgccttttgaaatggaacagccccccaggggaccacttaaatggggagtcgcctccggtggcattcaaagaccaccaagggcccgatggccga

SEQ ID NO: 84229 - DNA, 793 bp, Homo Sapiens
ggggcgcgcgccatttctagtcgttttcaaagcgcctcgcgctgattctcacgggcccggctgccggcccccgctctgccctgcataataaaatggctaatcaggtgaatggtaatgcggtacagttaaaagaagaggaagaaccaatggatacttccagtgtaactcacacagaacactacaagacactgatagaggcaggcctcccacagaaggtggcagaaagacttgatgaaatatttcagacaggattggtagcttatgtcgatcttgatgaaagagcaattgatgctctcagggaatttaatgaagaaggagctctgtctgtactacagcagttcaaggaaagtgacttatcacatgttcagaacaaaagtgcatttttatgtggagttatgaagacctacaggcagagagagaaacaggggagcaaggtgcaagagtccacaaagggacctgatgaagcgaagatcaaggccttgcttgagagaactggttatactctggatgtaaccacaggacagaggaagtatggtggtcctccaccagacagtgtgtactctggcgtgcaacctggaattggaacggaggtactctgtaggcaaaataccaagggattcatatgagcgatgacttggtgcccccttttttgagaacgcccggaccatttgggaatctaccttcttatgatggaatccactgtcccggtccagaatagaggggtatgcattttattcacctttcctgtggaaaagggaaactgcacaggcaagcccctgaaaactgggtatgt

SEQ ID NO: 84230 - DNA, 835 bp, Homo Sapiens
  misc_feature (799)..(799): n is a, c, g, or t
gagttccgccgcacaaacaccccttctttggggccgttgaccggaatttctgttcccaagaaaggggtttttccttgaagttcgtaatttctttccggcgcagaggaatccccaccccaaaaaggttgctgtgtgtttgcccaccagaaaaattcccccattggcgaggggtttttttaaccaggggggggaattttccataggggtgtcccccacaggtttccacgggctttcctgggccaggttttcctttcccccaagaaggtgaataaattgcatccccctcttatttttgaccgggaccagtggattccctcattaggccggtaagatccccaaatggggtccggcccttctcaaaaaagggggcaccaaactcatcctccatataaatcccttggtattttccttacaaatacctccgttccaattccaggttgcacgccagagtacacactgtctggtggaggaccaccatacttcctctgtcctgtggttacatccagagtataaccagttctctcaagcaaggccttgatcttcgcttcatcaggtccctttgtggactcttgcaccttgctcccctgtttctctctctgcctgtaggtcttcataactccacataaaaatgcacttttgttctgaacatgtgataagtcactttccttgaactgctgtagtacagacagagctccttcttcattaaattccctgagagcatcaattgctctttcatcaagatcgacataagctaccaatccagggcagagcgggggccggcagccgggcccgtgagaantcagcgcgaggcgctttgaaaacgactagaaatccc

SEQ ID NO: 84231 - DNA, 758 bp, Homo Sapiens
gtatcgagaggaagttcctttcagcgtcaggatttatgaatgcctatgagcccagtgtcagtgacgactttctagcggcggtcttcaacactttctaaatattaagcgatcaaggcccctgccccacttttagttccaacagaatgccgttcacaagatctgggaggcactctctcagccctctcctggagcccccggaatttctcagcagcccaggccctcccgctgcccgtggcccctcctcccaggtgccaggtggtcttccagcctctccaagggcccacccccctgcctcttcctcccactgcagctgatctaggggtttcttggccacatttcccttgagagagagtgggatttgccctatccacagagagcctcatttccacctgaaggtgtatttgtcagtggctagaccaggttcatgtctgtttccccttggggacttctgaaccttcctgcccgggagtctgtaacacagcagcacaggaccgcgcttcctttagcagtgctgagtaagcaggcagcggcactctgagatcccggggctgggcagtcgccccccacttcccagcagctctgtggtagtggggcgggagcagcagggacgtaccttaagatttctccagtgtctgactcttactttgtttcctgaaataattagagaaaagtcgttttaatgaaaaagagactgttgtaccttgaattctacagtacctcagtccaggctgctgctgagatcctgtctttagctcaca

SEQ ID NO: 84232 - DNA, 553 bp, Homo Sapiens
  misc_feature (530)..(530): n is a, c, g, or t
ggggatctaagatggttcacagcacagagacctccctcaactggagggcagcagcagctcacccccaccccagaatcagtgttccagaggacagctgggggcagggggttaggaacaatcccactccctcctggaagaggtcctgaccccccaccccacccatctgcctgtacgggtccctctgctatcgactggggcgagttcttttcatgagggccttgcctggtgcctggagggaacagggtgtgggggaaaggtctgtgtgttcccccctcacctcccctgctcagcggtgtggcctctggctctggggaggatcgggaagccccagggtccgtgccttggagtggggggacagccttttctctgccacagcttctgcctttgggggcttacccttcctaggagcagaactgttgtggaggggaagaggacggtgaaggttccgaagggaagggggctgcccccactgaaaacgaagcttccagtcacagccccttcattatttatcaggacccaggggatgaggnggcaggggagggggcctgcatgg

SEQ ID NO: 84233 - DNA, 1117 bp, Homo Sapiens
  misc_feature (949)..(949): n is a, c, g, or t
  misc_feature (962)..(962): n is a, c, g, or t
  misc_feature (1002)..(1002): n is a, c, g, or t
gtgaagagttaatggctccgcgcgcaggcactgccctctgaactggaacaaaatgcgagcttccggttggagtcactcggccaggcgccggcgacctgaggggagagggaacgcagctgaaagcgtgaactgtacctgtcatttactccatcctttatagtgatgctacaggacgaagaggaatggataaaaacattggcgagcaactcaataaagcgtatgaagccttccggcaggcatgcatggatagagattctgcagtaaaagaattacagcaaaagactgagaactatgagcagagaatacgtgaacaacaggaacagctgtcacttcaacagactattattgacaagctaaaatctcagttacttcttgtgaattccactcaagataacaattatggctgtgttcctctgcttgaagacagtgaaacaagaaagaataatttgactcttgatcagccacaagataaagtgatttcaggaatagcaagagaaaaactaccaaaggtaagaagacaagaggtttcttctcctagaaaagaaacttcagcaaggagtcttggcagtcctttgctccatgaaaggggtaatatagagaagactttctgggatctgaaagaagaatttcataaaatatgcatgctagcaaaagcacagaaagaccacttaagcaaacttaatataccagacactgcaactgaaacacagtgctctgtgcctatacagtgtacggataaaacagataaacaagaagcgctgtttaagcctcaggctaaagatgatataaatagaggtgcaccatccatcacatctgtcacaccaagaggactgtgcagagatgaggaagacacctcttttgaatcactttctaaattcaatgtcaagtttccacctatggacaatgactcaactttcttacatagcactccagagagaccgggcatccntagtcctgccacngtctgaggcagtgtgccaagagaatttttaatattgaagntcagagacaaccccagggaactttggtaaaacagaagaaactttatttgaaattcagggaaattgacccccatagcttccgctataccaaaccttaaaaacactgaacaaacaat

SEQ ID NO: 84234 - DNA, 922 bp, Homo Sapiens
  misc_feature (742)..(742): n is a, c, g, or t
ccactgccaataacaaaataactagcaaccatgaagtgggtggaatcaatttttttaattttcctactaaattttactgaatccagaacactgcatagaaatgaatatggaatagcttccatattggattcttaccaatgtactgcagagataagtttagctgacctggctaccatattttttgcccagtttgttcaagaagccacttacaaggaagtaagcaaaatggtgaaagatgcattgactgcaattgagaaacccactggagatgaacagtcttcagggtgtttagaaaaccagctacctgcctttctggaagaactttgccatgagaaagaaattttggagaagtacggacattcagactgctgcagccaaagtgaagagggaagacataactgttttcttgcacacaaaaagcccactccagcatcgatcccacttttccaagttccagaacctgtcacaagctgtgaagcatatgaagaagacagggagacattcatgaacaaattcatttatgagatagcaagaaggcatcccttcctgtatgcacctacaattcttctttgggctgctcgctatgacaaaataattccatcttgctgcaaagctgaaaatgcagttgaatgcttccaaacaaaggcagcaacagttacaaaagaattaagagaaagcagcttgttaaatcaacatgcatgtgcagtaatgaaaaaatcttgggacccgaaactttccaagnccataactggttactaaaactggagtcagaaagtttaccaaagttaattttactggcaatcccagaaacctagtcctggattgtggcccatgttcatgacgcactgttgcccaagacaatgtgcctggattgcctgcagatgcggaacaatcacgtcctacatatgtcccacacaaacct

SEQ ID NO: 84235 - DNA, 855 bp, Homo Sapiens
ggagaatcagtggaagcaagctggcagcgatcgacccttcacccttgacgatttacagtacatgatctttcatacacccttttgcaagatggtccagaagtctctggctcgcctgatgttcaatgacttcctgtcagccagcagtgacacacaaaccagcttatataaggggctggaggctttcggggggctaaagctggaagacacctacaccaacaaggacctggataaagcacttctaaaggcctctcaggacatgttcgacaagaaaaccaaggcttccctttacctctccactcacaatgggaacatgtacacctcatccctgtacgggtgcctggcctcgcttctgtcccaccactctgcccaagaactggctggctccaggattggtgccttctcttatggctctggtttagcagcaagtttcttttcatttcgagtatcccaggatgctgctccaggctctcccctggacaagttggtgtccagcacatcagacctgccaaaacgcctagcctcccgaaagtgtgtgtctcctgaggagttcacagaaataatgaaccaaagagagcaattctaccataaggtgaatttctccccaccctggtgacacaaacagccttttcccaggtacttggtacctggagcgagtggacgagcagcatcccccaaagtatgcccggcgtcccgtctaaaggtgttctgcagatccatgggaaagcttcctggggaaacctatggctaaccaggccttctcccccgcgaaatcatattttttaagatccccactccttaccctgggaaaatggaattttgaatccaacatagtaagcccccaataaaggcatccgc

SEQ ID NO: 84236 - DNA, 717 bp, Homo Sapiens
ctccactccagctcaatctgctgcagctggaggagctcccccgtgctgagggggctgctgttgcaggaggccctgggagcagtgccgggcccccacctcccagtgcggaggctgctgagccagaggccagactggcggaggtcactgagtcctccaatcaggacgcactttccggctccagtgacctgctcgaacttctgctgcaagaggactcgcgctccggcacaggctccgcagcctcgggctccttgggctctggcttgggctctgggtctggttcaggctcccatgaagggggcagcacctcagccagcatcactcgcagcagccagagcagccacacaagcaaatactttggcagcatcgactcttccgaggctgaggctggggctgctcggggcggggctgagcctggggaccaggtgattaagtacgtgctccaggatcccatttggctgctcatggccaatgctgaccagcgcgtcatgatgacctaccaggtgccctccagggacatgacctctgtgctgaagcaggatcgggagcggctccgagccatgcagaagcagcagcctcggttttctgaggaccagcggcgggaactgggtgctgtgcactcctgggtccggaagggccaactgcctcgggctcttgatgtgatggcctgtgtggactgtgggagcagcacccaagattctggtcaccctgatgacccaa

SEQ ID NO: 84237 - DNA, 1515 bp, Homo Sapiens
  misc_feature (143)..(169): n is a, c, g, or t
  misc_feature (859)..(859): n is a, c, g, or t
  misc_feature (887)..(887): n is a, c, g, or t
acgcgcatggaatatgaacaggtggtaaaaaaagcaggctggtaccggtccggaattcccgggatatcgtcgaccacgcgtcggatctgcctccttcctcttcggcttcatgcatgatcgtaagtttcctgaagcctcctcannnnnnnnnnnnnnnnnnnnnnnnnnnataatcttttagctgaaaaagtagagcagctgatggaatggagttccagacgctcaatcttccgaatgaatggtgataaattccgaaaatttataaaggcaccacctcgaaactattccatgattgttatgttcactgctcttcagcctcagcggcagtgttctgtgtgcaggcaagctaatgaagaatatcaaatactggcgaactcctggcgctattcatctgctttttgtaacaagctcttcttcagtatggtggactatgatgaggggacagacgtttttcagcagctcaacatgaactctgctcctacattcatgcattttcctccaaaaggcagacctaagagagctgatacttttgacctccaaagaattggatttgcagctgagcaactagcaaagtggattgctgacagaacggatgttcatattcgggttttcagaccacccaactactctggtaccattgctttggccctgttagtgtcgcttgttggaggtttgctttatttgagaaggaacaacttggagttcatctataacaagactggttgggccatggtgtctctgtgaatagtctttcctatgacttctggccaagatgtggaaccatatccggggacctccataatgctcataagaacccacaccatgcaccagtgagctacatccatgggagcagccaggnctcagtttggtggcagaatcacacattnattctgggactgaatgccgctatcaccatgggggatgggtcttccaaatgaagcagcaacttccaaaaggcgatgttggaaaaagacggataatttgcctagtgggattgggcctggtggtcttcttcttcagttttctactttcaatatttcgttccaagtaccacggctatccttatagctttttaattaaatgaagccaagtgggatttgcataaagtgaatgtttaccatgaagataaactgttcctgactttatactattttgaattcattcatttcattgtgatcagctagcttattcttgtgtactttttttaaactgtgggttttcctagtaaatttaatttacagaaatcaatggtagcatttagtaatctacaaaggaaatatcaaagtgtttttcaagcctgttatattcagtgtgtgccacaggattgaaataaatgacaatgtaattatgaattcatgttttagagctgtttactcattagtaaaggaccgcaatgttagtaaagaaaacctatgaaatgtatgttaaagattcttagtattacagggataaagcaaatgcatgaaaatatgtcatgtactgaaaattaaacttacttcagtttcagttataaaa

SEQ ID NO: 84238 - DNA, 1198 bp, Homo Sapiens
  misc_feature (1055)..(1055): n is a, c, g, or t
  misc_feature (1076)..(1076): n is a, c, g, or t
tcggcacgaggtccggtgaaccggatgctctgtcagtctcctcctctgcgtcctcggccgcggcccgggtccctcgcaaagccgctgccatcccggagggcccagccagcgggctcccggaggctggccgggcaggcgtggtgcgcggtaggagctgggcgcgcacggctaccgcgcgtggaggagacactgccctgccgcgatgggggcccggggcgctccttcacgccgtaggcaagcggggcggcggctgcggtacctgcccaccgggagctttcccttccttctcctgctgctgctgctctgcatccagctcgggggaggacagaagaaaaaggagaatcttttagctgaaaaagtagagcagctgatggaatggagttccagacgctcaatcttccgaatgaatggtgataaattccgaaaatttataaaggcaccacctcgaaactattccatgattgttatgttcactgctcttcagcctcagcggcagtgttctgtgtgcaggcaagctaatgaagaatatcaaatactggcgaactcctggcgctattcatctgctttttgtaacaagctcttcttcagtatggtggactatgatgaggggacagacgtttttcagcagctcaacatgaactctgctcctacattcatgcattttcctccaaaaggcagacctaagagagctgatacttttgacctccaaagaattggatttgcagctgagcaactagcaaagtggattgctgacagaacggatgttcatattcgggttttcagaccacccaactactctggtaccattgctttggccctgttagtgtcgcttgttggaggtttgctttatttgagaaggaacaacttggagttcatctataacaagactggttgggccatggtgtctctgtgtatagtctttgctatgacttctggccagatgtggaaccatatccgtggacctccatatgctcataagaacccacacaatggacaagtgagctacattcatgggagcagccaggctcagtttgtgggcagaatcacacattatntctggtactgaatgccgctantaacccatgggggaatggttccttcctaaatgaaagcagcaaacttccgaaagggcgaatgtttggaaaaaagaacggataatttggccctaaatgggatttgggggccctgggggggcctt

SEQ ID NO: 84239 - DNA, 137 bp, Homo Sapiens
aaataaaaaacgatcgaaaccatttcacttttaggttgctttttaaaagagaactctctgcccaacacccccacaaggtttgtaattaaaactgtaaatagtctttgtaaatttaattatatatattttctatttaa

SEQ ID NO: 84240 - DNA, 976 bp, Homo Sapiens
  misc_feature (22)..(22): n is a, c, g, or t
  misc_feature (42)..(42): n is a, c, g, or t
  misc_feature (105)..(105): n is a, c, g, or t
  misc_feature (111)..(128): n is a, c, g, or t
  misc_feature (130)..(130): n is a, c, g, or t
  misc_feature (136)..(136): n is a, c, g, or t
  misc_feature (171)..(171): n is a, c, g, or t
  misc_feature (182)..(182): n is a, c, g, or t
  misc_feature (188)..(188): n is a, c, g, or t
  misc_feature (196)..(196): n is a, c, g, or t
  misc_feature (203)..(203): n is a, c, g, or t
  misc_feature (922)..(936): n is a, c, g, or t
aaagaaaccaaatatggaggangtccaacttgattctggagntaactggcccccagttttatggcaaggcagcaggtccaaaatcatttggcacatgaataggtnaatgcnnnnnnnnnnnnnnnnnngnatcagnttgggaatatgtggcaccaaacatacttctcatgncacatacacantgcganaatcaagncacaccntgtgtgtttctgctcatatccaccccatatgctgggctgggcttgacactggatgggaagactcagtgcctgagagatcaatagcaggtccctactgtattgactgatctttaaattggcccgccttattattctaggagctctattctaaactcaaggagttcagaaaagctgtgccagccagtaagtaaagttggacctttggtcttcagaagatagggttttgtctttggttgttttttgaagcccctgtcattttgcttgatgcccttcacacttttctccctgcctttttgttaaagtttttttctcctgtaataaaatcagttaataaccactgaactaacttctttagattaaagctctattagaagtgcattcagtggtccagaatattctgagaaagtataacaacttctttcattatggagctctcagtatctttttatagggaagaagtcagaaaactccaacaacacaacacaatctagtagcattaaggcaacacagcagaagaaaagttaactgtccccatgtgatcatctctgaaaatcaaaataggcaaaaacaataggggccaaaaaccaagttctgagcacagactacaggaacctagaggatgggggaaaatctacttaatagtccctgtttcaaatcaccagcccccaaagctatcctattattgtcacattcctgtggggtatctaatacaatttacnnnnnnnnnnnnnnngtcaccaccggattatcaacatggtaaatgaagaaggagc

SEQ ID NO: 84241 - DNA, 139 bp, Homo Sapiens
ctctttagaacgaatatttctcctcattcctctactcttaataatggattttctgaaaaacatctattaattttatgcactattcaattcaaacaactttttaaaagttgccaaatctgtcacaaaatattaaacaaca

SEQ ID NO: 84242 - DNA, 1100 bp, Homo Sapiens
  misc_feature (784)..(793): n is a, c, g, or t
agagaagaaaaatactagttttcccctcttttgggaaatagattttaaatggctaaactactagccttaaaactactagtctaataaaatcaactaccacttttgtgaatctgacaggccacatttttatatggccctttacagaatggagtgtgttgaacaggatactaacgccattgagttgagctggcctagcgatggagggacactctaacacaactttccctcagctattatgcaacagatcagggaaaaagatgggatgacagatggggtcagacagaaagagcttctgggaaacaagcttacatagtcttttttaaaatgcacaaagcctcccagctaagaggtcacttggtttgggcttcattaggactgagactttgttgagttctttctgggacttggagagtggatgatattcaggctctgaacattcccagcgctctcccgagggtgccactttctcaagatgaaaactgtgactgaaaaaattaataataaatgtttctgagctgcctgtgttctccctgtgtgggtgagagaagggactagactcctaagcctgcctcagatacaagaggcatcattggctccaattttagagaacttgaaagcaaggctttggacaaaattttgagaccctaatcactttaccttcctccaaattacccaacatacggtaaacaacatttgtgcagaagtatgtatgtatttagttcaggttgacttgtgtccttataaactcttactcaaatgatttgaacttttatgcgactgggannnnnnnnnnccaaagctacaagcatggccgcctgtggtatcgaggtgttgcaaacaatatctgtgttgcgcttcctgttttaacctacctcgtttggttggttttggtttcactgttcatcacagcagtgttatctccaggagacatatagagagctcaaccggcaatctcaggtgcatttaacatttttaaaacgaaacagtagttgaccaaatttttcttcttaaaaaatgggaagtggggggaatccaatgacaaaaactaatgtggcttgtttctggagaaaataattactgtaaatggaacaacaacaagc

SEQ ID NO: 84243 - DNA, 705 bp, Homo Sapiens
  misc_feature (56)..(113): n is a, c, g, or t
cggcagtactctacggtttaaggtagcgaggctgggtggcgaattcggcacgaggnnnnnnnnnnnnnnnnnnnnnnnnnnnnnnnnnnnnnnnnnnnnnnnnnnnnnnnnnngccatctttctccccgtgcctattgatcccacataggctcattctgggtacaccggctaaaggctttggtgcattgcagcgttttctcccagcagctgtgtgaaagatgcattttctaagctaaggagaattttctcaagagtggcatactcatgccaaatattattgctctgggccatataggctggtcttcctccacactaaaatgggtgtcttgttttggtacttaaaacagtctactccaggcatccagtccttacagaccaaggaagagcatagcgattgcctgttggaattgcagatgcattctggccttctacccccgtcctgaaacatttactttgaggaaggctcttagaacattagatagtctgctgaggttgtaggcccagctccatacacccagtagaacagtggaacaactcatgcttcatgctgcaaactgctgtacttcagaggaaacagatctagcacactgatgaaccactgcttacacatccacagttaccccgatgcttttactctgaccgacccctgggctagtaagactccacgtaagctaagtccaggatgcctgtggcctgcgggttga

SEQ ID NO: 84244 - DNA, 614 bp, Homo Sapiens
gccaagtctgctaagaacaaatcaaccacccaatattactactcatttcataacagatgcttttgtctttatgtgaactgcaaccatatacattagcactgtaattttgtgcagtcttggcaatttaaaacagtctacagtgaaatttcacgtaagacacaaaacagattaactaacatctctaaaagaaatatcacccttggtgttaattcaaatatatcatgcttcctcaaatttgctggagaaatatttataagtttatatacattaataaactgctgtgaaatttcttcagtctttgtatttactcaaacccttggagtttcttcatcttgtttaaattttttcctggatgaaggcgtgctgtagggcctggttgatgctaattcgtttagctgggtccaacatcagaatctggtccaacaagtcctttagctggtgtactttcttacgttggtcttcaggaagtctctggcacccaatcaagtcagccaacaggtccttagttggattaatggtgctcataacagtaactttctccctctctgttactttatcaacttctatgtacatgaagttgagattttgatcaaaatgctgatctttgaacacac

SEQ ID NO: 84245 - DNA, 593 bp, Homo Sapiens
  misc_feature (520)..(520): n is a, c, g, or t
  misc_feature (545)..(545): n is a, c, g, or t
agtttgggagtattgaatcatggtcttaatattgaaatatttcaccaaagtccaggggactcctttgggtaatgaggttgagctggcaccagatcagcttccagatttgatgcttagcattttgctggtaagatggctaaaggattttaatttagcctctattctatagtggcttaaaagaacaaagggtggtgcgttttccccttatacactcaaaacctacagctgtttcttgtgaaggctaagccagggccacacatatccaatgagactgactagaaatttctcctgcctttgggaaaggatgactgtcagtgtcagaaaagccaggctctgctgcctaatctgcagtgacctgttagaggtctaataagtcttacccctgtgggctctacctgtagaaacaatactaggtactagtttagggggctgctagaaaataatgaggtcctttgaggagagatcttctaaaatcacacattagtgatactggaattattgagagtgacaaacttttttntcttcacccctaataaacttttttnaacctcactttgttaggcaaatccaaggaatgtgggatttttagtttt

SEQ ID NO: 84246 - DNA, 754 bp, Homo Sapiens
  misc_feature (21)..(21): n is a, c, g, or t
  misc_feature (28)..(28): n is a, c, g, or t
cccatgcctttgctataactntatgtgnaacggttcccaaggaatttaagaaccattctgaattctgcctttgatgtacattataattaaatgtgactgttataaacgttgcctctatcatattatcttttgtaaagtggaggcaaagagagacaaaaagcatcctcctggactgctgacatgcagaaagcatcagcgatgatagggttgtgacagcatttatggagtttctagggcaggggggacagaatgctgtatctcagcatctttggttaaggtctggcctctttaaatccacctctccctcacatttagtctctcatgaattttaagtccatgcacttgaagacggtcacaagatataatttccatataatatgtcagattcataagagtttcagatttttggtcctcaccctgcccagtgggagtacacgggccttacacagaaagctgcagagtccaatgcttcagttaaagcatgttcttttcaaagttttcttgagctgcacaaaaaaccgtcaacagttttttggctcccagcactgggagagggataaagctgagctctggcttttgtcctttaaagtggcccaagccgactgtatgaagagtctggtcatcaaacacatttaccaccagccttcagagtacatctgtctcattcaaaccttacaggaagcctaaacgttgtgtaggtgtttgggtggaaagataagaataagctaaacttggcctaaggagaaaaagggta

SEQ ID NO: 84247 - DNA, 960 bp, Homo Sapiens
tatacgctaggtacgaggctgggttagaatcggcacgaggcccaacgctgcagcagaagcggaagcccagccgcggcagccgcgagtgggagaggaaccagaacctcatcaatgcctgcacaaaggacatgccccccatgggctcccctgtgattcccacggacctgcccctgcgggcctcccccagccacatccccagcgtggtggtcctgcccatcacgcagcagggctaccagcatgagtacgtggaccagcccaaaatgagcgaggtggcccagatggcgctggaggaccaggccgccacactggagtataagaccatcaaggaacatctcagcagcaagagtcccaaccatggggtgaaccttgtggagaacctggacagcctgccccccaaagttccacagcgggaggcctccctgggtcccccgggagcctccctgtctcagaccggtctaagcaagcggctggaaatgcaccactcctcttcctacggggttgactataagaggagctaccccacgaactcgctcacgagaagccaccaggccaccactctcaaaagaaacaacactaactcctccaattcctctcacctctccagaaaccagagctttggcaggggagacaacccgccgcacgcccgcagagggtggactccatccaggtgcacagctcccagacatctggccaggccgtgactgtctcgaggcaggcccagcatcaacgcctacaagtcactgacagggtcggggctgaaagcgtacgccctcggctaaagccggacgtaccccccaaaccatcctttgctccccttttccacaatccattgaagcccaatgatgcgtgtacataattgcagggggacgggcgtccaggtgtcgaaccagcgtgcaaggcgaggtgcccttcagctcaggcaggtctcaatggcctcgaggtaccaaccagaccaagaag

SEQ ID NO: 84248 - DNA, 1292 bp, Homo Sapiens
ggaccggtccggaattcccgggatatcgtcgacccacgcgtccggggattgtggcggtcctctctcccaattcggaagctacagctacctccggacgctctcaagatggcgacctctctgggttccaacacctacaacaggcagaactgggaggatgcggacttccccattctgtgccagacatgtcttggagaaaacccatatatccgaatgaccaaagaaaagtatgggaaggaatgcaaaatctgtgccaggccattcacagtgtttcgctggtgccctggagtccgcatgcgtttcaagaagactgaagtgtgccaaacctgcagtaaattgaagaatgtctgtcagacctgcctcttagacctagagtatggcctgcccatccaggttcgtgacgcaggattgtcttttaaagatgacatgccaaagtcagatgtcaacaaagagtactatacacagaatatggagagagagatttctaactctgatggaacacggccagttggcatgctggggaaagccacatctaccagtgacatgctgctcaaactggcccggaccacaccctactacaaaaggaatcgaccccacatttgctccttctgggtgaaaggagagtgtaagagaggagaggaatgtccatacagacatgagaagcctacagatccagatgacccccttgctgatcagaatattaaagaccgttattacggaatcaatgatcctgtagctgacaagcttctaaagcgggcttcaacaatgcctcggctggacccaccagaggataaaactatcaccacactatatgttggtggtctaggtgataccattactgagacagatttaagaaatcatttctaccagttcggagagatccggacgatcactgttgtgcagagacagcagtgtgctttcatccagtttgccacacggcaggctgcagaagtggctgctgagaagtcctttaataagttgattgtaaatggccgcagactgaatgtgaaatggggaagatcccaggcagccagaggaaaaagaaacaagagaagagatggaactacagactctgggatcaaactagaacctgttcaggattgccaggagctcttcctcctcctcctgcagcagaagaagaagcctctgccaactacttcaacttgcccccaagtggtcctccagctgtggtgaacattgctctgccaccgccccctggcattgctccacccccacccccaggttttgggccacacatgttcacccaatgggaccacccctcctttcatgcgggc

SEQ ID NO: 84249 - DNA, 878 bp, Homo Sapiens
  misc_feature (386)..(386): n is a, c, g, or t
ccgcggcagcagagccacggatggtgccctccgcccgatgcccacagccccacgccaggattacatcttctacctggagcctgagcgactcgagtcagggaagggcaagtgtccgtacgatcccaagctggacacagcatcggccctcatcaatgaggagctctatgctggtgtgtacatcgattttatgggcactgatgcagccatcttccgcacacttggaaagcagacagccatgcgcacggatcagtacaactcccggtggctgaacgacccgtcgttcatccatgctgagctcattcctgacagtgcggagcgcaatgatgataagctttacttcttcttccgtgagcggtcggcagaggcgccgcagagccccgcggtgntacgcccgcatcgggcgcatttgcctgaacgatgacggtggtcactgttgcctggtcaacaagtggagcacattcctgaaggcgcggctcgtctgctctgtcccgggcgaggatggcattgagactcactttgatgagctccaggacgtgtttgtccagcagacccaggacgtgaggaaccctgtcatttacgctgtctttacctcctctggctccgtgttccgaggctctgccgtgtgtgtctactccatggctgatattcgcatggtcttcaacgggccctttgcccacaaagaggggcccaactaccagtggatgcccttctcagggaagatgccctacccacggccgggcacgtgcccctggtggaaccttcacgccatctatgaagtcccaccaaggattatcctgatgaagtgatcaacttcatgcgcagccaaccactcatgtaccaggccgtgtacccctctgcagcggcgggccccctggtag

SEQ ID NO: 84250 - DNA, 608 bp, Homo Sapiens
  misc_feature (497)..(497): n is a, c, g, or t
  misc_feature (546)..(546): n is a, c, g, or t
  misc_feature (567)..(567): n is a, c, g, or t
atctaaatggacatttgggggaattccctcccaaatttgattttgttattagaaaaatgattccgtgaacacagatgtgttttgaagaagtagcacgtaatggcttttatctaccatcaacctgataaggcacatgtgaaatggaaatgttctctttcctctgaagcagcaaattaatgttgaaaacttacatagacagaaagtaggttttggaaagggaaaccacagagattagggggacttaaaattaatataggcacaggaaagagaaaagtgtgcgctccattctcagtggtgggttcaccacaaaacacgggccccaggagggaagcgctgtctaggcacacggcaaggccttagtaacagcatgctacactgctcgaggtacagtatgtcccatcgccctgtgcaccgtagagacctcagtcatctcaaggaagaatacatttgcttctccttagaggcgttcgaactagaagctatggttacctctgatntggaaacagaatagcagccactcattctgcattcccattttctctccangtgttctggtggaatgagatntcttggcactatagctgatgtccacatggcccattgccacc

SEQ ID NO: 84251 - DNA, 508 bp, Homo Sapiens
  misc_feature (26)..(26): n is a, c, g, or t
  misc_feature (32)..(32): n is a, c, g, or t
  misc_feature (100)..(100): n is a, c, g, or t
ctacactgcgacagcaacttgttgtnatactnttgaattttttgtttcttagatgttctggatcactgagaccctattaactgaccagtttggacagaantgaacattaacagactagccctgttgacactggaattcccgttaggactcgacatggaactgcttggcgtgtctttcaatggtccagtcccatttaagtgaggtggattctttatcatgtgagagggaagctgtggtccgataaagcctgcgcagcctgtttgttggtgacaacccgctgactgatgacggggcggggagaggactggccggggctatgggtgggatgagtaagttcacctccatttttcacatcatgggacctgatataaaagagcacataggcttgttggctgagtaccgatctaatatcactggtagatacaatggagtcattcatttgataccagaggccattgctagcttttatgtagcagaagtaatggccagcatggcaattaaaaccagt

SEQ ID NO: 84252 - DNA, 784 bp, Homo Sapiens
gcctctaacagaagcatcaagccactgacttttattcccatgagctcctactatgatgacataacatggtcacatttattgctcttacctacttcctaagttactgcttgcctaaataaggaaaagggcaagaaataagagtccaaaagacactcagaacaccagcagcagctttcaagtaaggactcagggtcagggtctcacaactcgctccatgttcatgtatcatgtgacattgtcttcgtgctccagcagcaaggctgacatgtgactttggggtaggagcctggagtatttctgccagatggtctgaggtgacgtatactcctagagcccaagtgaccaccagaagggacatgtgagacagcaggcagaggccatacatggaggatcacactccctcagacgtcatcagccccatgctttatcctttgactccccctgatcctcaaggccaggtggggtgcccctgctgcatgctccagagaactgtgggcctctcctaccatggctctcaatgcactgttccataactggcttctcccctggacagagccaccctggtctccttgtaagctttagttgggcttgtccctgagtgtgtggggtaggaataggagtgtgttcttgtgtatgttgcaatctttaggctcaggagacaaggagttagacctgagtcctgacatgtgcactcatttgtactcaccattacattctatttaattgctttgagccagacaggctgttttctttaccatgaaatatactaatcattcaaaaaagc

SEQ ID NO: 84253 - DNA, 1300 bp, Homo Sapiens
cggtccggaattcccgggatcctacgtcgagctctgactcccgtgctgtcgagagggagtccccggggacacctcggcacgcagcggagatgcctctttttgccaccaatcccttcgatcaggatgttgagaaagcaaccagcgagatgaatactgctgaggactggggcctcattttggatatctgtgataaagttggtcagtctcgcactggacctaaggattgtcttcggtctattatgagaagagtgaaccacaaagatcctcacgttgctatgcaggctttgactcttctaggagcatgtgtatcaaactgtggcaaaatttttcatttagaagtatgttcaagagattttgctagtgaagtaagcaacgtattaaataagggtcatcctaaagtatgtgaaaaattaaaggctcttatggttgaatggacagatgaatttaagaatgatccacagcttagtctaatatcagcaatgattaagaaccttaaggaacaaggagttacgttcccagctattggctctcaggctgcagaacaagcaaaagcaagcccagctcttgtagccaaggatcctggtactgtggctaacaaaaaagaagaagaagatttagcaaaagccattgagttgtctctcaaggaacaaaggcagcagtcaaccaccctttccactttgtatccaagcacatccagtctcttaactaaccaccaacatgaaggccgaaaagttcgtgctatatatgactttgaagctgctgaagacaatgaacttacttttaaagctggagaaattattacagttcttgatgacagtgatcctaactggtggaaaggtgaaacccatcaaggcatagggttatttccttctaattttgtgactgcagatctcactgctgaaccagaaatgattaaaacagagaagaagacggtacaatttagtgatgatgttcaggtagagacaatagaaccagagccggaaccagcctttattgatgaagataaaatggaccagttgctacagatgctgcaaagtacagaccccagtgatgatcagccagacctaccagagctgcttcatcttgaagcaatgtgtcaccagatgggacctctcattgatgaaaagctggaagatattgatagaaaacattcagaactctcagaacttaatgtgaaagtgatggaggccctttccttatataccaagttaatgaacgaagatccgatgtattccatgtatgcaaagctacagaatcagccatattatatgcagtcatctggtggttctgggtctcaggg

SEQ ID NO: 84254 - DNA, 381 bp, Homo Sapiens
accgagccgggcctcaaagtgccctttcaacaggcattcccgggggccctcctcggaggggtggtgccagtgtgcttgtgaaatttaagcgtccagtgtgggttttgccggcctcatctcacgctgatgagacagaacagggcatctgactgctcttgggcacagctagggaaactgaggctgatggggggcaggaaacctgactgtcctcatgcacagctggggaaattgaggctgggggcaggacagctggccgcccttgtgtacagatgggatacagtttgggagtgggacacctgattgccttcctgtacagctggggaaactgaggctgggacatgacgtctgatgtttttgtgtacatctggtaacagttacgca

SEQ ID NO: 84255 - DNA, 499 bp, Homo Sapiens
  misc_feature (345)..(345): n is a, c, g, or t
  misc_feature (402)..(402): n is a, c, g, or t
  misc_feature (420)..(420): n is a, c, g, or t
  misc_feature (438)..(438): n is a, c, g, or t
  misc_feature (456)..(456): n is a, c, g, or t
  misc_feature (470)..(470): n is a, c, g, or t
gaagggacaccctccccatttcatgccttgcattttgcccgtcctcctccccacaatgccccagcctgggacctaagggcctctttttcctcccatactcccactccagggcctagtctggggcctgaatctctgtcctgtatcagggccccagttctctttgggctgtccctggctgccatcactgcccattccagtcagccaggatggatgggggtatgagattttgggggttggccagctggtgccagacttttggtgctaaggcctgcaaggggcctggggcagtgcgtattctcttccctctgacctgtgctcagggctggctctttagcaatgactcanccaatttgagaacgcttctgattaagaggctgaattcagaggtcactcttcatccanagctccagatgatgcaanaccagactgagggagaantgctcacccttccttctntttcaggccttagnttgcaaacccagtgtggctttatgcatga

SEQ ID NO: 84256 - DNA, 775 bp, Homo Sapiens
ctcattcttgcctgctagtatggcctacatgccacttacgttttaagttatttaggaacacaaaggacagacaaaaaagccatatgcacatgcctcattttctcttatttttgatctatctagtaattcttttgctgcctgtctcttctccattttccttcttcttttttaagcatttttcatattcttcactgtcttctatttggtcttgattaggtgcatctatctcttcgctctgtcttccacaaacaaaaattctgccttcagacatttggtgttagtatttcacactcagttctccctttttttacataaaggattgagtttcctttttatgatgattttacctttatagcaattttgaattttgcattctattgctagtattgattcaggtacaccattaagatacaacattctagaagtctattaccttaggagttaattaaacatgatatttgaagaataatgaaatgctttatagttgtttgaggcataacaatgtgtatttgttttactggatcatgttttgaactgactagggagggtagcacctgcctcagatagtaccaacaatgctgtttcactgggtagtctaaaactagcttatagtttaacttaacttgttgtgtatgtgaatttagggatggaaactttttttcccctatttattctttgtttccttctgggaaaaaaccccacaaaaatcagcactcctttatggatacattggagcttttgaaagaattgtaaactctaggaaggggaaatatgc

SEQ ID NO: 84257 - DNA, 754 bp, Homo Sapiens
  misc_feature (78)..(78): n is a, c, g, or t
  misc_feature (84)..(84): n is a, c, g, or t
ggtccggaattctcgggatatcgtcgaccacgcgtccgctggcaaactatccatcagcctttcatagtgtcatgtttnaacccntgtggaccccaggttgttggccacagccaattcaaaggaaggagtgggactctgggacattcgaaaacctcagagttctctcctgcgctatggtggaaacctgtccctccaaagtgccatgagtgtacgattcaacagcaacgggacccagctcctggccctgaggcgacgcctgccccctgtgctctatgacatccattcccgcctgcctgtgtttcagtttgacaatcagggttacttcaactcatgcaccatgaaaagctgctgttttgcaggagatcgtgaccagtatatcctttcgggctctgatgacttcaacctgtacatgtggagaattcctgcagatccagaagcaggtggcattggtagggtggtcaacggagccttcatggtgctgaaagggcatcgatctattgttaaccaagtccgatttaatccccacacctacatgatctgctcttctggtgtagaaaagattatcaagatctggagcccatacaagcagccaggatgtactggagacctcgacggtcggattgaggacgattcccgctgcctctatacccatgcaagagtacatcaggccttgtgctgaaccagtgggcagtggcctgtcgcatgacctacgccaacccagatcggtccaggaaggacccccggatgatcggcc

SEQ ID NO: 84258 - DNA, 865 bp, Homo Sapiens
cgccaccgcccagctgcccaggagcccagccaggactggccatactgccaccgcacacgtgcacacacgccaacaggcatctgccatgctggcatctctataagggctccagtccagagaccctgggccattgaacttgctcctcaggcagaggctgagtccgcacatcacctccaggccctcagaacacctgccccagccccaccatgctcatggcgtccaccacttccgctgtgcctgggcatccctctctgcccagcctgcccagcaacagcagccaggagaggccactggacacccgggacccgctgctagcccgggcggagctggcgctgctctccatagtctttgtggctgtggccctgagcaatggcctggtgctggcggccctagctcggcggggccggcggggccactgggcacccatacacgtcttcattggccacttgtgcctggccgacctggccgtggctctgttccaagtgctgccccagctggcctggaaggccaccgaccgcttccgtgggccagatgccctgtgtcgggccgtgaagtatctgcagatggtgggcatgtatgcctcctcctacatgatcctggccatgacgctggaccgccaccgtgccatctgccgtcccatgctggcgtaccgccatggaaagtggggctcactggaaccggccggtgctagtggcttgggccttctcgctcctttctcagcctgccccagctcttcatcttcgcccagcgcaacgtggaaggtggcagcggggtcactgacctgctgggcctgctatgcggagcccctggggccgtcggacctatgtcacctggattgccctgattggtgtcaggggccctaccg

SEQ ID NO: 84259 - DNA, 1263 bp, Homo Sapiens
cctcaccgggtcataccaggttcgacaactttccctacggtttttccggacatcttctgtagtcgccatgccatcacctggacaaccctcctgagtggagtgtgtgcaaatgtactctcgtacgtctcaatcgacaacatctttgcccactccttccgcaactgtgttagccagacaagcaccttcctggatttgccagtccatggagagcccctgccagcccgttcatggctgctgcaaaaggacaggtaagggtcggaaagcgcactgcccaccaaaatggctggtatgggcacttaacatgcccaccctcatggtcactgtggatggtgaggtacaggcgcgtgagctcagtgaactgatgatccagtatagcctaaccatgttggtgaaattgtgagacccagtccaggttagagtcaatggcccccaataccgctgccttctctgtagagatttcggtagatctttgctgcaacacaaggtagctttgcgattagatccatagagtcttcataaatcaactcccagtacttggttcggctgataccctgtgcatatgctcgggcaaagttactttcactgttgagggctgtaacagctgcactgagctgagacatggggtgtagattggtgggaaagttgtccagcatggtgaccacatgggaaggcagagctgccctctttgcccactcttttgagagccaagatacctgttcctctgttgggatatgtccagttaccagcagccaaaataagccctcaggcaggggttcttccccacccttagccttgggtagcagtttctggcattcagggatactaaagcctcggaaacggatgccctcatcaggatcaagaactgatgtttcatagaccaatcccttcatgcctctcatgccaccatacatcatgtccacagtgatttggcccaccaccgtcttgccatgttgctgcctgaaagtcttaattctggcctgctccttaggtatcaggtcagccaatatgtctttcaaattcgtggaggaagcactggcatgccgggctgcaagaacaagacaagatgcattcttggttcccaagagccgggcggccgcagtaagtaaagccatggcgggcgatctccgggatctggtggggaggtaagaaagggagagagctgcggcaggaacaggagccgccgccgctgcaccagaggccgcgccgacgggttgacaaggttgaaagcctcgtgccgaattcgccacccaggcctcgctacct

SEQ ID NO: 84260 - DNA, 1032 bp, Homo Sapiens
agaaactgggggcccccgtcgccacagcgagggagacccgcccaggtgtggcaacgcccctgtcggtgtggagaccgcggtggtcctgcgaagcagaagccaaaagggggatgaggagccagcccggataaggccaggccgccatccccgccctctcttagagattccgtagaatcttccgcaacaacagggtagctttgcgatagaaccccacagagtgcgttcaataaatccaagcgccgcagtacttggttcggctgatacccctgtgcaatatgctcggggcaaaggtaacttttcactgttgaggctgtaacagctgcactgagctgagacatggggtgtagattggtgggaaagttgtccagcatggtgaccacatgggaaggcagagctgccctctttgcccactcttttgagagccaagatacctgttcctctgttgggatatgtccagttaccagcagccaaaataagccctcaggcaggggttcttccccacccttagccttgggtagcagtttctggcattcagggatactaaagcctcggaaacggatgccctcatcaggatcaagaactgatgtttcatagaccaatcccttcatgcctctcatgccaccatacatcatgtccacagtgatttggcccaccaccgtcttgccatgttgctgcctgaaagtcttaattctggcctgctccttaggtatcaggtcagccaatatgtctttcaaattcgtggaggaagcactggcatgccgggctgcaagaacaagacaagatgcattcttggttcccaagagccgggcggccgcagtaagtaaagccatggcgggcgatctccgggatctggtggggaggtaagaaagggagagagctgcggcaggaacaggagccgccgccgctgcaccagaggccgcgccgacgggttgacaaggttgaaaggaggcggctgaaggaaagagtagacgaaccggcgcggcgcccagcccgcctcgtgccgaattaaaaccgcatgcctcgtacctagcc

SEQ ID NO: 84261 - DNA, 651 bp, Homo Sapiens
cggcagtcactcactacggtcttaaggtagcgaggcctgggtggcgaattcggcacgaggccgggctgggcgccgccgccggttcgtctactctttccttcagccgcctcctttcaaccttgtcaacccgtcggcgcggcctctggtgcagcggcggcggctcctgttcctgccgcagctctctccctttcttacctccccaccagatcccggagatcgcccgccatggctttacttactgcggccgcccggctcttgggaaccaagaatgcatcttgtcttgttcttgcagcccggcatgccagtgcttcctccacgaatttgaaagacatattggctgacctgatacctaaggagcaggccagaattacagactttcaggcagcaacatggcaagacggtggtgggccaaatcactgtggacatgatgtatggtggcatgagaggcatgaagggattggtctatgaaacatcagttcttgatcctgatgaaggcatccgtttccgaggctttagtatccctgaatgccagaaactgctaccccaggcctaagggtggggaaaaaacccctggctgaaggggcttattttgggctgcctggtaaatggaacttatccccaacagaagggaccagggatcttgggcttctc

SEQ ID NO: 84262 - DNA, 897 bp, Homo Sapiens
gacggcagtaactataacggtctaaggtagcgaggcctgggtggcgaattcggcacgaggcgcggctctggtgcagcggcggcggctcctgttcctgccgcagctctctccctttcttacctccccaccagatcccggagatcgcccgccatggttttacttactgcggccgcccggctcttgggaaccaagaatgcatcttgtcttgttcttgcagcccggcgatgccagtgcttcctccacgaatttgaaagacatattggctgacctgatacctaaggagcaggccagaattaagactttcaggcagcaacatggcaagacggtggtgggccaaatcactgtggacatgatgtatggtggcatgagaggcatgaagggattggtctatgaaacatcagttcttgatcctgatgagggcatccgtttccgaggctttagtatccctgaatgccagaaactgctacccaaggctaagggtggggaagaacccctgcctgagggcttattttggctgctggtaactggacatatcccaacagaggaacaggtatcttggctctcaaaagagtgggcaaagagggcagctctgccttcccatgtggtcaccatgctggacaactttcccaccaatctacacccatgtctcagctcagtgcacgctgttacagcctcaacagtgaaaagtaaactttgcccgagcatatgcacaggctatcagccgaaccaagtactgggagttgatttatgaagattctatggatctaatcgccaaggctaacttgtgttgcagcaaagaatctaaccgaatttctacagaagaaagcagcggtattggggccattgaactcttacctggatggtctcaacattcacacatgttaggtatactgatct

SEQ ID NO: 84263 - DNA, 1868 bp, Homo Sapiens
  misc_feature (1816)..(1825): n is a, c, g, or t
caggccagaattaagactttcaggcagcaacatggcaagacggtggtagggccaaatcactgtggacatgggcatccgtgtccgaggctttagtatccctgaatgccagaaactgctacccaaggctaagggtggggaagaacccctgcctgagggcttattttggctgctggtaactggacatatcccaacagaggaacaggtatcttggctctcaaaagagtgggcaaagagggcagctctgccttcccatgtggtcaccatgctggacaactttcccaccaatctacaccccatgtctcagctcagtgcagctgttacagccctcaacagtgaaagtaactttgcccgagcatatgcacagggtatcagccgaaccaagtactgggagttgatttatgaagactctatggatctaatcgcaaagctaccttgtgttgcagcaaagatctaccgaaatctctacagagaaggcagcggtattggggccattgactctaacctggactggtctcacaatttcaccaacatgttaggctatactgatcatcagttcactgagctcacgcgcctgtacctcaccatccacagtgaccatgagggtggcaatgtaagtgcccataccagccatttggtgggcagtgccctttccgacccttacctgtcctttgcagcagccatgaacgggctggcagggcctctccatggactggcaaatcaggaagtgcttgtctggctaacacagctgcagaaggaagttggcaaagatgtgtcagatgagaagttacgagactacatctggaacacactcaactcaggacgggttgttccaggctatggccatgcagtactaaggaagactgatccgcgatatacctgtcagcgagagtttgctctgaaacacctgcctaatgaccccatgtttaagttggttgctcagctgtacaagattgtgcccaatgtcctcttagagcagggtaaagccaagaatccttggcccaatgtagatgctcacagtggggtgctgctccagtattatggcatgacggagatgaattactacacggtcctgtttggggtgtcacgagcattgggtgtactggcacagctcatctggagccgagccttaggcttccctctagaaaggcccaagtccatgagcacagagggtctgatgaagtttgtggactctaagtcagggtaaaactggagactgggtgaaagtgactaccagaaagtgaggaagcctaaataaaaagtatacttttgtttcagggggcctttaaagacttaagattaaattatatctgaggcactgataatatgtttgaggttaaaatataaattaagactttaaaagatgaaaaatggtcccttcttccctaatcagctcccttcccctgcctggtatgagttgcccatcatacgcatggtcctggaggatgaccaggactaatgcatgtggtatgagtaggtttggccccctcactatctctagagtgagaatctggctcctgtttccatgggtcaaagccggttgcagagaatctgtagtcactttggagctttagcttctctgccaagccctcaataagccagcaaaccaggactctgcccccttctgtttccataagaatcatgttgggataagtcagctgtaccaagcccccttggccctctcccatgcacacaaacacctcctaacaagacctgttgggttaactgggacatgccttgggcaattttttttatactaaccaagggaccataaaggcatggccattttgttgtggactggccccccaatggttggaannnnnnnnnnaaaaactattccaattaaaagttaagggcctggggagatggtc

SEQ ID NO: 84264 - DNA, 891 bp, Homo Sapiens
cactctgcctgagagtcaggcagtcagataaacgtagctacagtggaatgggacgtcagtagatcatgcccatacgtgcttctcgtagagatcgtagatcttgtgcacacaggtagcttgcgatagatcatagagtctcataatcactcccagtactggttcggctgaaccctgtgcatatgctcgggcaaagtactttcactgttgagggctgtaacagctgcactgagctgagacatggggtgtagattggtgggaaagttgtccagcatggtgaccacatgggaaggcagagctgccctctttgcccactcttttgagagccaagatacctgttcctctgttgggatatgtccagttaccagcagccaaaataagccctcaggcaggggttcttccccacccttagccttgggtagcagtttctggcattcagggatactaaagcctcggaaacggatgccctcatcaggatcaagaactgatgtttcatagaccaatcccttcatgcctctcatgccaccatacatcatgtccacagtgatttggcccaccaccgtcttgccatgttgctgcctgaaagtcttaattctggcctgctccttaggtatcaggtcagccaatatgtctttcaaattcgtggaggaagcactggcatgccgggctgcaagaacaagacaagatgcattcttggttcccaagagccgggcggccgcagtaagtaaagccatggcgggcgatctccgggatctggtggggaggtaagaaagggagagagctgcggcaggaacaggagccgccgccgctgcaccagaggccgcgccgacgggttgacaaggtgacctcgtgccgaattcggcgcgccgtcgacttcatactcttcccccctaa

SEQ ID NO: 84265 - DNA, 537 bp, Homo Sapiens
tctggtcaactactctgcacaaatgagggtaaaagaattaggcagggggaagaaggaatgaggagttaatgtttaatgggaacagtttctcggtttgggcagacaaaagttctggagatggatggttgcacaataatgtaaacatatctactgccactaaaccatatacttaaaaatgattaaaatggtaaattttatgttatgtatattttacactacttaaaacatttaaaagaattaggcaaatgtattgatattcccatctcactataccactgagtaaattatttgttaaatagtaatataataataatagcagctataacaataacaatagtaacaaacacttccaggaaatactcaggataataagaggccaggtggttgccaaatcctctgccccaaggtcaggctggccgcaatgattcttattcttagtcttcttttccaaaccttaccgtggaggaagcactggcatgccgggctgcaagaacaagacaagatgcattcttggttcccaagagccgggcggccgcc

SEQ ID NO: 84266 - DNA, 726 bp, Homo Sapiens
  misc_feature (40)..(40): n is a, c, g, or t
  misc_feature (400)..(408): n is a, c, g, or t
  misc_feature (544)..(581): n is a, c, g, or t
cataattttaaaggttaaagggcctaactaaggctggagnagcaggaatagagctgtgctcccaacatccctatcacaaacatatgacgaatgaacaacaaaacaactgaatctgtttacatcataaccattgtatatgtgatacacaactgcttgctttctatgggttaataccacccactgcaagactagagatggcagtcaatggagcatgcttctttacaaataagcctaagtctacaactgcagaaataacatggaaacgtttcagtctatccagagtacttaaatatacttttaaatttttcctaagaaattaattttgatagtatttcccaagtccttcaactaagataccttgataatttcggtcttttttacatcaaaatctatccgttgnnnnnnnnnttttccaggtattaggaataaggaagctggtaacagcatgtattcacaattaattgttaatatttttcagtaagttacaataaactgttttgcatgcttgaaaaactgtaaagaaaaagaatatttataggaggannnnnnnnnnnnnnnnnnnnnnnnnnnnnnnnnnnnnnaaaaacaacccctaatatttatctctgacaacacaggtggtgtgtataaagttcatttccatgcttattacacaaaaataacgatcagaaatatcaatctatcagtgtcagctgatatatatccaattaattcactgcaggaggg

SEQ ID NO: 84267 - DNA, 1004 bp, Homo Sapiens
  misc_feature (478)..(536): n is a, c, g, or t
  misc_feature (564)..(612): n is a, c, g, or t
  misc_feature (615)..(647): n is a, c, g, or t
  misc_feature (679)..(809): n is a, c, g, or t
tatttatgaactctagtgccacaccccatttcttcccaggtttcaccccctcttcccaggtttcacccaccccaaccagtgttgtttgcaacacttcagcttctctcctcacgaagcacgtctccagagacgcctcttccgcaacttcccagggaagccatttctgcctggacccaccacagctcccaacctgtcacgcacccctggagggttttgctctgtaatcctgatttagaaatcctcttatatgaaaccactgtaatccacatctggttagacaattggaaaagttcattgaaaggagaaataataaaaatggcatccatcccttaaatgttgtatgccaacgtaaaacacattcgacaatgaccctgggctaaggctctaccttacagagaaacctgtatcggtgttcccctccattttccttacataaaccaaccaaaaatcttcagttgttccgttctctgtctctctnnnnnnnnnnnnnnnnnnnnnnnnnnnnnnnnnnnnnnnnnnnnnnnnnnnnnnnnnnntttttgagacagagtttcactctgtcannnnnnnnnnnnnnnnnnnnnnnnnnnnnnnnnnnnnnnnnnnnnnnnnacnnnnnnnnnnnnnnnnnnnnnnnnnnnnnnnnnaccgcagcctcccaggtggctgggactacagnnnnnnnnnnnnnnnnnnnnnnnnnnnnnnnnnnnnnnnnnnnnnnnnnnnnnnnnnnnnnnnnnnnnnnnnnnnnnnnnnnnnnnnnnnnnnnnnnnnnnnnnnnnnnnnnnnnnnnnnnnnnnnnnnnntgaaccatcgcgtccggcctcccaaatcttttacagttgtcttgttcacttctcattcagcagcattttgagttgggaggggtaacaactcaccttaatcaagtctctctaaagcattcaacttagttttactaggttcatttcttgtagctcattggtttaactaatagttccccaaatcacatcctaccagta

SEQ ID NO: 84268 - DNA, 1203 bp, Homo Sapiens
tccatggtgaattgcatctttcagatgtgctttcaattcactggtttttaatttcccattcctgatttactgaggagtaaaggtgagaatcatccaactgatgacaaagtaaaacaggaaaacaggataaacagctagggctctgcggtttggaggctggctatcagcaaggaaagctgtggaggcaactatagaccaggcaaacatcacaatcaccacaaaaagccgaaccatgaagtttacaggtcctggatcagccaaaagtaccagccggcaaatcagcattgctactgtcaagggaagtatacagtaacccagcacacagaggctctgaaaaaaagatatgttccctccaagaagttttgagttgagggtgatggtaactgcaccaaaccagacaatgacaaacacctctgcaaattggggccctccatctttttcactatctgcagagtctctttgcagcattaatgcgagtgtcacacaaaggatcaaagggccccacaaatcccaatctctcaaaagagtattacttttccttgggtacaaaacatgcatgaattttttcccaacagcttttagatcacgcatgatggtattgcgaacagattcatttaatgtggagctgtcaaactcccggatgcgagatctcataggaatggtgatttctccttctacggggatgtcttgtgagatggatatatctgaaaggcctgcaaacaggggcctgggcgatgctgtccccgggtctcctggagactcctccgcttccgccatcttggccctccttctcccgggtcgctcccacaggtctttgcggaacctgcgacgtggaggccactgccggtcagcgcgtcatcgcgtgacggccgcgtcacctaatggcgcctggcaatggccggcggccccggcccttcgctgtccctcggtcctcggggtgtcagggacagctccgcgtcgccttgtctcgcttcttcggggccacgggtccagctagacacgcttagcctttaacactcaagccggattctcagaccgctccttcgctctcgcgaccacggctgccctctccaccccaccgactcccgcccatttcccgttctcaggagttggcttggagtgccagaccctcgatcacggcacctctaggaaagagcctgcctctcttccttcccttccccggctaccgagcgacttcaagtt

SEQ ID NO: 84269 - DNA, 361 bp, Homo Sapiens
  misc_feature (21)..(21): n is a, c, g, or t
  misc_feature (33)..(33): n is a, c, g, or t
  misc_feature (44)..(105): n is a, c, g, or t
tcaaattagtaagcagcagcngacccacatgcnaggacactaannnnnnnnnnnnnnnnnnnnnnnnnnnnnnnnnnnnnnnnnnnnnnnnnnnnnnnnnnnnnnctctgccccctttatcaactatgaagcagttcagaagtgctcattaagaggtggagtaagaatgtgaatggaggcagcctgacctcaaagtcaaggatctttaccaccaacttccctttttaccaactcctatcatgtagaggtccacacaaagcaatgaccaaaaaaagaagtttcataatccttattacatagatttagaaaactgattctattcttgttaccagttagatctaagactgttaaaagcccttat

SEQ ID NO: 84270 - DNA, 928 bp, Homo Sapiens
  misc_feature (65)..(106): n is a, c, g, or t
  misc_feature (110)..(144): n is a, c, g, or t
ctagacttgctactacgaactcaaccttactaagagagccgacttagacggtcggggctgttctnnnnnnnnnnnnnnnnnnnnnnnnnnnnnnnnnnnnnnnnnnccgnnnnnnnnnnnnnnnnnnnnnnnnnnnnnnnnnnncagtcgacggtaccggacatatgcccgggaattcggccattacggccggggagccccagcttcgcgcagggatggagccggaagaggggacgcccttgtggcggctgcagaagctgccggccgagctgggcccgcagcttcttcacaaaataattgatggcatttgtggtcgagcttatcctgtgtaccaagattatcacactgtttgggaatcagaagaatggatgcacgttttagaagatattgccaaatttttcaaagccatagttggtaaaaacttacctgatgaagagatatttcagcagttgaatcagttgaattcacttcatcaagaaactatcatgaaatgcgtgaaaagtaggaaagatgaaatcaaacaggctctgtcaagagaaatagttgctatttcctctgcacagctacaggattttgattggcaggtaaagcttgcactttccagtgacaagattgctgcattacgaatgccacttttaagcctgcatctagatgtaaaagaaaatggtgaagtaaaaccttattctattgaaatgagtagagaggagctgcagaatctaatacagtccttggaagcagcgaataaggtggtcctgcagttgaaataactggaaatgatgaataccagtcctatcagattttattgctccaacttatatggcagagtgaatactgcgtgttcagaaaccttgtgatgtcttgactgttgcaccaggctgagaaagcagcaatattgatattataaagataaaaattttatccacatttc

SEQ ID NO: 84271 - DNA, 761 bp, Homo Sapiens
tcggctaaggtacgaggcctgggtgtgtaattcggcacgaggctcaccaccaagaatggtggtggacaacaccacagccaaggagttagcagactctctgggcatccccttcttggagaacgacgcgccaagaatgccaccaatgtcgagcaggcgttcatgaccatggctgctgaaatcaaaaagcggatggggcctggagcagcctctgggggcgagcggcccaatctcaagatcgacagcacccctgtaaagccggctggcggtggctgttgctatgtgttagggggcacatggagtgggacaggagggggcaccttctccagatgatgtccctggagggggcagggaggtacctccctctccctctcctggggcatttgagtctgtggctttggtggtgtcctgggctccccatctccttctggcccatctgcctgctgccctgagccccggttctgtcagggtccctaaaggaggacactcagggcctgtggccaggcagggcggaggcctgctgtgctgttgcctctaggtgactttccaagatgcacccctacacacctttctttggaacgaaggggctcttctgtcggtgtccatcccacccccatgtatgctgcactgggttcctctccatcttcttcctgctgtactgcccaagaactgagggtctccccggcctctactgcctggctgcgtcagtgccaggcgggatttggcagggatcaggcctggattcaggcctgtgttggctttga

SEQ ID NO: 84272 - DNA, 911 bp, Homo Sapiens
ttgaattatctagaggcacagcacagacaggctccggcctgcctggccacaagccctgagtgtcctcccttagggaaccctgacaggaaccgggggctcagggcagcagccagatgggccagaaaggagatggggagcccaggacaccccccaagccccagactcaaatgccccaggagagggagagggaggtacctcctgcccccctccagggacatcatctggagaaagtgccccctcctgtcccactccatgtgcccctcctagcaacagccaccgccagccggctttacaggggtgctgtcgatcttgagattgggccgctcgcccccagaggctgctccaggccccatccgctttttgatttcagcagccatggtcatgaacgcctgctcgacattggtggcattcttggcgctcgtctccaagaaggggatgcccagagagtctgcaaactccttggctgtggtgttgtccaccaccttcttggtggtgaggtcgctcttgttgcccaccaggagcttattgacgttctcgctggcatagcggtcaatctcctgcagccactgcttcacgttggcgtaggattcctggtcagtgacgtcatacaccacgatgatgccatgagccccccggtagtagctggaagtgatggtccggaaccgttcctggcccgctgtgtcccagatctgaagtttgatagttttgccatccagctcgatggttcggatcttgaagtccaccccgatggtgctgatgtagctctctgtgtacgtgtcatcagcaaaccgcaggagcaggcatgacttgcccacgcctgagtcgccaatcaaaagcagcttaaacaggtagtcatattcggggcctcgtgccgaattcacacacccaggcctcgctacctagcctaggtt

SEQ ID NO: 84273 - DNA, 1582 bp, Homo Sapiens
gatggggcctggagcagcctctggggggcgaccgagcgggccgccgccgccgccatgaaccccgaatatgactacctgtttaagctgcttttgattggcgactcaggcgtgggcaagtcatgcctgctcctgcggtttgctgatgacacgtacacagagagctacatcagcaccatcggggtggacttcaagatccgaaccatcgagctggatggcaaaactatcaaacttcagatctgggacacagcgggccaggaacggttccggaccatcacttccagctactaccggggggctcatggcatcatcgtggtgtatgacgtcactgaccaggaatcctacgccaacgtgaagcagtggctgcaggagattgaccgctatgccagcgagaacgtcaataagctcctggtgggcaacaagagcgacctcaccaccaagaaggtggtggacaacaccacagccaaggagtttgcagactctctgggcatccccttcttggagacgagcgccaagaatgccaccaatgtcgagcaggcgttcatgaccatggctgctgaaatcaaaaagcggatggggcctggagcagcctctgggggcgagcggcccaatctcaagatcgacagcacccctgtaaagccggctggcggtggctgttgctaggaggggcacatggagtgggacaggagggggcaccttctccagatgatgtccctggagggggcaggaggtacctccctctccctctcctggggcatttgagtctgtggctttggggtgtcctgggctccccatctccttctggcccatctgcctgctgccctgagccccggttctgtcagggtccctaagggaggacactcagggcctgtggccaggcagggcggaggcctgctgtgctgttgcctctaggtgactttccaagatgcccccctacacacctttctttggaacgagggctcttctgtcggtgtccctcccacccccatgtatgctgcactgggttctctccttcttcttcctgctgtcctgcccaagaactgagggtctccccggcctctactgccctggctgcagtcagtgcccagggcgaggaatgtggccaggggatccaggacctgggatccagggccctgggctggacctcaggacaggcatggaggccacaggggcccagcagcccaccctttcctctccccactgcctcctctcccttcctacactcccagctcgagccgtccagctgcggtgggatctgagtatatctagggcgggtgggcgggtaacagtgctgggcctgtgtcttgagccctggagggaatctgcttcctgccgccctctgccctgccaaagacagacccatgcccttgcctgcccaccgggccccttttgtccccatgtcaggggcgaggcggaaaggcccacccgggcccgaggcttgggcaccaacctttaaccctcattttggctagaacctcctttccttttccccagggtagcacatctggcttcacttccccatttcgtttttttggagcccccaccacgggaaaggcccttcattcccctggcgcgtaactttcct

SEQ ID NO: 84274 - DNA, 1109 bp, Homo Sapiens
  misc_feature (73)..(73): n is a, c, g, or t
tctttgagcttaggtgagcaggattctggggtttgggatttctagtgatggttatggaaagggtgactgtgcntgggacaaagcgaggtcccaaggggacagcgtgcactccctgctcatagtagtggccaaataatttggtggactgtgccaacgctactcctgggtttaatacccatctctaggcttaaagatgagagaacctgggactgttgagcatgtttaatactttccttgatttttttcttcctgtttatgtgggaagttgatttaaatgactgataatgtgtatgaaagcactgtaaaacataagagaaaaaccaattagtgtattggcaatcatgcagttaacatttgaaagtgcagtgtaaattgtgaagcattatgtaaatcaggggtccacagtttttctgtaaggggtcaaatcataaatactttagactgtgggccatatggtttctgttacatatttgttttttaaacaacgtttttataaggtcaaaatcattcttagtttttgagccaattggatttggcctgctgttcatagcttaccaccccctgatgtattatttgttattcagagaaaatttctgaatactactagtttccttttctgtgcctgtccctgtgctaggcactaaaaatgcaatgattattgatatctaggtgacctgaaaaaaaatagtgaatgtgctttgtaaactgtaaagcacttgtattctactgtgataagcgttgtggatacaaagaaaggagcaagcataaaaaagtgctctttcaaaaggatatagtactatgcagacacaaggaattgtttgataaatgaataaattatatgtatatttgaggccaatttgtgtttgctgctctggtaattttgagtaaaaatgcagtattccaggtatcagaaacgaaaacacatggaaactgcttttaaactttaaaatatactgaaaacataagggactaagcttgttgtggtcacctataatgtgccagataccatgctgggtgctagagctaccaaagggggaaaagtattctcatagaacaaaaaatttcagaaaggtgcatattaaagtgctttgtaaactaaagcatgagag

SEQ ID NO: 84275 - DNA, 429 bp, Homo Sapiens
ggagccaggcccaggacccagtcttggagactctggggaatacgcaaggtttgagcagcccaggcctgttgacggtaaccctttcctgcacaagtgtcaatagtgccattctttgattaatgtctctcttcctgcagactacatgaaagcaaaatttgtaactgtgtaggtaatatacctaatcgttcagcacagctgctgataattggaggtactctgtaaatttttgttgaataaatgaatgaataaaatcttctgattgtctttatctccttctagtctatactgtgttctatacctttctgccctatagctttcagacacttctttataatggagtcttgtcatgcattttatacgtaaagttacttttgtgttaatgagtaatatgtagtaagtacttaaaatatttattttattactctaatt

SEQ ID NO: 84276 - DNA, 649 bp, Homo Sapiens
gcggtaccggcgcatttaggtgagaaagcactagtctacatgcccatctatctggacaccccacagccactccagcccagcatggccatgctgaatgcagacccctcccctagaccacaaatttctgtttggttttccttcctgatgaacagtttctatcctatgtatggagatgggagtgtggtctggagtggggtcaatgtccccgccatgtggctgcctcactttttaatgggctccaaatgacacagagctgggtcacctgggtctcactgcagtttcctggatcagggatactggaaagatgtcatgttccacatggacaccagcctaagctttaggctgacacaaaaagactccctccagcatgcaagtggcatggctcttttttgttaccacgctgttcccttccacttattggtgccagtgcccctcagtcctcctctggtcctgttggtgtccctctccaaatctgaggcctcccttccttagggagagcatcagtcctggagccctccatcgggagctctccattaagaagggcatcttcagaacccagggtggggcccactcgggcagcaggacacacggtgcagcaggagctcagggctgcaatgcagccactgggtgtgacctaaagcggcacaga

SEQ ID NO: 84277 - DNA, 916 bp, Homo Sapiens
caggtaacacacataaaagatgaaagtcatgcaaaaatgttgaaacaagcaagccaccattaaaaagaatctgggtcatcaaattcacagtctaaacttcgctaaagaccaaaagaaaaaatacttacttggtttatccaagctacagacatgttataaagtactcaagaaattaacagcttataaaaatagtggaaaatttttcaatgggagcataaaactaaaatgaactcattatctggcaaagagttcttccaaaatgtcaagtccacaggaaggaatgtgtggccaacctcacgcatcagcccactcataggccaactgcctctgccctttgctcacgttggcttcagaggtgcagggatgttggcagatgcctgctccaggtaggccaaggagccctgagggatgtcggcgggctttttgtgctgcacgttgatgtcctccagcacctgctgccaatgcctcagctttgtcaagtgcttctggactagtgcatctttccgctgtaattcattccttagttctgacacatcctctttgataacttgctctggtttctggacagataactgcaatcttttttgtaagaaaaaacattctgtctgtcttgcaatatccagaaacttctggatacactgatcaacaccggttcgaatttcttcctgatcggtgccattgacatagtcctgactcaccagagatgcaaagcaagcctcgaaagatgactccaactcgtccaccaaagtactgctggaaggtctaggagcgcctggagctgcctgaagaagcgaagcttggcccggaaagcccggcggggcctgagggggaccgggtggctgcccagaaaacataccccctagtggagccgccatgtttcctcggccgattcaaaccagcctcgctacctagcgtt

SEQ ID NO: 84278 - DNA, 475 bp, Homo Sapiens
agcacttcccgtagggacaatcaccacagatcactccagcatgacaaactgaccaaagagagtcccattttggtaaagtgctcctttctcttacaagaaaatttccccagacaagcagggcacagataaagttatatgcaaatgtgactgttaggtctcacaatctactagatgacagtaaaacaccagcatggatgacttccacaatgatatgactttcatgcctcccagtgtgtataaacacagcaggggcacagaaaaacctccctcatttcagtggcaagaacacatgattagcccattaagatggacatagtaataccggattattacactggcctcttaactacccccacttttctgcccttgttgaccatcctcccctgctcctcctcttccaatagtctactctcaatacagcaggcgaaggaatccttttagaaatgtaagtcagatcatgttgctcctctgttcg

SEQ ID NO: 84279 - DNA, 1108 bp, Homo Sapiens
  misc_feature (150)..(150): n is a, c, g, or t
  misc_feature (473)..(473): n is a, c, g, or t
attacctttactggatctgccaaagttggttttgaacaatcctggttcaatgcatgagacgtgcacaccaaaagctttcatgtcccggtcttaagctgtcattgaaaccttccacttgcatatttggatggagtatagccccctccaacngattgcaaggcgacctccaacactggagacattaataactctcccttgagctttcttgaccaaaaggaagcatatttagtgtcacactgatgagtccaaacagggttcacttcaataggttctccgtagtcctctagtgtcagccagtcagtgggagccagcacgccgggaacaccagcattattgatcagaccccagagacctttctccccaacttggttcttcacccactgggcagtcctcttgacattctctgggtcggtcacatccagaagcacagtacgaagtctctctgaggtttctgcctttaaagctgttgatcntgattcagtcagacaggcagcgattacatgaaatccctttttatcaaaagttctggctgccaagtttccaaagcccgagtcacatccagtgataaaaatgtacttatcagtgatgtcttcaatctttagttttcctttacgagtccacagaaaaccacagaggattaggaggcctagcacccaaaagagcatttttccccctgtgtgtgataggtacactcctttcttgtataatacaagaagatggtgtccttattaaagatgaagtgggacacagaaactgttggtggacttgctcagctgatggcagctttcctgctgtgcacggggaaggaagagttgtgccaccctggccaggctgatcctcttgaggtcgaggtgcctgggtttccgtagagctctgagtactacatgtgtgaggaatcctcaggttctctccttgctctgtgagtcactcccattgtgacacaacgtgatgactaaatatctcttgaatagctcataaaagccaagaagtccagtgtgcaggctgtggtgggtccaacttctggagtatatccagtgtcactcttgtaaggctgaccaggagggtgaggctggtgatagagcatgcacagtggcatcccgggaattcc

SEQ ID NO: 84280 - DNA, 1071 bp, Homo Sapiens
  misc_feature (961)..(995): n is a, c, g, or t
gattcctgaaaaaccgtaggtgagtcaccaaaagtataagccttcaatgtaaaaagaaatatcgctttccttttgatggccccaaagcaatttttctggttttcaactccaacttgtaaccaccctgaagtcgctcaccagtgaaaatttgttttcgcgtcccaggtgctatctataaatatatttttttcaatttgtgccttgcactgctgtcattcaatcacagaactcttgttcttcagttcttttgcgtttaaaagatggcttgtcagggtcatcatttttgcctctaacattattttgaatccttttttgcagatgaaaagaaatatcttttattgagatagactgaggtcccaggaaaaatgagtgcaacttcatggtccttttcttcatattctggaatacacggatacgtgtaaatgtttacaaattcaggtgctaagagttttgcatgtatagcagtacttttgccatctgtttcatttggatgtttaatgatgtcaatcttcaatggaagcttcacaagtggaatctgttcaataggtacattttcaactggaacataacatgtatagcagtagaacattctggaaccaccacatttgagacattttgatctcccactttgctgagctttttgaagaacttcttgagatgctaaacataagttttgaaggggatcttctgaagctatggaagtagtttgtgactgttttgtttccacaaattttgaactattttcttcacttcgtttgagaaatataggtggattgagagacattcttcattcaaaccaaagtttaacggctatttctaaaacacatatcataggtgcactgcacacccgcgagtcctcgaacagctccacacgtctccagctccgcccgagcccgagccacgcgccggccccggccgtaatggccgaattcccgggcatatgtccggtaccgtcgactgnnnnnnnnnnnnnnnnnnnnnnnnnnnnnnnnnnncgccgcttcctcgctcactactccgctgcgctcgtcgttcggctgctaagagctagcgccctatagtgattatcaa

SEQ ID NO: 84281 - DNA, 461 bp, Homo Sapiens
  misc_feature (124)..(124): n is a, c, g, or t
  misc_feature (135)..(135): n is a, c, g, or t
  misc_feature (179)..(179): n is a, c, g, or t
taccacttaacccatgagctgtgtagtaacagcagcagtgcagcccacagacctggagcgtcggatcaagtggatggagaacaaatccactgtgaccagtccagaagcctagaatttagaggcnggaaggaaccncaaaggtgatcctgcctgtgggtttttaactcagccattcagcngcccaagcgattttcagtatctgccttctttgtcgttgtgtctagggtgtctgtttgcttgctgtatattcactgagcacagcgggcttctccactggcacagggcacgcctgggcctgtgccctccctgccccgctgggtcagtggttgaagtcaggatatctgtcactgggcatctaactgggtggggcgggctggtgtgctcagcgtctgtctgtccactttctcccatgcttgttctctggaaggttccctgtcctgcgcccagcctgcaggacccca

SEQ ID NO: 84282 - DNA, 604 bp, Homo Sapiens
  misc_feature (397)..(423): n is a, c, g, or t
taaggtggaaccaaaattcaattgcagtggtgtattctggggtccgaggtcttaaaccctactctgctccctaatcaggattcaggctcagggaatgaataaacccgggacagctaggagaagggaggaggtgcgctcctgtcgccggctagtaggcctgaagataaatcactctattcagcaagatttgggtggcagatgctatttacctttgttctgtctctttgaagcagcgcagggattttccagagaaatcttgacagatgaatgtttatcctccaggttttttggtgatcagaggtcaaactattctcagcctgtttttaatataaacaattctctgggataattttgactgtgaaacggccacctctaacagaaagtccattttaaacannnnnnnnnnnnnnnnnnnnnnnnnnnactgtgctgaataaaatgtttcttttattctaaaatgttttctcagctgaaattttcaagtctgtttctgtccgtaagtgatttgactttctatgtattagatggtaatgaggaaattgcaggttttccagtctacatctatttttaaaattctgagcataaagaatattttattataaaa

SEQ ID NO: 84283 - DNA, 869 bp, Homo Sapiens
taggctagtacgaggcctgggttgtgaattcggcacgaggtgtctaccaggcaatttgagaggaccccacctatcatggggattattattgatcactttgtggaccgtccctatcccagctcctctcccatgcacccctgcaattacagaactgctggtgaggacactggagtaatatacccgtctgtagaagactctcaagaagtgtgtaccacctctttttccacctccccaccatcccagctgatggttcctgggaaggaaggtggggtaccccttgctcccaaccagcctgtccatggtacccaggctgaccaggagagactggcaacctgcaccccttctgacagaacccactgtgctgccacaccctccagtagtgaggatactgaaaccgtatcaaacagcagtgagggacgggcctcccctcacgatgtcttggagaccatctttgtccgaaaagtgggggcttttgtcaacaaacccattaaccaggtgaccctgacgagtttggatataccctttgccatgtttgctcccaagaatttggagctggaggataccgatccaatggtgaatcctccagattccccagagactgaatctcctctccagggcagcctgcactcagatggctccagcgggggcaacagtggcaatacccatgatgacttgttatgatagacttttaaaccagctttttctaaagatgacatttcttccgatggacctggggaccttctatcgggagtttcagaacccactcagctgagcagctctccatagatttggagcacagtccatggtgaagactttgactcattacagagaagcgggtgtgcatgagaaaaatgtccggaatttgatgc

SEQ ID NO: 84284 - DNA, 883 bp, Homo Sapiens
gagagagtatgaagtcgacggcgcgccgaattcggcacgaggagactctcaagaagtgtgtaccacctctttttccacctccccaccatcccagctgatggttcctgggaaggaaggtggggtaccccttgctcccaaccagcctgtccatggtacccaggctgaccaggagagactggcaacctgcaccccttctgacagaacccactgtgctgccacaccctccagtagtgaggatactgaaaccgtatcaaacagcagtgagggacgggcctcccctcacgatgtcttggagaccatctttgtccgaaaagtgggggcttttgtcaacaaacccattaaccaggtgaccctgacgagtttggatataccctttgccatgtttgctcccaagaatttggagctggaggataccgatccaatggtgaatcctccagattccccagagactgaatctcctctccagggcagcctgcactcagatggctccagcgggggcagcagtggcaatacccatgatgactttgttatgatagactttaaaccagctttttctaaagatgacattcttccgatggacctggggaccttctatcgggagtttcagaacccacctcagctgagcagcctctccattagatattggagcacagtccatggctgaagacttggactcataccagagaagctggctgtgcatgagaagatgtccgcgagttgatgccttgtggaacctgcagtaaagtatcctgagtccacagcacccctttgtgcccaagcatacagctccatgatactgcccacctatctgtcgacagtggaggagtgctctcatggacagatcttctgactcgaatctgcgataccagcatgaaaccgcgcg

SEQ ID NO: 84285 - DNA, 926 bp, Homo Sapiens
gcggaacctcggcgcggtgcttccagcagggtctctccgccactccagccccgcgcccctcgccgcggccctcgggcgtctgcgccgcagctgccgcccccgcctctttggagtctctcgcggcctcaaagcgcggcctgcgtcgcttccggcagttcccgaccgcgggcgatggctgccgctgggggcgcccggctgctgcgcgccgcttctgctgtcctcggcggcccggccggccggtggctgcaccacgctgggtcccgcgctggatccagcggcctgctgaggaaccgggggccgggcgggagcgcggaggcgagccggtcgctgagcgtgtcggcgcgggcccggagcagctcagaagataaaataacagtccactttataaaccgtgatggtgaaacattaacaaccaaaggaaaagttggtgattctctgctagatgttgtggttgaaaataatctagatattgatggctttggtgcatgtgagggaaccctggcttgttcaacctgtcacctcatctttgaagatcacatatatgagaagttagatgcaatcactgatgaggagaatgacatgctcgatctggcatatggactaacagacagatcacggttgggctgccaaatctgtttgacaaaatctatggacaatatgactgttcgagtgcctgaaacagtggctgatgccagacaatccattgatgtgggcaagacctcctgaactagaacaaatagggaatatttttcctggaaattttacccaatttttaataaatattcattttcctaaaagggattaaaaggagaaacttggaaatgaatgggacttcataattatgaactagcctttacccaattttaaattccccctttggcataactaaccggaaattttggcccattccttgaaaaggtattcat

SEQ ID NO: 84286 - DNA, 737 bp, Homo Sapiens
ttcggcacagggtgggctgccaggcagttaggcctatggagagctgctgtcagtctctctaggaggccatggtttcctgcatgtgggggagagccccatccccagactctggaagtgagtttaatttcccaaggcaagtctgcctgattgtcctctcctttccttaccttcagcaccaagaagtttccggtcccggtacagatcagtgaggaagaggctattgacaagtgtggatttgcccaggccagactctcctgagaggagagaggacagaggcaccaaatcagaagggacccttctctgggctgtctgatagtctgcagagacacagctgcttccgtgctctaggagagagggactccttggagatctgatctcactagtagtcgtaattctttggatgggctcagtttgtactgcttcatcctttggagaaggctccagaccctcctttactctcccgagattctagaaattctcaggactcatccagagaaggaatcagccagaagatcctatgaagacaagatcaaaccaaacacgctgtgttcgccccagttttaataagaaatctgactgaaaacaaatggttgaatgtgctgctaacagagagggccaaacgatgatgtctattgtggcagctgaacaaagtgagacttacagaactggaactgctgccctgacagcaactgaagcagaaagagaagaaaggagcttacaaccaggacactcaaact

SEQ ID NO: 84287 - DNA, 517 bp, Homo Sapiens
agttggtgaagagaaaagaaaaagggaagatagcattacaccagaaagaaggaaatcagagggtgttctagggacttctgaagaagatgaactaaaatcctgtttttggaagcgactaggttggtccgaatcatccaggataatcgtgctggatcagagtgacttgtcagactgattggaattggatcatagacggactcctggcctgagtttgagtgtcctggttgtaagctcctttcttctctttctgcttcagttgctgtcagggcagcagttccagttctgtaagtctcactttgttcagctgccacaatagacatcatcgtttggccctctctgttagcagcacattcaaccatttgttttcagtcagatttctgaaaagtgagaggtagttttgatagtaaaaatttttggttgtgcctagaatggctttggttttgttgatgttaattttcaaaaactttaactcttgttatataataaaatgtttaattttaataacagataaaaaaaa

SEQ ID NO: 84288 - DNA, 1025 bp, Homo Sapiens
  misc_feature (882)..(882): n is a, c, g, or t
cgcgcagctccgccgcgggtcgctcgggcgctgtccaggcggagccggccccgcccgggctgcagccatgatcaagcgtttcctggaggacaccacggatgatggagaactgagcaagttcgtgaaggatttctcaggaaatgcgagctgccacccaccagaggctaagacctgggcatccaggccccaagtcccggagccaaggccccaggccccggacctctatgatgatgacctggagttcagacccccctcgcggccccagtcctctgacaaccagcagtacttctgtgccccagcccctctcagcccatctgccaggccccgcagcccatggggcaagcttgatccctatgattcctctgaggatgacaaggagtatgtgggctttgcaaccctccccaaccaagtccaccgaaagtccgtgaagaaaggctttgactttaccctcatggtggcaggagagtctggcctgggcaaatccacacttgtcaatagcctcttcctcactgatctgtaccgggaccggaaacttcttggtgctgaagagaggatcatgcaaactgtggagatcactaagcatgcagtggacatagaagagaagggtgtgaggctgcggctcaccattgtggacacaccaggtttcggggatgcagtcaacaacacagagtgctggaagcctgtggcagaatacattgatcagcagtttgagcagtatttcccagacgagagtggcctgaaccgaaagaacatccaagacaacagggtgcactgctgcctgtacttcatctcacccttcggccatgggtatggtccaagcctgaggctcctggcaccaccgggtgctgtcaagggaacaggccaagagcaccagggcagggnctgccactagcaggtggtcacaggttcctgttccccaggctccggcattggatgttgaattcatgaaggccctgcatcagcgggtcaacatcgtgcctatcctggctaaggcagacacactgacacctcccgaagtggaccaa

SEQ ID NO: 84289 - DNA, 507 bp, Homo Sapiens
  misc_feature (392)..(416): n is a, c, g, or t
gtcactgtggctggtgaggacctcaaggaccccatcaagtgtacacagcagcagcaaaatcaagggatgaccctcctctggggccccctgtcctcagcacattccaggcagctgtgccctgacccacagggacccgtggggatgggaggaggtccaggcctgtgttgccagagctggcagtgtgagctgtaggcagggacggggagggactgtcgctgtgatcagagtgggttaagctgaccaggaacacccatttaacccctttttctttttgctttcatttttataaaggaaaagaggacctgtcagataggcagccccatgctacgtgattctttatgttgtgttgttttgttttgtaaattgtataatttttaaatatctgagttttnnnnnnnnnnnnnnnnnnnnnnnnntcttgttatggccttaagaaggggttagtgcatctttcaggggtcactctgccatggggataaaatagctgtttcacaaacagttttattt

SEQ ID NO: 84290 - DNA, 518 bp, Homo Sapiens
  misc_feature (392)..(416): n is a, c, g, or t
ggtgtggctgcacggtaggacgatttccattccatcacgagtgtccaccaccttctcatctccacagtctcacctgtgcttgctgtcctttccattcccacgagcacactgcccccctcacccccgctccgactgctctgtgctgaggctgcctttcgcggtcttgttctgcaagggggggagagggcacggaaggggaggcttgtgcttagggcacctcaccgagaagttctcctcatgtagcaaacaatctgcatcaatggcacacgggtaatggtatcggaaggagcagcctttgttgtagcagcccaaggtggcgccatgctacgtgattctttatgttgtgttgttttgttttgtaaattgtataatttttaaatatctgagttttnnnnnnnnnnnnnnnnnnnnnnnnntcttgttatggccttaagaaggggttagtgcatctttcaggggtcactctgccatggggataaaatagctgtttcacaaacagttttatttaaaaaaacaaa

SEQ ID NO: 84291 - DNA, 514 bp, Homo Sapiens
  misc_feature (14)..(14): n is a, c, g, or t
  misc_feature (30)..(30): n is a, c, g, or t
  misc_feature (35)..(35): n is a, c, g, or t
  misc_feature (42)..(42): n is a, c, g, or t
  misc_feature (58)..(58): n is a, c, g, or t
  misc_feature (63)..(63): n is a, c, g, or t
  misc_feature (86)..(86): n is a, c, g, or t
  misc_feature (145)..(145): n is a, c, g, or t
ctgcagactcacgnacaactgactaagctntccanaattatntgagacatgactcgancaaanaatcatttgtgtctgtcggtaanagctgggtgagggatccgaggggaggctgggctgttgagggcgatggagccgatgtcgngccggagagcaccacgggggcgctgagatttccaagcctttgggttttttggcctttgggggaagagatggagacttggtcttggagcccgatgacaggttcaagggctccagggaatcggagtcatggcaggcggcctccaggaagaggcttctgtgttcagaagggaggggtgagttgggggacagggacggggaccgagatgagaagggtgaggcggatgaaatactggcagcgtttggcaacattaaagaggagatcttggccgagacggacgaggccaggagagcggacgccgccgcagcctctgacgtggaaggcagggacaccaccggcctggtgacgtgcttgtcggttttattggtaaca

SEQ ID NO: 84292 - DNA, 558 bp, Homo Sapiens
  misc_feature (24)..(24): n is a, c, g, or t
  misc_feature (37)..(37): n is a, c, g, or t
  misc_feature (73)..(73): n is a, c, g, or t
tactaattcaagcctttaataggnaacaactccaagngggaaataggaatatttactaactacatactactgnatcatccaggactcacaacccaaatggataccacattaatgaaacacccatctatcttttagaaagaatgccaaagcacctcagcaaaagactgttcatgtgctcgagtagtatatgctaaagtagttggaatcagtggagcatatgttagtacatggcaggaacagttctaggcactcaagacaacaagatgtaacaacatcaagtccttgctgtcatggattttacttggttgttccaaacatctaatcatctaacaaacctgcaagcacctgctacataattggcaccgttctagatgctagacccttgagagagcccgataccattgcctgatgatttcattcctttttagaagaaaatgaaattaacacatggtaattgttaagcaaattataccaatatttgtgtgttctcaacttagaaatcatattttgcaacaatgggaaagaacatgtagtgtgtgcaaaattcttgcaaaacat

SEQ ID NO: 84293 - DNA, 1114 bp, Homo Sapiens
  misc_feature (114)..(114): n is a, c, g, or t
  misc_feature (993)..(1011): n is a, c, g, or t
tgcactttcaaagtgtaattccaatcacttcaccgtccaggttactaacgggcctcccgagtttccatagtgatgatggcgtcggtctggatgtagtccatgtctgagttgcgnaccccagctctttgccgcctcgctgggtggtgctcacgatcccggtggtgactgtgttttgaagggaaaacgggcttccgatggcgaccacgaactctcccggccgcagctctgaggagcggccaagcagcaggacaggcagcttgccctggtggtcaattttgatgagtgcgatgtctgctttctcatccacatcctggattttggcttcgtaaggggcaccgttcttcagctcaacttggacccggtgcttgtgggtcaccacgtgggcatttgtcacgatcagtccatcttccgacacaataaacccagacccactagccaccggcacctctcgtttagaaaacggaagcttgcgaaacaattcgatatgaaccacggcaggggcgatcttctccaccacgtccgcgataaagttatatttatggcgcaaactgttgggatcttactgcccttggccggcaggctccgcgctgcaggacgatgaccggcggccggtgcagcctctcggagcggcggctggcggcgcgcagctggcacaggttggcgtaggtgttggcgtcgctgccgcacaccggctcgctgctggcgcacacacagaggccggcctgcgcgcgccgccgcaccgtggccgaggctggcaccccgaagggcaccacgcactgcagcccctcgccgcacgggccctcctgcaggccgcacgcggcgccctcgggcgcgccgcacacctcgcagcagccgcacgcgtcccgggcccggccgccctcgcagtgctccggctgcggcgggcagcgcgccggctcgcagcggtctgggcacccggcggccaaaggcgccgagcggccggcccgggacagctgcgccgaggcgggcgccgcnnnnnnnnnnnnnnnnnnngggagaagagcggcgcgcggcctcgtgccgaattcgccacccaggcctcgctactgtaggtttgattgcgtcgatgtggttgttgtttatatgttgtgtctgt

SEQ ID NO: 84294 - DNA, 549 bp, Homo Sapiens
  misc_feature (14)..(14): n is a, c, g, or t
  misc_feature (76)..(76): n is a, c, g, or t
  misc_feature (114)..(114): n is a, c, g, or t
agattttggcaagnggatattagaatctttggataatttaagcacatcaaaaaatcccctattctcaaatatctgncctacaccttgaaattcctaccattggacattcttttntttaacctttaactaacaaatgccaatatcctactgctcaaatattgacattctatctgggaggggctgctcattatcatccaccaaatgcccatagatctctaggacagggtaggttttgatgaaaaagcagcgcatgaatattataatgggggtcttagacaagatgatgatggtgaggaactgaggagtaaaactataggactataataaagaagaaattcagagcaccaaaacaaaacattaaggaatgctaatttcctccttaactcccaacttttcctagtcaggccccggctcataggtcaaggagctgacaggacggtgggtacctcaaagcgaggctgagctcataaggccacagggaagggtgcaactcaaatttgggaggttctgttcaccactggggggctagtattgggaaaaggtcctagg

SEQ ID NO: 84295 - DNA, 1191 bp, Homo Sapiens
  misc_feature (668)..(668): n is a, c, g, or t
cagtcaaagatcctggagcatatggaatttaaccggcgttctaatccagaagataagtgtttaaacaaacttatgaggggaagtggggtttggtggaggggaatcagaagggaaagaaggtcccttccttttgctttcttcttacccagataccatcggacatactctgtttggcacttgagggctctggtattttggcaaagcaattatgggaggcccaatcctagacggcaactggggacgaaggagtctttgtgactagatggaagtctttcccctctgcagtctgaaatcaccttgtgtcttctcagaggtagcagtccccagccgattccttgagcacaagtctctctcagtgggaattagtcatgcccaacttcactttctcttcattttccacatcataacctcctctcctatggtacctaaacatgagaagccccacgatgaccagcagacagacagatgacagcaccacagccaccacggccaggatggttgtgtggtcataggtatataagcgattttccactgggagctcagcccatgacacctctctccatggtaacccgggtggcagatgcaggagggagcccggagctccttcacatatttgcattctccatggatgcagaagtccttgtattaccgaagacatgggtccctcnttcttccctagcccatgccctatcttctctcttaccccatgctcctccttgtttggtgtggccagtgcttgtggcttggaggataaagtgactctcaaaaggtccagatctgcctcttgcaagtcacggactttccggtcccggccgcctcctaggggtagcagctggtccgtggatacagtgggagggtccgggttgctggttccagcagctagccctctccgaagccgctccaggctctcgccagtcaccagtgccgagagaactgcagccagaaagagcttcagcaccaccgacggcagcagcttcatggtcccgcaccgagaggaggcggcgaggcaccagtcactttcgaagcggcggccactgggcgctggcaccagagctgggcggcggagctcaggagattccgccgggcaccgtctgccgcccgcctctgcgtgcaagcctggccgggacccaggcgcagctcgctcttcttgagtgtcttgtcttgctcactcagcccgcccgcgcggccgca

SEQ ID NO: 84296 - DNA, 425 bp, Homo Sapiens
caggaaagatccagttaaatcacccactgaggtgacagctcattagcggggagagagatggagcatcgagtgacactgggccatccaggcggctctgctcccaccagacaggagctaggcctcactggcaggggggctgcccacagccttttcaggggctcgcttggcgggtgacggggccgcagccaggccttctctccctgccccttggtgaccccgtggcttcctgtctgctggcctctcctgctacttatcacttcaccacgaactctctgcctgagactggggaagtaagcgggtatcttcgcagtgagcataggttggggactgtgatcttgagaagccatgggccagcaatacctgcttttctgaagcccccaaggagggctctgacattctttttaaaaacaccacaaagcaaaatt

SEQ ID NO: 84297 - DNA, 1464 bp, Homo Sapiens
ggtagttgtcagtccgcctcagagtctggtcttgcagatgcccggtgtgtgaggtggtggcctttgtagagccaccagggagagcaagccacagtccggccagaatcagagcgctgtcagatgttgcctggaaggtttccggtgctggtcctcggcatgggaggtggccacagcagctgctagagagtgaaggagctggaccaagccccgggggaggaaggcatcacggcaagggaaagggtctgcagtcacaagccacaccctcgagagggagacctcgtggcccaagcccgcggcggggcacaacaagtaccagccgttttcccgggccccaccttgggtcctgagagactcagggccaggggtccagaacagttcagcatcaggaatggggcggggaaggcagagagggagaaggggctggctccgaccagagcagagccctggggatagcttgaatctgccctcacaccctccagcctacctctatggagccacagtccactgctccagcccctgggcaaccccccggcccgccctcctggggacacagaggccatcaagggatgggctacggtggccggtgcccaggccagaccagggccgtgggcgtgctcagttaggatcaactgttggatgacgggatggccgcgcaggtgaatgcagggacgcgaccagcaaggcccccgttcaaatggggcaggggtcggaagctgctcacacacctctcaaaaatgaattccaccctccagcctttgcacctagaactcttcgcatggcccagctagtggctcagctgtggtggtcgagtcctttcattcactcaccaggcgaaaccaacatcccacatactctaactgagccccactctgtgccaggctggtgctgggacaccctgaggagacacggggctggtcaagggcaccccgggatggccaggtcaggaactggggagggacaaagagagggagatattgagagagaggaagacgaggaagaaggcaacagaagcagaaaaagcagggactcaaggagccaggttaaagggctgcccctacactcaagggagcaacgagacccctctgccggtgcctcagaaaagtccagaaacccaagcaggatggggacgtggggagttaacttttgaaagtttttagggctccaggagccttgggcacaaaagcccagagaacctgccgggggccagctgatttcttccacgccctctccgggctttccaatgtccacaggagctactgcagcactaacaggggctttggggcctgtatgtgaatgactgccatgtgttagagggtgacggagagtgccatggattcttcattactattgaaagtcttctcatttagaaacatcaggcgtgctctatttttctactctccaacagctacatggcggggaggccaggttttcgtgtgatctcagcttcagaggtctacacccgag

SEQ ID NO: 84298 - DNA, 773 bp, Homo Sapiens
  misc_feature (12)..(12): n is a, c, g, or t
aatttcggcacnaggctgaaattcaggccaaggctccaagtagtctgagtgatgctgtcccccagcgagcagatcacagggtagtgggcaccatcgaccaagcttgtgaaacgtgtcatcgaaggcagcctgtctcccaaagagagaactcttctcaaagaggaccctgcttactggtttttgtctgatgaaaatagtctggagtataaatattacaagctgaagttggcagaaatgcagcggatgagcgagaacttgcgaggagccgaccagaagccgacctcagcagactgtgcagtgagggccatgctgtactcccgggctgtccgcaacctcaagaagaaactccttccgtggcagcggcgggggctcctccgtgctcaagggctccggggctggaaggcgaggagagcgaccaccgggacccagaccctcctatcctcaggcaccaggctgaaacaccacggccggcaggctccaggcctctcacaggcaaaaccatccctgccagacagaaatgatgctgccaaggactgcccgccagacccagttggaccttctcctcaggaccccagcttagaagcctcaggcccatcccccaagccagcaggagtggacatctctgaagcacctcagacctcttctccctgcccatctgctgacattgacatgaagacaatggagactgcagagaaactggctagatttgttgctcaggtgggaccagagatcgaacaattcagcatagaaaacagcaccgataaccctgacct

SEQ ID NO: 84299 - DNA, 632 bp, Homo Sapiens
gcatgttcacatcaagctcatttgataaaactctgaaagtatgggatacaaatacattacaaactgcagatgtatttaattttgaggaaacagtttatagtcatcatatgtctccagtctccaccaagcactgtttggtagcagttggtactagaggacccaaagtacaactttgtgacttgaagtctggatcctgttctcacattctacagggtcacagacaagaaatattagcagtttcctggtctccacgttatgactatatcttggcaacagcaagtgctgacagtagagtaaaattatgggatgtgagaagagcatcaggatgtttgattactcttgatcaacataatgggaaaaagtcacaagctgttgaatcagcaaacactgctcataatgggaaagttaatggcttatgttttacaagtgatggacttcacctcctcactgttggtacagataatcgaatgaggctctggaatagttccaatggagaaaacacacttgtgaactatggaaaagtttgtaataacagtaaaaaaggattgaaattcactgtctcctgtggctgcagttcagaatttgtttttgtaccatatggtagcaccattgctgtttatacagtttactca

SEQ ID NO: 84300 - DNA, 840 bp, Homo Sapiens
caaattcggcatcatttggtcccaaggctgcccattagcaggtaagaatccgactcaattgtcggctcagttgaatgacaggggtaagtcaagggcaaatgagaaggtatcactatctggtgccacccatacacattggtcatatagacacagtctacgttcagtgtagtttttccagagaatcgaaagtgatacggatctgaactttcttctcaaaactcacatttgtgactgtaacagtccctgtcactgttcgctcttgcaacgagcagttctccagacagacaaagttcttctgaaagtggctccggaaacttaagtaatcggttgaaggctgagggaaatctaaaatcaagtttttctcctcgtggtgttttaaggcagaggagatatcattaaggtccaagagatcaaactgcagatcccacgctggttcttctgggaggtcggagaagacatggatcgcagtgagagagaggcccttggagtcagcaaacacaacgcgcttcttggcttggttgtgtgagcacttccagtcattctgtgatttggctttgtgttttatattgagacatgatttcaggggctttaatttattcacaaaatgtcgtcgttgaaattcatcgtacgggcccaggaaactcttcacaggtggtgaatgtgccaagcaaagcctcatggccacatccacgggcatgaccgaacttgtcaaaggacgtggatctaaaacctggatcattctggtgcagctcattaggcagagaggcggcggaccctaaaagccagcacccgctgcctgcaaaaattcgaaccacagctccaggccttgcccccgcggcg

SEQ ID NO: 84301 - DNA, 783 bp, Homo Sapiens
ggggtcgttgccatggatcctggggacgactggctggtggaatccttgcgcttgtaccaggatttctatgcattcgacctgtcaggagccactcgagtccttgaatggattgatgacaaaggagtctttgttgctggctatgaaagcctgaaaaagaatgaaattcttcatctgaaattacctctcagactttctgtaaaggaaaacaagggcttattcccagaaagagatttcaaagtgcgccatggaggattttcagacaggtctatctttgatctaaagcatgtgccacataccagattgctggttaccagtggccttccaggttgttatctgcaggtgtggcaggttgcagaggacagtgatgtcattaaagctgtcagcaccattgctgtgcatgagaaagaggagagtctctggcctagggtggccgtcttctccacattggcacccggagtcctccatggggcgaggctccggaagtctgcaggtcgttgatctggagtcccggaagaccacgtacacctcagatgtcagtgacagtgaggagctgagtagcctgcaggtcctagatgcagacacctttgccttctgctagtgcttcgggccggcatggggcttagttggacacccggcagaagtgggcaccgttggagaatcgcagccctggccctgggtctggtggagagagatggtgtgctgaagttgggagctggggccagggccctgggcccagcattgcagccttggtcagatggggcgtctttgtcttcttgaaccccg

SEQ ID NO: 84302 - DNA, 780 bp, Homo Sapiens
gggatctcgcgagagccgcgcggcccccgaaggctcgcaggcggaagtgagacgccggaagcggtcgttgccatggatcctggggacgactggctggtggaatccttgcgcttgtaaatcgtaccaggatttctatgcattcgacctgtcaggagccactcgagtccttgaatggattgatgacaaaggagtctttgttgctggctatgaaagcctgaaaaagaatgaaattcttcatctgaaattacctctcagactttctgtaaaggaaaacaagggcttattcccagaaagagatttcaaagtgcgccatggaggattttcagacaggtctatctttgatctaaagcatgtgccacataccagattgctggttaccagtggccttccaggttgttatctgcaggtgtggcaggttgcagaggacagtgatgtcattaaagctgtcagcaccattgctgtgcatgagaaagaggagagtctctggcctagggtggccgtcttctccacattggcacccggagtcctccatggggcgaggctccgaagtctgcaggtcgttgatctggagtcccggaaagaccacgtacacctcaggtgtcggggatacacagtgaataagaggtaagccctggcctctaagggctcctatgctggggcaggattaggcagtcccaggcaccagcacccaaccagctgagcagacaatgatgtcagtgacagtgaggagctgagtagcctgcaggtcctagatgcagacacctttggctttctgtgtgc

SEQ ID NO: 84303 - DNA, 814 bp, Homo Sapiens
atctggggacgactggctggtggaatcctggcgcttgtaccaggatttctatgcattcgacctgtcaggagccactcgagtccttgaatggattgatgacaaaggagtcttgtagctggctatgaaagcctgaaaaagaatgaaattcttcatctgaaattacctactcagactttctgtaaaggaaaacaagggcttattcccagaaagagatttcaaagtgcgccatggaggattttcagacaggtctatctttgatctaaagcatgtgccacataccagagtgctggttaccagtggccttccaggttgttatctgcaggtgtggcaggttgcagaggacagtgatgtcattaaagctgtcagcaccattgctgtgcatgagaaagaggagagtctctggcctagggtggccgtcttctccacattggcacccggagtcctccatggggcgaggctccgaagtctgcaggtcgttgatctggagtcccggaagaccacgtacacctcaggtgttggggatacacagtgaataagaggtaagccctggcctctaagggctcctatgctggggcaggattaggcagtcccaggaccagcacccaaccagctgagcagacaatgatgtcagtgacagtgaggagctgagtagcctgcaggtcctagatgcagacacctttgccttctgctgtgcttcgggccggctggggcttgttgacacccggcagaagtgggcaccgttggagaatcgcagcctggcctgggtctggtggagagagatggtgtgctgaagtgggagctggggccaggggcc

SEQ ID NO: 84304 - DNA, 250 bp, Homo Sapiens
aatcctaaatttaattaccttattggatatttgatatttggttatttaatcacagtcatctttaacagcttacactgattggtgttttatctcctgtgatcctttgatggctttttttgcctaccatttcacagaggtttagacagcagtagtagctccctaggagagtttactgatgaaacagcctctgcaagattttaaaagttttgttcttttatagactgatttagaaaaacaaatgattagttaa

SEQ ID NO: 84305 - DNA, 604 bp, Homo Sapiens
agggcgagagagtatgaagtcgacggcgcgccgaattcggcacgaggagaggggagcctgacgactcggaaatttgaataccacagtagcatggagtgtgacctcatggagactgacatcttggagtcgttggaagatctaggttacaagggcccattgttggaagatggagcgctctctcaggcagtctctgctggagccagttcccccgagtttaccaaactctgtgcttggctggtgtctgaattaagagtgctctgtaaactagaggaaaacgtgcaagcaactaacagtccgagtgaagctgaagaattccagcttgaggtgagtgggctactaggggagatgaactgcccgtatctttcactgacatctggggatgtgaccaagcgccttctcattcagaagaactgcctcctcttgctcacatacctcatctcagaactagaagctgccagaatgctctgtgtgaatgctcctccaaaaaaagctcaagaaggaggcggtagtgaggtctttcaagagttgaaaggcatatgtattgctctaggaatgtccaaacctccagccaatataactatgttccaattcttcagcgggattg

SEQ ID NO: 84306 - DNA, 359 bp, Homo Sapiens
  misc_feature (174)..(249): n is a, c, g, or t
gctgaggccactgcgcggctcaacgtgtttgcaaagccataggccaggatattatccatgactcctgatggtctcatccagcccaaacttcttggcagcagcaaccttctcttcctattctgttactagatgtttggacatcaaaggaataatagctgatgcataacactaacnnnnnnnnnnnnnnnnnnnnnnnnnnnnnnnnnnnnnnnnnnnnnnnnnnnnnnnnnnnnnnnnnnnnnnnnnnnnacaaggggaatccagagcactcaaggtactagcattgttgagacaacccaggctgggaaggggaaatggaaaatctatattcagtgcatgctctgatcagggcaacttcc

SEQ ID NO: 84307 - DNA, 969 bp, Homo Sapiens
ttcccgggatatcgtcgacccacgcgtccgagctgatccgtctgttggagattagttgctgctttctgatgtcataactcattcctggatacagctgggtcaacaagcttaggagtaggaggacagatatctcaaggccaggatggaagaatcaccactaagccgggcaccatcccgtggtggagtcaactttctcaatgtagcccggacctacatccccaacaccaaggtggaatgtcactacacccttcccccaggcaccatgcccagtgccagtgactggattggcatcttcaaggtggaggctgcctgtgttcgggattaccacacatttgtgtggtcttccgtgcctgaaagtacaactgatggttcccccattcacaccagtgtccagttccaagccagctacctgcccaaaccaggagctcagctctaccagttccgatatgtgaaccgccagggccaggtgtgtgggcagagcccccctttccagttccgagagccaaggcccatggatgaactggtgaccctggaggaggctgatgggggctctgacatcctgctggttgtccccaaggcaactgtgttacagaaccagctcgatgagagccagcaagaacggaatgacctgatgcagctgaagctacagctggagggacaggtgaccagagctgaggagccgagtgcaggagctcgagagggctctggcaactgccaggcaggagcacacggagctgatggaacagtacaaggggatttcccggtcccatgggggagatcacagcaagagagggacatcctgagccgggaacagggaagaccatgtgggcacgcatccctggagctagaggatgaactcccgaccctcagtgaaaaagtgcctaaccaagggaatgggaacttggaacaggtttaaaaacccaggtgaaggcccctgactcggggaacaaaagaagctcccctgggcca

SEQ ID NO: 84308 - DNA, 1136 bp, Homo Sapiens
  misc_feature (925)..(925): n is a, c, g, or t
  misc_feature (1044)..(1044): n is a, c, g, or t
  misc_feature (1069)..(1069): n is a, c, g, or t
  misc_feature (1097)..(1097): n is a, c, g, or t
gagagtatgaagtcgacggcgcgccgaattcggcacgagggaaaggtgaggggaacagctgatccgtctgttgggaggacagatatctcaaggccaggatggaagaatcaccactaagccgggcaccatcccgtggtggagtcaactttctcaatgtagcccggacctacatccccaacaccaaggtggaatgtcactacacccttcccccaggcaccatgcccagtgccagtgactggattggcatcttcaaggtggaggctgcctgtgttcgggattaccacacatttgtgtggtcttccgtgcctgaaagtacaactgatggttcccccattcacaccagtgtccagttccaagccagctacctgcccaaaccaggagctcagctctaccagttccgatatgtgaaccgccagggccaggtgtgtgggcagagcccccctttccagttccgagagccaaggcccatggatgaactggtgaccctggaggaggctgatgggggctctgacatcctgctggttgtccccaaggcaactgtgttacagaaccagctcgatgagagccagcaagaacggaatgacctgatgcagctgaagctacagctggagggacaggtgacagagctgaggagccgagtgcaggagctctagagggctctggcaactgccaggcaggagcacacggagctgatggaacagtacaaggggatttcccggtcccatggggagatcacagaagagagggacatcctgagccggcaacaggcagaccatgtggcacgcatcctggagctagacgatgacatccagaccatcactgagaaaatgctgacaaaagaaccggaactggacaagcttagagacacagtgaaggccctgactcgggaacaagagaagctccttgggcaactgaaagaagtacnagcagacaaggagcaaagtgaagctgagcttccagtggcacaacagggagaacatcacttaaatttgggacctgaagaagccaaaaaactggcaagaggaacagaatgctcaggctcancgactggaaaaacaaggtggcccanaatgaagaaaaccctaggccagggccancaacggggtggccgaacctggaacccttgaaggagcacc

SEQ ID NO: 84309 - DNA, 1105 bp, Homo Sapiens
  misc_feature (898)..(898): n is a, c, g, or t
  misc_feature (912)..(912): n is a, c, g, or t
  misc_feature (932)..(932): n is a, c, g, or t
  misc_feature (1041)..(1041): n is a, c, g, or t
ggagagagtatgaagtcgacggcgcgccgaattcggcacgaggggtgaggggaacagctgatccgtctgttgggaggacagatatctcaaggccaggatggaagaatcaccactaagccgggcaccatcccgtggtggagtcaactttctcaatgtagcccggacctacatccccaacaccaaggtggaatgtcactacacccttcccccaggcaccatgcccagtgccagtgactggattggcatcttcaaggtggaggctgcctgtgttcgggattaccacacatttgtgtggtcttccgtgcctgaaagtacaactgatggttcccccattcacaccagtgtccagttccaagccagctacctgcccaaaccaggagctcagctctaccagttccgatatgtgaaccgccagggccaggtgtgtgggcagagcccccctttccagttccgagagccaaggcccatggatgaactggtgaccctggaggaggctgatgggggctctgacatcctgctggttgtccccaaggcaactgtgttacagaaccagctcgatgagagccagcaagaacggaatgacctgatgcagctgaagctacagctggagggacaggtgacagagctgaggagccgagtgcaggagctcgagagggctctggcaactgccaggcaggagcacacggagctgatggaacagtacaaggggatttcccggtcccatggggagatcacagaaagagagggacatccctggagccggcaacaggggagaccatgtgggcacgcatcctggagctagaggatgacatccagaacatcagtgagaaagtgctgacgaaggaagtggagctggacaggctttaaagaacagtgaaagcccctgactccgggaacnagagaagctccttnggggcactgaaagaaatacnagcagaccagggagcaaggtgagctgaagctccaagtggcacaacaggagaaaccatcacctaaattttggacctggaaggaggcgaaaaagctggcaagaaggaacanaagtgctcagggctcagcggactgaaaaacaagttgggcccacaatggaaggaacccctagggc

SEQ ID NO: 84310 - DNA, 1063 bp, Homo Sapiens
gcaagtaactataacggttcctaaggtagcgaggcctgggtggcgaattcggcacgaggggctcttccgcaggctcagttatgggttcctgtgtgcttagtcatcgggtccgacacaggctggactgatctggggagccgcgaagggcctgccttcacaaagggacgtaacgcaagtactgcgggcagtgtttgaatatggccctgaacaatgtgtccctgtcctccggtgatcagaggagcagggtggcctaccgctcttcccatggcgacctcagaccgcgggcgtcagcgttggcgatggtctccggagacggcttcctcgtttccaggcctgaagcgattcatctaggacctcggcaggcggtgcgaccaagcgttcgggccgagagccgtcgagtggatggtggcggccggagcccaagggaaccagatggccggggccggagccgccaagccagattctcaccttacccaatccctgccgttgaacccgatctcctaagaagtgtgctgcaacagcgtttgattgcattaggaggtgttatcgcagctcgaatttcagtttaaacgaacacctttcctctggccctcacttagcttgtgaaacaggcctttttaaaatcctttcttggtgtagcagcaatcgtgtcgttttatttctagatggatgtatttcttccatttaactactgtgggagttatattgaatattgttccttaccactaaggggaagtgtaacaagtcgatcgatctcacgtgggtccatgcagccagaaacgattgggattccgggaaacggtggtgggaccgggatattcgttaggtcgtcaccaaaagctggaagctgatggggaggacacgctccccagaaggctgacaaactccattccgttaactcaagacacattaaacgctttaccctttacttctgtgggcaaaacagaagtgcgtcttttatttccgccggatttattcttgcatttgtcctgggattaccgtttcaattcccttcattttcagaatattctacaaacggactcattcggcgctaaatagagaa

SEQ ID NO: 84311 - DNA, 628 bp, Homo Sapiens
  misc_feature (34)..(34): n is a, c, g, or t
ccagggcagtctcaatgcgtgtctggagcttggntgagctgctgggtcgattgaggcggcattcctcatttatgagggagcagatgctgatggggcttccctcaatgagatccaaacagggctggttgtcctggtagttgatgaatgaccactccaggccctcaactgcgtattcctcctgctgggcccttaggtagtgagccacaaaatgctgctgcagcttctcattggcgtagttgatgcacaactgttccagactgttgtcaggaaatgattcaaatccatacacatccagcaggcctgggaagatggcagagaacccatggggccactgcagggagcagatggggaataggggaccaaggaacccagggtggctgggcccctgccaatgccttatacttggcagcctgggcatcaggctgagtgagcatgacacctgtggtgggcagaacataccttccccaccctccacccaaggtggctcccatctctaccccattcccctgtagagctcagagcaagcaggaaacccaaatgaagtgtgcatgacagcccagagcatcaggcccatttctgagtctgaattctctggttcgtgataagcccagcagtatgagacacgtga

SEQ ID NO: 84312 - DNA, 449 bp, Homo Sapiens
  misc_feature (422)..(422): n is a, c, g, or t
cattgtatctgctgtctgtggctgaccaaaacatcatcatgtagcacatgactagtgtggcaagtgctctgttagatgtaaggccatgatgctaaagcatcacaagagggcatctaacccagattggggatgtcatggaaggccgacatcctgagttgaatcctgcaaatgtaaaaaccaataggcaaagaagaggaacaaaaaggattccaggacaaactgaggtcacatctatgatccttgactttattgtgtctgtttaaagtatctacagtaacctgtatcaacttagtcagtgtattaatactaaatttagctccttcaaagcagttggaactatgtgctacataaatttcagcttcacacaaggaagggaagggagtgaatagtgaacaggcagttacagcaaaagaaaaacatanaaattgatagctggctctggtggaatg

SEQ ID NO: 84313 - DNA, 1908 bp, Homo Sapiens
  misc_feature (1646)..(1646): n is a, c, g, or t
  misc_feature (1719)..(1728): n is a, c, g, or t
  misc_feature (1750)..(1750): n is a, c, g, or t
  misc_feature (1801)..(1801): n is a, c, g, or t
  misc_feature (1804)..(1804): n is a, c, g, or t
ggtgtgcttctaaggagtattgacaagcccttagctagatgacaatctcattgagaagcagaaaattcatgctggagagaaactagtgaaggtagcaatacttcattgaatattagaaaatttttctagagagaaagcattgaatatactgagtatgataacatttcctctcaaaccttatcccttactctgcatttgggagatcatacacagagaagccttataaatgtaagagatgtggaaatatcttcagccaaaagtaaatcctcactcatcaagaaatttttactggagagaaaccttgtgaatgtgggaaagcttccattcagatgtcacacctcagccagcagagaatttacagtggggaaaacccctttgcctgtaaggtatgtggaaaagtcttcagccacaaatcaaacctcactgagcatgagcattttcacacgagagagaaaccttttgaatgtaacgagtgtggaaaagcctttagccaaaagcagtatgtcattaaacatcagaacacccatactggcgagaagcttttcgaatgtaatgaatgtggaaaatcatttagccagaaggaaaacctccttacgcaccagaaaattcacactggagaaaaaccttttgagtgtaaagattgcgggaaagctttcattcagaagtcaaacctcatcagacaccagagaactcacacaggagagaagccctttgtatgtaaggagtgtggaaaaaccttcagtggcaaatccaaccttactgagcatgagaaaatccatattggagagaagccttttaaatgtagtgaatgtggaacagcctttggccagaagaagtacctcataaaacatcagaacattcacactggagagaaaccctatgaatgtaacgaatgtggaaaagccttctctcagcgaacatcacttattgtacatgtgagaattcatacaggtgataaaccttacgaatgcaatgtctgtggaaaagccttctctcaaagctcatctctcactgtgcatgtgagaagccatacaggggagaagccctatggttgtaatgaatgtgggaaagctttctctcagttctcaacccttgctctgcatttgagaatcacacacaggtaaagaagccttatcagtgcagtgaatgtgggaaagctttcagccagaagtcacaccacattagacaccagaaaattcatactcactaaaaaacccatgaaagccttgaaagtgggaaagctttcattagaaatttgcacctcatcatgccccagaaataatccttctgaagcaaagcaccacgaatgaggttaactttaacaagtactaaaaacttaagggacaccagaaaatttgtactgaagagaaagacatgcatatgattaaaaccctgtgtccaacagagaaacctgcagcagagataatggtgaaagtttaggcacattttcactaaaagtgggaacagaaaatggaggcctgttttttattgctaccaccatagatctggagatcttcgccagtaacaagaaaaattaagttgtaaatattggaaaggaacagacaaaaatagatgacatggtcatctacaactaatattaagactcctgtggtattgattgagcagagcagaagagatttcaaaanaagacctatgcatttattagaatttggaatatgatacaagtggcatcaggaaatgagggaaatatgggactannnnnnnnnnagtggaggtagtttgttctccnagggggaaatagaccatgaactatacacaaaagtggattccgagattaaanacngaaatatgggaaaagctatggtactaaatgcatatggaccttggggaataggggaacattccttggaaacatttgaaaaaatacttaaccggtctacttaatga

SEQ ID NO: 84314 - DNA, 739 bp, Homo Sapiens
gcggccgcgttccccacagaggacagcaggacttccaaggagagcatgtcggaggctgatcgcgcccagaagatggacggggagtccgaggaggagcaggagtccgtggacaccggggaggaggaggaaggcggtgacgagtctgacctgagttcggaatccagcattaagaagaaatttctcaagaggaaaggaaagaccgacagtccctggatcaagccagccaggaaaaggaggcggagaagtagaaagaagcccagcggtgccctcggttctgagtcgtataagtcatctgcaggaagcgctgagcagacggcaccaggagacagcacagggtacatggaagtttctctggactccctggatctccgagtcaaaggaattctgtcttcacaagcagaagggttggccaacggtccagatgtgctggagacagacggcctccaggaagtgcctctctgcagctgccggatggaaacaccgaagagtcgagagatcaccacactggccaacaaccagtgcatggctacagagagcgtggaccatgaattgggccggtgcacaaacagcgtggtcaagtatgagctgatgcgcccctccaacaaggccccgctcctccgtgctgtgttgaagaccaccggggcccgcatggtgaagcaccagttgcttgtcctggctgtggcttactttcttgcacagcgggtaattttatggagtgtcagcccgagagcagcatctc

SEQ ID NO: 84315 - DNA, 561 bp, Homo Sapiens
tttaagtatagctcaataagttaggaatttgggagttttgtttaaaagtcagaaataacttgatatttatatcactaatagaggtccaaaaggcattgcaaattccattagttctatcacttctaaatggttctctaaatgttaactatggcttatccggccattaaagggtgtctggccctaaaatataataggcatgtttcaaaaaaatgaaagaggaataataaatttatataaatgttcaatctcattccaaaaatgtcttacaaaaatgtttcagtaagtacttcctaaaaacatttagcaggttttaggacctgaaaaataattttcagttggaaaaacactttttctgagaagagaatatgttctagttttcaagacagtttatatagtaacagggaaaattaaatcattcaaaaattaaaatttgggtccaagattaagttttagaaacagagcatttcatttaatccctagcaacaagtctggaaaggataaatgtattcctaacatgcagactattaacagctcttccaaggccagaacagaagctccact

SEQ ID NO: 84316 - DNA, 1470 bp, Homo Sapiens
  misc_feature (78)..(112): n is a, c, g, or t
  misc_feature (348)..(365): n is a, c, g, or t
  misc_feature (1097)..(1126): n is a, c, g, or t
  misc_feature (1379)..(1391): n is a, c, g, or t
agagtgatgatcactataggggctactcgtacgagcgaacgacgagcgcagcgaagtcagtgagcgaggaagcggcgnnnnnnnnnnnnnnnnnnnnnnnnnnnnnnnnnnncagtcgacggtaccggacatatgcccgggaattcggccattacggccgggggggagtcactgaatgtttgtccttcctttatactaatgatagtgctttagaatgagaattatgcctgaaatctggcaaaccgaaaaatgttgctattgcaacaaagtggcaaaagctaaaagtaaggatttatcttcaaacataagctgagataacgaatagaagcaaaacgattggctactagnnnnnnnnnnnnnnnnnnattaggtaaatttgaaaaataaaaatgacttggcacttttaaaggtaacttcaccaaagaccgaagagccagtaaccagtagctccaacttgtctcagcatcacatcttctgtgctctttatttttgccggaccagtttgcggttaggagaatgtgccttttttgtacctttgcatttaggttttataattttaattgatgtatggacacacacaaacaaaaaagcatgaaggaagatttggatccaagcagtgccacactttacatcatcactacaagtgttcaagtgtaaagaaaaccaattttgaaactatgaaattcctgattcataaatacacagttatttctactttagtacatataagataattcactgttattaaagctcttttattaaggcaattgcatatgttttaaaagcaatggtaaattaagttgtcttccaaaactgtgtacttgtctggtcagctgtgtatgatcagttatctacctcagagtctattttcttttgtgctgggacaggttgctggccctccctgtttccacagaccaaatcctcctagctcaggagctagggctaagcagttatttctttcaagtattttttagttcttaaattttatgcttgtatttgatgatagatgtcagtgacatttcatagtttcaaaagtccttgctgctctgagaagtgtagattctagtgaaaattacatagtcataagagaaatgtgnnnnnnnnnnnnnnnnnnnnnnnnnnnnnnaaagttgtggtattattggttctatgctccctggaatattactgctttgtgaaagtccagactgaacgcagcaccctctgtgtacctagtacagttataaacctgggtctctcactacttgatatttttgcattagttaagacagaaatttgatagctcggttagaggggaggggaaatctgctgctagaaatgtctgaactaagtgccatactcgtctgggtaagatttgggaaacataacctctgtacatnnnnnnnnnnnnntcagttaaacatcacatagtagacagccattaaattataaaaaaattaatttatgaagaaagaccttttgtacagattg

SEQ ID NO: 84317 - DNA, 1456 bp, Homo Sapiens
caggcatctgtccggaacatcccccagtccaatctggccaaaaggatgggacatgcacagtccctttctaagccacagcttcatagtgttgtccattctccagtcttgctcaaactatctatcaccttaaaggttggaagagattggaatccatttccttttcagctcagcaggggacactgattcccaagaagcaagtaacttaacaaggacaggttggccatctggatctacactgaaggtctttcaagtttcatccactttatgcccagatctcagggcagaaaattcagccagacccagagcaaacaaggtgaccagagtgatggctgagcaagaaagtcccagcagcacactgcaagaccagagtacattcaagaggggagagggcacgtggcaagctggagtcccgagtcagagtctagggcagcactgggtctgaaggacacagcccggcctgctgggctgacagtgtgggtctgatgcctcacatgatgtggccccactggttgtattcctatgtggagggtggtgggttcctgccctgttgtggcccctgttcctaaactgaggccaggttccatctcagtgctgcagtcctgaggagcaccacgctggcccgccagccaggccacagtccttcagcccctctgggttccacgagaaggccccagggagtcaccgtcactgagagggaaggggccagggaagggaggctgcattctactgggagagactcggggagggactaccatgggcttggaaggagctacagccccaaatattgcagagccaaaaggaatgggatacatgtctaaaaagtgacaacagtcttgtccctatttaaaaaacagaatattgttgctgttgcctggtttcatttttttccttttaaaaccactcatatttaaaaggtgaagggctgggagatgtagtccccttcactctggtccttgataggcaccagggggcctcagtctcacgctggctcctgctctccttgcctgggctccagccacatgaagcaagggcagagagggttgcaactgctctgccttcccaacagcgattccctctccccataaaaccagggcacacgtgaggagaagtccaaagagtaaagtgcacagaactccccggagcaggtggcctgggggcgggtcactccgagaaggaaggggtctggggggcgtcagcccagagctacagctgtggagcaaacactgatccctgtgaagtgagcctccagggcacagtcccctttcccttgggccctttgacacttgtttttgggactgtccgctctcagcagctctccaaggaaagtctcggtcccaaagatatcgcccatgctggaggaaacttggatgaccttccctggctggtaatgactcgtgaatgtgaagggggcaggcctcgtgccgaattcggcgcgccgtcgacttcatactctccc

SEQ ID NO: 84318 - DNA, 879 bp, Homo Sapiens
ggagagagtatgaagtcgacggcgcgccgaattcggcacgaggggatcccaggtctatgtcaccttcgccgttagcttctacctggtggcaggagctggtggagcctcaatcctggccacgacagccaacctcctgcgccactaccccacagaggaagaggagcaggcgctggagctgctctcagagatggaagagaacgagccctacccggcggaatatgaggtcatcaaccagttccagccaccccctgcttacacaccctaatgccagccctgggctctcttcctcggcagcccctccctcaactctgcagctcctctcgcacccagaggagctcctttccccagcaggcctcactggtaggatcctgaccatcttctccaaaccttccccaggagagactctgcctttagggtcatccaagtatccctgctctcagaaccggaggtccactggttttctataatgtactctttccctcctgccacatcctgcccccttcacattcacgagtcattaccagccagggaaggtcatccaagtttcctccagcatgggcgatatctttgggaccgagactttccttggagagctgctgagagcggacagtcccaaaaacaagtgtcaaagggcccaagggaaaggggactgtgccctggaggctcacttcacagggatcagtgtttgctccacagctgtagctctgggctgacgcccccagacccttccttctcggagtgaccgcccccagccactgctccgggagtctgtgcactttatcttggactccctacggtgccttgtttagggaaaggatcatgtgggagcaacattgccctcttgcctgttatgtgctgaccagaagaatatgacactaa

SEQ ID NO: 84319 - DNA, 1200 bp, Homo Sapiens
acatcagcctcagccaacagagccaaagctggacatgactgaacaggtgccagccatgagttaaactcagccaggccctcctgatatgtgaactagagagcaataaggaaagtttcagtatggggccacacactggagcggaataattccgatgtagggttaggaaaggctaccatcgcaaaaaggggaagcttgggagcagaaaggagaaaaaatgagagggcaagagattcaatgaccacagactcctcagagggaaagaacagcccccattcccaaccactctggtgcctgtcctgtgagccccagctatctgttatttcacaacctaagacggcccatgagattgctccctgtacaggatttacgatgagaccatctccactggagctggcctgaataggtactggtcctcataaccaaaagttttgcctaaaattaaactatagcttaaatcgaaaaccagagtccctagaatctaggataagatgtagatatacaagacccctagcaaaataagaatcttcaactaccaacaatttggtctggaaggtgctgccatcacctagggtaatatgaacccaagggctggagtcggccataggaaatggacaaggccaggtatagcgaatggctttgctcctgtagagaaccgtcactcggtcagacacagcctccaactgcttagtgagagcatgcatgatgacatcattctccacgatatagcccatgtcatctaaattatccttatcaaacattatcagggcctctgagcaggcgtcccacacctgcattcgccgaaaggctctgtatctcatgttgcagatatggtcccaggcaccaaaactactgagaagcgttgcagagccaggggaaatggagctgaccctgttgctgtaagtttctgacaatttctccagtactttctttggacctgcttcgagcaacaggattttcttgtcatgaaagtgaatatcatatcccaaggcacaggccatggcagcgcccaccaggcctccacccgacaccaccacgtcatacacggtgtctgttgaggcgccggaccacctgcgccaggacaccagcgggccgctgtggggagctgcacgcacagccccgcatcggctgacaagccgggccgccatggtgcagacctgcgccgtcgcactcagaactcccgatcccgggaattccggaccg

SEQ ID NO: 84320 - DNA, 970 bp, Homo Sapiens
  misc_feature (912)..(912): n is a, c, g, or t
gacggcgcaggtctgcaccatggcggcccggcttgtcagccgatgcggggctgtgcgtgcagctccccacagcggcccgctggtgtcctggcgcaggtggtccggcgcctcaacagacaccgtgtatgacgtggtggtgtcgggtggaggcctggtgggcgctgccatggcctgtgccttgggatatgatattcactttcatgacaagaaaatcctgttgctcgaagcaggtccaaagaaagtactggagaaattgtcagaaacttacagcaacagggtcagctccatttcccctggctctgcaacgcttctcagtagttttggtgcctgggaccatatctgcaacatgagatacagagcctttcggcgaatgcaggtgtgggacgcctgctcagaggccctgataatgtttgataaggataatttagatgacatgggctatatcgtggagaatgatgtcatcatgcatgctctcactaagcagttggaggctgtgtctgaccgagtgacggttctctacaggagcaaagccattcgctatacctggccttgtccatttcctatggccgactccagcccttgggttcatattaccctaggtgatggcagcaccttccagaccaaattgttgataggtgcagatggtcacaactccggagtacggcaggctgttggaatccagaatgtgagctggaactatgaccagtctgctgttgtggctactctgcatttatcagaggccacagaaaacaacgtagcctggcagagatttcttccctctgggcctattgctctgctcccgctctcagacaccttgagttccttggtttggcccacgtcccatgaacatgcagcagagctaagttagcatggatgaggaaaaaatttgtggatgccgttaactctgccttnttggagtgatgctgaccacacgggacttcattcgacaccagctgggtgcccatggctg

SEQ ID NO: 84321 - DNA, 1786 bp, Homo Sapiens
  misc_feature (685)..(693): n is a, c, g, or t
attcggcacaggcaggcacccccacttcacacagctaccaccaacccatttctcaccatccatggagataatgcaagtcagaaagtagcaagacttagtgataaaactgggcctgtagctcaagagaaaagttgacacctgagaaacatctagaaattgcctatcctgctgttctagcacttcatctggctgcctttgcagtccttttactacagctatgaagaaacgcaacaagaaactcaatgcacaacaaaggattaattgctgcaaggacattcttgtaaggctttgattagttttcttgttgctttgttgcactgaaatggaattcccatgcccctaccccttaccccagttttttcgaacatggaaagaaaatttaataactttttaaagtggacataatttacatgcaatatggtttatcaactccaagaatttaatatagttgggtacacaactagttttggtttataaattggagatgcaaatagcaaaactaaatacttgctccatttacaaactacttgattttattgtacaagttgaaatatgctcttttgtttgggttacagtatgcttgctctaagtcaaattccaaggaactaatttcttctcctggagttgcattgattcagtattacaaatatatagcacatcacctaggacttggcaatctttgttnnnnnnnnntttcctttctaatgggatttggccaattttggtaatgaagttaggatggtaatgtctgcatctgctaaaggtaattttcttttgagaattgctttctttagtgttaagacctactcatattttgaagaaatcttgagttaagtgagttctgaggctgctgggggaaccagatcaattcaaagctaaatacttctttcagaaaggggccactgtggaaagtgctggtggggtttgcccttgatcaagtgcctccattgtgctgcaagggctgtagacagcagggtgggacagtcagtcctccgagcagcaggaatcatcccgtcacctgcagccttcccatgcttccgcctttattcagaactttctgtgccactgtagatagctcaggcaaaactattacctgggtatttatccactaatgagtcacaagaaaaggagtggatttggtaagaatagagatttgttttatttaaaccacttcccattactgaccattaaaagctcaccactagagttcctgaaacaggtgaaacctgtatgacagcccttccactttggggagccacgcttttgatgtgacagtaccgcagagtgattcccccactgaggatgtcatcatcaaactcttctttggtgtgtgaattattagtggaaaagacccagctgtaattagacctccactgtgtacttagctggaagaacatgttaattctgcaatatgtttcttggttaaacattgcacagttcttacctcatttctgtaaataaagttttgtgaatctgttttgtattgtgacaaattcataagataacattgatattttgatttgtaatatttctaattggtagatttaattgaaaagtaaaattaatttatttttatatgttcaggggaattttaaagtcaaatcttttgtagataatttaaaaaatcagtgtggtttattttacttatttaacccactggttgttattctgtaacagtttgtataaatggtaaattttgaatgtgttgttattttacctagatgtaaaattccacatgtattaaaatgtacaaaatgttttgttaataaaatttaataatgtttat

SEQ ID NO: 84322 - DNA, 755 bp, Homo Sapiens
cctaaatcttatccttctcaaaaacatgccccagtgttggagttggaaggaaagaaatggagagtggagtaccaagaggacaggaatgaccttgtgatttcagagactgagctgaaacaagtggcttacattttcaaatgcgaaaaatcaactattcagataaaagggaaagtaaactccattataattgacaactgtaagaaactcggcctggtgtttgacaatgtggtgggcattgtggaagtgatcaactcccaggacattcaaatccaggtaatggggagagtgccaacaatttccattaataagacagaaggttgccacatatacctcagtgaagatgcattagactgtgagatcgtgagcgccaagtcatctgaaatgaacatacttatccctcaggatggtgattatagagaatttcccattcctgaacagttcaagacagcatgggatggatccaagttaatcactgaacctgcagaaattatggcctaacttcctgagagaccgaaccccctcacctgaatccccctctatcaaacaaacaaaaaagcagcagtaaagagctagaagttgcagtagcccctactgctttagctttggcctccaacgattctgtgctatagatacagcactgtttctggcacgcctcgtgggcattttgaaatatttaacgtttcctcatgatttgcctttgtgtgtgattttagttccacatgatgacttgtgaacattagggatttaaaggaaaa

SEQ ID NO: 84323 - DNA, 979 bp, Homo Sapiens
  misc_feature (852)..(915): n is a, c, g, or t
ctcggtggcccacggaagggccggaaaagggcaccggggagcggccagctgcgtcggcagtccaagcatgtggcggtagcactgggcgtagtaggtggtctgagacttggcggtactcgtggagtcagcgcaggtggttcacgtgagtgctactgattccctccgagcaagagacgggtcacttctgcttgccggtcagactctgtctggggccacgcggagctcctgctccggcctttgtccacttcatcattccagaagcgtgcctttggcttctgcaagccttggccttcgttcaagcctcgctttgcaggcatccaaggtccaagacgccggttttggaggagccgcctctccttcgagatggtcttcacagtccccctgccaggaagttgcgcaagggtgtgaggaagctgatggagcccgtgtggataaaattccctctccgcggctcccaagttgctttttcagcttctgccaccttgatcagtgtcttcccatagggggtaatcggccacaagcatcactggccgcgtctgccatgtactgagccaagcagctccccgttggtgacccttagaggggaccttcctgtccagcttctcatacaggaactcctccactcgggcactggggttgggatgcagcagcacctctgtctgcctcaagatcttctctgtccagttcttggtgctgtctgcccgggccagaaggttttcaaagtgggcatcaagctcagtcttctcagcctggccaaatttctcctccgtgaactgcaccgcccgggtgaagaagatgcccgcgtccgacgccagcttcttcatgttgaagtccatggcgtgcccgcacggnnnnnnnnnnnnnnnnnnnnnnnnnnnnnnnnnnnnnnnnnnnnnnnnnnnnnnnnnnnnnnnncgcccacctgctgcggggcacaagccctccgcgcacccgcctgccggcctgcccgcctgcccgc

SEQ ID NO: 84324 - DNA, 1293 bp, Homo Sapiens
  misc_feature (1029)..(1029): n is a, c, g, or t
  misc_feature (1185)..(1193): n is a, c, g, or t
cggtccggaattcccgggatggctcggcggctgcggcgggcgggcaggcgggcaggccggcaggcgggtgcgcggagggctggtgccccgcagcaggtgggcggggtgcggttggcggcggcggctgggccgggggctgccggctgcgctcgggccgtgcgcggcggccgtgcgggcacgccatggacttcaacatgaagaagctggcgtcggacgcgggcatcttcttcacccgggcggtgcagttcacggaggagaaatttggccaggctgagaagactgagcttgatgcccactttgaaaaccttctggcccgggcagacagcaccaagaactggacagagaagatcttgaggcagacagaggtgctgctgcagcccaaccccagtgcccgagtggaggagttcctgtatgagaagctggacaggaaggtcccctcaagggtcaccaacggggagctgctggctcagtacatggcagacgcggccagtgagctggggccgaccaccccctatgggaagacactgatcaaggtggcagaagctgaaaagcaactgggagccgcggagagggattttatccacacggcctccatcagcttcctcacacccttgcgcaacttcctggagggggactggaagaccatctcgaaggagaggcggctcctccaaaaccggcgtctggacttggatgcctgcaaagcgaggctgaagaaggccaaggctgcagaagccaaagccacgacggtgcctgactttcaggagactagacctcgtaattacattctctcggccagcgcctccgcgctctggaatgatgaagtggacaaggccgagcaggagctccgcgtggcccagacagagtttgaccggcaagcagaagtgacccgtctcttgctggagggaatcagtagcactcacgtgaaccacctgcgctgcctccacgagttcgtcaagtctcagacaacctactacgcacagtgctaccgccacatgctggacttgcagaagcagctgggcagatttcccnggcaccttcgtgggcaccacagagcccgcctccccacccctgagcagcacctcacccaccactgctgcggccactatgcctgtgggggccctctgtggccagccctggccccctccgggggaaaggcccttgtttttgcctggaaaaaaggggggnnnnnnnnntggcccaggggaaaccccccaaagcttcgggggggctccctttggacctcccaagggcaaccccgaaaaacaatgggaatttgggcccctggcttgggtt

SEQ ID NO: 84325 - DNA, 477 bp, Homo Sapiens
  misc_feature (342)..(342): n is a, c, g, or t
  misc_feature (371)..(371): n is a, c, g, or t
  misc_feature (428)..(428): n is a, c, g, or t
  misc_feature (446)..(446): n is a, c, g, or t
  misc_feature (451)..(451): n is a, c, g, or t
tattttcaccaaaatctgcaaatgtaaactgaaggacatcgcatgtttaaaatgtgggaacattgtaggttatcatgtgattgttccatgtagttcctgtcttccttcctgcaacaacagacacttctggatgtttcacagccaggcagtttatgatattaacagactagactccacaggtgtaaacatcctacttcggggcaacttgccagagatagaagagagtacagatgaagatgtgttaaatatctcagcagaggagtgtattacgataaatggaattatgatatatatgatatacaaacttttttcctatttaaaaatatattaatgggatccacntttaaaattggttaagttgccagtgatcntttttggggaaacccaaaatgggggccaattggttggatttaatttaatttccaggnccccaaattaggttaccnccagntttggatggaagccccgtgggaggtt

SEQ ID NO: 84326 - DNA, 561 bp, Homo Sapiens
  misc_feature (210)..(210): n is a, c, g, or t
  misc_feature (451)..(451): n is a, c, g, or t
tggtatttacttgggaaaaaaagatgctacaaaaaagagacatgaattaagaaaatatttcgcatgtaagacaagtgcagataaaaatgaaaaatgtgccgggtggtgatctgacagttcctgggatatcagtaacactgaaaatgcctagaaaacaaccttttcccagtgttggggggaaagggttctattcctgtagagtccaaaaancaatttttccaccattttgaaaaacatctggttgtattttggcaaactatggtagctatcagctttgaatccatatgtatttaattttgctggaggctggataattaaaaccaatataactgaaaataaaacaacaaaaagcttttttcaccctctaagagcaaagaaatctacacctgggttatctgtatttccagttgatatggaccagccagatactccagaaatactcacaaatatntttgtttctatttcaaacattatctcattattggtttaaaatactcttgtagacaataacgtccttattttgaataggaaatattgggggtcataccaatactaataact

SEQ ID NO: 84327 - DNA, 890 bp, Homo Sapiens
  misc_feature (20)..(20): n is a, c, g, or t
  misc_feature (74)..(74): n is a, c, g, or t
  misc_feature (88)..(88): n is a, c, g, or t
  misc_feature (681)..(681): n is a, c, g, or t
attccaaagcttggggttcngctgaacttgaaccttggcccgaagttttgcgggatcgggcttccacgggtggnttgctgccttgctngaggggattatgacactgaagaacactcgccaggacaacttccatcctttaaggtcaccattggtatgttcctgctctctggagatccctgcttcaagacgccaccatcgactgccaagtccatctccatcccaggccaggattcctccctgcagctgacgtgtaagggtggtgggaccagcagtgggggcagcagcaccaactccctgactgggtcccggccccccaaggctcggcccactattctcagctcagggctgccagaggaacccgaccagaacctgtccagccctgaggaggtgttccactctggccactcccgcaactccagctatgccagccagcagtccaagatctccggctacagcacagagcactcgcgctcctccagcctctcagacctgacgcaccgccgcaacacgtccaccagcagcagcgcctctgggggccttggcatgaccgtggagggccctgagggcagtgagcgggagcaccggcccccggagaagccgccgcggccaccccggcccctgcatctgtccgatcgctctttcaggcggaagaaggactcggtggagagccacccgacctgngtggacgacacgcggatcgatgcggatgccatcgtggagaagatcgtgcagagccaggacttacagatggcagcacaccgaagacagcaactccggctgttctgagcgcgatggtctgcccgctaacggcatccacttgcacaggtctctctgggctagagcagtgtgatgaagcatgagagcaggtcggctgagagatctgctccctg

SEQ ID NO: 84328 - DNA, 1013 bp, Homo Sapiens
  misc_feature (1002)..(1002): n is a, c, g, or t
gcacgagggtacttcaaactaggaatgtaaaccttataaagaagactgtattaaggatgcccctgcatactattattccgttgttacaagagcttacaaagaggttacaaggacatcctaatagtgctgtgctaatggttcagtggctaaaatgtgtgttaacagttcatgcatcatacctgtccacgttgcctgacctggtaccccagctggggacactctaccagttaatggaaagcagagtcaaaacttttcagaaactttcacaccttcatggaaagcttattcttctaattacacaagtaacagcatcagagaagacaaagggagcaacttcccctggacagaaggcaaagttggtgtatgaagaagagtcttctgaagaggagtctgatgatgaaatagcagataaggattctgaagataattgggatgaagatgaggaggagagtgaaagtgaaaaagatgaggacgttgaagaggaagatgaggatgccgaaggaaaagatgaagaaaatggcgaggacagagatacagcaagtgaaaaagaattaaatggagattctgacttagatcctgaaaatgaaagtgaagaagaatgaagacagcaaagcaagccggtcaaactatataaactctggctcaccttgcccagtggtgagggctgcctctgtgccaggatgccaaggaccgctgcacatttccaaattcacagcagtggatcccatgccactttgctgtcctgagcaccccagacttgactgtgtaaataagagtgtttcattcaaatgttaataaactttacacagtatatagacacattttctgcaatgtactgacatcagtgtccaatatatggtatatttttataatgtaatatcctagtatgattggttatatcaagaattgacaagtgcagataaagacctttcccataggagttcaagaactggactgttgtgaagaagtcagctcttatctcaggttggtatctttcatcanatccagatgca

SEQ ID NO: 84329 - DNA, 907 bp, Homo Sapiens
ttctgtcaaatccttattgcattatgcagtttcaagatgtggggcccctgatttccatcagaatcctgccaggggtttggagtcatcttggcttcggcatagtacatttctcatttactgactcaggtgatattcatcatgcatctcaatctcttctctagctgacccgatgtagcagcgcatgggctgtgggcgcactgccgtggggccggtagtggggcagcctcaggggcaggcagtggctgggcacttgcgggccccggcggtggggtgagggcctgggaagccagcttgggcccgagtgtggtggacaggtactgtttcacctgctgccggcgcgcctgctgcaggtggtagcgcgttgggttctccagatgggtctgcaccttgagcacctccctgggcacctgagcagggggtggacggctcaatgtgtggcccccagcagagacgccaaccacagagatggcaggagaggcaggtgcaggactggggaagggagccgcggcggcctgttcccgacgctcacgcctctcctgctcctgcgcctgggcccgcattagctgctgccgcagcaagaccctcgatgaagaagatgacgacatggcaggggtcctggagccccctgcagaagacgatgcagagagtgtagctggggtggctggtgtggccttgagcgaaggggtaagggttggcttttgagctcgtagaagctgtcaggatcaaggacgttttctaattctatgtcagcaacaatcccggattccggaagcaaagagttcaggctgagcagctgagccgagtcggccggcctgcgctcctccaacagcacgaacacggctcgagggccctccgcgcctcgtgccgaattcggcgcgccgtcgacttcatactctctcgcccctaa

SEQ ID NO: 84330 - DNA, 1653 bp, Homo Sapiens
  misc_feature (100)..(108): n is a, c, g, or t
  misc_feature (288)..(288): n is a, c, g, or t
cggtgtctccctggaaaaagggcaggtccccaaaagggctcttttgagggccggtcaccagggggtctgtttattgggggagcattttgggggcagggtnnnnnnnnntctccactggaaagttggtgcgcttggccttgccctccctccttcaatgtcccagctgctctggtttgaggctgtcagaaccggaagtcgtggccaaagaaagcaacccctggagtgggaggcactgccaggccatggatctgggcctgcaagttctagttccctgaattcggagctgcnaggctgcaggttggccttgctccaggagatcgctgccggctctccaggtctttggagcgctgctgctccttcgtgcagcttgcggatataatccacagaggccttcaggatggtgcccttgttccagcgcatctccgggtcactggacttagggatgagagtgcccagttccttgatcctgtcgttaatgttgaatcgcctgcgacgctcaattaggttgtgattgtctttcttctgccgttccttcaaaaggcctttgcctcggtctcagagatctcccgtttgatgttgggcagctcagctgggcaggagttgctgacagtgatggctggtgtggccacgccttgactactgtacacatcaagcagattccctgacacaggcagcgtgctggggagctgcagtcctgtggtgcctccaaacagatagctgagcatttcatcattgtaactggactccaggctgatgatctcatcaatgacatcatcaatctccttctctgagctggacccgatggtgagcagcgccatggggctgttgggcgcactgcctgtggggccggtagtgtgggcagcctcaggggcaggcagtggctgggcacttgcgggccccggcggtggggtgagggcctgggaagccagcttgggcccgagtgtggtggacaggtactgtttcacctgctgccggcgcgcctgctgcaggtggtagcgcgttgggttctccagatgggtctgcaccttgagcacctccctgggcacctgagcagggggtggacggctcaatgtgtggcccccagcagagacgccaaccacagagatggcaggagaggcaggtgcaggactggggaagggagccgcggcggcctgttcccgacgctcacgcctctcctgctcctgcgcctgggcccgcattagctgctgccgcagcaagaccctcgatgaagaagatgacgacatggcaggggtcctggagccccctgcagaagacgatgcagagagtgtagctggggtggctggtgtggcctgcagtgatattgggaggcttgagcgaaggggtaagggttggcttttgagctcgtagaagctgtcaggatcaaggacgttttctaattctatgtcagcaacaatcccggattccggaagcaaagagttcaggctgagcagctgagccgagtcggccggcctgcgctcctccaacagcacgaacacggctcgagggccctccgcgctggcctctacgccatcccgagctggttcggccgcatgagacatgacgcccggccccgggcgagccctgccaggccggtcgggcctcggcccggtccccctaacaaaataagagtcccccctcaccccagctcgccac

SEQ ID NO: 84331 - DNA, 735 bp, Homo Sapiens
accgagccagtactctaacggtttaaggtagcgaggctgggtggcgaattcggcacgagggtgcttggtcctgctctggtcactggggcttcccaggaggcagcagggtctggtcataatccagtgtgaagatgaggtgaggaaggaaggggttgctgtccagtgttggcctggtcgctttgattcttcctgcacagctcagcccaccccatctgtactggaagggaccctggagccctgggaccaccccctttcaagtcccaaacactgagtcctctgtcatgtgtccttgtccctaggctacaatgctacacttggctcaggctgatcaccatgctagtcacaggagggagagagaggcagtgtacttgcccccatctcctggagggaggtgcgttggaaattctaggcccttcagcagagacccatttgtgcccagaccacaatatttcttcttcctcagggactacatgccacagacctgtatccccagtggcaactcctgttagctcccaaacttaaacagtgatctcttctaaatatacaaggcatctacccagccccaatagtgaataaaagtcacaaatttaagttcaacacccctagcaatttcttcaaagccagccttacctgactagggctattccccgcaccggttcccaacccccaagggggaaattagggggattaaaattaagagtaagggaaaagaccccctttgggccctttcccggg

SEQ ID NO: 84332 - DNA, 498 bp, Homo Sapiens
acccggtgcacgtaggttctcaggtactggggggcgtcgtagttcaccaccagctccacaccctgcacgtcgatgcctcgcgcggtggcgtccgtgctgatgagcagctggatcttcccctgttcaaactgcttcaggatcatcctcctctggccaggcccgtagcgcgaggagaactcagccacgtccacacccccaaaagcttgcaccagcaggaagagcctgtgggagttctctcgggagttagtgaagcagagaaccctcgagaagcccatctccaggaccaggtgcaggacgaccagcggcttagagctgaggctgcagggcacgtagtggtgcgtgagcccaacaggaaaggcatacttccccgaatccccgtccccatctgtatcttccaggcccctgtgtgctagccctggcggctgtcacagcctgggcctgccttcgctggagcagggcacaggggtccgcggggtcctcgctctggaaggcggccgc

SEQ ID NO: 84333 - DNA, 1469 bp, Homo Sapiens
  misc_feature (540)..(541): n is a, c, g, or t
aagcgaggcctgggtggcgaattcggcacgaggcgcagcaccagcgccagcgccgaggcggccccagatggaccggccctggaggaggcggccggacccctggtccccggcctggtgctgggggggttcgggaagaggaaggcgccgaaggtccagcctttcctgccaaggtggctggctgagcctaactgtgtcagaaggaatgtcaccgaagacctggttcctatcgaggacatccctgacgtccatcctgacctgcagaagcagcttgcgggcacacggcatctcgtcctactttccagtccaggcagctgtgattcctgccctcctggagagcgcagccggtgggtttctggtgggcagaggtggctaccggcctagcgacctctgtgtttctgccccaacaagcagtgggaagacactggccttcgtcatccctgtggtgcaggccctgctttcgagagtggtctgcccacatcccgtgccctggttgtgctgcccaccaaaggagctggcccagcaggtgagcaaagttttcannacatcttacacagatgccacaccttctgagagtctccctggttacgggacagaagtctctggccaaggagcaggagagcctcgtccagaaaacagctgatgggtaccgctgcttggctgacatcgtggtagccacccccggccgcctggtggaccacatcgaccagaccccaggattcagcctccagcagctccgcttcctgattatcgacgaggctgaccggatgattgacagcatgcatcagtcctggctgccgcgggtggtggcggccgccttccagagcgaggaccccgcggacccctgtgccctgctccagcgaaggcaggcccaggctgtgacagccgccaacacctgctgtccccagatgcccctgcagaagctgctcttctcagctactctgacccagaaccctgaaaagctgcagcagctgggcctccaccagccccggcttttctccacagggctagcacacaggggcctggaagatacagatggggacggggattcggggaagtatgcctttcctgttgggctcacgcaccactacgtgccctgcagcctcagctctaagccgctggtcgtcctgcacctggtcctggagatgggcttctcgagggttctctgcttcactaactcccgagagaactcccacaggctcttcctgctggtgcaagcttttgggggtgtggacgtggctgagttctcctcgcgctacgggcctggccagaggaggatgatcctgaagcagtttgaacaggggaagatccagctgctcatcagcacggacgccaccgcgcgaagcatcgacgtgcagggtgtggagctggtggtgaactacgacgccccccagtacctgaaaacctacgtgcacccgggttgggaggacagcttcgcggctgggaaaactggacaggccttcacactgctg

SEQ ID NO: 84334 - DNA, 674 bp, Homo Sapiens
gcggccgccaccacccgcggcagccaggactgatgcatgctgtcaatcatccggtcagcctcgtcgataatcaggaagcggagctgcatgcgaggctcgaatcctcggggtctcggtcgatcgaggtccaccaggcggccgggggtggctaccacgatgtcagccaagcagcggtacccatcagctctacagaccagagagcagctcgagagaaggaagctttctcaagggcttccggatagcaagacgctgcctcaccccacagccccgactccaccccacatgggaagggggccggtgggagctcctcctcttcacgggaacaggtggttaaagatggtggcccctcctctgctcccacggtgcctcaggccacctgcagggctgagcagggaccccctgaaaaacccgcaccctgacacaacctacgttttctggacaaggctctcctgctccttgaccagagacttatgacccgtaaccagggagactctcagaggtgtggcatctgtgtagatgctgaaaactgtgctcacctgacgagccagctccttggagggcagcacaaccagggcacggatgtggcagaccactctcgaaagcatggcctgcaccacagggatgacgaaagccagtgtcttcccactgcctgttggggcagaaacacagaggtc

SEQ ID NO: 84335 - DNA, 736 bp, Homo Sapiens
aattcggaacgaggctcgctcctcgggctcccctaaggcattggacccatcgccgcgtcttttattttttgcaaagttgcatcgctgtacatatttttgtccccgccacctccctctgtctctggagtgacagcccggggctagggcgcctggagaataagatattttctgttaccaacaacacagaatgtgggaagttactggaggaaatcaaatgtgcactttgctctccacattctcaaagcctgttccactcacctgagagagaagtcttggaaagagacctagtacttcctctgctctgcaaagactattgcaaagaattcttttacacttgccgaggccatattccaggtttccttcaaacaactgcggatgagttttgcttttactatgcaagaaaagatggtgggttgtgctttccagattttccaagaaaacaagtcagaggaccagcatctaactacttggaccagatggaagaatatgacaaagtggaagagatcagcagaaagcacaaacacaactgcttctgtattcaggaggttgtgagtgggctgcggcagcccgttggtgccctgcatagtggggatggctcgcaacgtctcttcattctggaaaaagaaggttatgtgaagatacttacccctgaaggagaaattttcaaggagccttatttggacattcacaaacttgttcaaagtggaataaaggttggctttttaaattttaaaaa

SEQ ID NO: 84336 - DNA, 786 bp, Homo Sapiens
  misc_feature (162)..(213): n is a, c, g, or t
gtgagaagctgcagccgccggcagaggagacctcagcatcatctagagcccagcgctggcccgtgcctccgcctgccccgccgccgccgtcgccgtttctgttcctgctactgtcccacctaaacaactcccgttacacggacaagtgaacatctgtggctnnnnnnnnnnnnnnnnnnnnnnnnnnnnnnnnnnnnnnnnnnnnnnnnnnnncagccgcagcagaaagcccccaacccaactgacactggcacaactgcaaacggtgtcatccgcacaactttatctcgctcctcgggctcccctaaggcattggacccatcgccgcgtcttttattttttgcaaagttgcatcgctgtacatatttttgtccccgcacacctccctctgtctctggagtgccctacagccccgcaaactcctcctggagctgcgccctagtgcccctgctgggcagtggcgttcccccccatcctcccgcgcccagaccctgctgctctgggcagacgatgctgaagatgctctacctttaagctgctgctgcctggccgaggcgtctgggcttctctgaaggagatgctaagactggggaacagaaacgaagggagccggagcaaggaggagaaggtgcctgaatggcgaacccacccgaaagcgcctgcaaaacggagagacagagacggctgatgtcccagctggagcttgctgaatgaggagagagactgctgtgccggggctaataaccctacggatgacctgatgcctgcggagagacagccaggagc

SEQ ID NO: 84337 - DNA, 735 bp, Homo Sapiens
  misc_feature (594)..(594): n is a, c, g, or t
  misc_feature (687)..(687): n is a, c, g, or t
gaattataccaactaaattattgggtttctggaagtgaatggagaaaacagcaagggaagaaatcgtttttaagataagtaaataattcccatggattgataaatattttccttttaaaatgttatggactgatattttttattcacctttaaatttcttatcaagaagtttatctttgtttttcagatttaaaaatgaaatacaggtattcgtcactttcctgaaaccatgctaaccaaaatcagtagccaaaccaattcagatagatgtgtctcatctaattaaacccattggtttttatgggagggctgcattaagagcacccaaccaccacatgtaagttgataattaccagcatggcaggtgattttatctgctgaccaagcgcatagttttgttttgttttcagaatgttctagggaacatttgagattttatgtgaaataaaattttaagtgccaaagccaaaaaaatacttaactcttttcaaaggccctctttcatccttgccttcgtcaactttcctttgcacacaggaagcaaaatctacttcaagacatttattttagaggaatccattaagaaaggattgntttacttaaatgaaatgctgtcttatttttgctgtgtcttttgacacctcttagctttaacattcttcttttaaccaagccattatgcaaagntatcaaagaagaggagaaggaaaggaggacagatgaaagtgaccggga

SEQ ID NO: 84338 - DNA, 462 bp, Homo Sapiens
agtaaccatgggagagttttactgcaaaaactagacagagaaaaacttgttcttgttaaacctttgggagaccgaggatacctttttcttctctccccttatcagatggttcctccatatggaatatcagactgcccaaagtctcggagtcctacatgcttggtttctatttcaagaacctagaagcatagttacttcacaaaaaggttcaaccaatgcagcaccacaggagaggcatgagagcatgccagatgtattaaaaatagctcagtttttacaattttctttgattcagtgtcgaaaggaattcaaaaatataagcgccataaattttcattctgttgttgaaaagtatgtaagtgaattttttaagcgaggttttggttcaggtaaacgagagtttattatgtttccatatgattcacgattagatgataaaaaattcttatactcagctcccac

SEQ ID NO: 84339 - DNA, 1217 bp, Homo Sapiens
  misc_feature (1135)..(1135): n is a, c, g, or t
  misc_feature (1200)..(1200): n is a, c, g, or t
agactggctacatcagagtcttagtgcatgaaggaaaacaggtcatggcagactcaggacctatctatgaccaaacctacgctggcgggcggctgggtctatttgtcttctctcaagaaatggtctatttctcagacctcaagtacgaatgcagagatatttaaacaagatttgctgcatttccggcaatgcctgtgcatgccatggtccctagacacctcagttcattgtggtccttgtggcttctctctctaagcaagcacctcctgtcccttgaccttaactctgatgggttcttcacctcctgccagcaaccccaaacccaagtgccttcaaaggataaatatcaatggaaacgcagagatgaacatctaacccactagaggaaaccagttgggtgatatatgagactttatgtggagtgaaaattggggcatgccattacatttgctttttcttgttgtttaaaaagaatgacgtttacatataaaatgtaattacttattgtatttatgtgtatatggagttgaagggaatactgtgcataagccattatgataaattaagcatgaacaaatattgctgaacgtacgtttaggtgcttaaagttgtcactattcttgaattagagttgctctacaatgacacacaaatcccgttaagtaaattataaacaagggtcaattcaaatttgaagtaatgttaagtaaggagagattagaagacaacaggcatagcacatgacataagctaccgattaactaatcggaacatgtaaaacagttacaagaaataaacgaactctcctcttgtcctacaatgaaagccctcatgtgcagtagagatgcagtttcatcaaagaacaaacatccttgcaaatgggtgtgacgcggttccagatgtggatttggcaaaacctcatttaagtaaaaggttagcagagcaaagtgcggtgctttagctgctgcttgtgccgctgtggcgtcggggaggctcctgcctgagcttccttccccagctttgctgcctgagaggaaccagagcagacgcacaggccggaaaaggcgcatctaacgcgtatctaggctttggtaacttgcggacaagtttgctttttacctgattttgatggatnacattttcatttaaggtttccagtttattaaatatttttgtttaatattttatttaaagttggantattaggaattggccaa

SEQ ID NO: 84340 - DNA, 291 bp, Homo Sapiens
tttctagagaacaacagccatcatcagcatctgaaagacaggcccctcgagcacctcagtcaccgagacgcccaccacatccacttcccccaagactgaccattcatgccccacctcaggagttgggaccaccagttcagagaattcagatgacccgaaggcagtctgtaggacgtggccttcagttgactccaggaataggtggcatgcaacagcatttttttgatgatgaagacagaacagttccaagtactccaactcttgtggtgccacatcggtactgatggattt

SEQ ID NO: 84341 - DNA, 807 bp, Homo Sapiens
aatgcgcccgccgtgtccatggagagaagctgaggcggccgaccttcggcccgaggcaccggggcgccgggacggcgaagatgtcggcttccttagtccgggcaactgtccgggctgtgagcaagaggaagctgcagcccacccgggcagccctcaccctgacaccttcagcagtaaacaagataaaacaacttcttaaagataagcctgagcatgtaggtgtaaaagttggtgtccgaaccaggggctgtaatggcctttcttatactctagaatatacaaagacaaaaggagattctgatgaagaagttattcaagatggagtcagagtattcatcgaaaagaaagcacagctaacacttttaggaacagaaatggactatgttgaagacaaattatccagtgagtttgtgttcaataacccaaacatcaaagggacttgtggctgtggagaaagctttaatatttgaaatctcaggactcttctggccgtaggttccaggaaagctcgtggaagctttggggctcactgcagaaatcatgtgactgtcacgtgctggaaaataaagtgatacatcttgaaaatgaatccagtgtgttggattccagaagaaatgatatttatattctctataggggacagaaaatgagaagccatcactctttttggatcatttaggtctcttgtatcctttgttttagaaccagtttcattaaagttgccttcctgggcacctgtttatccatttcctgaactgtgtgcactccttagatcgctatcgatggcttgatcatccctcagcattt

SEQ ID NO: 84342 - DNA, 755 bp, Homo Sapiens
  misc_feature (265)..(265): n is a, c, g, or t
gctgctggtggagttgatatagggtcttggttctgtgctggtaatgaaaacacaagtgaggacaaatctgcacctaaggctaaagcaaaaagtcatctgagtcaagaggcatatatccgtacatggtccctggggcaggaatggggtcatgggatggagccatgatctggtcggaaactaagtttgcacaccaaagtgaggccagcttcccagttgaagatgagtccagaaaacaaaccaggactggggaaaaaactccggcccntggtctttgccgctgtaaacacgaagctaatatggatccacgagatcttgaaaaactcatttgcatgattgagatgactgaagatccttctgttcatgaaatagccaataatgctttatataacagtgctgattattcttattctcatgaagttgttcgtaatgtaggtggaatttcagttattgaaagcttgctcaataatccctaccccagtgttaggcagaaggctttaaatgcactgaataatatctcagtggctgctgaaaaccataggaaggttaaaacttacttaaaccaagtatgtgaagacactgtcacctatcccttgaattcaaatgtgcagttggctggactaaggttgataaggcatctgactattaccagtgaatatcagcatatggttacaaattatatttcagaatttcttcgtttgttaacggtgggaagtggagaaattaaagacatgaccatgtaagagaaccatgtccga

SEQ ID NO: 84343 - DNA, 500 bp, Homo Sapiens
ctagttgttttaagatgaaagttcccagttctcccttgcccggaaagtctctggagcaagcgtggaaggcgagtgaagcggaagagaagcataaaaaaacgctgaacaagaaaaaccaaacaacagaaagtaaaaccactgcaagcaccaagaacgaaacgaaaatgagcacagcaaaaaagattgtggcagcacaaaagtcaagaaaatgcacgtgtgatcatgactggccaatcatcaactgatacaacatccaagaaaaacgctccaatcacagcacctccacgaaacttgacggcaattgtcatgcaaccgattcttagccttgttacatgacgccatcatgtcacactgtgaactttgagttgatttgaacttacggatgggggacttttctccactctcatgtgattacgtgaactttattcctagctcagcgcgagactgtggtggatttgactggccctggttgggttgttggaatttgattaaatgacaaa

SEQ ID NO: 84344 - DNA, 550 bp, Homo Sapiens
  misc_feature (218)..(237): n is a, c, g, or t
  misc_feature (360)..(420): n is a, c, g, or t
aacctatagaagttagcattactgctaaaatcccagatgttgtaggactgtacttttgtagagtttagacagagcatcaatcccttctccccgcgagtgcagtcggatgccgttgtccccaagggccaggccgaactcgccccacacctgcgggcgcctggctgccgacgccggtggaggccacgccgtcggtcgggaacggtcgcgtcgcccgggtnnnnnnnnnnnnnnnnnnnntcatcctcgcctctcgcttccctctgggagctgcgcgcgcttcactcaccttccgcttcactcgccttccacgcttgctccagagactttccgggcaagggagaactgggaactttcatcttnnnnnnnnnnnnnnnnnnnnnnnnnnnnnnnnnnnnnnnnnnnnnnnnnnnnnnnnnnnnntctttgaagaatttctgaaactgtttacaaggaattttgaaaaacagggatgtttaaatgatgccggctctgtttttctgtaaataaatttgcatattttgtaggacttttaattgtaatgatagagaaa

SEQ ID NO: 84345 - DNA, 508 bp, Homo Sapiens
  misc_feature (182)..(236): n is a, c, g, or t
  misc_feature (394)..(415): n is a, c, g, or t
cctatagaagttagcattactgctaaaatcccagatgttgtaggactgtacttttgtagagtttagacagagcatcaatcccttctccccgcgagtgcagtcggatgccgttgtccccaagggccaggccgaactcgccccacacctgcgggcgcctggctgccgacgccggtggaggccannnnnnnnnnnnnnnnnnnnnnnnnnnnnnnnnnnnnnnnnnnnnnnnnnnnnnncatcctcgcctctcgcttccctctgggagctgcgcgcgcttcactcaccttccgcttcactcgccttccacgcttgctccagagactttccgggcaagggagaactgggaactttcatcttaaaacaactagacaacgcacacacacccccacccttnnnnnnnnnnnnnnnnnnnnnncaatctttgaagaatttctgaaactgtttacaaggaattttgaaaaacagggatgtttaaatgatgccggctctgtttttgctgtaaataaat

SEQ ID NO: 84346 - DNA, 807 bp, Homo Sapiens
  misc_feature (12)..(12): n is a, c, g, or t
  misc_feature (174)..(193): n is a, c, g, or t
  misc_feature (316)..(376): n is a, c, g, or t
ggactgtacttntgtagagtttagacagagcatcaatcccttctccccgcgagtgcagtcggatgccgttgtccccaagggccaggccgaactcgccccacacctgcgggcgcctggctgccgacgccggtggaggccacgccgtcggtcgggaacggtcgcgtcgcccgggtnnnnnnnnnnnnnnnnnnnntcatcctcgcctctcgcttccctctgggagctgcgcgcgcttcactcaccttccgcttcactcgccttccacgcttgctccagagactttccgggcaagggagaactgggaactttcatcttnnnnnnnnnnnnnnnnnnnnnnnnnnnnnnnnnnnnnnnnnnnnnnnnnnnnnnnnnnnnntctttgaagaatttctgaaactgtttacaaggaattttgaaaaacagggatgtttaaatgatgccggctctgtttttctgtaaataaatttgcatattttgtaggacttttaattgtaatgatagagaaaaaaacaaggaaaactatttaatgaaagcacgatatttatctttggtaaatgactttagagcagttaaagacattgcttaaaaaactcagaatcagaaaaaacactgaattatttaagaacacatatattttaaagtataacatatttattataatttatttgcacccttgggaagattgctttggcattctgccttgattccttctcattgatgtccaggtcatctggaggccgggggttctcagacctaccagtttccctttagaagaacaaatttccagttcctctagggcctcctgcc

SEQ ID NO: 84347 - DNA, 672 bp, Homo Sapiens
catggccgaaaccaggaagctgcgcgagggcgccacggcccctcgttctcccggcctgtgtccggaaggtttccctccgaggcgccccggctcccgcaagcggaggagagggcgggacgtgccggggccggagctcagaggccctggggccgctctgctctcccgccatcgcaagggcggcgctgacctgaggcctccccgcaagggtccccgaggcggcggcggctggcgggctgtgagaaaccgcagaagaacgctgggcgcgcagcgacccgtccacccccgcgaggagagacttccacagaggcagcgtttccacagcccaaagccacgtaccaagggtgatgcagccccagtaagtccctggcggggaagctcacggctgtcaaaagaacctcttcgctccagaccggcgcacgaaggggaggagggcaggaggctgccgcccgcacaggtcaccggatcacgtcgccgccctaagtctgctttgtgaatctccaccttggttcaaaccccctaccgcgcgatctattccctccctgcgccttccctcttacctttaaagacccagtaacctcaacgcacacgtggtagtaccttctgcgcaggtgacagtcgacatcggttcacgctgggaccctattccctggtggcaagccgctgaaggagatg

SEQ ID NO: 84348 - DNA, 2130 bp, Homo Sapiens
gaggcagccttgacccaggaggcctcgactcctgacagtcaggtttggcccacagcacctgacattactcgtgagacctgcagcaccctggcagaaagccccaggaatggccttcaggaaaagcacaagagcctggccttccaccgaccaccatatcacctgctgcagcaacgtgacagccaggatgccagtgctgagcaaagtgaccatgatgatgaggtggccagccttgcctctgcttcaggaggctttggcaccaaagttcctgctccacggctgcctgccaaggactggaagaccaagggatcccctcgaacctcacccaagctcaagaggaaaagcaagaaggatgatggggatgcagccatgggatcccggctcacagagcaccaggtggcagagccccctgaggactggccagcactaatttggcaacagcagagagagctggcagagctgcggcacagccaggaagagctgctgcagcgtctgtgtacccaactcgaaggcctgcagagcacagtcacaggccacgtagaacgtgcccttgagactcggcacgagcaggaacagcggcggctggagcgagcactggctgaggggcagcagcggggagggcagctgcaggagcagctgacacaacagttgtcccaagcactgtcgtcagctgtagctgggcggctagagcgcagcatacgggatgagatcaagaagacagtccctccatgtgtctcaaggagtctggagcctatggcaggccaactgagcaactcagtggctaccaagctcacagctgtggagggcagcatgaaagagaacatctccaagctgctcaagtccaagaacttgactgatgccatcgcccgagcagctgcagacacattacaagggccgatgcaggctgcctaccgggaagccttccagagtgtggtgctgccggcctttgagaagagctgccaggccatgttccagcaaatcaatgatagcttccggctggggacacaggaatacttgcagcagctagaaagccacatgaagagccggaaggcacgggaacaggaggccagggagcctgtgctagcccagctgcggggcctggtcagcacactgcagagtgccactgagcagatggcagccaccgtggccggcagtgttcgtgctgaggtgcagcaccagctgcatgtggctgtgggcagcctgcaggagtccattttagcacaggtacagcgcatcgttaaaggtgaggtgagtgtggcgctcaaggagcagcaggccgccgtcacctccagcatcatgcaggccatgcgctcagctgctggcacacctgtcccctctgcccaccttgactgccaggcccagcaagcccatatcctgcagctgctgcagcagggccacctcaatcaggccttccagcaggcgctgacagctgctgacctgaacctggtgctgtatgtgtgtgaaactgtggacccagcccaggtttttgggcagccaccctgcccgctctcccagcctgtgctcctttccctcatccagcagctggcatctgaccttggcactcgaactgacctcaagctcagctacctggaagaggccgtgatgcacctggaccacagtgaccccatcactcgggaccacatgggctccgttatggcccaggtgcgccaaaagctttttcagttcctgcaggctgagccacacaactcacttggcaaagcagctcggcgtctcagcctcatgctgcatggcctcgtgacccccagcctcccttagctgctaagcctgccttgcccaggggtgggatggcactgaaggccagcagacaggcctaggctggggcagggtcacggctggcctttacctgctcaggcccccatctctggggtgtttgggggtcagggagcagggagcactggccgtggtctacagcgtgtggtagtcagaaggtttagctgggcccagggcaggtattgcgcctgcttgggttctgccatgcctggagcatgaccctgagatcgtgacaccacttgagtggaattttccatgttcctttttacctctaatttggatctttttgtttttgaaaaacattgagaaattcaattaaatgcttttggaataaaatggaaa

SEQ ID NO: 84349 - DNA, 665 bp, Homo Sapiens
ctgttaccgctccggatattcccgggatatcgtcgacccacgcgtccgctttctgccttcacccagagggttccctctgggcctcggtgccaccaggggcgctcccgtctgctggcacccacctgtagcctgtcctttcccccccatcccaggtttttgggcagccaccctgcccgctctcccagcctgtgctcctttccctcatccagcagctggcatctgaccttggcactcgaactgacctcaagctcaggtaagtggggacagccagggatggggagatgagctggggagtggggcagtgggagggagcagtttgaagctgaagcccacttctgcctgaatcctctccctaattttctccaccagtcctttctgccttcacccagagggttccctctgggcctcggtgccaccagggggcgctcccgtctgctaggcacccacctgtagcctgtccttttcccccccatccccagctacctggaagaggccgtgatgcacctggaccacagttgaccccatcacatcgggaccacatgggctccgttatggcccaggtgcgccaaaagctttaacagttcctgcaggctgagccaacacaattcactttggcaaagcagctcggcgtctcagcctcatgctgcatggcctcgtgaccccag

SEQ ID NO: 84350 - DNA, 645 bp, Homo Sapiens
gccatggagtacacagggagcaaatatatcggggaatatgtagatgggaggatggagggcaaagcaaggtacatcctccctaccgaaacaatatatgttggggaaatgaaggatggcatgtttcacggcgagggaaccctgtacttccccagcggaagccaatacgacgccatttgggaaaacaggattggccataaagggcacatatacgttctcagatgggctgcactatgatgagaaaaactggcattactgcgacggctatgatcggaggttttacacagagatcctcaatggcttgaagcctgcaggtatggctcaactcaccaatatggacccacctagaaaaatccccaagggctattacgattgtggagacggcttctataacccagtcacgagggtagtcaaggactataggaaccgctttctaagaaacgcagatgatgacgagcatgagtggatcacccgtacctgtcgaaagggctaggatgagatcgtgggtcacaggcccgagccgtgaactctgtggctgcctccaccagaggtttccatctgccctactagcattggctgccctgggggacgggctgtagttctagaacctgattttaactcaggaataaagactttctgcggtcaaaa

SEQ ID NO: 84351 - DNA, 1633 bp, Homo Sapiens
  misc_feature (1562)..(1590): n is a, c, g, or t
aaaccctgttcttgggtgggtgtgggaaacctaattatgtgaacaagcacggagtgctgggcaaaaccaagctcaagggagaggaaaggagggagagcacagttaaggacgtgaggtttgggagatctcaacagcaccagtgtgatcggcacgggtctgggactcctggggctgctggcccctcctgcgcaagccgggagagtgtgatggaggagagacgcgcactggacaccacaagaacctggccatggagacagggccgttttcttccctgggagtttgctcagaaccaggcactgctggggaccatggatggggaggaggggcacagggcccagtgcagatgaaggttgcacaaacaccccaaactgagagcccggcctcctggcaggcgagtaagcgagcaggcgcctcgacagcacagcctgtgctttcccctcagatcaatctgctactcccttttccttaggagggagaggagcaggcagataagcctggtgtccaccaccctctctgccccacctgtagaggaagggctcaagggacaggagagcagagagggagtgtgacgctggcctcagagcccgtgcagggtcgaggagaggctctcctcggtggggagtcaggggaagatcggtttcctgttgaatctgggctgggtgtgtcttagctgatcttctgtatcagcttctcgtcagacaggcagtagaggctgttgatggacaagtctgagatgaagtgctcgcaggcttttcgagtgatctgcttgcatcctcgaaggtcgatcaaggtgacgttggcaatgcgccgtaggtagatcagggtctggtctgtcaatttattgcaacctgccatattgagctctgtgagagagtagcgagtggaagacccgacagcagtgagtagattggaggactgatctgtaaggtggctgcagtgactgaggtcgagtcgagacaggaggggcatgtggcgaattatgaggcgaagcgtggcatctgtgatgtcaaggcctgccagccggaagtcggtcatgttccggagcttgctgcgattgtcctgacctggtttatcagccggtggagtaagcaagtcccgaatttgagggtccttgattcctactgcccaccgaacatcaagggtcctgagaagggggcatgctggaagtgctgaaggcagaaactgcagaacaagagcagcctgctaagaggaggtctttcagtcctggcagcctattgacgagccatgtcagttgcttttaagacatgttggtccaactgaggtcaaggctgactggctgcctcttgatgatgccactgagggcctggggcacaatggccttacacctactcaagtcaatttttgtccaaagtcgtcttgtcgcagcaccatttataccacgtcgtgcacactcgcatacattctacaaagttctctgcggctgaggtagcggaagacagacatccagacctcccgctgcatccagctttcgtctccatcctgagcccaactgccccggccattcagcctggctgcacccccctcctctgcactgtcatctnnnnnnnnnnnnnnnnnnnnnnnnnnnnngtgccgaattaaacacccagcctcgtacctagccgtattgcgt

SEQ ID NO: 84352 - DNA, 686 bp, Homo Sapiens
cagtcgacggtaccggacatatgcccgggaattcggccattacggccggggatgtggatatggatatgtggataaagacagtaaatgaaattaaaaccctgctgttttaaatatcattaccagatataattgagggaatattatatcaacaaacatattgaaacttggctttatttgtaacgtaaactatatataatccatacgtagccaaattagatttaaaatatacaattaatgaatagtactcaaagtgtttttgttgcactgttactctgaatatggactctctatatctggtatggcgtgactgggcataacttctgtaatgtatttcagttatatgtttttccctttattgccagcttctgataatgaaattttccacaagggcatgagatataagaatcatcttttataaaaaccagtggggagttggggtattataatctagttctaaacttgtccatttgctttatataaaggctttgatttacaatatattgagcatttgatgaatatctcaaattaccccagaactacttgtctacatagaaataaactctaagtattcaaagagccttaacgtgacacacaatgacctttgagctgccttcacaactactacttgactcggtagtacaggcatactaagttactttccttggggacctgttcacattaatgcc

SEQ ID NO: 84353 - DNA, 1670 bp, Homo Sapiens
  misc_feature (37)..(37): n is a, c, g, or t
  misc_feature (119)..(119): n is a, c, g, or t
  misc_feature (130)..(130): n is a, c, g, or t
  misc_feature (220)..(253): n is a, c, g, or t
  misc_feature (1470)..(1470): n is a, c, g, or t
gcttcggcacaggcacagtgctacgtgcaccagcgtncagcaacagtggctggtctctgccccgtgcctcctccactgggctcacacctgtcttattttgtcctttggtggctctgagnagcagcctaangtccctctccctttcccttactctttgtaagatcctcttccttctgccctaccatgttgcttggacaccagggtggaatagcagagaacnnnnnnnnnnnnnnnnnnnnnnnnnnnnnnnnnncgatagatttctgaactgagacatgtgactctctaaggcctatttctgcatgggtcggagaagtgggcgggactgctttactgagttatagtgaatgtaagttttaacctaagcgcctcacatgactaactcctcatccatcaagaatgaagctcagctctcacttccccactcctcacccccctgtaaagtaacctttctccaaggttatgcttcaacaggaatagctaacatttattaaattgtggcacgcaagtaatcttggatatattggctcattgaatcctcacacctactattttacagagatgccagtggggcttgagattgaatcacttgcccaggctcccactgctggtaaacagtagagggggctcctgacccatcagtctggcttgacaacccattccctcaactgcggatgccggattcccatatcaccctgttgatttctccatagctgtggtaacatttgttgcatgaatggaccgatgaaatagggcctggcaaggagaaattcaggaaatgaatgaatggttcttccctggcagccttgatgacttacaaagccctcaaggggaaagcatttatcctcctggactccttgatgcccggaagctgctggtggtttcccccgcccagaccagatctggcattggaacgcccactgtaccggcgcccagacccctcattctggcaggacctggggaccattctgtcctcccaagccatgcttgctgggaacccccccacccgggctccccaaggtcatccaaatgcctggcggtcgacccccggccaataaaaacccagccccacgttgggcctgccgccttcctggaaaacaaccccaaggggaaaaaacctttgcgctcttgaaaccctggtaatgcccaaaaacgggatctggcgattcccttggccacagcggttgacttcggaccttggcgtttggggaaaaacccatgccgcttaacatctggcgcgaaagaaagcacctattcaccacgcgcgaattatatacccctataaaaacccccttcaattccgcacccccgaccggaatttgtcgcctgctctacccactagcaacccgtaacgcccccgcccaagcacagaacccccaccgctccactcgttggcgaggaaagataaagaacccgcgaggtacccggtttgaatctccgccatgcgcgagctctcgactcgccagcctngtctaaacttggaaataggaccgggacctaacccgtgactcggctgcccctgactccagttcccgcacggtcctacgcagcgcgcaccgcccataacactcctcgagtgagacatacccggatgccacagctcgataacaccagtcactacgccgaccacaccccgactctattgacgcggtccggggagaggaagaact

SEQ ID NO: 84354 - DNA, 531 bp, Homo Sapiens
  misc_feature (517)..(517): n is a, c, g, or t
cttcggcacagggtcacggcataatctcttataaataaatgtcagtgtagtcactgaatgcagactggatttttgcctgactacggtgctcagccttctagacaatagttatgctaagggattatcttttaacattgtgcagttatctcctttgtttgttttcttttttcattattcacataagccaagggaaatgaaaagcatcttatttcaggcaaaaaggcctgtgaatgattaactctggttccatgcgttgggactttgcatagcaacccccgtggcttgcaaccgacaaaaaagctcaaggcaggaacagcagcccagggacctgagaccaagccgttctcaaatgaaggtgatctgctgttagaggagaattcttctgtcctagctgtgtctctgtgatctgtggatgagggtgggaaagcaccactccagtcaattggggtgtacaaaatgggagtttgagaaaggtctcacatccaggttggttttgaaagccaaagtccaagcattngtatcacttcatct

SEQ ID NO: 84355 - DNA, 1118 bp, Homo Sapiens
  misc_feature (1099)..(1099): n is a, c, g, or t
tttagtatggtacagagtattgaagcctaagagggccagcagatttcaagaaaggaaagatgattgcattacttgattacaatgaatacaatctttaggatactctttactttttggacaataacgatatgaaaggaattttttattctacctatacacagctcaaaataaaggtataacttctggaactgagaaactgatggtatggagagagggacgttttcataagaaaatagctttgataagtgtatacacaaaggcatatatatatacacacaaacacccctctctcttatatactatacaggctggcacacgccttataaagaatataatatcaaggctttaggatttcaatgaattttggaattttaatttgacaggtgcttaggccatttaaggtcctgacatatcggaatcccttgtatttctaaagtatattaattatgtttttaaaaaggccccagatcaactttccttaaacagtaacccaacataaagccatagttaccaagtggaaaataagattgttattctgtattaaatcagtaaagggtattttaagagaaaggacaacttggaaaatagagacttcagagtccattattccaagctgagaacattttagttattagcagtggttaccaaataagctgaaggtaaatcttcttcaaaggagctgctcataaatttgcgttgttgggaagaggcggaggagctgtttctctattccactataagatgatgcaagtttttttatccttgaaagggttttctgaagttggtattcctatcagcaaagggtcactcctggcatgttcctcacagtaggacatgaggtccgctgatgccttcgaaacctttattctttcaatggaggcttctaatcttaactgctgcacagttctccttgcctggggctatattgttggtgcttgcttgttttgctggacatcttcaattattgtttttacctgaaatcagtaagactttgtgtggtccaatgttttcaggttttaagtggaatgaatccgcctcgccggtgcgcttgccccgccgtcgccgccgggactcggtctctaagggctcctggagacanttccgacctctcctcctcc

SEQ ID NO: 84356 - DNA, 431 bp, Homo Sapiens
cctgctgtataactccttgccatgcaaactctcaagaggccaatatattcctggccatgtttgaatgagcctcttaaaataaacttagagccatgcaaatgccagcagcttaatggatttcatggaatgaaataccgtgattaactcatagctacatatcattgcataaatgggatttatcttttttctcacttatttttgcggtgaaagtcgagggcatgcaagagtttctcttccagaagccaagaggagaacaaaggtcctaatgctgtactattccaccctttggacgcctcatccaggacgcagaggactctaggtttaacattttgtacaaaatggaacctgttaatcatattaaagcacatatgtatatatcttttatttataaataaaattttaaaacaatagtttcagtatagccacaaaaa

SEQ ID NO: 84357 - DNA, 463 bp, Homo Sapiens
  misc_feature (74)..(74): n is a, c, g, or t
  misc_feature (79)..(79): n is a, c, g, or t
ccagtgacctggcttttaaaattccttaggaggaccaggaggcttggaggggaaacctttaggtagccctggcntgcgncatactgccaaagtaccaggactatataaccaagttgaaaggggaatccacccctgggtatattaatattttaaaacatgaaaaaggcattactattgttctggtctaagtactctaacaggaccgatgatttctaaccctagcatcatgacatgtatatagtgtgttgtaagacatttgccagctaatagttacagtactgaagcttgtgaatacgttaattgagaaaactttaagcaggttcaaagttatcccatgatagtggcattcttatttgtatatatgtgctttccttttttatttgtatcaaggcatttaaaatgaatatatgtaacatgtacctaagttttaaaagcataataaaatgaacacatctgaaaccac

SEQ ID NO: 84358 - DNA, 280 bp, Homo Sapiens
ccccatatctattctttccccccaaattaacaaagtgcttagttctggtagaggaatttttaaaaaattaaaatgcctacatctaaacaaataatctctttaaaaagcatttagattaagagattgaaaagagcgaggcatctaaggctggggggtggggaaggaaaagctgtggagcactacccctcccccaggccacaaaagtcaagggatgtctcttccactggtagcctcaccacacagcttactgaaatcaacaatgttaaatatttagcttcac

SEQ ID NO: 84359 - DNA, 838 bp, Homo Sapiens
  misc_feature (576)..(576): n is a, c, g, or t
  misc_feature (682)..(682): n is a, c, g, or t
ttggtttattattcctgacctaaggtggttttacttcccttctccataggtatctggcactgttggagtgaagcccagttaatgggaaggtaaaaatagcaaaataagagagtattgtttcccaaatagagaagggaatggtggtagagattctcaaatagagaagggaatggtggtagagattctcagcctccattttgagctgtaacagaataaacaaacatttctacattaacccttcacattcatcgtcatctacagatatggcattcacacattctgccagatattctcactattataaatgtaccccccaatatcaatgcttgtaagaatgtataacaaaatacacgctgtgcagatataaatactctgtaaaaatccacaaaaacatccaggggccccaaagaagagaggcataaacagatacaagatgataagtctttcttagcagaaaacgctgcaagtgaagaaactggagtgaagaaagtgggggaaggagttcccgaagtgaaacagaggaaagctgctcaggagatgactgcgggatatttattagaatccctgaaaaacatncacgccatctttccagaagaagagaagaggtttactctgggtggcacagaccaattcagctttcatggtcttcctccgtagcactgaccaaatcaaaatactgcangcgtttcactgtggttaacaggatggaaaggaggaaaaaactaaaaacaaagtatttggatttgtctaaatactttagaacttgatataaatgtatcaagtacattacagttgttttagttggacgaaaaagaaaacaaagaatcaaaaataaatt

SEQ ID NO: 84360 - DNA, 563 bp, Homo Sapiens
taaaaaggatgataataaaaaacaaacttcagttccttcattagggagctggccccagtcattcagtggcgagggcaaaaggcagtggtgtaccatcttcctacatcatcccctggatctcctcaaagttcatcaggttgttggccgtgtcagaccaggcagcatgctgggctccatccatttcagaagcaagctggttgcttctttccagagtatgatttgtgccaccaatcacttccttacagtcaggacacgtgcccctctccatggctcccccacaatcgccaatcacatagatatggccattgcggcacttgaaccagtgaccacgaggataacctatggcactgacaatctgcactcgctcttcctctgagatgcccaggccagagcagggaagggtggctttcagagcttccatcttttcctgcacaagttgttcatcctcttgggtgaactcacatgttttctcaaggatattctggacactatagacctctactgctatgctatctttcaccttcttctctactatcttgtagcggtacagaagtccagtaacc

SEQ ID NO: 84361 - DNA, 1081 bp, Homo Sapiens
  misc_feature (347)..(360): n is a, c, g, or t
gtagatgaactaagtggaatgcagctggctattcaggcagctatcagccaggcctttataaccccagaggtcatcagattgtttgcaaagaaacaaccaggtcagcttcggacaaggttagcagagatggatagagatctgatggtaggaaagctggaaagagacctgtacactcaacagaaagtggagatactaacagctcttaggaaacttggagagaagctgactgcagatgatgaggccttcttgtcagcaaatgcaggtgctatactcagccagtttgagaaagtctctacagaccttggctctggagacaaaattcttgctctggcaagttttgaggttgnnnnnnnnnnnnnntgacatggtgcagaagcttgtaacattgatcacattcttaatgtaaatggtgtctttcttctggggttttcagttattgcaaagaaatgaagagattctggaaatgcatcaataacctaagaaaaagcgacataaaaatatacttatggcttgtgtttatgctcttcatcattgtgcgttgtgtgcggttacctgcttgagtgatcctgaacttgttgcgacagagggactcactggactctgttcgattatgattcgtctgtttaactagagaaaacaatagtggactcgatttcccattcaaggctgttggtgttcaagtgttgatagtgaacgaacaagactgtgaagtaatgatatttttctgcttacaacttatccccactcattggcacgtgaacagtgacgcaagctcaatagacttcagtaagctgttcatagaacttttgacaatgtctgagtgatcttagaaatcattatctgttatttacaaatcaacggaaactgaggtccagaagagagcaagcgactttgcttaaagtcgcatcagagagctgagggtaagactcaggtgtcctgactcccagtttagtatcttatgaattttatgtctgtaccatttagaaaataactaattaacactattatgtgcaagtcagggttatggaaaattcagtgtcccaataaaaagtggacttgcacactaagggaccatccccca

SEQ ID NO: 84362 - DNA, 1038 bp, Homo Sapiens
ggggccctcaggtaggcggggcccctggccctaaactctgggactggcgggcggtcaggcggcacagggggaatcccgggggcctaaggaggttgtcccagtttttgtcagcatctccaccccgaggtggtttgaactttgagccttttgtagtcctgatgaataatttcattttcctcaagtttatgacactcggaacgtcaagaactggaggtttgtgcaatttgagaccggtcggcactgtgcagagatcagagtactaagagacagagattaaaatggcttccagaggaaagacagagacaagcaaattaaagcagaatttagaagaacagttggatagactcatgcaacaattacaagatctggaggaatgcagagaggaacttgatacagatgaatatgaagaaaccaaaaaggaaactctggagcaactaagtgaatttaatgattcactaaagaaaattatgtctggaaatatgactttggtagatgaactaagtggaatgcagctggctattcaggcagctatcagccaggcctttaaaaccccagaggtcatcagattgtttgcaaagaaacaaccaggtcagcttcggacaaggttagcagagatggatagagatctgatggtaggaaagctggaaagagacctgtacactcaacagaaagtggagatactaacagctcttaggaaacttggagagaagctgactgcagatgatgaggccttcttgtcagcaaatgcaggtgctatactcagccagtttgagaaagtctctacagaccttggacggcccccaagttacatgaactacctgctagactcacaccccagcaaaaatattgatgtccccagcaagattagcttcctgttaaagatccaggacctgtgaatacatgcgtaactgcaagaatggaagcaaaggatgaacccaagttaaagcccagcacaagaatatgatgtaagcgcttttgggaaatgcagagattttcttttctcttcaaataataaattacatctaaaaattaatgaaa

SEQ ID NO: 84363 - DNA, 373 bp, Homo Sapiens
taacttctagatgagtgtctgtttatgcatacacaacatatccttccagatcttcatttagttgtgtaattgcttccatgacaggaaccagtaaaccttgataaaaattaaggatccgtcaatcagttattgcaatatctgatttgttggactattttggttagtttttgccttcttgtgtttctaggctattcaggcagctatcagccaggcctttaaaaccccagaggtcatcagattgtttgcaaagaaacaaccaggtcagcttcggacaaggttagcagaggtaaaatttctttaaattgatttggttgctgtgtgtttttcatttcctaggccaattcattatgatatcctatggcttaaaaatttg

SEQ ID NO: 84364 - DNA, 372 bp, Homo Sapiens
  misc_feature (14)..(14): n is a, c, g, or t
  misc_feature (23)..(23): n is a, c, g, or t
  misc_feature (232)..(232): n is a, c, g, or t
  misc_feature (305)..(305): n is a, c, g, or t
  misc_feature (307)..(307): n is a, c, g, or t
  misc_feature (319)..(319): n is a, c, g, or t
  misc_feature (344)..(344): n is a, c, g, or t
cagtggggccgtcnggggctcangtgtgatctggactcagcctcttcagcgtggctgctggaggtgttcgtgggtgacggtgcctggtgaagtatcatgtgttagagggggctagcttggtccccatgctcttgggcaactacagcagagaagcctccctgccttggaccccaaagtctcctgtcctgccctttatgtgtgtgggtgaaactggggtgcgtctgagcacgtnggagccgtgtgtgtgcctgattactgagtggccaccaaggggccgctctggactagcgcggggccgtggaagngntgcacccgtgtnattgccgtggggggtgtacctggtnagagcaccctgtctcctctttccaaaat

SEQ ID NO: 84365 - DNA, 595 bp, Homo Sapiens
  misc_feature (72)..(72): n is a, c, g, or t
ggattacaggcgtgagccccgcgcccggcctgcagttcctcttatagtaaaaacatggagaaatcccacatngaggatcataaaaattacattgtttttccatgtttacattgatcacagtaggactttgcacccacaaaggtacaatatctaattgtcataatttactgtaatatactgccacaacacatttgaggtatgtcctatctgctgctggtggcggaggcaacatgaactaatgagccagctcattcatgctaacatgcgtcgctcagaccatttaagtccaggtgcaatccctcctccccccgcagcgtgggccctggggtcaggacttaccacgaatgtgcagactagagtcttgaaaaaggtttcagctgctgccccctctgtatccaactgcgggaaatgaacaattgaagatatcaacaaccttaaaagtgtgcttccctttggcaagaaatgccctcttgggaatgtatcctaaaggcatatagtctgagatatgcaaaagaatttgcttcaagttctgtttgaaaatttcttcaaaaagtggaagaaaaccttaagatccagcaacaggggattgctgttt

SEQ ID NO: 84366 - DNA, 328 bp, Homo Sapiens
cacaggaacaaattctctaagagactgtgtttctttagttgagaagaaacttcattgagtagctgtgatatgttcgatactaaggaaaaactaaacagatcacctttgacatgcgttgtagagtgggaataagagagggctttttattttttcgttcatacgagtattgatgaagatgatactaaatgctaaatgaaatatatctgctccaaaaggcatttattctgacttggagatgcaacaaaaacacaaaaatggaatgaagtgatactcttcatcaaacagaacgtgactgttatctcaaccattttgttaaatccctaaacag

SEQ ID NO: 84367 - DNA, 187 bp, Homo Sapiens
ttgacttcgtgcgtcttcgaaattacttcaagaaggaggaattgaattttacccacatctgcgagtacacgcagaagtctggtgtctccagggccagacacttcttccttcaaggagagaaacagtttctacttttcacagagcgcttccatttctacaaaaggtatacaataaaaggcatcaggaa

SEQ ID NO: 84368 - DNA, 1074 bp, Homo Sapiens
  misc_feature (89)..(190): n is a, c, g, or t
  misc_feature (401)..(448): n is a, c, g, or t
atggtagcccggcggttaatcggcacgagggtctgcttacagttcagaaggcggctcagcagtgcaatgggctgacagccttggaccgnnnnnnnnnnnnnnnnnnnnnnnnnnnnnnnnnnnnnnnnnnnnnnnnnnnnnnnnnnnnnnnnnnnnnnnnnnnnnnnnnnnnnnnnnnnnnnnnnnnnnnaacagcagctgaaattatgttgaagatccttttatacctgaaagagtttcttcatagaaatttctgtggtggggagggggcaatctctgtgtgtctcagtatacctaaaggttggggtggggcggagttgtgtgtctctgtagaaaggcgaaggggcagttcctatcaggactgtgtatgtctgagcacatgtggctctgtttgggattannnnnnnnnnnnnnnnnnnnnnnnnnnnnnnnnnnnnnnnnnnnnnnngtggctgtatagggtgtctgtagatcaagatgtgtatacagctgcttctgctattgctggtttgggggaggggactggaaagctgagactgaaaatcaagagggaagaggtgaggaaggcccacccctggggctgggcagtgtagacctgccaccgtgtgaagaaaaatgaaagcacagatagcctaagactgcacaggcctgtgcccacataccttatagcacaggcccaggtggatcatctcatgctaacaccccacatgtgctggtggatccactcccatggatccactcacatgctgcaggcatgcagtagactcacccacagcccactctctggacaccaatcctgggaggtgggagctggaatggggagcaatgagaggagggagtgagactgttggcttaggaagggtggtacctctccctgcatcatacccaggaacttccagctccaaaatattggggtacagctcaccaccccccactccgccaacccattcctacctcctctagtgcagggacccaagttagatgatgagaaaatgccaaacaaagggaggcaaggacagagaaggtacctgcaggaaccacaagggcatatatggggcttttgaaaccttttcg

SEQ ID NO: 84369 - DNA, 615 bp, Homo Sapiens
  misc_feature (231)..(259): n is a, c, g, or t
  misc_feature (261)..(291): n is a, c, g, or t
  misc_feature (549)..(565): n is a, c, g, or t
gcacgaggagatgtctggacccttcctcaccccacctgtcggtcttgtcctggctctgcctgtcccccaccgttgttctcgtaggtgaaccccaggtcctcaactccccccctttatgtgttgaaagttaatggtttcagatgtgaacatcacgtgttataactgtagcgctgtaaatttttttgtgggagggtgggcagggaggggtcccagagggtagagctcaaggannnnnnnnnnnnnnnnnnnnnnnnnnnnncnnnnnnnnnnnnnnnnnnnnnnnnnnnnnnnggagtaaaaggggcgggtttgttttttgaagaactgtcttggatacctatttaaatgtgtgttctgttttgttttttaacgatttttaaataacgtctgtgcctccactggttgagggtggaacctccaggcaggaaccggctcgccaccctctgcccggtaagggctgcccaagaaagcattacccgccctcggggggtcgggctgtgggggtcccggcacctggcgtgagtttcatgtatgaaaacataaaattgnnnnnnnnnnnnnnnnncctacacgagcaccgtgatttcaagtaataaacagaaaatgaaacacaaa

SEQ ID NO: 84370 - DNA, 826 bp, Homo Sapiens
  misc_feature (454)..(454): n is a, c, g, or t
  misc_feature (495)..(531): n is a, c, g, or t
ggagatgtctggacccttcctcaccccacctgtcggtcttgtcctggctctgcctgtcccccaccgttgttctcgtaggtgaaccccaggtcctcaactcccgtgttttctgacctcctgcctgagtttggggtatttatagactattaattttctgactgagccaatagtggttggggaactcttgaaaaaggggagagaatggctgggtgctggggagttcccccctccgagccctccttcccggcccaacctgagggatgtggatttgggactgtctgggggcccctcctgcagcgaggatgggagggggtgctgagctgtgaatcccctgggcagggggcgacaactccgtgtagcattaacccccgtggcggggtccgctgctggtctaatttggaccccctgcctctcagtgcccctgcccctaaggggtgtctgtctccagaggggnagggacaaatccccctactggggccatttcaatggggtagnnnnnnnnnnnnnnnnnnnnnnnnnnnnnnnnnnnnnaatgataatggagatgtctggacccttcctcaccccacctgtcggtcttgtcctggctctgcctgtcccccaccgttgttctcgtaggtgaaccccaggtcctcaactccccccctttatgtgttgaaagttaatggtttcagatgtgaacatcacgtgttataactgtagcgctgtaaatttttttgtgggagggtgggcagggaggggtcccagagggtagagctcaaggattttgggttttggtttggtttcatttttggcaaaaaaaccccaaccataaaaggaaaaatgt

SEQ ID NO: 84371 - DNA, 1034 bp, Homo Sapiens
  misc_feature (537)..(578): n is a, c, g, or t
  misc_feature (931)..(989): n is a, c, g, or t
gctgcgtaggtcggtgctatttccttgtccatgcctttctgtttgctgtgtgttgtgcttcctcggtctttcccctcacgtcccacaatggatgcctacgctgtgtgcgcgctggcgagggggtgggggcctctgtctttgtggtgtgtcctcctgagcttgcctggactgcggtacgcgccgttgcctgttcggcccttttttgctgtcctggtctcttggttgtccgctgctctgcttgtcgctcctatctcgcgcgcagtttctggtgctttagctgctcctcgttacgtctgctcatggtccgttcgttgcttagcgccgcgcctgacgtggtggagtctgtagcgttgtctattatatccttccgtctcgggcctggtgctttctgtgttttggattgtccaggccttgcttcggggttaagttttccccgtccgtcccttcccgacaggaaagggtgccatgcgcctgcacccaaaccccatggggacctcagccccagcctctgctaaaacagctttgctctccttgttnnnnnnnnnnnnnnnnnnnnnnnnnnnnnnnnnnnnnnnnnngataggagtggaagagaaacagtcccctcgttggcttctgtgacctgttggcttgctgtagcccagtgggcgctgctggcctgggcgtggagaccccgaagtctgcactggggggtggggtgggttctgcgcactgcggcccctccacctcatctgtaaagtgcataatgacatatcgacatttttgacttaaaacctgaatagggtcgggggggaaaggagcggcggaagggatggggcgcgtttctccgtctccttcactctccgccatccagagagactgctacatattggagctggggaaggttggcagggaggaccgacctggcgcagaggtgaaaggagacagacannnnnnnnnnnnnnnnnnnnnnnnnnnnnnnnnnnnnnnnnnnnnnnnnnnnnnnnnnnagcaaagcccatgaagagtccaggaaaccacggtcagaacttttt

SEQ ID NO: 84372 - DNA, 1099 bp, Homo Sapiens
  misc_feature (853)..(853): n is a, c, g, or t
  misc_feature (1015)..(1015): n is a, c, g, or t
  misc_feature (1044)..(1044): n is a, c, g, or t
cggtccggaattcccgggatctctgagagaatggatgctttctgttgagaaaccagtaccttgtggaggcaggttcttgggctgctactccagggagtggatggaatccttggtcccctaggccagacttcactgccactgtgccagacagctccctgcagctgggccctagccactcttaggaaagactattgggagtatttgctggccagagaatgggactctatcagctttacacatgtcccaccagctgtttcagatagatccttacagctggcagagtaaaagtggtcccgctaccattggggaatcaggaaaggaaagactgagatggttgccaggacttggggtggcccacctgtggagaggactggctgccctggaggaggaaagggaggaagtctacacagaggagcaccaggacggctggaatttccatatgtgcttcacattgtgaggggagtgcacaagccgcccatgcaaagagtagggtcagccatggcaaggccggaagttgaactttcagtccctgcctgaatctgggctttgcaagctcctgctccatattggtggacatgggaatggttggtgtggcctgagatacccattgctcaccaggcctcactggggcccacagctgggcaacaagaaaaatgtttgaatttggaccaactgctggtgatggggccagggggccctgggcccctgtgctgtcacaaattctgcccttgggaaatgatcctataagctgctgcttttttcttgggcccttggggctggcaagacccatagaacatggcctgttaggaggcgtcctgtctgtaaaggaaattcatctcttgtgacagcctgnggctacctagctcccaaacccagaagttggagacatcaggctgtttaaatgatcatagcctagcaggattggattaaaaccacaggcttttgcagctggaatggggttcagtgaacatctcccccattcctctcttgctacaaataaggaaacaggcccagngagattaagtgacttggggctaagtcacnatagcaaattagtagcagagccggggactatccccttaatccctgtggggttgga

SEQ ID NO: 84373 - DNA, 606 bp, Homo Sapiens
  misc_feature (171)..(171): n is a, c, g, or t
  misc_feature (325)..(325): n is a, c, g, or t
cttgtcttggagctggctataaagaagtatgctggtttgttatgtactcttttcaacagtatcatagcccaacttcatctcattgaattgttcacatataccagagtactctctcttgaggaacacctgcaggcagatagttagggatgaccatgaggagcataatctcanacagggatagaagtacacttatacaacagcacttacatgggcggtttctctggtagcatgtcccataagaggccatatgcttataattaatgtgtaacttgttgatgcttttgagatcaggactgctccaggcacgctaaaaaatgtgctaaangtatagtgggctctctaaaaagaggctatttggggagtctctgaattttgtttcagagtttagccatcagaaaggtgagtttggccatcagagttttgtcctgtgcaccataaaagtctctgaattttcgtttcctcatgtaccttaatttctaaaacggatgataaaagttaggttggacacagaaggggcaatcaaatttctgtattcagatacctcttaaaggtacactgtgccaccttgctgcctttgattgcaaatacaaagttaattttcaaaaa

SEQ ID NO: 84374 - DNA, 1102 bp, Homo Sapiens
  misc_feature (159)..(159): n is a, c, g, or t
gatttcatcagtctttcagccaaatgggaagggatcttttgtttctgaggctctgactcaatacagtctgcataaaatgtatgagaagtggtgattagttgacatatgacaagtcaaggcagtatgtctacttctggaaggctggattccatttgctcntgatggaaaaccctagtcccagcagtgtttagaatgaactggagaaggcagatgggtaccagattcaggaagaggtactgatagaccaagaccagttctttctgttttaaagatgtgttatctcaatctcctccaatgctccctttggaaattcacagaagattagggctccccacagaaacagcagctggcctgggctggtcttctgactaactggagctgaatacaaaaagtctgatgggttgactgagtcggtgactgccaattggagcctgaagcccccaaagtcttctctagacttgatgatgaagcaccagttacagttctcccagctcgccttccattgcccgcaccatgacatacagctcggccagacccaccacagaggcgacgatcaatgcagctagcacccgcgaggccatttctgtgaagatatattggcttccaaggtaagtgcagacgaaggcagcaaccaccgtgacaatgaaattgaagatggtgatgaccagagccttcaatgatctcacttgctttcccaggtcgctgagagtcccaccatgtcttgtatcctgacaagtgacgttgcgggtgatccgtttatattcctcattggccagctgtatcttaatcttctccagccgggcaactagttctgggttccgtggaggcttcacaacctctgggagatagatttcactgccttctaggagctcatggaggtatagtttggaatccctttctctcagatgctggtgcagatcccggatgagacggaaagaaaccaagcgttgggggccactggagctatcaccgcccttgtgcttcttccccagcgcggcctcaagctcggcccgcagctttcggggtagccgctctggctccagctccccgccggggcccaaagcacgcaccaatcgctcgcccgcaagcaaagaggacgcca

SEQ ID NO: 84375 - DNA, 824 bp, Homo Sapiens
  misc_feature (70)..(78): n is a, c, g, or t
  misc_feature (268)..(268): n is a, c, g, or t
  misc_feature (272)..(272): n is a, c, g, or t
  misc_feature (529)..(538): n is a, c, g, or t
tacaactgcttaaaaggaaattctgagttttatcagaagactcacatactcaaacacaatatcccagttnnnnnnnnntttcctggatagtccctgggatttgtcaaatggaatttgacctggatcttacttaatgacaactaaccagtaatatccataatttgacaacagcttcccttgaagagaaaattgtggatcatgtgtccattctagttaagtagaaaatctgtcatacttttcccttctggttgtaatcctggactacaanatcntcgcagggtgggatttcagccttagcattcaacaagttctttagtctacatttagcaaggcatggggcggagtgctgggcacatgtgacagggctgtaattcttctgctctttcaatttcttataaatttcctgctcagaattataatgaaaagtccgagaatcaggatgctagaaataaaatattttaggcagccctctgaaaatttatcctattcaaggctgttcccttgtttggcaatttaaaactctaagttnnnnnnnnnnttaagcatccctgttatagggacaagaatgcagaaaaatagcctctgctctaatgaagtagatatgttcgatgttcatcagcatccactccaataggagtatagattttgcttgacaagtacaattccgggttactctctttctcatgtgtgttgctctgaaaccttacttgtgctcatatacggaatgagaacaagtatctgtattactctgaaaaatatgaggctgtacattggccagaaatatgagcaagcaaaattagaggcaaatgaaaagtaacaaaagg

SEQ ID NO: 84376 - DNA, 352 bp, Homo Sapiens
  misc_feature (167)..(269): n is a, c, g, or t
ctaactgaaatattgaattaattctattcctcctcattcccccactccagggaaggaaccaatcatttgctctttacaaaaagcaacacatttctacaaaaccaacagcatgggaaattcttcaaataagcacttccaactgggcacagtggcccatgcctattatnnnnnnnnnnnnnnnnnnnnnnnnnnnnnnnnnnnnnnnnnnnnnnnnnnnnnnnnnnnnnnnnnnnnnnnnnnnnnnnnnnnnnnnnnnnnnnnnnnnnnnnttaaaacattagccgagcatggtggcatgtgcctgtagtcccagctactccaacaggctgaagtgggaggactgcttggccca

SEQ ID NO: 84377 - DNA, 1275 bp, Homo Sapiens
  misc_feature (1134)..(1147): n is a, c, g, or t
  misc_feature (1213)..(1213): n is a, c, g, or t
ccacgcttctgtacctatgaacacgttgttaaaaaaagcaggctggtaccggtccggtattcccgggatatcgtcgacccacgcgctcgaggaacgtgaggagattgccagacaggcagccaagatggccgatgaagccatcctgctaggagaagagtagagaggaggcccttgagcgaggcgagtgcgctggagggccaccctccagccatccagagcctcatcaacctgctggcagacaacaggtacctcactgctgaagagactgacaagatcatcaactacctgcgagagcggaaggagcggctgatgaggagcagcaccgactctctgcctggcccgatttcccgccaaccactcggggcgacctcgggtgcctcgctgaagacacagccaagctcccaaccgctccagagcggccaagtgctcccctctgctacacccacttccatctgcaccccccacctcccagcaagagcttcaggccaaaatcctcagcctcttcaatagtggcacagtgacggccaatagcagctctgcatccccctcggttgctgccggaaacaccccaaaccagaatttttccacagcagcaaacagccagcctcaacaaagatcacaggcttctggcaatcagcctccaagcattttgggacagggaggatctgctcagaacatgggccccagacctggggctccttcccaagggctttttggccagccttccagtcgcctggcacctgctagcaacatgactagccagaggcctgtgtcttccacaggtatcaactttgacaatccaagtgtacagaaggctctggataccctgatccagagtggccctgctctctcccacctggttagccagaccacagcacagatggggcagccacaggcccccatgggatcttaccagaggcattactgaagctaaatctttcaactctccccagtcccctcatcccctggcctcctcccacttacttgttctaaatagagctgttttggaggatgttctctgcgctcccaggccggcatcgagtgtcatcaatttctaccacctgctctctcttctgcccaagggctgtgttgcttattccttacaaagtttatactgcatttggggctggatcnnnnnnnnnnnnnnggtttggtagaaaataaatatctccggggggcagtacaggtggtctggggctttgtatttgatggnggtttctccgggtccctgttttctactgggattttggaggccagggcccagctagcccaaga

SEQ ID NO: 84378 - DNA, 436 bp, Homo Sapiens
  misc_feature (268)..(310): n is a, c, g, or t
  misc_feature (413)..(413): n is a, c, g, or t
taggtcatggcagttgaaaaagggcctcattggagataaagtcctaggataaaattgggaacaggaatgagcaggaagccaatcagccaaagaaaatggtgatctggacccaagagaccagtagtcaccctgcttgtttctgcagcaatgactggtcctgtcttttgagtctgggaaatactagtttccattcctgggatgcttcctgtgccctctcaagccagttcttctcttccagaagaattcagagtatgtgtctcagaaaatnnnnnnnnnnnnnnnnnnnnnnnnnnnnnnnnnnnnnnnnnnnttcaggaaagggcatttctgctgactgtggtgtgtgtgtggtgattgtggctcccgacccacaaatgactgagtgctccattcttcctttaccccccattttnccattatttcgctccaaggaatt

SEQ ID NO: 84379 - DNA, 274 bp, Homo Sapiens
  misc_feature (11)..(11): n is a, c, g, or t
  misc_feature (33)..(33): n is a, c, g, or t
  misc_feature (257)..(257): n is a, c, g, or t
atgagataatnttgttaaagttggcttgcttcnggcgggtgcttggtccagagggagaaaagaaggcatgatttcagaatactctggcagctttttaaattcagctttatcaagttacagtaaactgtatctgtttagaattacaactcaatggttattttgacagatgtatatgccatgaagccactgtcaccatcaacatgcagaacacttccatcgcccccaaaagattcctcaagttcctttgcagtccaacnctcatcgctgctgctga

SEQ ID NO: 84380 - DNA, 156 bp, Homo Sapiens
attaaaagataccagtatgagatgaaaacttccaataatttgtcctataatgtgctgtacagttcagtagagtggtcactttcactgcagtatacatttatctacacattatatatcggacatataatatgtaaataaatgacttctagaaagaga

SEQ ID NO: 84381 - DNA, 1033 bp, Homo Sapiens
  misc_feature (735)..(735): n is a, c, g, or t
tttagaccttgggagactggctcaggtccaggttttgctttgatccttttcaaaactggagacacagaagagggctctaggaaaaagttttggatgggattatgtggaaactaccctgcgattctctgctgccagagcaggctcggcgcttccaccccagtgcagccttcccctggcggtggtgaaagagactcgggagtcgctgcttccaaagtgcccgccgtgagtgagctctcaccccagtcagccaaatgagcctcttcgggcttctcctgctgacatctgccctggccggccagagacaggggactcatgcggaatccaacctgagtagtaaattccagttttccagcaacaaggaacagaacggtaggaactatatccaagcatctggactggcatagaaaagaggagaaagaacatttagaaggagtacaagatcctcagcatgagagaattattactgtgtctactaatggaagtattcacagcccaaggtttcctcatacttatccaagaaatacggtcttggtatggagattagtagcagtagaggaaaatgtatggatacaacttacgtttgatgaaagatttgggcttgaagacccagaagatgacatatgcaagtatgattttgtagaagttgaggaacccagtgatggaactatattagggcgctggtgtggttctggtactgtaccagggaaaacagatttctaaaggaaatcaaattanggataagatttgtatctgatggaatattttccttctgaaccaggggttctgcatccactacaacattgtcatgccacaattcacagaagctgtgagtccttcagtgctacccccttcagctttgccactggacctgcttaataatgctataactgcctttagtaccttggaagaccttattcgatatcttgaaccagagagatggcagttggacttagaagatctatataggccaacttggcaacttcttggcaaggcttttgtttttggaagaaaatccagagtggtggatctgaat

SEQ ID NO: 84382 - DNA, 983 bp, Homo Sapiens
  misc_feature (745)..(760): n is a, c, g, or t
  misc_feature (797)..(797): n is a, c, g, or t
gctggtaccggtccggaatcccgggatatcgtcgaccacgcgttcgggccatgattttagttaatagtttccagcttctctatgtggtggatgctctctggaatgaggaagcgtgttgacgaccatggacatcatccacgatggattggattcatgctggctttggagactggtgtgggttccctttatttacagcttccaagccttttatttagtcagtcatccaaatgaagtgtcttggccaatggcttctctaattattgttctgaaactttgtggttatgtaatcttccgaggtgcaaattctcagaaaaatgcattccggaaaaatcccagtgatccaaagcttgcacatttaaaaaccattcatacttcaacgggaaaaaatcttctagtttctggatggtggggctttgttcgccaccccaattacttgggtgatctcatcatggccttggcgtggtccctcccatgtggttttaaccacattctgccttatttctacataatttatttcaccatgttgcttgtccaccgagaagctcgtgacgagtaccactgtaagaagaaatacggcgtggcttgggaaaagtactgtcagcgtgtgccctaccgtatatttccatacatctactaatgctcttctggcttttctacaaaatactcctgcaattccagctgccatttgcaaaaacaaggaaaaaaatccgaaactttcttttgttgcactgacagggtctgtacnnnnnnnnnnnnnnnngagtcaggactatggagccgagtagttgatctttctnataatatagccgtgtttacttgtattaacttacagttaacataggaaaaatacaagtaaggatgtgagaatttgcattttaatgggaaatttccaacccttaatcctgaaaacagaagacagtcttaatataaatgtactgtggaagaatgctattgatgtttatggtttctgattactttttcaa

SEQ ID NO: 84383 - DNA, 1288 bp, Homo Sapiens
  misc_feature (791)..(800): n is a, c, g, or t
ctgcctgctgccccggctcttcaccggcagcctcctccactccagcagcaggctcggttcatccagccccggccaactttaaatcagcctccaccacctcttattcgccctgctaattccatgccaccccgtctaaacccaagaccggtgttgtccacggttggtggtcaacagccaccatcacttattggaattcagacagattcacagtcctcactgcactaaaaattaaattggacacagctgcagtaacttttcaccccatcattataccagtgctcatctgactgatgaaaaagaggaaagaataatcatttctagatactgaggctgcgaactagttctgtggcagtggactagcataagtggatgtctaagaaatttttcagttcactagactaaaatgttttacaacaaaaagcctccagttagcctcctttctagagtatatgttcagcaatgttgatctcataaaaggaaaaacaaaagatttaagtattctatataccaagttttgttttgtttttactgtatttattttattgaggttctttatattcctgcctcttcatagtcaaggctcttagtacaggaatattgacttaggaattgtgaaaactccttaagtttcgtaagttaaggatgtttggcttttttctttaattttttaaaaaccattttcctatgttaggagtgcaagaatagccagcatttccgattttgacatatgttcattttatgcatatttaagaaattatagctgcatatcccttctttcaaaaaatgttgcnnnnnnnnnnaaaggaattttaatatattcctttaaaagaaagcaatttaatcaattgcaaagcaattatataaaaccacaaagaatgtactgaacctactaaccctttaacatacagtttagggtcctagcgcagagtccttgtttaaaggtcattgactcatcatctgtcagtaatgagaggattggaagaataattttgcatacaaatgaggacttaatttgttgaaatataatctctttaagttccttgaaaatggagttggttttttttgtttctaaatgctatctgcttttaactagtagttgcctacatctggggacttcagagaagaattatattttgttagttaagtagacacagtggttatggaagcatttctttacagtaccctttacgtgtttggtttctgaacttaaaattgccctcatacttaataatatggtctgcatttaatatgaaaggtgttttattgataaatctattgtactatttgg

SEQ ID NO: 84384 - DNA, 528 bp, Homo Sapiens
  misc_feature (224)..(224): n is a, c, g, or t
  misc_feature (449)..(457): n is a, c, g, or t
accaaggtgggccatgcgttgtttggtcttatacctgatgaagaaatggcaacagctgacagaaatgggtacagctcatcaaaaatgtgcagcaccggcagagggaagatacggggcaaatgtgcttcctgatgcttccatggggatgtgccctggtgtgcatctgcttgtcaggaagagtcacattgctgcttaacatgctggattgccctagtctttgcccnagccttcagaatggtcctgagaaaacatcactacttcgatgttctactttgctttccaaggagcaaaaataactttggagccttctgggaagtgtgcctgggattcttcagttggtttcaggcagatagttgagactgggggctttgatattcaaggtctttggcaagaatcccaggcttgaccaactgggtacccaggtcaaagatttttgtattcttgtgaannnnnnnnngtccctattgcccagggatgtcattgtaaatatatgtgcatttataaataatttttgtattcattgaccat

SEQ ID NO: 84385 - DNA, 419 bp, Homo Sapiens
taccaatctgaagtgtaagtcccttttcctactttcatgtaaagtgccacaggtgtcttggtttgcatattcaaatattatataggaaaaacagtctgttatgtatttcttcacctagcttcttgtaatatttatggacgtttccagtttttgtaccttcttagctaaagcagttgcctttttgtaatggcaattaatttatatgataaaactttgtatccactgtagttgacagtattggttgctaattaactgccatattgccctgtctttctattaaaaaaatactgtacctgtacttagaggctaacagattcatgtggacatttaccaggcaagaccaacttgtattgtccatgatttctacgatttccactatcttcaaatgaaaaataaacgctgagtagaactgaaaaaaa

SEQ ID NO: 84386 - DNA, 421 bp, Homo Sapiens
  misc_feature (27)..(27): n is a, c, g, or t
  misc_feature (218)..(218): n is a, c, g, or t
acacgctgcaacaggggctggaggacnacataacccaggtgacattggtaaccgcaaggggcttgggtcgaaaggctggcaggatggtgttgaaagaaaagctttccttctgcaatgggcaagccgcatgctcaatcctctaggtatccccgagatgcctgaactttgcccccccttgcccctgtgcttcaaaccacatagcagaggaaggtcattgncctcccgggaactgtactccacattccggaactggaatttaaagaagttggcaggcagccgttctcctgtgacaatctcaaagggcggcagctcaatcagctctttcagcttctcagggtcgtccaggttctccagatcctcccattctgagtaggcagcctcagtggccacagcagcctcttccttctccacgtgccgaaat

SEQ ID NO: 84387 - DNA, 480 bp, Homo Sapiens
agaggacactgtttcaagattcctgcgccagctccttcgttgttatagaagttggactaaataaaagggtaatcacaagcgtacagataacaggcaggcaggaatgtgaaaatcagagagaagagagatgtgcaccagaagctggagtaatgtgctttgaagatggaggaagggaccataaatcaaggaatgcagacagcctgtagaagctgggaaaggcaaggatgtggattcactcgagtctctagaagaaacgcaaccccgccaacaccttgatttgaggacgtctgaccttcagaatgagaaaatgatacatttgtgttgtaagccacccagtttgtgaaatatgtatcaacaattgaaaactagtacatagtcaaatactcaatctctgttttttttagcttatcattttcaatctctgtctccaacccacaaaccacatgcatcataaataaattaaaataccaaaactttaaa

SEQ ID NO: 84388 - DNA, 938 bp, Homo Sapiens
  misc_feature (43)..(77): n is a, c, g, or t
taaacgacgagcgcagcgagtctttgagcgaggaagcggccgnnnnnnnnnnnnnnnnnnnnnnnnnnnnnnnnnnncagtcgacggtaccggacatatgcccgggaattcggccattacggccgggcagccaccactaagcccatggttaagatgtcccgtgaagtccaggtgtttgagataacagagaaaagcgccaaactccactgggagaggcctgagccccccggtccttatttttatgacctcaccgtcacctcagcccatgatcagtccctggttctgaagcagaacctcacggtcacggaccgcgtcattggaggcctgctcgctgggcagacataccatgtggctgtggtctgctacctgaggtctcaggtcagagccatctaccacggaagtttcagtacaaagaaatctcagcccccacctccacagccagcaaggtcagcttctagttcaaccatcaatctaatggtgagcacagaaccattggctctcactgaaacagatatatgcaagttgccgaaagacgaaggaacttgcagggatttcatattaaaatggtactatgatccaaacaccaaaagctgtgcaagattctggtatggaggttgtggtggaaacgaaaacaaatttggatcacagaaagaatgtgaaaaggtttgcgctcctgtgctcgccaaacccggagtcatcagtgtgatgggaacctaagcgtgggtggccaacatcatatacctcttgaagaagaaggagtcagccatcgccaacttgtctctgtagaagctccgggtgtagattcccttgcactgtatcatttcatgctttgatttacactcgaactcgggagggaacatcctgtgatgactaatcagaaggtgctctggggctggggacctcgactctgttccaaggaatctctcgaatcttgaatg

SEQ ID NO: 84389 - DNA, 433 bp, Homo Sapiens
ctgtaaattaaagtacttattaggtaaatagaggttttgtatgctattatatattctaccatcttgaagggtaggttttacctgatagccagaaaatatctagacattctctatatcattcaggtaaatctctttaaaacacctattgttttttctataagccatatttttggagcactaaagtaaaatggcaaattgggacagatattgaggtctggagtctgtggattattgttgactttgacaaaataagctagacattttcaccttgttgccacagagacataacactacctcaggaagctgagctgctttaaggacaacaacaacaaaatcagtgttacagtatggatgaaatctatgttaagcattctcagaataaggccaagttttatagttgcatactcagggaagaaaattttataggatgttc

SEQ ID NO: 84390 - DNA, 844 bp, Homo Sapiens
cgggctcccccttaaagttttattccccaaggaggggtcccttttcccctttcttttaaaggcaaactttaaattttgggggtggctactttcccctccctttttgggaccagccaactaaattccatcactacccggaggaagacaaaagtgggtgctgcagaaggcaagactgtaggccagtggggatttgtctaataattgatgataagatgatagcacagagggcaacgtactgagagaggaaggcagccttaagaaatgatgcagaaatagccaagcaagatttttccaagcactggttaaatcaccagcaaaacaaagcatttatgtgagtacctcaggcctgggcacctctttgcttgaaatatggcaagacttggaaaaatgtttgcccttagaatctatctcactactttagttagttgtctcctttgggcctgggcacagttctggcactgatctggaacagactcccttttctaaaactgaacttgaccacatcaaaagtttgtaaaacaatctccatggtaattaaacttgcattcaacaccatatggtaacagaagatggcaaaggataagattcagatcttagatctttccaagtagggcatgttagatgatagaaggattagttgcaagctggatctgagctcaggcttgggcatgaaggaaactgtctcccatgtggtttggaagagttaggggctccctgagctctattgtgaactatacgggtttcatccaaggaatggtatgatgtgggcataaaaccattcttcagacaactgaagatggtccccttctgtagccagaaccacaaatatcggggtacgagctgc

SEQ ID NO: 84391 - DNA, 1253 bp, Homo Sapiens
  misc_feature (335)..(409): n is a, c, g, or t
cagtcgacggtaccggacatatgcccgggaattcggccattacggccgggggattgtatcagagggaatatgaaatgtgtccctgccctacctagttttaacgacagaatatctattaaaggctacttagctgaagggtaagggtgacaggtctaggggaagcttgggaggtggtgtgctgtgacagaaaaagtggcagagtagggacgagagacctgcattctagccctgtttctgtcacttgctctgtacacttagacaacagcttgacctcttgagctttagtttcctcctctgcataatgagagggttagactactgaattgtatgggaannnnnnnnnnnnnnnnnnnnnnnnnnnnnnnnnnnnnnnnnnnnnnnnnnnnnnnnnnnnnnnnnnnnnnnnnnnagggaatccccaggggaatctcgtgaccagccaggtgtgaaatctgctaactggaagatctcaaagcttccttcactttttgtgattttgtggtcatgtaacgttactgtattattctacgtaaatgtgggtactgggatgtttatcatactggtttctctgtgtttacatactaatttgtgtaagaaatgcattttagtctgtgtacctcaacctgctgtttgtttcctagaggtgtttagtagtctttaaatacaagtaagacttaagaggatatttgatgttatttacctggatattttcttccccttttatttatttagaggaaattgagattctaggagccaaaaaaatgaaaacaaaattctaaggcaaagttaaagaaaaaaattacattatttcttaccatttgctactttataatgaaaatttaaaaattatatgggaagatttttctctgggataacaaatccttgtcataaagtaagaggtctttttaaagtaggtaggctataaggcctgtaatttaaaataatactcctttctctagggttggtgcaattctccattaatgaagataacatttgaattccccaaagcaggtgaggagtcggggaggagaaagcgatgttaaaatgaaaactcactgcaaaagaggaggcagaggaagaaggaatgtaaaccccttaaagcagatgtgtgtggggccttatgaagaccaggattctgcgggtgtcaggggattgcccctcttgacagagactagggttttagactgaggcttcctgcagggtgttcgcattgcccttctccgttccccttcagacctttctggggagaagag

SEQ ID NO: 84392 - DNA, 950 bp, Homo Sapiens
  misc_feature (19)..(19): n is a, c, g, or t
  misc_feature (22)..(22): n is a, c, g, or t
  misc_feature (48)..(48): n is a, c, g, or t
  misc_feature (52)..(52): n is a, c, g, or t
  misc_feature (55)..(55): n is a, c, g, or t
  misc_feature (58)..(58): n is a, c, g, or t
  misc_feature (61)..(61): n is a, c, g, or t
  misc_feature (65)..(66): n is a, c, g, or t
  misc_feature (88)..(88): n is a, c, g, or t
  misc_feature (91)..(91): n is a, c, g, or t
  misc_feature (98)..(98): n is a, c, g, or t
  misc_feature (101)..(101): n is a, c, g, or t
  misc_feature (103)..(104): n is a, c, g, or t
  misc_feature (107)..(109): n is a, c, g, or t
  misc_feature (112)..(112): n is a, c, g, or t
  misc_feature (115)..(115): n is a, c, g, or t
cgttattgaaaggtcatcntcngtaggcaattttaacagcttttgaanctgnctngtngcnaatnntcagggtgcctttcgagaaatnatncaccctnttnannttnnnatnagnggaaagaacttgtccacttgctcattgaaagctgtagctcggatttcaccactttcggtcaaccagttctagggagaaaagcttcccttcccctcgggagttgctccaggtacggatctgacttttgttggtaacacgagcacaaatggtccacttggactggtaaggagtgaggctggcaatgggcaccactttggactgtgttcccccagaagtgtgtgacaggctgggacctgcagcttttccaaatgtctttgaagcaccataagccttagaaacagtagaacccattcccgagcttccattctgcggctggggcctgctgcttgctgctgggttggctgctggcgctggaggagctacttgcggctgcccgagtccttcattatagggcactggattgccaatcttcactccaactgcttcacctgacttcaaaacttctaattccatcaagataactactctccttccgtctttcagagtgttcacaataaatctgtgaatctggcatacacagttgctggacaattgttcttcctccacgagagggttcaactgtgtcgccaacatgaaagaggatagagtgttcaatccatcactcatgagcagtcgataacgcggcggactattccccgtagtaatgggacggatgttgatgacttggaggatgggctttatgtttgtatcccccttccgcatgatggccgcaatggccccctcgctcagttggccgaccatggctccaccgccaagacttccccgcggaccccgcaacagcctcagccggatgctctggtcgacgatatccggagaattccggaccggtacctcc

SEQ ID NO: 84393 - DNA, 1136 bp, Homo Sapiens
ggcgtgagcaaccatggccgggcagcacctcccggtaccccggctggagggcgtttctcgggagcagttcatgcagcacctctacccacagagaaaacctcttgtgttggaagggattgatttggggccatgtacaagcaaatggacagtggattacctaagccaagttggagggaagaaagaagtaaagattcatgttgctgcagttgcacagatggacttcattaaactttaccttttgaccagttggtccagagggcagctgaagagaaacataaagaattctttgtttcagaggatgagaaatactacttacggtcacttggagaagaccctagaaaggatgttgcagatatcagaaagcagtttcctttgttgaaaggagatattaagtttccagaattcttcaaagaggaacagttcttttccagtgtttttcgaattagttcaccaggattacaactatggactcattatgatgtactaaatcagaagtactgaatatagataacccagacttggctaaatatccacttttttccaaggctagaagatatgaatgttcccttgaagctggtgatgtattattcattcctgctttatggttccataatgtaatttctgaagagtttggagtgggagtgaatatcttttggaagcaccttccatctgaatgctatgataaaacagatacctatggaaacaaagatcctacagcagcatcaagagctgcacaaattctggacagagccttgaaaaacactggccgagttaccagaggaatatagggacttctatgcacgacgaatggtcctacacattcaagacaaagcctacagcaagaactctgagtaaataatgaagtgaatgcaatgcacattaacactttagtaaggtataacgatataaattaaagattttgttaaaataggaaagatacatcagatttacagattatgtaagtacgaaggggtgtttgtgtggattctacttgatacagattgttataattaaagaatgctgtgctgggaccactctttaacattcagatgctgaccactaaaagtccaacttaaaatgacttaaaaacagtaagaaaatatattgattcacaatacatgaaatctattgacaga

SEQ ID NO: 84394 - DNA, 1657 bp, Homo Sapiens
  misc_feature (45)..(53): n is a, c, g, or t
  misc_feature (118)..(163): n is a, c, g, or t
  misc_feature (645)..(645): n is a, c, g, or t
cccgagttatgtgggactacagcgcccacggcacgcccggctaannnnnnnnnggtatttttagtagagatggggcttcacggtgtgaggccgggatggtcttgatctcctgacctcnnnnnnnnnnnnnnnnnnnnnnnnnnnnnnnnnnnnnnnnnnnnnntgagccaccacgcccggctcctctctttgtctagaaggaatgttctccttctcaaaaggaaggtttctcctttgtgcttctccaaatgcaacaacaggatgtgtgtgtggtaaaggtgtgggaacactcagggcaatgatgtgctccaggtgagcagaagggagagaggttccagaaccttctctgccaaatgttcctgggaggcaagatcagagccagccaagaaggggaagctgtaagagtctctcttaccccattatttccaccaaaggcaccgaaaaagaaagggaagaaaggcaaagccaaaggcaccccgattgtcgatgggctcgctccagaggacatgagcaaggagcaggtgaagttgagtcctccctctttcttccttgcctttcgccggccacacgccccgttgccgtgcatgggcccctgctcagtgcctcacctgacccactgcacctggccaggtggaggagcatgtnagccatgtcagccgcatccgggaggagctggaccgcgagcgggaggaacgaaactacttccagctggagcgggacaagatccacaccttctgggagatcacacggaggcagctggaggagaagaaggctgagctgcggaacaaagaccgggagatggaagaagccgaggagaggcaccaggtggagatcaaggtgtacaagcagaaagtgaagcacctgctatatgagcaccagaacaacctgacagagatgaaggctgagggcactgcactcatgaagctggcacagaaagagcaccgcatacaggagagtgtgctgcgcaaggacatgcgggcactgaaggtggagctcaaggagcaggagctggccagtgaggtggtggtgaagaacctgcggctgaaacacaccgaggagatcaccaggatgcggaatgattttgagaggcaagttcgagaaattgaggccaagtatgataagaagatgaagatgctgagggacgaactcgacttgcggagaaagactgagctccacgaagtggaggagaggaagaatggccagatccacacgctgatgcagcgccacgaggaggccttcaccgacattaagaactactacaacgacatcaccctcaacaacctggccctcatcaactccctcaaggagcagatggaggacatgcggaagaaggaggaccacctggagagggagatggcagaggtgtctgggcagaacaagcgcctggcagaccctctccagaaggctcgggaggagatgagcgagatgcagaaacagctcgcaaactacgagagggacaagcagatcctgctttgcacaaaagcccgtttgaaagtcagggagaaagagctgaaagacctgcagtgggagcatgaagtgttagagcagcgattcacaaggtgcagcaggagcgggacgagctctatcgaaagtcaccgcagccatccagaagtgcagcagagacaggttcagaactcgtgctagacgcagctcagct

SEQ ID NO: 84395 - DNA, 655 bp, Homo Sapiens
  misc_feature (102)..(102): n is a, c, g, or t
  misc_feature (144)..(144): n is a, c, g, or t
tgcccagccccaaaatcactctgacccattcgctcgtataagccaatgttggcgttgctcgtctcggggatttcagccagctgcatgggtggggtgaaagtntagcagccatgctgcactgagccagctgctggctgctgctcnggaggcctctccaccacacagccttgaggagacttgacgctgcaggtcggaggggagctgatgctggtttgctgcagcatgctgcagctcccgctgatgttggacatctgctgggtgacagcacagctgctctgtgtcagactgctggaggtgaggttgctataggagcagctgttctgtgaagagccgtttccacagatgctgcctcccatagtagaatcgtagctgcttgggttttcgtagttctcagttgtgctctcgatactgcccaggtcactaaatccactgtctacgacttgctgtgaatgatctgaaactgatgggacatccatcatgggactggtttccatgttctgcagagatggcactgagatggcactttgatctgggctgatttgggcgtagctgttttccagagcagggacacttgggctgttgacagaacgtacggactggccaggatgggagtggacggatgaaactgggctgctgtgctccgactgtgacaatc

SEQ ID NO: 84396 - DNA, 1486 bp, Homo Sapiens
  misc_feature (1465)..(1465): n is a, c, g, or t
ttggcatctagctaaaattccaaaggtaagccaaaagcagcaggcccaagtactgttaatccacattgctttaaaagcccttggaagtatgcaacaggcccaagatttacaatcttccacacaggacaagcaccacaaagaaacgtggtgggctacacaaatggcttaataaaatgttaagagctgtacatccagcagagttcttgtgaaataatgtgatcattagtactaattttaaggtggattatatttctgatctatacctgcattcccccccaccaccagggaaatgagtctagtattttagtagcagaacagggtgtactcctaagaggctgttggagggtggtgttttttgcttctgactcattttgatggtaattagataatctactttgtggatttattttcctccactgtggccccttgaattaacatgactgatagtggaggcttagatacaaccctcctccactccaggcggtttcctatctatctatctgttggacaattttcaattctttcaacccagtttcgaccatgaatgtgacaggactttacaaataacacttgtaacaaagagaaaacccttttaactggacaaaacagagtttattcagtccagtaagcaatttaacaagtgtcagtctgatagttttgctcagtggaatgtgctaacatcagttctagtagaaccttttatttcataaagcatttcaatgcaaattataccagggacaaagtcaaaacttccatcagtgcagcctgattaatcatcggcataacggcgccacattcaacattgaaacaaagaactaattcaaaagttatgtgcttaatctcaaatgtttccccccagtccaagtgtagagaccttgataatactgtggcttttcgtttttcttcttaaaaaagagatggtaactaagaagggggtgagaaaacagactgaacacgtaagtaacagatcatgactaacactctgccaagtcttcccaaagtaaaaatgttggtgccagtgtttgttctggaaatgaaaatcaatttcggttggtactgatccataatgaacacattccctgttgaaaaacctggagtacttcagctggtggaattcattgtagtaactttcaagtagccagaaggtatctggagacaacttcctgcctagctgaaagtgacactgtgaattgcaccgtccttcgtctttgcacaagcggacttcacttcgaacgcgcaacaccatcgaaccaccagtttctcaaagaataagtggccttctatgggaactggagaatatgtactgaaatcccaaatcagaatcaaacacaaaccgccatcctcctacgggagcccctcatggtccaaatcccacacctgaaaccaaagcaggatgactgttcagtcacgtaaacactaagcttatttgtctagtgaattgcctctatgtactcctcgtgccganttaacacccggcctcgcatcc

SEQ ID NO: 84397 - DNA, 557 bp, Homo Sapiens
ctccaagagcacttctcccgggaaatacccacaccccggcttggcagattttgccgacaatctcatcaaagagagtgacatcctgagcgatgaagatgatgaccaccgtcagactgtgaagcagggcagccctactaaagacatcgaaattcagttccagagactgaggatttccgaggacccagacgttcaccccgaggctgagcagcagcctggcccggagtcgggtgagggtcagaaaggaggagagcagcccaaactggtccgggggcacttctgccccattaaacgaaaagccaacagcaccaagagggacagaggaactttgctcaaggcgcagatccgtcaccagtcccttgacagtcagtctgaaaatgccaccatcgacctaaattctgttctagagcgagaattcagtgtccagagtttaacatctgttgtcagtgaggagtgtttttatgaaacagagagccacggaaaatcatagtatgattcaatccagatatgggttaaattcctcattttacttttaaactggtggtaaagtggaaattgca

SEQ ID NO: 84398 - DNA, 597 bp, Homo Sapiens
  misc_feature (263)..(305): n is a, c, g, or t
  misc_feature (400)..(400): n is a, c, g, or t
tttaaagcacttcctgattctatggtgtcagtaaagaggaaggctgagaacattgcttctgtggaggaagcagaagaagacctagagtgggacccagtttgtgtgtgagacagtaatccgatcccttaccttggatgctgccccagaccacaaccctccttgcagacagaagtccttgcagatgacatttgccttgcctgaagggaccacttggaaatgagaaggaggagattatccatatcgctgaggaagaagctgtcatnnnnnnnnnnnnnnnnnnnnnnnnnnnnnnnnnnnnnnnnnnnctcaaagatgaagttcaaagtcagtcctctgcttcctcagaggattacatcatcatcctgcctgagtgctttgataccagccgccccctgggganttctatgtacagctctgcgctctcacagccaggcctggagcgaggtgctgaaggcaagcctggggttgaggctgggcaggaaccagctgaggctggggaaagactccctggagggagaaccagccacaggagcacagcataagtgacatcctcacgaactcacagactctggaaaacagtgccctaatcccagaggt

SEQ ID NO: 84399 - DNA, 636 bp, Homo Sapiens
  misc_feature (112)..(154): n is a, c, g, or t
tgctaggaaggccggggtgaatcggcacgagggacatttgccttggcctgaaggaccacttggaaatgagaaggaggagattatccatatcgctgaggaagaagctgtcatnnnnnnnnnnnnnnnnnnnnnnnnnnnnnnnnnnnnnnnnnnnctcaaagatgaagttcaaagtcagtcctctgcttcctcagaggattacatcatcatcctgcctgagatgcttagataccagccgccccctgggggattctatgtacagctctgcgctcatcacagccaggcctggagcgaggtgctgaaggcaagcctggggttgaggctgggcaggaaccagctgaggctggggaaagactcccatggaggggagaaccagccacaggagcacagcataagtgacatcctcacgacctcacagactctggaaacagtgcctcctaatcccaggaggtatgtggagcttccaccgtcactgcccaggtaccactcacagccccctcagctggggtgttcttcagaggtgaaataaagagaggaatcgactgatctcaaaacctgttttttcctcagtatggaaagagactattttccatagcaaagtctgaatttagatgaataaaagttgtatttcccagt

SEQ ID NO: 84400 - DNA, 709 bp, Homo Sapiens
attcggaacgagggttcacaactgagtagaattttcctttcctgtgggcatgctgtgttcagacctgacagatctttgatagaggtcagcttattaaagggcaatattgttcttgtttagctacatcactgtggtgaatatagatggaattaaggaagtaaatgcaggccagggggttgtgaatgagaggataggggagataatatcagcatcaaattctttgggtatctctctaagaattaaataatcttttctagcttaatattttaattctaattcaaacaactctgaggttttggtttcattagtaatagttgaggaataatatactagcaaagaatggcctaatgtttgtcataactgttaatggatgaaattttttaaagatacaaccatgataaccattataaatgatctatgatcaaaatctaaagtgatgaattatttgtaggaatgtcttcctaatggggaagaattgcataggagcattatgcaaatctacacaagcttttataaatgttgctgctgggtagctccacagtgtttcataaggccatcctgtttcccccaactcccccatttttggtttgtttctttttaaatatttgttgagtacttacgtgtttatctaacagttcacttccatttttctagtctggattttttgagtatttaggaaagagagctattaaaaactctggggatttct

SEQ ID NO: 84401 - DNA, 883 bp, Homo Sapiens
gctctatacttccgagcatgaagcacgtcgatctaacctgatctatgcagatcgtttgagttcatcaaagagcatgctgagattcacagccaatcaattcatcatattatagtatctctccactaagtttatttttatatgcaggtggccgccattccgtaaagatgtgaaacacacttgaaatggagcattctgaatgtgagtgtcttctggtaacagaaagttctgaccgagccatacaacaaccctctgtgcccgttctgcaatggtaaagttaacataactgattggctcactggcagggtccaggctggtcagcgcatacatggagaatcgagggagctgtcttgtcgattcaaatacatgaaactgggtgctgcttctgtaacccacgaatgccttcaagtgcagatccacagggacatctttgggaggcacaatagggatgcagatggaactggagaggttgtgaatgctgggatgtaccacgtggctttcacctgtaaaaattccttctgcaaaaatcaatactgctcggatgatggtgtcattagaagtggaaatgcgtaattctgtatgagcagtttgggtctcattccccaggctgactgagagcgtggtgtggagcctggtattggctgggattatgccccgatgcccatcagcctccttcagtggactggccaattcagccttggcattttcctcatagttacggagttccagcaacagattctgcttcttctgactcagctctcggatcaggtcctgctctgcactggtgtccatgaggttgcccctcatctcagccgtgccaggcaggtagccccggatttccccatccactgagcagcagattaactgtatgtggccatccatccgg

SEQ ID NO: 84402 - DNA, 487 bp, Homo Sapiens
  misc_feature (290)..(290): n is a, c, g, or t
ttaacccagacccaacattttcccaacctttcctgacagccagggggtgaggggaaccttgtctcgtggctcccacgagggcaggctcaaccttgaggaggctggtgccctcggacctggtcacagcatgagccggtaacagaggactcaccccaaggcccagcaaagcaagacatgagctcagagcccataggagcatccagaacgctgagtaacacaggttctaaatctaacttctcggaggcaccaagcatgagctctgaatcagcagcctcaagggtgccctgatnagctccaaaaaagctgtcccaggagagaggagcaagcctggaggaggcgccccggaccacccccgagacctgccaatgggaagaactcctgaaaggaccggactgtttccaataatctaactgtcccacaacaaagctcaagaatttttacaggaatgtagatatccatcacctaacaaggtgaaactcaaaataaa

SEQ ID NO: 84403 - DNA, 474 bp, Homo Sapiens
agaacttaaagaaattcagatatgtgaagttgatttccatggaaacctcgtcatcctctgatgacagttgtgacagctttgcttctgataattttgcaaacacgaggctgcagtcagttcgggaaggctgtaggacccgcagccagtgcaggcactctggacctcttcagggtggcgatgaagtttccagcgcggagtaccaggggagcaaccaacaaaaaagcagagtccccccagccccccagagaattctgtgactgattccaactccgattcagaagatgaaagtggaatgaattttttggagaaaagggctttaaatataaagcaaaacaaagcaatggtaggtatctgactttgtgttagaattaatttttcctctctaagcgactcattacttaaatctgttccatcacgcaaaagttatttttttctgttacatgaataaaaagttatttttgtttacctgtgaaa

SEQ ID NO: 84404 - DNA, 476 bp, Homo Sapiens
ggtgagtctggacattctgcagtcagccactgttcttggcttccaaccaaaagcaaaactaaggcaaggcagagcacagagggtgctcaggcagaagctgcttcccctcctggtgcagccattagctgctgtagtatctgtgacctgtcagaacctgcttccttcattcttgggaatatttgaccaacctcagagcaattgctgttacgagccaaggaggtcacaagagcaatgtccagtcttcccattctgtccaagtcagatttatcgaccatgtttcggaaaaaggtgagcctcagggatagtttgtcaatggctgagctaatcacaaaggtgcctgggcagggaatactggcaccagcccaaatttgcattacttgttcttgagcaattgagctttgtcttgaagacatgggagggcgataaacgaagcaataacctggatcacttttcctcagggtgaactgaccctgggt

SEQ ID NO: 84405 - DNA, 272 bp, Homo Sapiens
caaacactattcacaaccctttctaacaccgtagaagatatgcacacttccattaccagtctccaacgacaattagacttcctcgtgggagtcatccttcaaaactggagagtcctggacctcctaaccactgagaaagggggtacctgcatatacctccagtgaagaattgctgtttctgtgttaatgaatctggcattgttcatatcgcagttcgtaggcttcatgacagggctgcagagctttgacatcaagtcgctgactcctggtgg

SEQ ID NO: 84406 - DNA, 1481 bp, Homo Sapiens
  misc_feature (1463)..(1463): n is a, c, g, or t
ggtccggaattcccgggatcgagcatggccgctccgcgagtattcccactttcctgtgcggtgcagcagtatgcctgggggaagatgggttccaacagcgaagtggcgcggctgttggccagcagtgatccactggcccagatcgcagaggacaagccttatgcagagttgtggatggggactcacccccgaggggatgccaagatccttgacaaccgcatctcacagaagaccctaagccagtggattgctgagaaccaggacagcttgggctcaaaggtcaaggacacctttaatggcaacctgcccttcctcttcaaagtgctctcagttgaaacacccctgtccatccaggcacaccctaacaaggagctggcagagaagctgcacctccaggctccgcagcactaccccgatgccaaccacaagccagagatggccattgccctcacccccttccagggcttgtgtggcttccggccagttgaggagattgtaacctttctaaagaaggtgcctgagtttcagttcctgattggagatgaggcagcaacacacctgaagcagaccatgagccatgactcccaggctgtggcctcctctctgcagagctgtttctcccacctgatgaagagtgagaagaaggtggtggtggaacagctcaacctgttggtgaagcggatctcccagcaagcggctgccggaaacaacatggaggacatctttggggagcttttgctacagctgcaccagcagtacccaggtgatatcggctgctttgccatctacttcctgaacctgcttaccctgaagcctggggaggccatgtttctggaggccaacgtaccccatgcctacctgaaaggaggtgagccacatttcagcagtgagccccactgccatccctgctgggccctgtttccctatctggacaaaggaaggagaagggtggtcaaggagacccccaaggaccttgcagctctgacctctgagggttcctgggctcagcaagcaacagctggtagggatgatgaatgcatttagcattgaacacgccttgaatcctgacaccaaccctgtgatgccatgctactctgattttaagtcctgccagtcagtgtgggaaccacaatttgaacgcaggctatattggatcaaagctgttgttctgtcacagcctttgtatgtctgtcctacctaccagggatttttacactaaaatatgcatgttgccatggaaggatgccacctttcgactgttggctgcttatcacacatgcctcatgcacaggattctgggggtaaaagtgggagactacagaggttggggctccccaacccccaggggttaacatgaactcccctctggacataaatgggtgacctgtcacctgtttttgggattttgatatctaaccccccattctcccaaagaatacaattcatggaaaattttaacttancctgggcatgggggttca

SEQ ID NO: 84407 - DNA, 1442 bp, Homo Sapiens
  misc_feature (850)..(878): n is a, c, g, or t
  misc_feature (881)..(918): n is a, c, g, or t
  misc_feature (1300)..(1300): n is a, c, g, or t
gtgaataagatcgaggagttcttagaggagaaattagctcccccgaggtatcccaagctggggacccaacatcccgaatctaattccgcaggaaatgacgtgtttgccaaattctcagcgtttataaaaaacacgaagaaggatgcaaatgagattcatgaaaagaacctgctgaaggccctgaggaagctggataattacttaaatagccctctgcctgatgaaatagatgcctacagcaccgaggatgtcactgtttctggaaggaagtttctgggtggggaccgagctgacgctggctgactgcaacctcttacccaagctccatattattaagattgtggccaagaagtacagagattttgaatttccttctgaaatgactggcatctggagatacttgaataatgcttatgctagagatgagttcacaaatacgtgtccagctgatcaagagattgaacacgcatattcagatgttgcaaaaagaatgaaatgaagctgggcatgttttctgtcttatttctcagttgagtaagcaaggatacgaaaacaggatgtttgaaaacaaattaggtttgggttcaattccttcaatttttaaaaaactggtctctgagagttttttaaatcattgagagcctgtttttcttctctaaaacattagtttaattttcttcaaaatgaaaatactgctttgtaattacaaaatgagacacacctatcttgatattttaaagcaatatcagagggtgtaaagaaggacattttaacaatcgccttcaattttactccacttaattaccgaaaacttactggagaacatgttccaaatcttcagtatcttgtnnnnnnnnnnnnnnnnnnnnnnnnnnnnnatnnnnnnnnnnnnnnnnnnnnnnnnnnnnnnnnnnnnnnatttcatacatatatggtatcgcattattttattttaaacgcactggtgaggggacctcttggtgatccctggatgatcatacacagaggacttacaacatacaaaaatattgggcaccgcagtgccagagaagatgctagaggttcagattcaaaggagtggggaattgtgaagcccacagatgcgcacgcaatcgaccagcaggaaccggaagccctgggtcacccccactctgcctcatttctgcctccaggatgccactgcctctgcttccaggaaaggcaagggggagggtgcttatccgtgtctctggttccagcttcctgtctttgctccctcccctctcttagagactgtgccttcagcaggaaactctaaaanatctgctgcaacttggagaacctccctgccctgaaatgtgaaccaagcacactttggttccttctccgggcggctctctctgagacccaaagctgcagtccctcagtgctggtggtatcgtgtggggatagcaatacttctc

SEQ ID NO: 84408 - DNA, 1007 bp, Homo Sapiens
aggcatgagctaccatgcctggcagaaattcaagatttggataaacttacttctttgccaagcctgttcttcaagttattcagaactgggtgtataccttgtcctcatatgtatcttgtccctgctgtcttttaggttagcaaggtgtatgaatacttttaagttttgtttgttcttttcctcgtggtatcagtgaaatactgatctattctctggctagggtcaatttacaaaattgccatggaactgagcaaaaggcccacgtgggataaaaatcactcaccatcgacgccaccagtatttttcaagttatggcttttgaagtataacaaatttcagtaaacaaaatcaaaagaaaaaattcctctgcgtacaacaaagaagcacctgttatattttgaatgcattcttcatgttgccagctttctaaacttgtttttttgatgcctcaacagacagaagtgaaaattatatgccactcttaagtacatccaggttctcctctacatattcccaatatggaatgcctggctagcaatcatggcactctctcagaaaccagccactggaagttaaaacttctggatttcaaaagctagtacaggctgctaaatttaacaaaggaacaaaccttcatataatggtacaaactacctgcccaacacactcttctattttccagaccctttaatattgagtagtctagtcttggattgactatggtgggttaggtctaatctaagtatcttaatagctatctagggataatgaataaaattaaatacaactggtacctcaagtatcataagagaataaatttatgaagacaagcagaccaagcaactcaagattttctacacctgactactgtagctgtaacttcaaataatgtgttacctatgaaacttattatgtacgaattagttcttaaagacagaaatgatggaaaccgacgcgtggatcgacgatatcccgggatatccgggcggtacagcctgctttgttac

SEQ ID NO: 84409 - DNA, 511 bp, Homo Sapiens
gctgggcactctgtacaattagttgcttattacgtatgattactcgcagcgatctattgttccatataaccaaaaagcatggtttattcattgaaacacggttgacctgaactcgtgccttaggaattaatgcccccttatggaacctgcctgaattgcacctgcgggtggaggctccggctgtgaagtcactgaacagaacgtcgctgatggagaaagggctcccgcagaaggaacggcctgtaccgtgcgctccggcacaatcgcgtctcttgtgtctcactcacggaaagaaacaacctgaaggccatcccgtcggtctgcacgtaaccgtgaagacgtgtggccgcgtcccacctgcggctgggtaccctgcacccggcactgtaggagtcacgtgcagcctttctcaggggactgtcattgaaaaggaaacgtttgatgtctgtgtcagctgtctttgtagttaggaaatagatccaataaagccgtatttttttgctggaaaaaa

SEQ ID NO: 84410 - DNA, 368 bp, Homo Sapiens
tacggctaggtagcgaggcctgggtggcgaattcggcacgaggcagttgaggaggagggagcgcttgagggggactggccgggcgtgcacatccgcacctcggggacattattgcgcgtggaacggctgctttaggaagactatagcccagaagaaaagatgtttggttttcacaagccaaagatgtaccgaagtatagagggctgctgtatttgcagagctaagtcctccagttctcgattcactgacagtaaacgctatgaaaaggacttccagagctgttttggattgcatgagactcgttcaggagacatctgcaatgcctgtgtcctgcttgtgaaaagatggaagaagttgccagcaggatc

SEQ ID NO: 84411 - DNA, 779 bp, Homo Sapiens
  misc_feature (353)..(362): n is a, c, g, or t
taaggctaggtacgaggcctgggtggtcgaattcggcacgagggagcgcttgagggggactggcctggcgtgcactccgcacctcggggacattattgcgcgtggaacggctgcttttggaagactattgcccagaagaaaagatgtttggttttcacaagccaaagatgtaccgaagtatagagggctgctgtatttgcagagctaagtcctccagttctcgattcactgacagtaaacgctatgaaaaggacttccagagctgttttggattgcatgagactcgttcaggagacatctgcaatgcctgtgtcctgcttgtgaaaagatggaagaagttgccagcaggatcnnnnnnnnnnctggaatcatgtggtagatgcaagggctggacccagtctaaagactacattgaaaccaaagaaagtgaaaactctatctgggaacaggataaaaagcaaccagatcagtaaactgcagaaggaatttaaacgtcataattctgatgctcacagtaccacctcaagtgcctccccagctcaatctccttgttacagtaaccagtcagatgacggctcagatacagagatggcttctggttctaacagaacaccagttttttcctttttagatctcacttactggaaaagacagaagatatgtctgtgggatcatctataaaggccgtatggggaagtcctcatggacacacatctcttcaagccttgcttgcagcaataagaagacagtgtgagaacagagaacagggcagagctttg

SEQ ID NO: 84412 - DNA, 889 bp, Homo Sapiens
  misc_feature (404)..(412): n is a, c, g, or t
ggggggaaagcggaatctacaccttcccggccagcggtagcaactgcagaactgcaggagactatctttctagacaaggcagttgaggaggagggagcgcttgagggggactggcctggcgtgcactccgcacctcggggacattattgcgcgtggaacggctgcttttggaagactattgcccagaagaaaagatgtttggttttcacaagccaaagatgtaccgaagtatagagggctgctgtatttgcagagctaagtcctccagttctcgattcactgacagtaaacgctatgaaaaggacttccagagctgttttggattgcatgagactcgttcaggagacatctgcaatgcctgtgtcctgcttgtgaaaagatggaagaagttgccagcaggatcnnnnnnnnnctggaatcatgtggtagatgcaagggctggacccagtctaaagactacattgaaaccaaagaaagtgaaaactctatctgggaacaggataaaaagcaaccagatcagtaaactgcagaaggaatttaaacgtcataattctgatgctcacagtaccacctcaagtgcctccccagctcaatctccttgttacagtaaccagtcagatgacggctcagatacagagatggcttctggttctaacagaacaccagttttttcctttttagatctcacttactggaaaagacagaagatatgttgtgggatcatctataaaggccgttttggggaagtcctcattgacacacatctcttcaagccttgctgcagcaataagaaagcagctgctgagaagccagaggagcaggggccagagcctctgcccatctccactcaggagtggtgactgaggtttttatgtagaaggggaacaaa

SEQ ID NO: 84413 - DNA, 868 bp, Homo Sapiens
  misc_feature (853)..(853): n is a, c, g, or t
tggtagtgtagctgtgtggctttccttcctgaagagtccgtggttgccctagaacctaacaccccctagcaaaactcacagagctttccgtttttttctttcctgtaaagaaacatttcctttgaacttgattgcctatggatcaaagaaattcagaacagcctgcctgtccccccgcactttttacatatatttgtttcatttctgcagatggaaagttgacatgggtggggtgtccccatccagcgagagagtttcaaaagcaaaacatctctgcagtttttcccaagtaccctgagatacttcccaaagcccttatgtttaatcagcgatgtatataagccagttcacttagacaactttacccttcttgtccaatgtacaggaagtagttctaaaaaaaatgcatattaatttcttcccccaaagccggattcttaattctctgcaacactttgaggacatttatgattgtccctctgggccaatgcttatacccagtgaggatgctgcagtgaggctgtaaagtggccccctgcggccctagcctgacccggaggaaaggatggtagattctgttaactcttgaagactccagtatgaaaatcagcatgcccgcctagttacctaccggagagttatcctgataaattaacctctcacagttagtgatcctgtccttttaacaccttttttgtggggttctctctgacctttcatcgtaaagtgctggggaccttaagtgatttgcctgtaattttggatgattaaaaaatgtgtatatatattaggctaaattaggaaatattcttactttctctgttgtcaaactggaaatttcagaggcaagttncctggagtgcgtggt

SEQ ID NO: 84414 - DNA, 1233 bp, Homo Sapiens
  misc_feature (484)..(484): n is a, c, g, or t
  misc_feature (500)..(500): n is a, c, g, or t
ttatttttaaaaaggaaggaaggagcaagtgaagtttcattctgctccagcggtggggaagccgctgaatccacctgcttctcctttgcaaccgaacagcaaacagctttctccggcctcagggcagaaaaagggaatggcagggagtaagaggcgctgggctcggagcctgtttccaagaaggaattggttgtcatctggcagtgttgcgcgtcacaagagagcctgtatataaattaaaatagtcaagacaacactgaccttgcacttgtacataactatacagtagtgtccagaatgttcagacattcggagtgtacataaaacagaaaaaatcttcatgtatttttattaaatataacaatgtctgagtttcacctaagatgtttttgtgccatatgctggatatccaggttctcgccaggccccaatacatgaataacaaacccaagaaacgcatccccattgtgtgatgtgttcagantgcatctggcaccaanttaggtatttcttaaaacaggactcatctgtcagagtgcacatgaaaaatcaggcagggaatcgaaacgacagcgctggaggagactcaggaagcagaggcgtccctgccgctgcccttggccctgcaagcacatcatgaccctttctggcagcctcttggtgctctgggtagtgagggatgaccagtcttgtcctgagaaatgtttctcttagtctttaagttcaaagactatcctgtagcaatcagactttccaaaagggggttctccattttttgtagttttgtctaaatttttaatgaccatttcctggaatcagtttattatactgaaaactgggggtgggagtagggagctagtttgttgataaatagttcccatttccccgtggagaatttgacataccctggactcctgtgtgcctcctgccatccctgcacacagcctggggagaagcctgtgcctccccgtgtggagagaaggcaaccccagatcccctgagctaccccggaggaaaggcagtcctggacagaagactgtcagcagaaggaaagtactggactacccgtggggtaagtcctgccattcaagactggagacacttggggaaataaaaagagcagggcactgcttggtgggaagaagcatttttaccttccagtggcaaatcctggctcctttgaattaaagggggttgtactgggggccagggggctggattcactttccctgc

SEQ ID NO: 84415 - DNA, 615 bp, Homo Sapiens
atagcaataataatgcttcactacatgaagtcaaagcaggtgcagttaataaccaaagcaggccacaaagccacagcagtggagaatttagcctgcttcatgaccatgaggcttggtccagcagtggtagcagtccaatccagtacttgaaaagacagaccagatcaagcccagtgctccagcacaaaatatctgaaacactggagagtcgacatcacaagatcaaaactggttcccctggaagtgaagttgttactctacaacagtttttggaagaaagcaataagcttacctcagtacagataaagtcctcaagtcaagagaatcttttagatgaagtaatgaaaagtttgtctgtctcttctgactttttgggaaaagacaaaccagttagctgtggtctggccaggtcagtaagtggaaaaaccccaggggacttctatgatagacggacaactaagcctgagtttttgagacctggtcctcgaaaaactgaagatacctacttcattagttctgcgggaaaacctacaccaggcactcaaggaaaaataaaattagtaaaagaatcttctctgtcacgacaatcaaaagatagtaacccttatgcaactt

SEQ ID NO: 84416 - DNA, 795 bp, Homo Sapiens
gtctaatcctcccctattgttttgccaacagtaatttaagtttgtgtggaacatccccgtagttgaagtgtaaacaatgtataggaaggaatatatgataagatgatgcatcacatatgcattacatgtaggaccttcacaacttcatgcactcagaaacatgcatgaagaggaggagaggacggcccagggtcaccatccaggtgccttgagaacagagaatgcagaagtggcactgttgaaatttagctgaaaggagaaagggggaggaagaaataaattatattgttttacaaaatatcatcaaattgctttgccatagatttgactaggctacagttttataacttggctaacaaatagattgaaaacactatgtataagagatgtttgcttgtgatcattacaagaagaaacatacaatgttacacaaagagagtattaaattagaagatcagtattaattattttttcacacaaagctaagctaaaaataaagagacagagacacagtcttcagtcacattattaaatctaagtatacatcttaagcattcctgtttactggacaaattagtaaatgaatataatccttttgttgaaatagacttaaaattcaagttcatccttagcttctgttattattgttagattccttgggaaatgaaacctagaagtcaatttaacaaggaatatagtctcgaaagtagagagaacatgattactctctttaattggagatctcctttgctgaaagcaacagctgggagcactatttgttaaaagctctgataa

SEQ ID NO: 84417 - DNA, 512 bp, Homo Sapiens
atgaattttcaccgatttacctttgaaaacgctttgtccaaaagcaataaaccaatccacactattattctaaaccctcatgtacatctggtaggggatgatcccgcctgcatagcatatattaggctcacacagtacatggatggcagtggaatgccaaagacaatgcagtcagaagagactcgtgtgtggcaccgccgggatggaaagtggcagaatgttcattttcatcgctcggggtcaccaacagtacccatcaactaaatttcaacagtgccacttctgcattctctgttctcaaggcacctggatggtgaccctgggccgtcctctcctcctcttcatgcatgtttctgagtgcatgaagttgtgaaggtcctacatgtaatgcatatgtgatgcatcatcttatcatatattccttcctatacattgtttacacttcaactacggggatgttccacacaaacttaaattactgttggcaaaacaatagggggagattagacaaa

SEQ ID NO: 84418 - DNA, 983 bp, Homo Sapiens
  misc_feature (833)..(861): n is a, c, g, or t
  misc_feature (877)..(877): n is a, c, g, or t
ggcttgctatacgttaaaaaagcaggctgacggtcggaatcccgggatatgtcgacccacgcgtcggggagggaagatggcagccgtggcggcaggcggcctggtgggaaaggggcgcgacatcagcctagcggccctgcagcgccacgacccctatatcaaccgcatcgtggacggtggccagccaggtggctctgtacaccttcggccatcgggccaacgagtgggagaaaactgatgtggaaggaaccttatttgtgtatacaaggtctgcattctccaaagcatggattcaccattatgaataggctgagcatggaaaataggacagaacctattactaaagacttggatttccaactccaggaccctttccttctctacagaaatgccagattgtccatctatggaatttggttttatgataaggaagaatgccaagagaattgcagagcttatgaaaaacctaactcagtatgaacagttgaaagcccatcagggaactggagcaggaatttccccagtgatcctcaattcaggagagggcaaagaagtagacattttacgaatgctcatcaaggccaaagacgaatacacaaagtgtaaaacctgttctgagccaaaaaagataaccagttcctctgccatctatgacaatccaaatctcatcaaaccaattccagtgaaacccagtgaaaaccagcaacagcgtatacctcagcccaaccagaccttagaccctgaaccccaacacttatccttgacagctctgtttgggaagcaggacaaagctacatgtcaggaaactgtggagcctccgcagactctccacnnnnnnnnnnnnnnnnnnnnnnnnnnnnnagagaagcttccattnaggcaggggggttgtacgctcccctgtcccctatgaggaacccagaaagacactcacccccccaatggagaaggcaggctctgttccagcccattccagaaaactc

SEQ ID NO: 84419 - DNA, 183 bp, Homo Sapiens
aatctaatagatcaaggaaatggaaaccggctcaataggttgtttaaagcttaagagatgtgtgaatgcacctagcacctactagacacaacaatgagcctgcatttccgcaagtaagccattcctacctccttaccccccattccaattaatgtttgtctataagaatattttaaaattcag

SEQ ID NO: 84420 - DNA, 468 bp, Homo Sapiens
ggctggcgacatgaatttgtccatcactgccatccaaatgttctgatggcacaaagtgaagatagaaacaagggcaataacccagtctaaggcagtcagacactgagaggtctaacagtggatgaggaggtaggtccagagaaaacaagagcacgttactgcagaaccaagagaaagctgtggtgagaagcaaaggatggtcaacatcaaggcagataaagataagcaagggaacacatgatttagcaacatggagatcaatggccactaaccatgagatggtgcgtattctcactaataagagaaatgcataaaacatcaataaaattatttctgtcctctcagactggcaaagagtatggagagggtgggacaggttctctcaaatgctatagattgagagaagtataaattgtgtaaatgtaaactgacatatctctggaggggcaacagtgggtcaagacccca

SEQ ID NO: 84421 - DNA, 642 bp, Homo Sapiens
  misc_feature (122)..(122): n is a, c, g, or t
tccgttcacccccgtgtgctgtttagcacccagcctccccgtaaagctcaagacactcaggatctggacttcgaggtcgggtggtgctgcccccttcaacaggactcacaggagcaagcggntcatcatcccatcccatcttccacaggggcgaattctcggtgtgtgacagtgtcagcgtgtgggttggggataagaccaccgccacagacatcaagggcaaggaggtgatggtgttgggagaggtgaacattaacaacagtgtattcaaacagtacttttttgagaccaagtgccgggacccaaatcccgttgacagcgggtgccggggcattgactcaaagcactggaactcatattgtaccacgactcacacctttgtcaaggcgctgaccatggatggcaagcaggctgcctggcggtttatccggatagatacggcctgtgtgtgtgtgctcagcaggaaggctgtgagaagagcctgacctgccgacacgctccctccccctgccccttctacactctcctgggcccctccctacctcaacctgtaaattattttaaattataaggactgcatggtaatttatagtttatacagttttaaagaatcattatttattaaatttttggaagcataaa

SEQ ID NO: 84422 - DNA, 558 bp, Homo Sapiens
ctggctgtctttccagtctcttccgggagtggacaaacaccagcacctgattttttcccagcatgttccatgattttttcatagacgatttcattcatgatctggaaacgcttgatagcttttttctctgtgatacccacatatgtctgttccagaggcactggacggaagctgttgtcaaagtaaaagagaagccttggcagggtcaacacgtagaaaggtggctacatcttcatagttgggtagggtggcactgagaccaatgagtcggacatcctcttgggtcatctcaatgtttcgggatggccctggccactaaagcttctaagacaggacctctgtcatcgtggagaagatgaatctcatccagaatgatgagccgcaccagctgggtgtaggtgctgctcaccaccattgcgggtgatgatgtcccacttctcgggggtgcagacgatgatctgagtggcactgatctcttctttgcacagctggtggtccccagtcagttcagcaacagtgatgccataagtggccaggcgccatccgaagcagttgccg

SEQ ID NO: 84423 - DNA, 760 bp, Homo Sapiens
accgggctcatgcgcgggcccgccgcggccttcaccgccgcgcgctctgacgccggcataagggccatgtgttctgaaattattttgaggcaagaagttttgaaagatggtttccacagagaccttttaatcaaagtgaagtttggggaaagcattgaggacttgcacacctgccgtctcttaattaaacaggacattcctgcaggactttatgtggatccgtatgagttggcttcattacgagagagaaacataacagaggcagtgatggtttcagaaaattttgatatagaggcccctaactatttgtccaaggagtctgaagttctcatttatgccagacgagattcacagtgcattgactgttttcaagcctttttgcctgtgcactgccgctatcatcggccgcacagtgaagatggagaagcctcgattgtggtcaataacccagatttgttgatgttttgtgaccaagagttcccgattttgaaatgctgggctcactcagaagtggcagccccttgtgctttggagaatgaggatatctgccaatggaacaagatgaagtataaatcagtatataagaatgtgattctacaagttccagtgggactgactgtacatacctctctagtatgttctgtgactctgctcattacaatcctgtgctctacattgatccttgtagcagttttcaaatatggccatttttccctataagttttatgtagttaaatgcttcctagaaacctaaataaga

SEQ ID NO: 84424 - DNA, 526 bp, Homo Sapiens
tgcggccgcctggctgctcctcggggcggcgaccgggctcacgcgcgggcccgccgcggccttcaccgccgcgcgctctgacgccggcataagggccatgtgttctgaaattattttgaggcaagaagttttgaaagatggtttccacagagaccttttaatcaaagtgaagtttggggaaagcattgaggacttgcacacctgccgtctcttaattaaacaggacattcctgcaggactttatgtggatccgtatgagttggcttcattacgagagagaaacataacagaggagaagacttcatggcggcggctatggttgccttctgataattgaaggatccctagtggaataaggaacgaatttattgcagacattgtaagcaagaacaactggtaaatgttataggcagtgatggtttcagaaaattttgatatagaggcccctaactatttgtccaaggagtctgaagttctcatttatgccagacgagattcacagtgcattgactgttttcaagccttt

SEQ ID NO: 84425 - DNA, 687 bp, Homo Sapiens
acacataaaaatctactcaaatacatagtttagtgaattattataaggcaaataaatacccttgtaactaccacctaggtcaagacatagggccttgccagccagcctagcagaaggaggacttgccaccatacctttattctgatgtttcaacccttagaaaacacttgcagccctcaccttggtcacaaaacatcaacaaatctgggttattgaccacaatcgaggcttctccatcttcactgtgcggccgatgatagcggcagtgcacaggcaaaaaggcttgaaaacagtcaatgcactgtgaatctcgtctggcataaatgagaacttcagactccttggacaaatagttaggggcctctatatcaaaattttctgaaaccatcactgcctctgttatgtttctctctcgtaatgaagccaactcatacggatccacataaagtcctgcaggaatgtcctgtttaattaagagacggcaggtgtgcaagtcctcaatgctttccccaaacttcactttgattaaaaggtctctgtggaaaccatctttcaaaacttcttgcctcaaaataatttcagaacacatggcccttatgccggcgtcagagcgcgcggcggtgaaggccgcggcgggcccgcgcgtgagcccggtcgccgccccgaggagcagccaggcgggccgca

SEQ ID NO: 84426 - DNA, 489 bp, Homo Sapiens
atcgtcgccaagcgggacttactgcaagctatcaaatctgaggtcttattttgttaagtcgaaagtgaaattttcctttggccaacgtgacagggctttgtttggtggtaaaaagggttactagacacccctcattccactaccactggagggcgcatttctcagctctagctcttcaaacatgctgaaaggaattcctaagatctaaacaccagcatcccctgcacaggagtgatggacagttgggtgcaaaggtgataaaggtgggatccccgaggcattgtcactacagaacaaccatgaaatagactccttatttcagaggaagagttacatattaatccacttctacttgattttgtagagggagaaaagtcagggactgtgttgtattcctgtttgcatcctttaatcatctagtataattcctttaatatggaaaatgctcaggaactccctgagttaataaaggaaaaaaaaccttgaaaa

SEQ ID NO: 84427 - DNA, 552 bp, Homo Sapiens
gcggccgctgcccggtgcccggctccactgcgaacgccgccgctgggccccgaccgcccgggaggcgtcttgggctcgccccggagcttcctccctggagccgcgccctgcacccggccttgcccggccctagcagggaagccaaggcttgtggggcgcagggacccgggctctgcggggtcccggttccgcctccccactcctgcgtcttcccgccccggccgggttctgggaagcctcgcgcggctcttccgcagctgctgcccgcccggagctcctggtccctcgtaggggaccccacttctctgacaccgcgttgggttcccggggcctacagcgaggcctgtaactccgggagagaccctggagcggggtgtgggagaacggtctggaggaagggctccgagcacttcgaaagtataaaccgcggtcccaaagaggcgtgctgtgtctgcattttcctgggagtgcacggtttacattctcgaaagcagtgctgtcgactagaaatattgagcgatacacatgtacaagttttgtcacttaaaaaga

SEQ ID NO: 84428 - DNA, 502 bp, Homo Sapiens
ttatacctgtctttgcacacgcaaccgatagaaagacttctcttcaggcagttctgtgataccaaacccactctaaagaggcacattgaattcttggatgcagtggcagaatatgaagttgccgatgatgaggaccgaagtgactgtggactgtcaatcttagatagattcttcaatgataagttggcagcccctttaccagaaatacctccagatgttgtgacagaatgtagattgggactgaaggaggagaacccttccaaaaaagtctttgaggaatgtactagagttgcccataactacctaagaggggaaccatttgaagaataccaagaaagctcatatttttctcagtttttacaatggaaatggctggaaaggcaacccgtaacaaagaacacatttagacattacagagttctaggaaaaggcggatttggagaggtttgcgcctgtcaagtgcgagccacaggaaaaatgtatgcctgcaaaaagctacaaa

SEQ ID NO: 84429 - DNA, 486 bp, Homo Sapiens
  misc_feature (313)..(329): n is a, c, g, or t
aaggtagaaattgttctgattgtaattagttttgtattttctatactggtgttagaaaacatatgtttacatttgattaactgtgttgcctatttatgcagggtaatccagctaaaggaagctttctttaattataagtattattgtgactattatagtaatcaagagaatgctatcatcctgcttgcctgtccatttgtggaacagcatctggtgatatgcaattccacactggtaacctgcagcagttgggtcctaatgatggcattagactttcataatgtcctgtataaatgtttttactgcttttagnnnnnnnnnnnnnnnnncttggttcatgtttacatgcctttcgatagctgtttgtgcatacttaaagatgatcaaaatgattttatacaaatgctgttataataaaatgtcattccctacccctctactttttttcagtaagtcatcttatacattaaataaatttccatttct

SEQ ID NO: 84430 - DNA, 280 bp, Homo Sapiens
  misc_feature (175)..(175): n is a, c, g, or t
  misc_feature (192)..(192): n is a, c, g, or t
  misc_feature (202)..(202): n is a, c, g, or t
  misc_feature (236)..(236): n is a, c, g, or t
atttagagagctgcacagcacagtcacctgctcttccgtattctgtggtaactactaatgttccagtaaacccctccactaaggactctgccgcagaaagagggcccggttgcatgaggcactttgtcaaaatgagcagatacgtatgagcactgaactcttgagtgaatcaacnagaactaagacccaganccacgcactnaggaacttgctctgaatttcagtttgacaacagngaagtagaatatttctaattagctaatatatatacacatttttt

SEQ ID NO: 84431 - DNA, 369 bp, Homo Sapiens
gcctgctggcccccatggtcctggccagtgcagctgaaaaggagaaggaaatggacccttttcattatgattaccagaccctgaggattgggggactggtgttcgctgtggtcctcttctcggttgggatcctccttatcctaagtcgcaggtgcaagtgcagtttcaatcagaagccccgggccccaggagatgaggaagcccaggtggagaacctcatcaccgccaatgcaacagagccccagaaagcagagaactgaagtgcagccatcaggtggaagggtcaaagtgatacaatggacatcgaagcaccgtgacaattctccatgtagccaattaggcattaaagtttgccaccactacccaaaa

SEQ ID NO: 84432 - DNA, 748 bp, Homo Sapiens
tcggctaggtacgaggctgggtgttgaattcggcacgaggcgggactcggcgggtcctcctgggagtctcggaggggaccggctgtgcaggtttgggccttgacgtggctgtggatgcagtcgttctgacccctggtggccgagaggtgaagtgcagtggcggctgcttgctcaaggccggaggaagacgccatggagttggtgctggtcttcctctgcagcctgctggcccccatggtcctggccagtgcagctgaaaaggagaaggaaatggacccttttcattatgattaccagaccctgaggattgggggactggtgttcgctgtggtcctcttctcggttgggatcctccttatcctaagtcgcaggtgcaagtgcagtttcaatcagaagccccgggccccaggagatgaggaagcccaggtggagaacctcatcaccgccaatgcaacagagccccagaaagcagagaactgaagtgcagccatcaggtggaagcctctggaacctgaggcggctgcttgaacctttggatgcaaatgtcgatgcttaagaaaaccggccacttcagcaacagccctttccccaggagaagccaagaacttgtgtgtcccccaccctatcccctctaacaccattcctccacctgatgatgcaaataacacttgctcccactgcagctgcggtctgccactcccgtgatggtgttgtatgtgtgtgttgaatggtggtggcaaggggcagg

SEQ ID NO: 84433 - DNA, 1037 bp, Homo Sapiens
  misc_feature (610)..(644): n is a, c, g, or t
ataggcagtacgagctggtgtgaatcggcacgaggcgggactcggcgggtcctcctgggagtctcggaggggaccggctgtgcagacgccatggagttggtgctggtcttcctctgcagcctgctggcccccatggtcctggccagtgcagctgaaaaggagaaggaaatggacccttttcattatgattaccagaccctgaggattgggggactggtgttcgctgtggtcctcttctcggttgggatcctccttatcctaagtcgcaggtgcaagtgcagtttcaatcagaagccccgggccccaggagatgaggaagcccaggtggagaacctcatcaccgccaatgcaacagagccccagaaagcagagaactgaagtgcagccatcaggtggaagcctctggaacctgaggcggctgcttgaacctttggatgcaaatgtcgatgcttaagaaaaccggccacttcagcaacagccctttccccaggagaagccaagaacttgtgtgtcccccaccctatcccctctaacaccattcctccacctgatgatgcaactaacacttgcctccccactgcagcctgcggtcctgcccacctcccgtgannnnnnnnnnnnnnnnnnnnnnnnnnnnnnnnnnntgctaactgtggtctttgtggctacttgttgtggatggtatgtgtggtagtgaactgtggactcgctttcccaggcaggggctgagccacgtggcatctgcctcctccctggcccccggtggcctccatcaactttctgctcctaaggaggtgcttgttgcccgagacagccctccctgaattaggatgcgttaggtaaaaaccacgggcgaggtcctcatcgtcttggaaccgggaaaggttgggcgctttggcaacaatttcaggaaccttttctcctttaaaaaactgtgttccttcccacgatacagctgaggcctttcaggacttaaacaggggtgggcccgtggaagacgtaggccccgggaaatccggggcacaagagcactgcca

SEQ ID NO: 84434 - DNA, 618 bp, Homo Sapiens
  misc_feature (510)..(575): n is a, c, g, or t
gtagtttggggaggagggtgggaaccctaatttccacagaatgaaattttgatgttaaatgacatgtatacaaattcttccttaagtgaaagttatgctgcatcgaattgtaactgaaagtatagatccaacaaatagagactgggttctagagagttctggtctatagaaacccaaaactaaaatctctcataactcaagtatggaatactttttttaaagaaattcttatcatgggtgttgtaataatgaagacgaatttgactttatgcagtgttctgcagcatgcctcccccacatctcatagcaccaggttgtgtctgacctgacataccctgcagctctcagctggctgcagtaacattttgtgggagaaagaggagctggagttacagaaatgattgtctcttggttctcagtttttagcccttgagaggacatacttttccagcctcatgggtatggcactcttaattaaaatttcagtgactgtttactggatgaggcagnnnnnnnnnnnnnnnnnnnnnnnnnnnnnnnnnnnnnnnnnnnnnnnnnnnnnnnnnnnnnnnnnnaatgtaaaagcaagtgaaattttaataaacttctgtaattacc

SEQ ID NO: 84435 - DNA, 1109 bp, Homo Sapiens
tattagccaacagactcaaaacatgtgttattgcttaatcaaggagggagattaacttgtgagggaaaagaattgaatatccaggtccgggacagtgatcagactgtatgtacaccttgaaaatcttgagtcaccttcagcagatcattaacatagatggtacaagaaattaagaattcatggtatgaataagaatctgtttaactaagggagttgggtgcgtggattttttatagaactactcactgatccgatgctgagtatgcaaataagcagtgctgattttgacaagaaatgagatttttatatttcacatgttgtacatgaatgggggtggatatgggacgtaaaagccaagggagacggggccacagcatctactcccattttggatagtaagagaccatttaataacatacagtaggccacaatccaagggcatagttggaagacctgaatctattatcttattaacactaatcactaataattacatggcaggatacctgctgaggtaattgataaatctacgaatttgcacacttataaaccttttacttctatttaaaaggcattatttattttcaattaactaaaaattcccaaaacttatccacaaaaaatgagacaacggacttagcattacctaaaattcccttatgttaagatacagaagtcagaaagtaccaacttgttgatccaaaaataataatttcaatagtggatccaatgccttatcatttctctgtagtaatggtttgatgtttccatatagagcacgacctacaatctaaccatactttagaactttcacatgctttgcctcataaagcaattccttcactcagtgaattggctgagccaagtgctgaaaacacaaatttaggtcagccggaacagactgagcaacacttggttcttagttttctgatggaagaagtaaattgaagtacagcaaaaactttaaaagcttttaagaaaacattattatgtggacttttctccaaatcttctaaaatactgccatttaaaaaacaaatacaaatgtgagagagtataaaaacaaactgccttcagggactgacagatacaattttgtctttttaaaa

SEQ ID NO: 84436 - DNA, 469 bp, Homo Sapiens
  misc_feature (201)..(201): n is a, c, g, or t
  misc_feature (216)..(216): n is a, c, g, or t
  misc_feature (410)..(410): n is a, c, g, or t
  misc_feature (421)..(421): n is a, c, g, or t
aatatgattagaaattcactgagctcactcttgcaggtttaaatggaggcctgcataaggactgcaagaggaaatctcgggtgggagagaatgtaatctgatcttgcactcataggcaatgctgcaatgcaatcatgtccaatacaagcacagcttcattcataacaggaaaccgtcttctttgggaaaatagctcctttngggtgcccaaactcnggtatgccagtgtatgcaggtggagtcgccctacccctcttccaaaacatgtcctgtgagatttttaaaataacgatgggatagtacaggggcatgaaaagaattgattccttcacaggatttgaatccagttcacgggagaatgtaggaaattcaaaacccacattataagggtatcaccacaaccaaggaanagttaaaaccnttggcaagttttacttgcggttgaggtacaaaaccgggttttatgggg

SEQ ID NO: 84437 - DNA, 302 bp, Homo Sapiens
  misc_feature (188)..(188): n is a, c, g, or t
tttttttctgtttgtgaataaggccagcactcaagatgggcagccaagggtgcactgactattagctggcccataggatatctgtaaggctggtgggacagttttggacctggaatcatgtgtaactaacaaggttggacgtttcttccccatcagggtagaaaaatcatctcaaactagccaaaagncagttttggaaactacattgggggacgttatttttatttatatatggggcctaggcaatccaggatggtaagctggaataccttccttcttaaaatctgatcatggcagggata

SEQ ID NO: 84438 - DNA, 723 bp, Homo Sapiens
cacggcggttccctagagaatcaacttggaaacacccagtatggtggctggaatggaatttataaaggtgggaagggcatgggaggatgggaaggtgggatccgcgtgcccgggatcttccgctggcccggggtgctcccggccggccgagtgattggcgagcccacgagtctgatggacgtgttccccaccgtggtccggctggcgggcagcgaggtgccccaggacagagtgattgacggccaagaccttctgcccttgctcctggggacagcccaacactcagaccacgagttcctgatgcattattgtgagaggtttctgcacgcagccaggtggcatcaacgggacagaggaacaatgtggaaagtccactttgtgacgcctgtgttccagccagagggagccggtgcctgctatggaagaaaggtctgcccgtgctttggggaaaaagtagtccaccacgatccacctttgctctttgacctctcaagagacccttctgagacccacatcctcacaccagcctcagagcccgtgttttatcaggtgatggaacgagtccagcaggcggtgtgggaacaccagcggacactcagcccagttcctctgcagctggacaggctgggcaatatttggagaccgtggctgcagccctgctgtggcccgttccccctttgttggtgccttagggaagatgacccccaataaatgtctgcagtg

SEQ ID NO: 84439 - DNA, 383 bp, Homo Sapiens
  misc_feature (25)..(25): n is a, c, g, or t
  misc_feature (60)..(60): n is a, c, g, or t
  misc_feature (65)..(65): n is a, c, g, or t
  misc_feature (156)..(156): n is a, c, g, or t
attggggggaagaccagcaacttcnggaatatggcccacaagatacccctctcatggcgnggctnaccttcaaccttttaagaatcttgtgtcctaaagaccctctgttcgcaaagggtggagaaatttccgaaagagggacccaggctttccaanagactcaggacgctgcctgctgaattgctggggcctctctgttagaaattatctaaaacccagggttgtgctgcttcctcacttgcaaatgcgtcctcctttctcctaaactgcctcggagcttgttttgttaggtctagttccattgtggagggaaaaagggtttctcgaaaaactttataaggtaagagaccagaaccttccagacccctcaaccctcctcgcgt

SEQ ID NO: 84440 - DNA, 569 bp, Homo Sapiens
  misc_feature (343)..(343): n is a, c, g, or t
  misc_feature (350)..(350): n is a, c, g, or t
  misc_feature (357)..(357): n is a, c, g, or t
  misc_feature (362)..(362): n is a, c, g, or t
  misc_feature (523)..(523): n is a, c, g, or t
ggtcaagtgcaaacttttggtagaggctttttctcctacagaatggcccagatgacattcctgctgagtagccaaaacgattctacactttaaaccttcagtccatagcaatgcaaaggtgtgggtagataagctgttagcttttcctcaagtatgctagtatgagggatggtcctttgtggaggctgtatgttcaaggagaaattgatgatgctccttcaacaaatacttgaggtatttcctgtatactccgtgtgatatgctttttcacataataaaccaaaccagctgtgtggcccttagaaatcactggtcatgtagatgctttgtataattcttgccnacccctnttttagngacantttgtaaacagtaagcttatggggagaaaagtcctttgataaaaccacgagaggagatactgtatggagacatgaggagatactgtgtggagacgaggagatactgtatggagacataccatgggcccttcaaggagcacctctgtatgggctggcaaatncctttcactcatctagaaagaagcagacactcgctcgttccgaatc

SEQ ID NO: 84441 - DNA, 443 bp, Homo Sapiens
  misc_feature (11)..(11): n is a, c, g, or t
  misc_feature (24)..(24): n is a, c, g, or t
  misc_feature (33)..(33): n is a, c, g, or t
  misc_feature (42)..(42): n is a, c, g, or t
  misc_feature (51)..(51): n is a, c, g, or t
aaacatggcanttgccacaaccangaatcgganggtcaaaancagccccantgaacttctcaagagggtccatgcaccttggcactgcacttgactcctggctctgtccctgctcactaggtgacccaggaggagtgactgcatctaacaagaggactaacagtagccccttgcaccccccagtggatctgtgatgtttaagataaatgtttgctaaaaaatgcactaactagcctaaagcatcatacaagtgtctgttaatcagaagaatgtgccagccacagcaggaaaatcccagatgaattttctgtcttgttacctctgagccttgacgaaggcatattctgacaactaacgaagagaaaagaggctaaaaatgcagacaactgcagtgagggggaaatacatgagtggattatctaattaaaaatgcctgattgtta

SEQ ID NO: 84442 - DNA, 1012 bp, Homo Sapiens
  misc_feature (142)..(249): n is a, c, g, or t
ggaccggtccggaattcccgggatatcgtcgacccacgcgtccgcccacgcgtccgaaatgccatgtgcagcctttcctgaggccataggagggcttcctgcagctgagatctatgcaggccatcctctcaacaggtgccannnnnnnnnnnnnnnnnnnnnnnnnnnnnnnnnnnnnnnnnnnnnnnnnnnnnnnnnnnnnnnnnnnnnnnnnnnnnnnnnnnnnnnnnnnnnnnnnnnnnnnnnnnnggggtgtggcatctgtgtttctgatgcttactacaatatgtgaaccactactttagaaaatctgctttaacttggtattcctctaattgtgttccctaggaaatgactgtcccaagagccagtgattattccaggtgttccctggaaaggtcaagtgagtctgggaaacactatgtctgtacacctcttgaaggtgtcgaatgtatgtttatacatcagtggaacccatttttctagcctagcaagtcccaaacacattacactgaagagattttggtgaggaaacttgctggagttttcagggaacactgttctaggcttaggtgaccttaggatcactcaagtagacccttcactccctgcgagaaattaggatgaataactacctgtggcattgttggttctgaacttttacagttcagggcctgctgtgaatctttgatgaagctttaaggtgacacttgttgtacaagatgtcagcctttgcttgaaacgcacattaccctggaataagtggctttaattgtagaattagaatgggatttactgtactgttttaaatgagattggccttcagaatccattacagttaccttacatagcacttgatacgtgttaaatgaacatatgaatgtaatttatatattcctagaatttaagttactttgtgagatttgggcctgtccctcaatgccagtttaggatttcttttttctaaccttgaaatgattataaaatagattttcatgggaattttaaaaac

SEQ ID NO: 84443 - DNA, 1012 bp, Homo Sapiens
  misc_feature (44)..(75): n is a, c, g, or t
  misc_feature (79)..(113): n is a, c, g, or t
agacttgaataatcactatggggctcaccttattagcgaagatnnnnnnnnnnnnnnnnnnnnnnnnnnnnnnnncggnnnnnnnnnnnnnnnnnnnnnnnnnnnnnnnnnnncagtcgacggtgaccggacatatgcccgggaattcggccattacggccgggggagtaaccgtatgatggtggtggtggtggtgtcttcctgtctcaacgatacctattttctagtgctgagatcctgagacaatgaatcatagtgaaagattcgttttcattgcagagtggtatgatccaaatgcttcacttcttcgacgttatgagcttttattttacccaggggatggatctgttgaaatgcatgatgtaaagaatcatcgcacctttttaaagcggaccaaatatgataacctgcacttggaagatttatttataggcaacaaagtgaatgtcttttctcgacaactggtattaattgactatggggatcaatatacagctcgccagctgggcagtaggaaagaaaaaaccgctagccctaattaaaccagatgcaatatcaaaggctggagaacactaattgaaataataaacaaagctggatttactataaccaaactcaaaatgatgatgctttcaaggaaagaagcatgggattttcatgtagatcaccagtcaagaccctttttccaatgagctgatccagtttattacaactggttcctattattgccatggagattttaagagatgatgctatatgttgaatggaaaccagactgctgggacctgcaaactctggagtggcacgcaaagatgcttctggaaagcattagagccctctttggaacagatggcactaagaaatcgcgggcatggccgtgattcttaggtcctgcggcagagaatgggggtggtttattccttcagtggaggtgtgcgccgcaacctgctaattctcatgtcctgtgcttggtcaccccaggtgcggcagctggggaacaccagaggcaacg

SEQ ID NO: 84444 - DNA, 434 bp, Homo Sapiens
gcacgaggtgaattgggcagctccaagccagaagtggctagggagctccccagaagaatccttgagcagacagagccagttgggcctcctaagtgaccttaaccttgcttgatttgcaagcatgtctgaaactttatttgtggtatttcttgtaaatgcctatgttaaagaaacacagaacttaagctcaaccaatcagaagcagccaacaaaaacgtaattagtaactaggacttcctcatgggatagaccaaataaggcaactgtataactgtgtaactgtataactgtaaccaatgaaatattatctttgcttttatctatttgtcctaaaaagcctcctcctcatgttctctctggggagctccctagccacttctggcttggagctgcccaattcatggatcactgctcaaataaactcttaaatattt

SEQ ID NO: 84445 - DNA, 501 bp, Homo Sapiens
cactccaagcttggcgtggccaacactcggtaggcagaatgatcacctccgttgtttcaggtactctgtgtttatttatgcaacagttcatgtaaaatggagacggaggccagaagaatccttgagcagacagagccagttgggcctcctaagtgaccttaaccttgcttgatttgcaagcatgtctgaaactttatttgtggtatttcttgtaaatgcctatgttaaagaaacacagaacttaagctcaaccaatcagaagcagccaacaaaaacgtaattagtaactaggacttcctcatgggatagaccaaataaggcaactgtataactgtgtaactgtataactgtaaccaatgaaatattatctttgcttttatctatttgtcctaaaaagcctcctcctcatgttctctctggggagctccctagccacttctggcttgaagctgcccaattcatggatcactgctcaaataaactcttaaatatttaaaaaaa

SEQ ID NO: 84446 - DNA, 383 bp, Homo Sapiens
  misc_feature (44)..(44): n is a, c, g, or t
gaaaaaacatgatcatctccaaagatactgcggaaagcatttanccaaaatataacactctttaatcataaacacttaacagactacaatgagaagagaacttcataaggaggagctacagcgagtataacacttaatggtgccgtttttttggaaggattcccatagaggcggaaggaagacaagtgtggtgagaaagtactcctattcaacacggcatcacagggtttggccaataccatgagataggaacaggcagtcagaagagcaaggattcaataggaaaagatgattatctttgaaaataacataattgtcaaggtaaaagttcacaagaatctataaacaattagatcaaataagaattggaattagtgggcaat

SEQ ID NO: 84447 - DNA, 1165 bp, Homo Sapiens
cccccaggtttaattccctgcccaattgggatgaaaaaggttccccgggggctgctggggtcagggcccccatttcgatccagtcaagttgcccggttcggccttcatttggggggccttggtggtcctggcccggtcggaacccgttcaacccgttcctggcggcaggaaccccattgttgagatggtcattgaccgatgagcagttcctctgtcaggtgctccatgggcgatctgagggatgagcttcccggaccccgtgttgcatggctcggcccgtgcggttgagctcctgcagcagctccaggtctgcggggctcggccctgggtgggcaccagctccgtcagcatctccgacatcaccctcacgttcccactcaccatctccagctcactgcgcagcttcccaatctgttccggggttggtgctatgggcgtgtcaccggagagtatgggcggggcgggcagaggggcagcatgctggccagagtcctcttgctggctggagtcagtgcccacagaatcctgtcctgattgtgtctctgagttgaacacggtcctctggggtgtgtggatgggtgacagcatgtccaggtcagtcatggggaactccaggcctttcctccgcaggtcctcatagatggtgaccacacctgtcagatcgggcgagctgcggaacgcgtcagcccaggactggatgaggttgagcactttgtcatgcacgatggtgggtgggttgttcttgggcaggatggtcctcaccagcacactctccacgaagtcctggctggccaccagcacgtggaagcggtgcccgcagttcttgacacaggtttctaagactgtgagagccagcatcacctcgtggaagttcttattccccacgattctcttctttactgctcggagggcatctttgggaccttcctccgtctcgttgatgatgtcgcagatctccatgttgagggcccagtcctcgctctgcagggagccatctgtggctttctcgatgcgctgtcccactggagagctgaacgggttccccaggagaaagtccattgctgctaccgccgctgccaccaaccccgggaatcagctgacagcaaccgccagcgccaccgacccgtccctcgtgccgaaatcgccacccaggcctcgctacctt

SEQ ID NO: 84448 - DNA, 1118 bp, Homo Sapiens
ggtctttctcctggggaacccgttcagctctccagtgggacagcgcatcgagaaagccacagatggctccctgcagagcgaggactgggccctcaacatggagatctgcgacatcatcaacgagacggaggaaggtcccaaagatgccctccgagcagtaaagaagagaatcgtggggaataagaacttccacgaggtgatgctggctctcacagtcttagaaacctgtgtcaagaactgcgggcaccgcttccacgtgctggtggccagccaggacttcgtggagagtgtgctggtgaggaccatcctgcccaagaacaacccacccaccatcgtgcatgacaaagtgctcaacctcatccagtcctgggctgacgcgttccgcagctcgcccgatctgacaggtgtggtcaccatctatgaggacctgcggaggaaaggcctggagttccccatgactgacctggacatgctgtcacccatccacacaccccagaggaccgtgttcaactcagagacacaatcaggacaggattctgtgggcactgactccagccagcaagaggactctggccagcatgctgcccctctgcccgccccgcccatactctccggtgacacgcccatagcaccaaccccggaacagattgggaagctgcgcagtgagctggagatggtgagtgggaacgtgagggtgatgtcggagatgctgacggagctggtgcccacccaggcccagcccgcaaacctggagctgctgcaagagctcaaccgcacgtgccgagccatggcacagcggggtcctggagctcatccctcaaatcgccaatgagcaacctgacaaaaggagctgctcatcggtcaatgacaatctccacaatgtgttcctgcgccctgaacggttttgaacggtttccaacaggcccgaacccctaagggcccccaatggagggccgagacgggcagcttgaacttgatcgaatgtgggcgcctggacccagcagacccccggggaaactctctcttctccccacttggggagggaatggaaacctgggggttccccacaaaggggggaaaacgttgggacctggcgaacctcttttgaggggcccccc

SEQ ID NO: 84449 - DNA, 425 bp, Homo Sapiens
ctagcattttatcacatctaaattccaattggaattatcaatatttgagcatacatatcttatgtaaataccagcacttaatagtactttcatatatttttctaggataagaaatgtatacattacaatagcaattactaataaattagggtctaagagtcacaaaaactacatgcaaaatttctgatgcatggaaacaagggtatggttcataagacattgaaatggagggtacattatttctagtaaaaaggcatgatcataataaaactgtgtaatttcagtttacaatacacttggccaccaatttttaaattatgtaattattaatcatttggaaatattttgagggatttgcagtttttcccattaagttaatcattgttaatattttaacatcttttttcaagtttccacaaaaaatt

SEQ ID NO: 84450 - DNA, 1057 bp, Homo Sapiens
  misc_feature (992)..(992): n is a, c, g, or t
ggacatgaaggaaaacaccagaaattattgttggcagtttttgtgactcctcttactgatcttcgttctgacttctccaagtttcgggaaatgatagaaacaactttagatatggatcaggtggaaaaccatgaattccttgtaaaaccttcatttgatcctaatctcagtgaattaagagaaataatgaatgacttggaaaagaagatgcagtcaacattaataagtgcagccagagatcttggcttggaccctggcaaacagattaaactggattccagtgcacagtttggatattactttcgtgtaacctgtaaggaagaaaaagtccttcgtaacaataaaaactttagtactgtagatatccagaagaatggtgttaaatttaccaacagcaaattgacttctttaaatgaagagtataccaaaaataaaacagaatatgaagaagcccaggatgccattgttaaagaaattgtcaatatttcttcaggctatgtagaaccaatgcagacactcaatgatgtgttagctcagctagatgctgttgtcagctttgctcacgtgtcaaatggagcacctgttccatatgtacgaccagccattttggagaaaggacaaggaagaattatattaaaagcatccaggcatgcttgtgttgaagttcaagatgaaattgcatgtattcctaatgacgtatactttgaaaaagataaacagatgttccacatcattactggccccaatatgggaggtaaatcaacatatattcgacaaactggggtgaaagtactcatggcccaaattgggtgttttgtgccatgtggagtcagcaaaagtgtccaatgtgggactgcatcttagcccgagtagggctgggtgacagtcaattgaaaggagtctccacgttcatggctgaaatgttgaaactgcttctatcctcaggtcctgcaaccaaagattcattaataatcatagatgaattggggaangaggaacttctacctacgatggatttggggttaacatgggctatatcagaatacattgcaacaaa

SEQ ID NO: 84451 - DNA, 963 bp, Homo Sapiens
gtgtggcccttccatggggacaagggagggaagaccaggagggatcccaacccccagccatggaggggggagtgggcagtctccccaatttggcccctctagctgcagttccacgttgttggcacggtcaagcactcgggagccacgggcactacccccaagctggaaacggctctcatagagagtggggcaagaggtgccagcgattggcccggtagatgcccaggtaggtgtagacatcaggcttgtaggtgagcaggcacttaatgcccgctgcacggatggctgaatccgcctccagtacacccaagcggtccgtgaagtcgtccgtgtaaacacagatgacctggcgcccaccctccttggcacgtgggctcaccttggccacctgaagccggccttcaaccacggcccgggcaatgccagcccaggcgtggtccagcttgaagcccggtgccagatgcataagccacttgcccgagagcacgtggtgggtgatggcgagctggcgcagggtacccggtgtgatgggccgcccactggtctgcagagcttcccaggctgcctgcaggccctgcacgtccccggagttggggctgtagccctgcccatacactgcaatccagcccacaggctctgagttgggtgaaccggggtccccatagcgggtaacttgggatggtgggtacttggccagccaggcatccagctcagtggcaggcgttgtgcgggcatcaaacactagccaggggtccatgtcagctgccatggcctctgcagccaggtgctcggcggtgaagccatcctcacggccacctggagagccctcctcttccagctcctcacctggttccatcctccggccttcgctgcgttcgacgccggcccagccccgggcccggctccgctcctgccgtggctccgcgccaccgccaccgcgccccacccccgccacggccgccg

SEQ ID NO: 84452 - DNA, 323 bp, Homo Sapiens
  misc_feature (59)..(107): n is a, c, g, or t
  misc_feature (115)..(115): n is a, c, g, or t
  misc_feature (123)..(166): n is a, c, g, or t
aagggtctttgctattgtttgcccagggcttggtcttcaaaagacttagtcattcttcnnnnnnnnnnnnnnnnnnnnnnnnnnnnnnnnnnnnnnnnnnnnnnnnntttctttnttttcttnnnnnnnnnnnnnnnnnnnnnnnnnnnnnnnnnnnnnnnnnnnntgctgaggaaggacgctgagctccgaggtgaaaagggatgaggacgcctaagaagacacgagcgcaatacctaatacaatttcctgaaattgtttcatgtcacacgttaaaataatatgaaacacgttaaataataaaatggtatgaaggttttatc

SEQ ID NO: 84453 - DNA, 391 bp, Homo Sapiens
tatatccccattttctaggtggggaacatgaggcacagagtggttatgtcttacccacagtcatttgcaagggagtggcaagaacctaagataccaacccatgtcaatctgcctctggagtctacgtagtatatccactatactaaactgcccttctaccttacaaagcagaacaagatcaggttctcacttttaaggagtctacagtctagtataggagccagcaaactttctctgtaaaggtctgggagactaaatactagggttttgcagcagtaatggtctctggttgtaaactaactcagctttttcccactgtagcgtaaaaacagttgtagacaattcataaacaagtgtggctgtgttccaataaaacttgatttacaaaaat

SEQ ID NO: 84454 - DNA, 1432 bp, Homo Sapiens
gcgccgagcggccgaggcgccgcggccggctctgggactcgtctggcgtccctcagaggcagaagaggcctggaccttggcgcacacagacccaggaacagatgagcagggatgtctgcatccacacctggccgtgcacctactacctggagcccaagaggcgatgggttactggacagctgtccttaacatcgctgtcgctcaggttcatgactgacagcactggagagattctggtcagcttccccctctccagcatagttgagatcaagaaggaggcttcacattttatcttcagctccatcaccatcctggagaagggccatgccaagcactggttcagctccctgcggccaagtcgaaatgtggtcttcagcatcatcgagcatttctggagggagctgctgctgtctcagcctggagccgtggcagacgcatctgtcccaaggacccggggcgaggagctgacgggactcatggctggatcccagaaacgcctggaggacacggcgagggtcctgcaccaccagggccagcagctggacagcgtcatgagaggcctggacaagatggagtcagacctggaggtggcggacagattgctgacagaactggaatctcctgcttggtggccctttagctccaagctttggaagacaccaccggaaacaaagcccagggaagatgtctccatgaccagttgtgaaccctttgggaaagaagggatactgataaaaattcctgctgttatttcccaacagaacagagtctcacgttaaaccagggaggctcaccgtccttgtgtctgggttgggaaatacatgactcccagttctttgctcatgcacaggtttgaaaaagaagacgtggacgacatcaagggccactcaccttacgaaattagcatccgccagcggtttattggaaagccagacatggcctatcgtttgatatctgccaagatgccagaggttatccccattttagaagtgcagttcagcaagaagatggagctgttagaagatgcattggtgctcagaagcgcaagaacctcttcccccgcagagaagagctgctcagtctggcatgcagcatctgggctgatgggccgtaccctgcaccgtgagccacccgcaggagaccaggagggcacagcactgcacctgcagacaagcctgccagccctttctgaggcagatacccaggaactaacccagatcctgaggaggatgaaggggctggccctggaggccgagagtgagctggagagacaagacgaagccctggatggcgttgcagcagcttgtggacagggcaaccttgaccatcgacaagcacaacaggcggatgaagaggctgacctaggggcagaacgtccctggcattcctgtctcaccctgcacatcccgctgagatggagggctgggcggca

SEQ ID NO: 84455 - DNA, 1571 bp, Homo Sapiens
aagggccaggagggggtgtgtgcccccctgaaaaggatccttttgggggccagggccaagtgaccaaggattcttgaagggttttccacagaacgccaggttcttccaccttgcctggaggggaggagtgatccagcccaggggggaagagggccaggggacttgttacttgcccagaaagccggcagggaggggaaagagcagataagggaggtataggggtgtgcccttggccaaggcagcaggggtaacgaagctctcagtgactcctcccagtagccaggggagagcagtgacagtctcaggtggccttgagcatgtgagctgctcatccacatcaggcaaaggcaaagccaggacctgaacttcccaccccaagccctacatccatgcaagccagaccagactgggtcagaggctagaagggagctcacaggattgcctggggaagcctcggcccaaaacctggccctcgctccagcccagagcacccacctgggcatgagactggcggcagccgtaggggtgccctgggtatatgccgggctcccagggtgccatacctgccaagccagcccaggggagtggtgatgggctgggtgctggctgtccctgcacatagcagtgcccgcgcggcagtaactacaactgctgcctgcccctcacccctgggttatgctcggcctcccctgtgcatttctgtgtccgtaagtgtcccctgtgcatttctgtgtccacaagactactataaaccctgtagacacctcacaaacagcattccacgcaggtgggttcatgtcccaggggcatggggctccctgctgcacagacttgggatgttccatgacagaccctgcatatgcaggcgagctcacaacccaggggtatgcggctccatgacaccaccccatactcaggcgagctcacgacccaggggcatgaggctccatgacaccaccccatacgcaggcaagctcacgacccaggggcatggggctccctgctgcacggcctcaggatgctccatgagcaacccccgcactgggctattcacggatgcacactacctgccattgtcacagggttgccctcgtgtccctcagcccagcagacaaaaggtgcaggagaagcctgcccagggccgaccccagcccagagcccactcgacactaaggaatcacacaggcacagctgctcctctcccaagaactcagctattggtcagaaaaaacctcctagcctcactaccttgaggccgtgcccagaggtggcagaaggcgctgtgcctcctcaggggtcacggctcctgtgcccccttcctcacccaagcccgacaagctactttcagaaatgaacctacagtaaaaatcaagagtctaagccacccaccctgtccccatccctgcctccagcctggcccccagattcacatctatgagatagaggttgaggggttggagcccaagacagggttatgggagggctccccaacccggccaggaccccttggcctcaatggaacgcacagaccctcgtgccgaattcaacacccagcctcgtacctagccgta

SEQ ID NO: 84456 - DNA, 1019 bp, Homo Sapiens
gaaagtgtgcgaggcctcgggtagccgccaggggagtgtgcttctgcaggctagttgggtcaggaaaagaagcgctcgctaggcgctcacgtagccttgagggccgtggcccagagggtggcagaagaggcgctgtgcctcctcaggggtcacggctcctgtgcccccttcctcacccaagcccgacaagctactttcagaaatgaacctacagtaaaaatcaagagtctaagcccaccaaccctgtccccatccctgcctccagcctggcccccagattcacatctatgagatagaggttgaggggttggagcccaagacagggttatgggagggctccccaacccggccaggaccccttggcctcactggaacgcacagacggcacccagcaggtaggcatgttctcaggggtggccagcaagggctctctcagggtacagctgggagaagcggccgagggcccagatggggaagatgttcctgtagctcgtgtaggagatggcacaggacttgttgaagaccccagcaatgttttcctgcggccagtcgccattggggagctgtttctcaagtagacaccggactcctctctcctgggcctcgatgtcaggatgccgaacggccatcagccccatcatggcccagcatgtgttatggatctgggactgggcactctgcacataacgccgctcctcgcaggactcaaagtcctccccccagcctccgtctgccatctgccgggacagcaggaagtcacaggcccgggagacctctgcacaggcagtcccatctcggtaggtctgccccatacaggcgaaggcctccaggccaaaccaggtgccgtaggtgaagcaaactccccaggagccttcccaggagccatcggccctctgctgccgccgacagaactctaagccctgcgtgagggtctcccggatctccgctgccctgtgctccgggaaacgcttgtggaaacctcgtgccgaattcggcgcgcctcgacttcatactctctc

SEQ ID NO: 84457 - DNA, 1348 bp, Homo Sapiens
cagcccctagtcaatgctgtccctgtgcagaatgaatctggggagctggtttctgtcacaccagttcctggacagactttggtcaccatggcaaccgccactgtcacagccaacaatgggcaaacggtaaccattcctgtgcaaggtattgccaatgaaaatggagggataacattcttccctgtccaagtcaatgttggggggcaggcacaagctgtgacaggctccatccagcccctcagtgctcaggccctggctggaagtctgagctctcaacaggtgacaggaacaactttgcaagtccctggtcaagtggccattcaacagatttccccaggtggccaacagcagaagcaaggccagtctgtaaccagcagtagtaatagacccaggaagaccagctctttatcgcttttctttagaaaggtataccatttagcagctgtccgccttcgggatctctgtgccaaactagatatttcagatgaattgaggaaaaaaatctggacctgctttgaattctccataattcagtgtcctgaacttatgatggacagacatctggaccagttattaatgtgtgccatttatgtgatggcaaaggtcacaaaagaagataagtccttccagaacattatgcgttgttataggactcagccgcaggcccggagccaggtgtatagaagtgttttgataaaagggaaaagaaaaagaagaaattctggcagcagtgatagcagaagccatcagaattctccaacagaactaaacaaagatagaaccagtagagactccagtccagttatgaggtcaagcagcaccttgccagttccacagcccagcagtgctcctcccacacctactcgcctcacaggtgccaacagtgacatggaagaagaggagaggggagacctcattcagttctacaacaacatctacatcaaacagattaagacatttgccatgaagtactcacaggcaaatatggatgctcctccactctctccctatccatttgtaagaacaggctcccctcgccgaatacagttgtctcaaaatcatcctgtctacatttccccacataaaaatgaaacaatgctttctcctcgagaaaagattttctattacttcagcaacagtccttcaaagagactgagagaaattaatagtatgatacgcacaggagaaactcctactaaaaagagaggaattcttttggaagatggaagtgaatcacctgcaaaaagaatttgcccagaaaatcattctgccttattacgccgtctccaaaatgtagctaatgaccgtggttcccactgaggttagtctcttgccttaaactcttcac

SEQ ID NO: 84458 - DNA, 809 bp, Homo Sapiens
  misc_feature (772)..(773): n is a, c, g, or t
  misc_feature (789)..(789): n is a, c, g, or t
tgaacctgaccagtgagctgctgcagaaatgcagcagtccggcgcctggcccaggaaaagagtgggaagagtatgtgcagatccggactctggttgagaaaatacggaaaaagcaaaaaggtctgtccgttacttttgatggaaaaagagaagattactttcctgatctaatgaaatgggcctctgaaaatggggcttctgtcgagggttttgaaatggttaacttcaaagaagagggctttggtttgagagcaacaagagatatcaaggcagaagaattgtttttatgggttccacgaaaattgctaatgactgttgaatctgctaaaaattcagtgttggggcccttatattctcaagaccgaatccttcaagccatgggaaacatcgcactggcctttcatttgctgtgtgagcgagccagccctaactccttctggcagccctatattcaaaccctccccagtgaatatgacactcctctctactttgaagaagatgaagttcggtatcttcagtccacacaagctatacatgatgtcttcagccagtataaaaacacagctcgacagtacgcctacttctataaagtcatccagacccatcctcatgccaacaaactacccttgaaggattctttcacttacgaggactacaggtgggcagtctcttctggtatgacgaggcaaaaccaaattcccacagaggatggttcccgcgtgaccctggctctgattcctttatggggatatgtgtaaaccacacccacggnncctgatcactactggnttacaaccctggaaagatga

SEQ ID NO: 84459 - DNA, 1012 bp, Homo Sapiens
gagtcagtgtacaacaacagttgtaaacgacggcagtactataacggtctaaggtagcgaggctgggtggcgaattcggcacgaggccattgtgtggcaggaaggaggtggctcttggcccaggcctaaaccaggaaagcctgggaaactgggacccacaggtgggcatgaaagggccgcagcaggggctcccagcagtgtgtaagaccgggagctggtctggcaccactgccctggtccttccagctgcctgtcactggtatgatggccccggtgcattgtgccaccagcaggccacagctgtggatcttggaaggcctctggggtcccccgggagcaggggagtgggtgtgggggggaacggatggtggtgagagggacagaccaggcaggctgacgagcagggcgggcctggctcacgtgggcctgtaggcgggcccacgccaagtttcacttcccgccactgctgccagcgagagccgcgggagagtgtgcagccgagtcactactgcctgcctgcctgcctgctacggctcagcagcaggctacgtacccaaccatgggctcgcaggccctgcccccggggcccatgcagaccctcaaatttttcgacatggaggccactggcttgcccttctcccagcccaaggtcacggagctgtgcctgctggctgtccacagattgtgccctggagagcccccccagctctcaggggccagctcccaaagttcctccaccaccgcgtgtggtagacaagctctccctgtggtgtgggtcccggggaagctgcagcctgaggcaggagatcccagtctggcaccgctgtgctgcgcgcatggggttccgttgtgacactgggcactgtcctgactcccgggggcgccacggctgggctgggggcgcgggccgtcaatccctcgtccgaagggttgccccagcggggccggaacaacggagcgggggagcccagcgagaaggcactttggcccaccggtgcccttcccacgggct

SEQ ID NO: 84460 - DNA, 875 bp, Homo Sapiens
gtatacgctaggtagcgaggctgggttgagaattcggcacgagggctgcgaagatggccgctgcgtctcatcggattccgacgcctgcggagctgagagcaatgaggccaattcgaagtggttggatgcgcactacgacccaatggccaatatccacaccttttctgcctgcctagcgctggcagatttacatggggatggggaatacaagctggtggtaggggaccttggccctggtgggcagcagccccgcctgaaggtgctcaaaggaccactggtgatgaccgaaagcccgctacctgctctgccagctgctgctgccaccttcctcatggagcaacatgagccccggaccccagctctggcacttgcttcaggcccttgtgtctatgtgtataagaatctcagaccctacttcaagttcagcctaccccaattgcctccaaatcctctggaacaagacctttggaaccaggccaaagaggaccgaatcgaccccttaaccctgaaggagatgctggagagcatccggtgagaggctgccttccccttcatacccccctcactccttcatcccatctgagccccagggccccattcttccattcggctgccatgctggccccctttccttgcagggagacggcagaggagcctttgtccatccagtcactcaggtttctgcagctggagctaagtgaaattggaggcatttgtaaaccaaacacaagtccaactccatcaagcggcagacagtcaatcaccaccatgagcaccttgaagaagaacctgggctgacgaggatgctgtgtcttgcctggtgctgggcaccgagaacaaggagcctctggtgctgacccccgaaggcttcaaca

SEQ ID NO: 84461 - DNA, 1177 bp, Homo Sapiens
  misc_feature (49)..(49): n is a, c, g, or t
  misc_feature (60)..(60): n is a, c, g, or t
gtcgtcagatctgtatcagcaccactcggtgtcatgagaggtgtgtctnccgccgtacgnccaagcaaggctgtcactgcatccgggtgtgatgacatgagcagggcttgtcacgataaatgcggacctctccattggccagcccagccatgacggcctgcaggccccgggaatgctgctccaggaggttcatggtcaggatggctgcgggcatctgcactgtccacagcttcttccccttgtgggtgaagccatgcaggctgtcttgggtgctgcccaccactaggaccttgtgtacccggataagtcccacaggctgggcgctcagctcgatgcagtacttggggtgcttggagtctcttctcagaatatagatgtttccattgcggcaggccgcggcaagccggaactcaacatcaaactggccagaaacctctaggaagacggggacgctgggaaggctcatcttggctaaaatggtgaaggcctcggggtcaagcaccaggagctccttgttctcggtgcccagcaccaggcaagacacagcatcctcgtcagccaggttcttcttcaaggtggtcatggtggtgatgactgtctgccgcttgatggagttggacttgtgttggtttacaaatgcctccatttcacttagctccagctgcagaaacctgagtgactggatggacaaaggctcctctgccgtctcccggatgctctccagcatctccttcagggttaaggggtcgattcggtcctctttggcctggttccaaaggtcttgttccagaggatttggaggcaattggggcaggctgaacttgaagtagggtctgagattcttatacacatagacacaagggcctgaagcaagtgccagagctggggtccggggctcatgttgctccatgaggaaggtggcagcagcagctggcagagcaggtagcgggctttcggtcatcaccagtggtcctttgagcaccttcaggcggggctgctgcccaccagggccaaggtcccctaccaccagctaggcaggcagaaaaggtgtggatattggccattgggtcgtagtgcgcatccaaccacttcgaattggcctcattgctctcagctccgcaggcgtcggaatccgatgaggacgcagcggccatcccgggaattccggaccggtcca

SEQ ID NO: 84462 - DNA, 798 bp, Homo Sapiens
aggctctgggataaggggggggagagtatgaagtcgacggcgcgccgaattcggcacgaggtctcagaccctacttcaagttcagcctgccccaattgcctccaaatcctctggaacaagacctttggaaccaggccaaagaggaccgaatcgaccccttaaccctgaaggagatgctggagagcatccgggagacggcagaggagcctttgtccatccagtcactcaggtttctgcagctggagctaagtgaaatggaggcatttgtaaaccaacacaagtccaactccatcaagcggcagacagtcatcaccaccatgaccaccttgaagaagaacctggctgacgaggatgctgtgtcttgcctggtgctgggcaccgagaacaaggagctcctggtgcttgaccccgaggccttcaccattttagccaagatgagccttcccagcgtccccgtcttcctagaggtttctggccagtttgatgttgagttccggcttgccgcggcctgccgcaatggaaacatctatattctgagaagagactccaagcaccccaagtactgcatcgagctgagcgcccagcctgtgggacttatccgggtacacaaggtcctagtggtgggcagcacccaagacagcctgcatggcttcacccacaaggggaagagctgtggacagtgcagatgccgcagcatcctgacatgaactcctggacagcatccccgggcctgcagcgtcatgctggctgggcatgagagtcgcattatcgtgacagcctgtcatgtctccacccgag

SEQ ID NO: 84463 - DNA, 967 bp, Homo Sapiens
tctgggtgaacccatccagctttctgggtgctgcccaccactagtaccttggtgtaccggataagtcccacaggctgggccgctcagctcgaatgcagtacttggggtgcttggagtctcttctcagaatatagatgtttccattgcggccagcccgcggcaagccggaactcaacatcaaactggccagaaccctctaggaagacggggacgctgggaaggctcatcttggctaaaatggtgaaggcctcggggtcaagcaccaggagctccttgttctcggtgcccagcaccaggcaagacacagcatcctcgtcagccaggttcttcttcaaggtggtcatggtggtgatgactgtctgccgcttgatggagttggacttgtgttggtttacaaatgcctccatttcacttagctccagctgcagaaacctgagtgactggatggacaaaggctcctctgccgtctcccggatgctctccagcatctccttcagggttaaggggtcgattcggtcctctttggcctggttccaaaggtcttgttccagaggatttggaggcaattggggcaggctgaacttgaagtagggtctgagattcttatacacatagacacaagggcctgaagcaagtgccagagctggggtccggggctcatgttgctccatgaggaaggctggcagcagcagctggcagagcaggtagcgggctttcggtcatcaccagtggtcctttgagcaccttcaggcggggctgctgcccaccagggccaaggtcccctaccaccagcttgtattccccatccccatgtaaatctgccagcgctaggcaggcagaaaaggtgtggatattggccattgggtcgtagtgcgcatccaaccacttcgaattggcctcattgctctcagctccgcaggcgtcggaatccgatgaggacgcagcggccatcttcgcaggcgtcgtc

SEQ ID NO: 84464 - DNA, 1021 bp, Homo Sapiens
  misc_feature (903)..(903): n is a, c, g, or t
gggtccggaattcccgggatcacctgcgaagatggccgctgcgtcctcatcggattccgacgcctgcggagctgagagcaatgaggccaattcgaagaggttggatgcacactacgacccaatggccaatatccacaccttttctgcctgcctagcgctggcagatttacatggggatggggaatacaagctggtggtaagggaccttggccctggtgggcatgcagccccgcctgaaggtgctcaaaggaccactggctgatgaccgaaagcccgctacctgctctgccagctgctgctgccagccttcctcatggagcaacatgagccccggaccccagctctggcacttgcttcaggcccttgtgtctatgtgtataagaatctcacaccctacttcaagttcagcctgccccaaattgcgctccaaatcctctggaacaagacctttaggacaccaggccaaagaggaccgaatcgaccccttaaccctgaacgagatgctggagagcatccgggagacggcagaggagcctttgtccatccagtcactcaggtgtctgcagctggagctaagtgaaatggaggcattggtaaaccaacacagagtccaactccatcaagcggcagacagtcatcaccaccatgaccaccttgaaggaagaacctggctgacagaggatgctgtgtcttgcctggtgctgggcaccgagaacaaggagctcctggtgcttgaccccgaggacttcaccatttttagccaagatgagccttcccagcgtccccgtgcttcctagaggtttctggacagctttgatgtagagttccggcttgccgcgggctgccgcaatggaaacatctatattctgagaatagcttcccagcaccccaagtactgcatcnagctgagcgcccagccctgtgggggacttatcccgtgtacaccaggggacctactgggtggggcagcaccccgagaaaggccctgcatgggctttcacccaacaaggggggaaaaaaa

SEQ ID NO: 84465 - DNA, 868 bp, Homo Sapiens
gggaggcgtggttggccggttgttgcgttgggatggatcaggcggaattccagaagagaaaataatccctgtctagatgcagaggacttggttcctattccagtgctcctccggtagcagggaggcgacagaaggtgtccaactatccattaccaagaagaaatctattcgtttgagcctgagacactctttgaggtaaaaaattagaatgaaagaacctttggatggtgaatgtggcaaagcagtggtaccacagcaggagcttctggacaaaattaaagaagaaccagacaatgctcaagagtatggatgtgtccaacagccaaaaactcaagaaagtaaattgaaaattggtggtgtgtcttcagttaatgagagaccctattgcccagcagttgaacccaggctttcagctttcttttgcatcatctggcccaagtgtgttgcttccttcagttccagctgttgctattaaggttttttgttctggttgtaaaaaaatgctttataagggccaaactgcatatcataagacaggatctactcagctcttctgctccacacgatgcatcaccagaccttcttcacctgcctgcctgccacctcctccccagaaaacctgcacaaactgctcgaaagacattttaaatcctaaggatgtgatcacacctcgttttgagaattcctatcctaacaaagattcctgcagccaatcatgcctgccctcttatgagctaaagaaaaaacctgttgttaccctatataccaaaggccatctcacctaagtgcaatcatgtggtcagaccactgcctgatactcgatttggaagtttattatccaaaatgggggcactgggccttttgaagg

SEQ ID NO: 84466 - DNA, 484 bp, Homo Sapiens
ctgggcagctgttgtcgcgtggcgggcggccgggcggcggcgctgcggggaccgggtgcgggaggccccgccgcgcggccccggctgggcggtgacggtggcggccggcggcacctggggcaggggcagccgcgcgagctggcgggctgtggcagccgcgcggacggcggcttccgcccctcccgggtggtggtggtggccaaaaccacccggtacgagttcgagcagcagcggtaccgttacgcggactcttctcggaggaggacctgaagcagctgcttgcattgaaaggctctagttacagtggacttcttgaacgacatcatattcacaccaaaaatgtagaacatattatagatagtttacggaatgagggaattgaggttcgtctagtaaagaggagagaatatgatgaagagactgttcgatgggcagatgctgtcatagctgcaggaagtgatggcacaatgctgctggcagcgag

SEQ ID NO: 84467 - DNA, 579 bp, Homo Sapiens
  misc_feature (236)..(236): n is a, c, g, or t
gggcggagcgtggcggaccccacccgcgaggggcccaggaggacgcggcagagtcacggtggcagcattgagagttggacacccgggtccttgaagtgatctctaggccccagcccaaatccgccaccattccgtgctgcggggacaccatggctccagaagaggacgctggaggggaggccttagggggcagtttctgggaggctggcaactacaggcgcacggtacagcgggtnggaggacgggcaccggctgtgcggggacctggtcagctgcttccaggagcgcgcccgcatcgagaaggcttatgcccaagcagttggctgactgggccccaaagtggaaggggaccgtggagaagggcccccagtatggcacactggagaaggcctggcatgcctttttcacggcggctgagcggctgagcgcgctgcacctggaggtgcgggagaagctgcaagggcaggacagtgagcgggtgcgcgcctggcagcggggggctttccaccggcctgtgctgggcggcttccgcgagagccgggcggccgaggacggcttccgcaaggcccagaagccctg

SEQ ID NO: 84468 - DNA, 229 bp, Homo Sapiens
  misc_feature (22)..(22): n is a, c, g, or t
cttgagttctggcctgtaccangtgcagaaatagcttcccaaaggaaaaaaatgggcaacagtaccaaatgctgctgagaggtcaagaaagaagaaggctgagaactgattactgaatttggccacctggaggtacttggggaccctgacaagaggcacagcccccgttgctgtggcagggatcttggctgctctgcgaatcaccaacaacaagctttccaatcaagtg

SEQ ID NO: 84469 - DNA, 1262 bp, Homo Sapiens
ctggaccggtccggaattcccgggatatcgtcgacccacgcgtccgcccgagctcggcagcagcgcagcgggccggcccacctgctggtgccctggaggctctgagccccggcggcgcccgggcccacgcggaacgacggggcgagatgcgagccacccctctggctgctcctgcgggttccctgtccaggaagaagcggttggagttggatgacaacttagataccgagcgtcccgtccagaaacgagctcgaagtgggccccagcccagactgcccccctgcctgttgcccctgagcccacctactgctccagatcgtgcaactgctgtggccactgcctcccgtcttgggccctatgtcctcctggagcccgaggagggcgggcgggcctaccaggccctgcactgccctacaggcactgagtatacctgcaaggtgtaccccgtccaggaagccctggccgtgctggagccctacgcgcggctgcccccgcacaagcatgtggctcggcccactgaggtcctggctggtacccagctcctctacgcctttttcactcggacccatggggacatgcacagcctggtgcgaagccgccaccgtatccctgagcctgaggctgccgtgctcttccgccagatggccaccgccctggcgcactgtcaccagcacggtctggtcctgcgtgatctcaagctgtgtcgctttgtcttcgctgaccgtgagaggaagaagctggtgctggagaacctggaggactcctgcgtgctgactgggccagatgattccctgtgggacaagcacgcgtgcccagcctacgtgggacctgagatactcagctcacgggcctcatactcgggcaaggcagccgatgtctggagcctgggcgtggcgctcttcaccatgctggccggccactaccccttccaggactcggagcctgtcctgctcttcggcaagatcccggccgcggggcctacgccttgcctgcaagcctctcggcccctgccccgctgtctggttcgctgccttccttcgtccggaagccagcttgaacggctcacagccacagggcatccttcctgcaacccctggctgtcaacaggaccccgatgccccttaaccccaaaccgaatcccatctccggggaggctgccccagggggtccctggattgaactggggcctgggaacaaaaccaagggcaaaaggaagggaaaacggaaaaaggggcttcctgtaatgggcttaagaccccccc

SEQ ID NO: 84470 - DNA, 1104 bp, Homo Sapiens
gctggaccggtccggaattcccgggatatcgtcgaccacgcgtccgggacccgggcagggctggagctgggctgggatcccgagctcggcagcagcgcagcgggccggcccacctgctggtgccctggaggctctgagccccggcggcgcccgggcccacgcggaacgacggggcgagatgcgagccacccctctggctgctcctgcgggttccctgtccaggaagaagcggttggagttggatgacaacttagataccgagcgtcccgtccagaaacgagctcgaagtgggccccagcccagactgcccccctgcctgttgcccctgagcccacctactgctccagatcgtgcaactgctgtggccactgcctcccgtcttgggccctatgtcctcctggagcccgaggagggcgggcgggcctaccgggccctgcactgccctacaggcactgagtatacctgcaaggtgtaccccgtccagaaagccctggccgtgctggagccctacgcgcggctgcccccgcacaagcatgtggctcggcccactgaggtcctggctggtacccagctcctctacgcctttttcactccggacccatggggacatgcacagcctggtggcgaaacccgccaccgtatccctgagcctgaggctgccgtgctcttccgccagatggccaccgccctggcgcactgtcaccagcacggtctggtcctgcgtgatctcaagctgtgtcgctttgtcttcgctgaccgtgagagggaaaagctggtgctgggagaacctggaggactcctgcgtgcctgactgggccagatgattccctgtggggacagcacgcgtgcccagcctacgtggggactgaagatactcagctcacgggcctcttactcggggcaaggcagccgaatgtctggaaccctggccgtggcgcttcttcaccatgctggccggccactaccccctttcagggactcggaagcccggtcctgcttcttcggaaagataccgccgcgggggccctaccctttggcctggaggggcctttgtgggcccggggcccctgtgtctggggtccccttgccctcccttcctgggga

SEQ ID NO: 84471 - DNA, 938 bp, Homo Sapiens
  misc_feature (797)..(797): n is a, c, g, or t
ggtccggaattcccgggatatcgtcgacccacgcgtccggcgcgcacgagactcgcagcggaagtggaggcggctccgcgcgcgtccgctgctaggacccgggcagggctggagctgggctgggatcccgagctcggcagcagcgcagcgggccggcccacctgctggtgccctggaggctctgagccccggcggcgcccgggcccacgcggaacgacggggcgagatgcgagccacccctctggctgctcctgcgggttccctgtccaggaagaagcggttggagttggatgacaacttagataccgagcgtcccgtccagaaacgagctcgaagtgggccccagcccagactgcccccctgcctgttgcccctgagcccacctactgctccagatcgtgcaactgctgtggccactgcctcccgtcttgggccctatgtcctcctggagcccgaggagggcgggcgggcctaccaggccctgcactgccctacaggcactgagtatacctgcaaggtgtaccccgtccaggaagccctggccgtgctggagccctacgcgcggctgcccccgcacaagcatgtggctcggcccactgaggtcctggctggtacccagctcctctacgcctttttcactcggacccatggggacatgcacagcctggtgcgaagccgccaccgtatccctgagcctgaggctgccgtgctcttccgccagatggccaccgccctggcgcactgtcaccagcacggtctggtcctgcgtgatctcaagctgtgtcgctttgtcttcnctgaccgtgagaaggagaaactggtgctggaaaaacctggaggacctccgccctgctgactggggccaaatgaattccctgtggggaccagcaagccctggccctggcctacgggggggacctgggaaaaacccccgctca

SEQ ID NO: 84472 - DNA, 1187 bp, Homo Sapiens
accaacaaccaagagcctgtgtttattgaagagatgggcagtagcgaaccccttcccatcgcagatggtgacaggaggaggaagaagaagcggaggggccgggccactgactccttgccaggaaagtttgaagatatgtacaagctgacctctgaattgcttggagagggagcctatgccaaagttcaaggtgccgtgagcctacagaatggcaaagagtatgccgtcaaaatcatcgagaaacaagcagggcacagtcggagtagggtgtttcgagaggtggagacgctgtatcagtgtcagggaaacaagaacattttggagctgattgagttctttgaagatgacacaaggttttacttggtctttgagaaattgcaaggaggttccatcttagcccacatccagaagcaaaagcacttcaatgagcgagaagccagccgagtggtgcgggacgttgctgctgcccttgacttcctgcataccaaaggcattgctcatcgtgatctgaaaccagaaaatatattgtgtgaatctccagaaaaggtgtctccagtgaaaatctgtgactttgacttgggcagtgggatgaaactgaacaactcctgtacccccataaccacaccagagctgaccaccccatgtggctctgcagaatacatggcccctgaggtagtggaggtcttcacggaccaggccacattctacgacaagcgctgtgacctgtggagcctgggcgtggtcctctacatcatgctgagtggctacccacccttcgtgggtcactgcggggccgactgtggctgggaccggggcgaggtctgcagggtgtgccagaacaagctgtttgaaagcatccaggaaggcaagtatgagtttcctgacaaggactgggcacacatctccagtgaagccaaagacctcatctccaagctcctggtgcgagacgcaaagcagagacttagcgccgcccaagttctgcagcacccatgggtgcagggggaacagcagcacaatggacctgacgctcttcgcagctgaggccatcgcccttaaccgccagctatctcagcacgaagagaacgaaactagcagaggagccagaggcactagcttgattggctctgctccatgaagctttcccctccctggcaagtcacgcctgggccggagacgggccctggggc

SEQ ID NO: 84473 - DNA, 302 bp, Homo Sapiens
  misc_feature (197)..(213): n is a, c, g, or t
gaccgtttcctcaacctggattcttgtcggcccacaactctgtgccttgagaatcctcttctagcctcaagggacggtaagacaaaagaaaatttaaaaagggggctcagctgttcttttatgcaaaggtgaaaaaagcttcattgcctaaagaagggacagatgggatcttgcttcctacaggaaaattaattttnnnnnnnnnnnnnnnnnggggggacagtgtaatgcttctcacaaggctccagaaacgaagcccagtaattccttaagtaaaagaggaatgtgaagacttcttaagg

SEQ ID NO: 84474 - DNA, 1057 bp, Homo Sapiens
ggtccggaattcccgggatggttgctgctgggctaacgggctccgatccagcgagcgctgcgtcctcgagtccctgcgcccgtgcgtccgtctgcgacccgaggcctccgctgcgcgtggattctgctgcgaaccggagaccatggccaaaccagcacagggtgccaagtaccggggctccatccatgacttcccaggctttgaccccaaccaggatgccgaggctctgtacactgccatgaagggctttggcagtgacaaggaggccatactggacataatcacctcacggagcaacaggcagaggcaggaggtctgccagagctacaagtccctctacggcaaggacctcattgctgatttaaagtatgaattgacgggcaagtttgaacggttgattgtgggcctgatgaggccacctgcctattgtgatgccaaagaaattaaagatgccatctcgggcattggcactgatgagaagtgcctcattgagatcttggcttcccggaccaatgagcagatgcaccagctggtggcagcatacaaagatgcctacgagcgggacctggaggctgacatcatcggcgacacctctggccacttccagaagatgcttgtggtcctgctccagggaaccagggaggaggatgacgtagtgagcgaggacctggtacaacaggatgtccaggacctatacgaggcaggggaactgaaatggggaacagatgaagcccagttcatttacatcttgggaaatcgcagcaagcagcatcttcggttggtgttcgatgagtatctgaagaccacagggaagccgattgaagccagcatccgaggggagctgtctggggactttgagaagctaatgctggccgtagtgaagtgtatccggagcaccccggaatattttgctgaaaggctcttcaaggctatgaagggcctgggggactccggaacaacaccccgtgatcccgcatcatgggtcctccccgtaagggaaatttggacttggctcgaacatttcggggaaaatctttcccggaccaagtatttaaaa

SEQ ID NO: 84475 - DNA, 702 bp, Homo Sapiens
  misc_feature (22)..(22): n is a, c, g, or t
  misc_feature (29)..(29): n is a, c, g, or t
ccttgatctctttttcccaagncactagnatatgtttctgtgatgattttgagataagtactcaaaattacatagttcatttctaagagaaggccatgttttctacctattgggtttttctaccctgagatactatggcttctttgtaaaggtatataaagtgtttttcaaagcggaaagatactgttaaattcagctgctaatcatagtgtatttgtttggaatgacatgttgagcaggtagtacctttacggctgttgctttttgcagcattatgtggaagtgcctaagtctatttagcctcacagatgactttagaatcttgtattttctacatcagagttcatagcggggatggtgctacatatatctatgcaactgaaaaagaaaacatttcaaacctaaagtatgcaacaagatattatttatatgaaatccatagctcagttatgctatgttcatgaatagagaagttttaagttggaagggaccatggatgacccaaagcagatacatatggtcattcatatacctaaaatacctacaaagacaagttgttccctggtttaaaaggcagtctgttctattgatggactgctttagtccctgaacattttctttggctaaaccaaaaacacataaacctaacttggtcttggcttgatctactgggtaaataataactcttaaatatatatacag

SEQ ID NO: 84476 - DNA, 757 bp, Homo Sapiens
cagtcgacggtaccggacatatgcccgggaattcggccattacggccggggaaagaccagcagttgatattaaagcgcaaatgaattcaacctcagccctgaaaataacagaattctgaagtttcctatgactaattcacaaaaaaagtaattgtaaactagtactattatggaattactctactgttctttctttaatagtggcaaatgaaagcataagcttaagcattttttcatattctgaagtctcaccacacataataaccaagtggtagactcacagccgtccaacttaaaaaggcaaaaccttaccttggaattggaattactgtaaacagcctactgaaaatgcatttttatcatgtaacattcttctacttgtttaacattgctgattttctctggcagcataattttgtggttaagagaatgaattctgaatgtacactttctgtctcaaaccctggctgtaatttcagctagttaataattctttgtgttcagttccactatctaggtattttcttcaaaaggtaaatacaatggtttctgaaagaatcatttgcattatcagcctgtttgggatgtctgagatcagtgcctctgggttgttaatactgtattgctgtatggtatatgtattgctgatttactacttatgcgtaagtggtatgcatgggatgtctgaaatcagtgcctatggggttgtcaatagtattaactattagtgttactgttagtattactattagtatta

SEQ ID NO: 84477 - DNA, 278 bp, Homo Sapiens
  misc_feature (247)..(247): n is a, c, g, or t
gtcaaacaaatgtgacttatgctggtgccctcgccctgctgatcagattctggttcaaattctgccactccagctcctgggttaggggctttgctgtaagtttctttttctggactttagatcctgaacctgtccttgcttctcagtttctctcactgtacccctttccctcagtctcttcctctctctttcccctgtcactatttgtctttctaatctccttctgtttctctgaacagaatacctncatttcaatctctgggttccgggtcaattcc

SEQ ID NO: 84478 - DNA, 1049 bp, Homo Sapiens
cccctccccaacccagcactaaggagcaccctgctctggtctccgccaccacccagcgcctcctggacccatccccccaaacccttgaacgtcctcaggacccccaggagcaggagacgcggagctcggagcgctgagctgacctgccggagccgggcgtgggctgcagcctcggagctcccggaacgatggtgaagttggggaacaatttcgcagagaagggcaccaagcagccgctgctggaggatggcttcgacaccattcccctgatgacgcccctcgatgtcaatcagctgcagttcccgcccccggataaggtggtcgtgaaaactaagaccaagtatgaacctgaccgcaagaaaggaaaagcacgtcccccccaaattgctgagttcaccgtcagcatcacggagggtgtcaccgagaggtttaaggtctccgtgttggtcctcttcgccctggccttcctcacctgcgtcgtcttcttggttgtctacaaggtgtacaagtatgaccgcgcctgccccgatgggttcgtcctcaagaacacccagtgcatcccagaaggcttggagagctactacgcggagcaagactccagtgcccgggagaaattttacacagtcataaaccactacaacctggccaagcagagcatcacgcgctccgtatcgccctggatgtcagttctgtcagaagagaagctgtccgagcaggagactgaagcggctgagaagtcagcttagcgggatgggcaagttccttacaatgtgtcacttgcaaataacaaagggactttgagggacatttcattaaatataattactgatactttagaggttactcatttacggtgcaattgcttctgtttgctaatgctgctttgcaaataaaacttgctgccgaccacccacgggcataaaatcaagtgcatttcagcattgcctaaagagctctgacaccacttttcatgttaagatcttcatttagctcctttactgggatttattggatgctgtaaaaaaataaatttacactggatatgcgaa

SEQ ID NO: 84479 - DNA, 579 bp, Homo Sapiens
  misc_feature (463)..(463): n is a, c, g, or t
ggcacgagggcagggctcagccagggatggcttctagctgacagtgggaggaattaattcatctgaccggaatattcttttctcttctgggctgttggtttttcaagtgcaacaaagattccatacagctccaaggaaggagccaagaaaaacattctgtgccaaagtgagatcctggaagtgaaaccccggaataaagctgaaaaacgggctccagttgggtgccaggaaatgcaggactggaatgtgacttgacttccggcagcgcgcaggtgctcccgggtcacctgctttgaggtccagcctcctgccctgcctcaggtgaccacatgaccactgtggactttgccctgaaaccttctgggaggagaagaggcctgaccttggcgctggggtccagtgggcgctgctctggtccgaggctgctgctcttgacctctgctctgcggctgttttccattgnagtagaggctcctcctgtcctgtcctgcctgtggagggaagcaaaccttcccctggaccagagagaggagaaagcggagacaggtaagcaaacgctgttggaactgggtgattaca

SEQ ID NO: 84480 - DNA, 598 bp, Homo Sapiens
  misc_feature (20)..(20): n is a, c, g, or t
ggaaaggccttcaggaggangggcttccctcatccgccactggaaaattcacactggagaaaggccttaggatgggagataattccgtttccttgttcaacataataactgacatcagagagaagctccaagcatagcctttatgtgtagccgacagccagaagtagaactttatacactcaaacactcaccctggggaggttcttccgagtgccagctatatgggaagccttctggagctatgcttgaattttctaagactcttgctggaatttcgtcaaggcagtgcctgttagaagccatctgtctttgtgctggaagagtcctgccttgtgccaaagtaaccccaatgtgtttcaaaagacagacctctgtactattcccttccctggagggaatcatcagtagcctgaggccatcaaggattctcactttttttctgccccactactggtttaagcatgagcatgacccagttttagcctgaaaaatgggagctttgttctgctgaccactggcagaggtttcccttcatggatatagttgatctcacatggcacttgggacgaatttttctagccttcaagacacctgacct

SEQ ID NO: 84481 - DNA, 1311 bp, Homo Sapiens
  misc_feature (1257)..(1257): n is a, c, g, or t
  misc_feature (1278)..(1278): n is a, c, g, or t
ttaggctagtacgaggctgggtgtgaattcggcacgaggctcttcccggtcatggaggcgccagccgccggcttgtttctgctcctgttgcttgggacttgggccccggcgccgggcagcgcctcctccgaggcaccgccgctgatcaatgaggacgtgaagcgcacagtggacctaagcagccacctggctaaggtgacggccgaggtggtcctggcgcacctgggcggcggctccacgtcccgagctacctctttcctgctggctttggagcctgagctcgaggcccggctggcgcacctgggcgtgcaggtaaagggagaagatgaggaagagaacaatttggaagtacgtgaaaccaaaattaagggtaaaagtgggagattcttcacagtcaagctcccagttgctcttgatcctggggccaagatttcagtcattgtggaaacagtctacacccatgtgcttcatccatatccaacccagatcacccagtcagagaaacagtttgtggtgtttgaggggaaccattatttctactctccctatccaacgaagacacaaaccatgcgtgtgaagcttgcctctcgaaatgtggagagctacaccaagctggggaaccccacgcgctctgaggacctactggattatgggcctttcagagatgtgcctgcctatagtcaggatacttttaaagtacattatgagaacaacagccctttcctgaccatcaccagcatgacccgagtcattgaagtctctcactggggtaatattgctgtggaagaaaatgtggacttaaagcacacaggagctgtgcttaaggggcctttctcacgctatgattaccagagacagccagatagtggaatatcctccatccgttcttttaagaccatccttcctgctgctggccaggatgtttattaccgggatgagattggcaatgtttctaccagccacctccttattttggatgactctgtagagatggaaatccggcctcgcttccctctctttggcggggtggaagacccattacatcgttggctacaacctcccaagctatgagtacctctataatttgggtgaccagtatgcactgaagatgaggtttgtggaccatgtgtttgatgaaacagtgatagattctctgactgtgaagatcatccctgcctgaagagccaagaacattgaaaatgatagtccctattgaatcagccgtgcccccgatgagctgcactacacctatctggnacacatttggccgccctgtgnattgtttgccttacagaaaaattctgtaaaaac

SEQ ID NO: 84482 - DNA, 1198 bp, Homo Sapiens
  misc_feature (755)..(767): n is a, c, g, or t
gtataagaggcatactctaacggttctaaggtagcgaggctgggtggcgaattcggcacgagggggcccctgaggctgcacaggggcctttgtcactggggcgcatgcttacaaacagtgcagttcttgggaccgaggtaagcagggctgggtctcatggcagaaaggccaggatctggggctctaggaatttgggaattgggcagagtggccaagaaagctggcaggcatatcctatgggacatcacacctgacaccattgtcattgttggtgcctgtgtcccaagtagctagtgataagctgaggctgcagcaagaaacacccttcccaggtgggggagtttggaccagaggtgccctctgcccaccacaccttgcaacccagaagccccagatggaacgcagctgacgaaggtgatgcttgaggctcacttttggggccccacagctggagccggtataatgactgggacaacatcaaggggtggatgaggggcctctcctcccggaacactgccttcccatgctgttcccctgccagctccttaacactgccgaccaaggccagccctggcattcagggaaattggagggcagcacccgtagggtggccagcctcaggccccaacccagctgtgtcctctagtctctggggaaccctggggggaagaagtctaccctgcttgtgagtcccgtctcagtgtggaggaactggctgcacatgggacctgaaggtgccctctgtgtttatgttnnnnnnnnnnnnncagtgctggctgcctctgtcctgtgtgtgaccctaccctcgaagggtcctgtcctgtcagtcccgagggagccacaaccaaagctgcggagagaaggtggggaagggtgcggaatggccgtggggcacagcgtggcagactgttcagtctctgctgggtctttcctagggacctggaaggccagtgttgcttccccctcactccctttcactgcaggcagcctctctgcttccccaatgccttatgcctgggcacactgccacagaatatgcaatatgtgtgggtgaccatgccctcacgaccacacccccaccccgggcagcccccggactccaaaggtcgtggctgccacagcctccctcagctcttcctgcctatctgtcttcacactgagaatggcgcccaataaatgctatccacggagaccagga

SEQ ID NO: 84483 - DNA, 834 bp, Homo Sapiens
tggagaatgaggtgaggttagagctgtgtttccccttaccactggcttatccagtgcctggcacagtacctaacacatagtaggcactcaataaatatgcctcaaagaatggtttcagaccatggcttgtctgcaaggagagctcatctttgcggaggctgcatatttgctaaatgaacggaataaatgattggtgaatctttgtgggtagaagccaagaaagaggaaaactgacctctatggcatcgacagaacgagtaattttaggaagtgacagggtccaaggtgaccaagtgattatgtcctcaggagaaatggcagcaatgagacacctgtggttgtcctcaacctccaaaccattctccacatacccatgacctgaccctaatctcaaaacccaacctggcaagctctggggaaggtagtgcttagagacaatttgagatgaaggttgaagagagacaaagaatctgggcccagggagacaaagtcatctgggcccagggagaatgtggattttggggaaccaataggtggacatgggtcaacagggagaagagtgcactgttccattttttcctggatatgacaatcaactggaaatgatcagagggaggggttgttgatgttgaccaggccattgaacaagaggcatgtgcacaaattgaaaagtcagtccaccttactctttctgcgagtgggaacgcttaggtccagagggcaagagaacagaactgggatcacaggggcctggagcaggtgtctcctgtccagagctttgaagcggacgcgtgggtcgacgatatcccgggaattccggaccggtacagcctg

SEQ ID NO: 84484 - DNA, 689 bp, Homo Sapiens
  misc_feature (49)..(66): n is a, c, g, or t
  misc_feature (301)..(391): n is a, c, g, or t
gctatgtttacagtagttaaggcgatcaaattttaaacaaaagcaattnnnnnnnnnnnnnnnnnncagcaaacgttttccatgctactcccatagaccttatttgtaagtgcaagacaggaaaacaaacactgtgcaaaatgcttttgccttgcgtgctggtcattaaaaccacacgttaggctgcagcctctgctgccgcaatccacatagtctactaacccccttccccatgtcaatcaaggcagtccagtcctttcagcctggggctttttcagtccatagaatcttttcatgagtnnnnnnnnnnnnnnnnnnnnnnnnnnnnnnnnnnnnnnnnnnnnnnnnnnnnnnnnnnnnnnnnnnnnnnnnnnnnnnnnnnnnnnnnnnnagaacgacctattgtcaacttgtgcagtagttattctaagaacgctcaactgggtaaatgtgtacacctaaactctgagctggcatgggttttgtgcaattagaagtttgttataaatgcacactgcacatgcaaatctttaagctgtttgtaaacatttatattttccttgttatgtagcgaagttatcaatttgcagcttaagtttttattcagcttaacagtttcaacttaaagacagtgggaaagtcaatttaaattatataaaataaaaataaaaacagtgcatttacgttct

SEQ ID NO: 84485 - DNA, 1176 bp, Homo Sapiens
  misc_feature (79)..(79): n is a, c, g, or t
  misc_feature (120)..(120): n is a, c, g, or t
tgaattttgggtttatcagtaacacagtatgagggactacacagatcccagcatcctgctgccaaaggagacatggggncaagagttgaagatttgagaggaaatgaagagacatacacnacaccaagggaaaaggggctggaatcaagttcagccaaagcacctaacacaaaaaacaggtgagcttttgctcagtctgttcttcaaaatatgtatgatcataatatggtgaagtttcataatttccaactcaaaaatacaaatgatcctcagttctatacttttgcctctattctcttataaagaaatatgtcaacataacagtatgacataacagttaaaatgaaggacaaaagcttgcttatccttagtttgacctcagcataaggcaaaatcccctggactaatacatttaaaaaaaactttaaaggaaaaaaagcgaaaccaaccttcatgcaaagattaattttaaaactatcaaaagtcagttcttttattccagaggtcactaagaaaagtaccatctgctaaaattctctttcaagcacttcttccatcatatcctagaggtgagatatgggaaacagaaagcaaatcagtgtttccttcaggagctatattctgttactcaattgaggtaagacaaagtgacaatgaagatatgagtagtatttccttccaatttttaaacattttcagaagctgagatcaaaccccagtcaataaaatgcaggacactagaagcaacaacttattttggactcctgagatcaaacacattgaactttcaaatctggtgtttgtatcaaaatgtgattttcattaaaatcaggtaagctagtcctacataaaaaagcatgagctgaaagtggaggaccctctatcttctcattccttaactgagccaccgatgttaagaaaaaaatggcttaagcggtaccttcaacaactattctagttaagaaggtgacaacaaattcctttcaataggttctctcaagaaaagttttccacacaaccatcccagtctttacaattttttacctagcaccatcataataaaatgttatctttcaaagtgctctctaaaatcctgttacattatctaaatgctaatcactactcaaatcagcagttacacagacgttaggtaattaaaacagcacagaggtaaat

SEQ ID NO: 84486 - DNA, 508 bp, Homo Sapiens
gctggaagtggccttagtttacagtcagcaagaaagtggggaccttggccctgccaccgaaaggatgtggattctgccagcagcctgaaggagcaggagacagagtctcccctagaacctccaggaaggaaggcagcctgccagccttgattctagtccagtgagacccatagtcagacttccagcctacagaattgcaataaatttgtgttaagtcactaagtttgtggtaaattttacagcggcagtataaaactaatacagtggtgtgccttcctggttgacatttgaaatgcgtttagaaaggcatgaatgcgctaatgtatacatacagtttaaaatgcttaagcccatttcactaagtttggaattggaggagaggcaagccaagaatcaagaggccaggaaggcaggggtagaatccatgagggcatagaaatctctaagactgagccaggagtggagtgggagagaggggaaaagcccgcaaaggcatcctctagagtca

SEQ ID NO: 84487 - DNA, 314 bp, Homo Sapiens
  misc_feature (36)..(36): n is a, c, g, or t
catgtgcccataccgtcattcgaggagagggaaganccccccttctcctcctccttactatagaattcctgttgggggtgggccagaaattagcacttctaaatatttcagagaagtccaaagtgttaaaaaaagtcttttatgcaaaagaacgtctttctgcatcagtgaatagtaatgctcatcagaatttcctaatagcacaaaaaacaaagccaagtctatacatttgatcagatatcaaagtaatgggaggtggactattatgtcaaccttagtcagagctcctgctggcttcttcctatacactgttc

SEQ ID NO: 84488 - DNA, 702 bp, Homo Sapiens
  misc_feature (612)..(612): n is a, c, g, or t
  misc_feature (614)..(614): n is a, c, g, or t
  misc_feature (661)..(661): n is a, c, g, or t
aagtgaaaggcgccaggtgacagtcctggcctctgatgtaacccagcgccccgcagtcccgacacagattcctggatctcagccccatagcagctatgatcccgctgctgctggcagcgctgctgtgcgtccccgccggggccctgacctgctacggggactccgggcagcctgtagactggttcgtggtctacaagctgccagctcttagagggtccggggaggcggcgcagagagggctgcagtacaagtatctggacgagagctccggaggctggcgggacggcagggcactcatcaacagcccggagggggccgtgggccgaagcctgcagccgctgtaccggagcaacaccagccagctcgccttcctgctccttgaccacgatgggggcttctggctggtccacagtgtacctaacttccctccaccggcctcctctgctgcatacagctggcctcatagcgcctgtacctacgggcagaccctgctctgtgtgtcttttcccttcgctcagttctcgaagatgggcaagcagctgacctacacctacccctgggtctataactaccagctggaagggatctttgcccaggaattccccgacttgnanaatgtggtcaagggccaccacgttagccaagaaccctggaacagcancatcacactcacatcccaaggccggggctgttttccagagc

SEQ ID NO: 84489 - DNA, 1019 bp, Homo Sapiens
  misc_feature (732)..(732): n is a, c, g, or t
  misc_feature (777)..(777): n is a, c, g, or t
agtcctggcctctgatgggacccagcgccccgcagtcccgacacagattcctggatctcagccccatagcagctatgatcccgctgctgctggcagcgctgctgtgcgtccccgccggggccctgacctgctacggggactccgggcagcctgtagactggttcgtggtctacaagctgccagctcttagagggtccggggaggcggcgcagagagggctgcagtacaagtatctggacgagagctccggaggctggcgggacggcagggcactcatcaacagcccggagggggccgtgggccgaagcctgcagccgctgtaccggagcaacaccagccagctcgccttcctgctctacaatgaccaaccgcctcaacccagcaaggctcaggactcttccatgcgtgggcacacgaagggtgtcctgctccttgaccacgatgggggcttctggctggtccacagtgtacctaacttccctccaccggcctcctctgctgcatacagctggcctcatagcgcctgtacctacgggcagaccctgctctgtgtgtcttttcccttcgctcagttctcgaagatgggcaagcagctgacctacacctacccctgggtctataactaccagctggaagggatctttgcccaggaattccccgacttggagaatgtggtcaagggccaccacgttagccaagaaccctggaacagcagcatcacactcacatccncagggccggggctgttttccagagctttgccaagttcagcaaatnttggagatggtttcatctcacctttgtcttgctgcccgcaatctctggcttggtcagctcaggaaacccctggtgccagagatccggatgaagatgagggactagttcggcctgttgcggtatctcagcggggtgagacgcctcccgtgggggaaggcagagtggaaaaaccgacgccttccaccagcaactctgtgaataagggggtgttgggggttatgttggctagccaaggagtggag

SEQ ID NO: 84490 - DNA, 629 bp, Homo Sapiens
  misc_feature (450)..(450): n is a, c, g, or t
ggcacgagggcgcggcgctcctaggagcaggcgttcccgactccggcaagagggtgggcgcctggactctcgccctcagagggaggcccgtcccacggtctgtggctacggatcccaggaccctcttcgcgggcgattcgcgtagcctcagaactggaaaagcccaaagatccagcaataaaggagcaaggcaaataaagctgttaccctgcaggatcagtcagcatgagccagattgtgctgcagtaacaaagatctccaacagcgcagcggctacagttggcactgcttatttcttgcttgcacctgtgggccaccgtggctggggcctgtcagacctgtgctgacgacagcctacctggacatatttctccatgctcactgaggcaggggaaaggccacagcaggccacaagtaatgtgtgtcaccccacttccattactgttgtgngccaaaggaagccacagagccacacctgagttccataggacggcagcagctgatcatcctatgggctggggtgctcacgtatggagaaagtacaagcagccacccagcgtggggctggttggtgctgctgaggatgggaggatgggaggggcctgcatccatcccagggcaacatacct

SEQ ID NO: 84491 - DNA, 827 bp, Homo Sapiens
  misc_feature (749)..(749): n is a, c, g, or t
gggaagagggtggcgcctggactctcgccctcagagggaggcccgtcccacggtctgtggctacggatcccaggaccctcttcgcgggcgattcgcgtagcctcagattgcctcggatgatggcctgcgactgacagtctctcagctcttctcagctctcctgaggctgcagctgtcagctccctgatcctcagcacttgcctggaccagtgcgggtctgccacgccctgttcagccatccctgtcctgttgtgtcgtgcaagccacatctgtccacacccccaccacccaccagtgctggctctcctctcttctcccctgtgctcccagcatgcctcgtggccggggccgtaagaagggccctcgcattcccatctgggcagccgccaattatgccaacgcacatccatggcagcagatggacaaggcgtctcctggggtggcatacaccccccttgtggatccctggattgagcggccctgctgtggggacaccgtgtgtgtgcgaacgaccatggagcagaagagcacagctagtggcacttgtggcggtaaacctgcagaaaggggtcccctagctgggcacatgccccagcgcccgaccccacagggtggactttctgctgggtaccacgctcagacccagggaccttttgatggctccccgtgggctactggacccgcttcgtgggccaactgggcgaatgacatgtgccttccctttggagcactatccgggacaacctgangccggggtctgcggagaatcctcaggcggcctaacaggcccgagccccagggcctggggcagcccccctaacttcggg

SEQ ID NO: 84492 - DNA, 948 bp, Homo Sapiens
  misc_feature (512)..(520): n is a, c, g, or t
gcatgtgtgtgttttcttcagttgaattacatcactctataaacctagagtaagaaaatgcaccttaactaagcaccaaagcctctcggacaaatgggatctagggaatggttctatgagttttccaggcagctaactgggagctaataagtcctgagggtcaaagagggtcctttaaaactctgaaggctcaaagaaaaggaagccaaataagaacatttgtattacatcaaatggctaggatgtaacaagctactccttattcagcaatttcaaagtccattaattcctcacagaagaagaaacacttcgttattatcacttgcaacgatttgcttatgtgaacatggcattctcttgttcaaaaggtcaaagactcgtgcttaagggaggaacaactggagtgaaataacaactctaccatgaattcagatatcactggctaaaaagtctagttacacaagaacatgggaaagaaaaagaatccaagacatcagtataataatgattcnnnnnnnnnccctgccatatttccatgttataataaaacaaaatcataaaaactgcaatatttacagatacatcaatcttacaacatataaaaactttaacaataagaaaaattaagagtagggaaagcagataattttaaggtaatcattaatacattaaaaaatctatttggagttaactgtttacactaacaccactttacacataatagaaatatgaatattttcattgtttttgttttcagtagcaagatgcagaagaaacaaataactgtctaacattaacttattgtaaggagttgtattactgcaaattactaggtgtaaagttatggtataagcctactcaaaaaatgggttaatataattcaccatctacttaaaatcccggccgtaatggccgaattcccgggcatatgtccggtaccgtcgactg

SEQ ID NO: 84493 - DNA, 893 bp, Homo Sapiens
  misc_feature (389)..(389): n is a, c, g, or t
  misc_feature (766)..(766): n is a, c, g, or t
  misc_feature (862)..(863): n is a, c, g, or t
gagaattcagtggccaaaggagtatttttggagtgccttgagccatatattttaagtgataaattggtgggaatcacaccccaagtaatgaaagacttgattgttcatttccaagataaaaaattaatggaaaatgtggaagcgctcattgtacatatggatatcaccagcctagatattcagcaggtagttctcatgtgttgggaaaatcgtttatatgatgctatgatctatgtctacaacagaggcatgaatgaatttattagtccaatggagaaacttttcagagtcattgctcctcctctgaatgcaggaaaaacactaacagatgaacaagttgttatgggcaataagctccttgtatatattagctgttgtctagcaggtcngtgcctatccccttggtgacatccctgaagatctggttcccttggttaaaaaccaggtttttgaatttctaattcgcctgcattcagcagaggcttctcctgaggaagaaatctatccttacattcggactttgctacattttgacacaagagaatttctcaatgtattggcactgacttttgaagattttaaaaatgacaagcaagctgtggaatatcaacagcgaattgtggatattttgttgaaagttatggtggagaattcagactttaccccctcacaagtaggatgtctctttaccttccttgctcggcagcttgcaaagcctgacaacacccttgtttgtaaacagaacacttttttgatcaaggccttngaattccctttgtagtccctgacgatgactccccgacactcctgaaagacagcagggtcccttttaaaaattgctggcaaggctgggaaggcatannttccaaattttgaaaaaggagtcgaactcc

SEQ ID NO: 84494 - DNA, 787 bp, Homo Sapiens
  misc_feature (532)..(532): n is a, c, g, or t
  misc_feature (573)..(573): n is a, c, g, or t
  misc_feature (578)..(579): n is a, c, g, or t
  misc_feature (668)..(668): n is a, c, g, or t
  misc_feature (752)..(752): n is a, c, g, or t
cttgtttgtaagagaaagcaaatctgtacaaaaatactctggttgcaagaaaagctagggcacactgttcaactaagagtagtttagctgttggaaaaataagagcatttaattttatctaaaaatatgtataaatcccctcaaaatggtaatgaatcatacacagtacatactaaaaatatttaaaatagagaatattcctcacagaggacttttttctttaattactgctaaaaaaataattacaaagtccaaacaggcagagagatttagcacactgatcacacgattctccatcatcctccacgcttgctctgaagagggtttaaaaagtccagtttctcgttgatttcgctgctccatttagccaaggttggcctggccactgattggccacaagtgggtaatgcgcttggataggtcatgtttgtgtcttggaaatttgggtacgagttgcctttagcttaaatgtctttaaggaagaagaagaagaagaaaaaacaaaacaccatatataaacagaaaaacacanatgtccaaagggaattctggttggtcctctctttcttcggntattnntaggatcatctcggccatcttcgcccttcgtgggaggcctcctcaaggtcgagtgagctgtgtgtagactgcttgttcccagtgctggnggctgtgggtctgcggtatggagggtaccccataggtgtccgcgatgggggtgtacatgggggcgctgagcggggttcatgtangtgaaggtgagattaaagccagtgccctgccctgc

SEQ ID NO: 84495 - DNA, 750 bp, Homo Sapiens
cagggaatgtatcgagtgttgatcagcctcttttcctgatatcctcttttcaggtcttcgtagaaaagaatagtacacgtggactctgttcccttttcccaccaagattgtacatgtttataccaggaaccataaggaacctgtcctttgcatgaatttctccagcaaactctggaaaggatccaggatttggatgaccagccaccattagaaagaaataataaaaggaaacagccacatcctttgcattccggcaaagatagattatcttacaatccttttcccaaaatgaggcaggaagaagttcaggtggcaaatgagtcttcacaattctaggagaattcatctcatctaattgttttactccattcatgaggttttcttttctgcattccaggaaaggtattcgattaaaaattacatcttctttgcacttttccacatcaccctctttatagatcatatacacaatttcactaacccaggttgtaccagatttagggtaggtggcaatgacaagatcatctggtcttgcctggaacgcttccacattatcccaatatttgacaaaatctttatacattagaatcccatggacttcttcaaacttttcataatagtcaagttcagaattcattgtggtacactgtttagttgatcctgtgaaagaaattgatctagtttatatctcttcaaatactaaggcagatcttaagctgcaaaaaaagatgagaaccagttacttcccag

SEQ ID NO: 84496 - DNA, 1584 bp, Homo Sapiens
  misc_feature (86)..(94): n is a, c, g, or t
aatagggtgagcgcgggcgtaatcggcacgaggagattaggaaaaacctctgccgagtgagcctctggttgggaatatgtatgagnnnnnnnnnctggcaaggcgttagtcaagcaaagctgaaggcagaggaaatttgatatctggctggagtctagaggatttaatgcaaataagatactctgagggcagcgtggcaaaaaaagactacaattcccggtggtcacagcgtttgagaagcgatgctttctgagacttgtagtaactaggagctgtgtttgaactatccaggctcaggacagcctcttgaaaaaaaattttttattaataaagcggatttgagtgggatctttttcctaatcgattacgggcccacacgtatgggaagaattctaacaatgattaaagggacatgctacctttacgactatccttttctaatcgatgactcctaaatctaggagtaggtagtcgatgtttgtggtctgggcgtctgtagaagggcaacctcgtgctttctgcagaggagaccggagggcagaaggcagagtccaggcttagactgcagttcctcgcttacctgtgcagtctaatttttgagctgcctctttgtaggtcttaaaaggcaggagcttcgtgttgtggggtcttgctaacccgtacgtttccgtgggcaagtcgtgtgtactcctcgccatggctcagctccaaacacgcttctacactgataacaagaaatatgccgtagatgatgttcccttctcaatccctgctgcctctgaaattgccgaccttagtaacatcatcaataaactactaaaggacaaaaatgagttccacaaacatgtggagtttgatttccttattaagggccagtttctgcgaatgcccttggacaaacacatggaaatggagaacatctcatcagaagaagttgtggaaatagaatacgtggagaagtatactgcaccccagccagagcaatgcatgttccatgatgactggatcagttcaattaaaggggcagaggaatggatcttgactggttcttatgataagacttctcggatctggtccttggaaggaaagtcaataatgacaattgtgggacatacggatgttgtaaaagatgtggcctgggtgaaaaaagatagtttgtcctgcttattattgagtgcttctatggatcagactattctcttatgggagtggaatgtagagagaaacaaagtgaaagccctacactgctgtagaggtcatgctggaagtgtagattctatagctgttgatggctcacgaactaaattttgcagtggctcctgggataagatgctaaagatctggtctacagtccctacagatgaagaagatgaaatggaggagtccacaaatcgaccaagaaagaaacagaagaccgaacagttgggactaacaaggactcccatagtgaccctctctggccacatggaggcagtttcctcagttctgtggtcagatgctgaagaaatctgcagtgcatcttgggaccataccattaaaagtgtgggaatgtttaatcctggcaatctttaagtcaactttgaa

SEQ ID NO: 84497 - DNA, 633 bp, Homo Sapiens
cattctgaagtatgtcctcaaaaactgaccaatctgtttgctaagaagttcatcaaaggtgccactccaggctcttgcaacacttgatgtacctatcacatacgataaaatgagattccagccagtgatgaaggcccacagctctccgacagtcacgtaggtgtacaaatatgcagaccccgtcttgggaacacgggccccaaattcggcatagcagaggccagccatcactgaagccagggcagcaatgaggaaggacaccacgatgctggggcccgagtctgccttggccacctccccagcgaggacataaaccccggccccaagggtgcttccaacgcccagggcaatgaggtccatggtggataagcagcggcataatttggtgtcttctagactgtccagggtcacgatttttctccggatcagacatcgggcaaaggtcagcgcggctctgcaaggaatcattctgacgtctgacgaaggcgacctgtaagggctcactgctttcctgctggtcttcagagagtctcctgtggggctgggttggggtcgcgccaagaaggcggcggtgggctgccggctgcagcgagtcgggggcccgcggctgggggacgctggagcagcggccgc

SEQ ID NO: 84498 - DNA, 407 bp, Homo Sapiens
aggcaagccgagccgtccgtgttccatcctccacgcacccccacctatcgttggttcgcaaagtgcaaagctttcttgtgcatgacgccctgctctggggagcgtctggcgcgatctctgcctgcttactcgggaaatttgcttttgccaaacccgctttttcggggatcccgcgcccccctcctcacttgcgctgctctcggagccccagccggctccgcccgcttcggcggtttggatatttattgacctcgtcctccgactcgctgacaggctacaggacccccaacaaccccaatccacgttttggatgcactgagaccccgacattcctcggtatttattgtctgtccccacctaggacccccacccccgaccctcgcgaataaaaggccctccatctgccc

SEQ ID NO: 84499 - DNA, 919 bp, Homo Sapiens
  misc_feature (29)..(29): n is a, c, g, or t
  misc_feature (441)..(450): n is a, c, g, or t
  misc_feature (836)..(859): n is a, c, g, or t
aaggcatgaattgctttagttccttaaancggagatgcagccaaaacagtttctttgggtcaactttcatattcccaagccccccaaggcaccagagtttgaggccaaccactgaagcaaaatacccttgattgcttgtgagaccataagaatgcagggccaacccgactggatttcccttctaataacctcagggaaccatatgtgctacccacaccacctcattcttacccaggggtgcgctgcgtcctcatggtactgtaggcagctgaagaaccgccgttcccttgaaagggaacacctggcattctgtggtgtttcgtgctgtcttaaataatggtgcatttattatgttcaagttatttcaggattgccatatgtgcaaacaaatcatgcaatgcagccaaggaatatatgttgttggtggtgttttaaacccannnnnnnnnnagaattttcattaatactgtagttatacaccatatgcctcattttatcatagcctattgtgtatgaaagatgtttgtacaatgaattgatgtttagtttgctttagtcatttaaaaagatattgtaccaggatgtgctattaagagcacgtatccattattcttctcaacccaagaacctgtttcctggaccagtgaccaaacctcatatgtgaaatggccaaagcacatgcaggctcctggttgttcctctcaaacctgtgctgaccaaagattagtaaccagttatacccagtattttgaggttttattgtttttttaataactaaaaagaaaaaaggaacagtgtaaatttgtaatcaagagtttgtgaggaaaaacttatgnnnnnnnnnnnnnnnnnnnnnnnnaggtctgtgtatcaaatatgacacttttcttgcaataaagcttattttggggtaaaaaaa

SEQ ID NO: 84500 - DNA, 646 bp, Homo Sapiens
  misc_feature (66)..(66): n is a, c, g, or t
  misc_feature (71)..(71): n is a, c, g, or t
tctgtctcgcaagttagtcactgatcaggcagaagtgtttggctcctgcttcctcacatttgtttngcacncacacaatggtcttgatatgtttagagggtatttgcaatgggatgtggctggcccaactgtcagctaaccttcatgtttctttcatagcccccaggaagaaaattgaagagttcaaagaattgaaaagttaagccaattcatttaaaataatctttgactttctcattatcaatatatgtgtattttctgcaaggttacaaaaacaactggaacatatgttaaaataatcttcagtgtcatctgcagcaactaattctagagaactatcttattcaatttcatttcttacttatatggaactaaaccttaatctgcttttcaggtatgaaatatattcatgattctgtctcaaaatatgaaatcaaaagttagcattataactcccagctaactgtcatattaattcatctggatgaaccttgtggtactgaactttgacaatgctcagggtgtcaaagcaaacacctgccccaccccacgcctaccccaaaaacaaacgagaggcttttataggttgcaagtcctggtctggtttatttataaagcaataaatattagaagcacaaacaaattg

SEQ ID NO: 84501 - DNA, 985 bp, Homo Sapiens
  misc_feature (668)..(682): n is a, c, g, or t
gactatgaaggcagtggctccactgatgggtccttgagctcccttaattcctcaagtagtggtggtgagcagtactatgattacatgatcgactgggggccacggttcaagaaacttgctgacatgtatggtggaggtgatgactgaacttcagggtgaacttggtttttggacaagtacaaacaatttcaactgatattcccaaaaagcattcagaagctaggctttaactttgtagtctactagcacagtgcttgctggaggctttggcataggctgcaaaccaatttgggctcagagggaatatcagtgatccatactgtttggaaaaacactgagctcagttacacttgaattttacagtacagaagcactgggattttatgtgcctttttgtacctttttcagattggaattagttttctgtttaaggctttaatggtactgatttctgaaacgataagtaaaagacaaaatattttgtggtgggagcagtaagttaaaccatgatatgcttcaacacgcttttgttacattgcatttgcttttattaaaatacaaaattaaaccaaccaaaaaactcatggagcgattttattatcttgggggatgagaccatgagattggaaaatggaccttaattctagttttagaccttacctttggcnnnnnnnnnnnnnnncccctaaaattcttaaaacttacctcccctgggttgcaaataaaagggagttttcctaatcccccaatttggaacgaaaaattgcaatttttttcataaaacctaccaatggtttcaaccccattttcgggacctaaaccccactgttaccacctttttcaaatctccggagattttttcccccatttccctcggcacaaaataagcattgcgggacccttcaagggtctctattcggcccccacttctcataggcacaaattggccaaacaacttcttcaaaacatggcgggacgcgcttta

SEQ ID NO: 84502 - DNA, 466 bp, Homo Sapiens
tccacctcttcctcggccccccctcgcttccctcctcccacttcccgagctccggcgtgtcccggccacgctcgacgctgctgcaggaacaaaggaagaccccgcggcggcggcggcgccacctccgcctgctgctccgacccgctcccggcccgcggcggcggcaccagggcgcccggctcagccttcccggaggcctcggcccggcctcatcgtgccggcttcgcgcgcgaacccggctttcgcatttgggaccctgcagggccctgaaaaggagcctttaaaagtcaattctactccatttggcaaagagggaactgaaatctggaaagtaaggacttgcccaaggtcactgacttagtggcagactagagacttgaactcaggtctccattcccagcagaaaaatatggctcaggagactaaccagaccccgggcccatgcctgtgtagcacaggatgtggg

SEQ ID NO: 84503 - DNA, 940 bp, Homo Sapiens
cagtcgacggtaccggacatatgcccgggaattcggccattacggccggggttggtcttacagggtttgactgccgatgtggaaatttgttttgtggacttcaccgttactctgacaagcacaactgtccgtatgattacaaagcagaagctgcagcaaaaatcagaaaagagaatccagttgttgtggctgaaaaaattcagagaatataaattacttcttgtgaagagactgaaactttgtttttattttaatatatcgtaggaaaacattaaagagcagatgcatggccatttttctttgatgttctccagagttttacattacacttgtctgtcttataattgatattttaggatgtttgggtgtttgttacaggcagaatcggatagatacagccctacaaatgtatatgccctcccctgaaaaaaattggatgaaaatctgcacagcaaagtgaaacacacagataactaggaacaaaatgtagttcccatgtgccaaacaaaatacaatgaacatctctgcatgtttgcagcatatctgccttttgggcaatgtaatcaaggtataatctttggctagtgtttatgtgcctgtatctcctctaaacatggtacaccagacaaaggactggcagtctacttcataacataggttaaaacttcaccctctttaatttcacaacatatactatggaggcaggcacgaaattgcctcataaagaggatcagaccttctttaccggtgagaccaagtattacgggggccatatctaagcctggctaacattgggtcatcttaaaagcctggtcacattcagacatccggtagaaagggtacaacatcgcaccacggttacttacgtacaacattcaacgcaaccaaaggggtctcgcacaaacccttcgcagcttattgactgggctgcccagcacac

SEQ ID NO: 84504 - DNA, 1157 bp, Homo Sapiens
  misc_feature (276)..(320): n is a, c, g, or t
catagcctaggtacgaggcctgggtgtttaattcggcacgagggggacgcggagctgtgtgcatctcctacgcgggctcgctcgctcccgggagccgcgcagcttccccggcggtggcaggagcggcgaagagcgccatcagcgggcccttacggccccaggcctcgcggcgcgcggtccgctcgccctcctcgtccgcccaacctgcggcctgtggaggcgtgaggcgacgacaggcgagcgcctcgagcagcgttagccgctgcggccgccggnnnnnnnnnnnnnnnnnnnnnnnnnnnnnnnnnnnnnnnnnnnnncacttcccgagctccggcgtgtcccggccacgctcgacgctgctgcaggaacaaaggaagaccccgcggctggcggcggcgccacctccgcctgctgctccgacccgctcccggcccgcggcggcggcaccagggcgcccggctcagccttcccggaggcctcggcccggcctcatcgtgccggcttcgcgcgcgaacccggctttcgcatttgggaccctgcagggccctgaaaaggagcctttaaaagtcaattctactccatttggcaaagagggaactgaaatctggaaagtaaggacttgcccaaggtcactgacttagtggcagactagagacttgaactcaggtctccattcccagcagaaaaatatggctcaggagactaaccagaccccggggcccatgctgtgtagcacaggatgtggcttttatggaaatcctaggacaaatggaatgtgttcagtttgctacaaagaacatcttcagaggcagcaaacatagtggcagaatgagcccaatggggacagctagtggttccaacagtcctacctcagattctgcatctgtacacgagcagcagacactagcttaaacaactgtgaaggtgctgctggcagccacatctgacaaactcacacgcacatgtgcctgtggctgccttgcctgtaactcagcaaaatgacagacaatgacgcatttcaagagaggacaaaataactaccccgaaaacagaggtgtcagagccagttgtcactcagcccagtccatcagtttctcagcccagtacttctcagagtgaagaaaaagctcctgaattgcccaaaccaacgacaa

SEQ ID NO: 84505 - DNA, 1868 bp, Homo Sapiens
  misc_feature (1555)..(1555): n is a, c, g, or t
tgggtggcgaattcggcacgagggggacgcggagctgtgtgcatctcctacgcgggctcgctcgctcccgggagccgcgcagcttccccggcggtggcaggagcggcgaagagcgccatcagcgggcccttacggccccaggcctcgcggcgcgcggtccgctcgccctcttcgtccgcccaacctgcggcctgtggaggcgtgaggcgacgacaggcgagcgcctcgagcagcgttagccgctgcggccgccggtcctctttttcctcctcctcggccccccctcgcttccctcctcccacttcccgagctccggcgtgtcccggccacgctcgacgctgctgcaggaacaaaggaagaccccgcggcggcggcggcgccacctccgcctgctgctccgacccgctcccggcccgcggcggcggcaccagggcgcccggctcagccttcccggaggcctcggcccggcctcatcgtgccggcttcgcgcgcgaacccggctttcgcatttgggaccctgcaggcagaaaaatatggctcaggagactaaccagaccccggggcccatgctgtgtagcacaggatgtggcttttatggaaatcctaggacaaatggaatgtgttcagtttgctacaaagaacatcttcagaggcagcaaaatagtggcagaatgagcccaatggggacagctagtggttccaacagtcctacctcagattctgcatctgtacagagagcagacactagcttaaacaactgtgaaggtgctgctggcagcacatctgaaaaatcaagaaatgtgcctgtggctgccttgcctgtaactcagcaaatgacagaaatgagcatttcaagagaggacaaaataactaccccgaaaacagaggtgtcagagccagttgtcactcagcccagtccatcagtttctcagcccagtacttctcagagtgaagaaaaagctcctgaattgcccaaaccaaagaaaaacagatgtttcatgtgcagaaagaaagttggtcttacagggtttgactgccgatgtggaaatttgttttgtggacttcaccgttactctgacaagcacaactgtccgtatgattacaaagcagaagctgcagcaaaaatcagaaaagagaatccagttgttgtggctgaaaaaattcagagaatataaattacttcttgtgaagagactgaaactttgtttttattttaatatatcgtaggaaaacattaaagagcagatgcatggccatttttctttgatgttctccagagttttacattacacttgtctgtcttataattgatattttaggatgtttgggtgtttgttacaggcagaattggatagatacagccctacaaatgtatatgccctcccctgaaaaaaattggatgaaaatctgcacagcaaagtgaaacacacagataatagggaacaaatgtagttcccatgtgccaaacaaaataaatgaaatctctgcatgtttgcagcatatctgcctttttgggaatggtatcaagctataatctttgggctagtgttatgtngcctgtatttttttaaaatggtacaccagaaaaggactggcagtctacttctaccatagttaaaactcaccctcctttattttcacacatattctttggaagcagggagaaatgctcataaaaaggatcagacctttctttcccgtgaaaccaagtatttgggcgcccatataataaccctgggttaaattgggccattctaaagctggtccaatttagaacactcctggggaaaaggtaaaccatccgaaaagtgggtttttaaggataaaaaccattcaagccccaaccaaaaggggtttccttggagaaa

SEQ ID NO: 84506 - DNA, 260 bp, Homo Sapiens
gtgggttatggaattcacaggatcacaaacactttttaaaaaattagccggaaacgtggcctaattcaaagctttcatgttacacacagaatacttagacctacagaggtcgaccaatttgcttaaggttaggagtacagaaggactgggatgtaaagacattggacaggtcctaattacatctaatcttcatgtgatgtggttataattaattgagttgttaatgaagtaagcaagaaagacctatctgatttatctaa

SEQ ID NO: 84507 - DNA, 590 bp, Homo Sapiens
  misc_feature (427)..(427): n is a, c, g, or t
cgaacaacaaaatgcatcagagagccaaaacattcagtattgcattttcacataggtgatgaaatgactttggaactttatctgtgttatagttatgagttgctttgggagacttggagctctctgtagctattgttcataacactttgctccataaccctgatgtccgcagtatctaagtatctcagccttcatccattaactctactagggagcccacagccaccatttccactaggaggtatcaatatttgtggtatgacataaggctccctttgaataacaagacttttgagcaatctgaattaaaatacctcaaaaaagtaattaccgctcatttgctaaatgcaaaaaataatcccctttgataccaaggtgccccaatatgccctaactagcctagcccagctgggagataatttaccanggaatggtttcaaagcccctaacccttgaaattttggaaaccggtgggccttctatggtgcaaaagaaacttatgctttaggcctctttttcaatttaaaaacctttactaattcccaaggaaaggttggttaaaaattttatttatttaacccaaaaggcct

SEQ ID NO: 84508 - DNA, 341 bp, Homo Sapiens
  misc_feature (55)..(65): n is a, c, g, or t
  misc_feature (171)..(171): n is a, c, g, or t
  misc_feature (228)..(237): n is a, c, g, or t
  misc_feature (309)..(309): n is a, c, g, or t
  misc_feature (325)..(325): n is a, c, g, or t
aaacaaaagaaaaagttgatgtagtatataccttcaactgtgttttgagttgacnnnnnnnnnnnctttaagctttgggtaaaaatgtatgaggagggagagggcccaatataaatatttacatcttcttacctttttggaaatggaagaagataaatctttgagtttttnctgcctatattaatcaggaattgccctttgaaaaaagtgctaaataaatattttgannnnnnnnnncaagggaagttaggtgaaaagaaggaaaaacatcacaggaaaagacctgttaaacattcctgtttgttgtcngagaggtgaggaaccnaagggaggcactaaag

SEQ ID NO: 84509 - DNA, 831 bp, Homo Sapiens
ggagcacacacacatctgcacctcaaccacagactacacttgctgaactggctcctggggccatgaggctgtcactgccactgctgctgctgctgctgggagcctgggccatcccagggggcctcggggacagggcgccactcacagccacagccccacaactggatgatgaggagatgtactcagcccacatgcccgctcacctgcgctgtgatgcctgcagagctgtggcttaccagatgtggcaaaatctggcaaaggcagagaccaaacttcatacctcaaactctggggggcggcgggagctgagcgagttggtctacacggatgtcctggaccggagctgctcccggaactggcaggactacggagttcgagaagtggaccaagtgaaacgtctcacaggcccaggacttagcgaggggccagagccaagcatcagcgtgatggtcacagggggcccctggcctaccaggctctccaggacatgtttgcactacttgggggagtttggagaagaccagatctatgaagcccaccaacaaggccgaggggctctggaggcattgctatgtgggggaccccagggggcctgctcagagaaggtgtcagccacaagagaagagctctagtcctggactctaccctcctctgaaagaagctggggcttgctctgacggtctccactcccgtctgcaggcagccaggagggcaggaagcccttgctctgtgctgccatcctgcctccctcctccagcctcagggcactcgggcctgggtgggagtcaacgccttcccctctggactcaaataaaacccagtgacctcaaa

SEQ ID NO: 84510 - DNA, 485 bp, Homo Sapiens
  misc_feature (32)..(32): n is a, c, g, or t
  misc_feature (41)..(73): n is a, c, g, or t
  misc_feature (130)..(130): n is a, c, g, or t
  misc_feature (136)..(136): n is a, c, g, or t
  misc_feature (141)..(141): n is a, c, g, or t
  misc_feature (146)..(146): n is a, c, g, or t
  misc_feature (151)..(151): n is a, c, g, or t
  misc_feature (153)..(153): n is a, c, g, or t
  misc_feature (155)..(155): n is a, c, g, or t
  misc_feature (159)..(159): n is a, c, g, or t
  misc_feature (166)..(166): n is a, c, g, or t
  misc_feature (169)..(169): n is a, c, g, or t
  misc_feature (172)..(172): n is a, c, g, or t
  misc_feature (178)..(178): n is a, c, g, or t
tctccatttggattctatagtatctcctaagnatttggttnnnnnnnnnnnnnnnnnnnnnnnnnnnnnnnnnggggaatccgttactcctttcattaacaactgtccacaaggagaagagaattaaagnccactnatatngggtnggccntncngggnttaaaanccnggngggctntgaatacattttaatatgttgaatctagagtgataaaccaatggttaatatactacaaaactttacaaacaaaatctcatctgttgcagaacttcaaaagtagtggaattgatttcttctcccttttaattttttcttccacaaaagtcctaaaactgagtagtcattggcatgcctgcactttcacaaatgtatcctcaaaacatgatggtttttctcaaaatgtatctgcaaaacatgatggtttttgaaaatggaagtaatttcaaatgaggtcaaggatgtcatgctccctcaaaacatattt

SEQ ID NO: 84511 - DNA, 315 bp, Homo Sapiens
tcctgaaaaaaggcaaaaaagactttacattgcatcatacagcagatatcctaaatcagtcaaactatcagaggaaactgttggcgtacagctgtacaaacaatttaccctaataaaagttccccagtcagaaaatgtgtttcacacaaaacatttttcccttcttgcatttcactaccttacacattatgtgaaaaatcattaaaaacacctactacatatttaaaaaagccaaaatttcagcaacttttattgactaccttttaaaagccctatgctgctgttttacaaggcataatagaccagctcatttgg

SEQ ID NO: 84512 - DNA, 793 bp, Homo Sapiens
tgcttccggcttcgcacataggagtgcatgtccccaaagtcattctcaaaaaagacatagcccttggtttccccaaggatcacttccacaatggccagtaatgttgctgtgcgatggcagctggatgtaaggcctgattttgtcctggtagtgtttaatggaaaacaccgtgcagcgcagctcgcgtccagtgtggatgcacagcgccaggcacacatgctcgcgctcggctaggggcagcagcaggtagtcggcgatgcggctgggcaccggcgcgctcccggagcctccgccggcccccggagcggcaggcggggactgcgggctgcagggcgagccgggggggctgaggtagtccggggggctggagcactcggagaggcgcgggcacttggccgccacagccgccgcgtcgtcggcgttccagcaggcgtttggccgggacgcctcgggtggctgggaagagcagggccgggccgcggggctgcgaggcgccgctcatggcagagcgcaccggaccgacccgcatcccgtcctgggccggggtggccccggctttttaagtcccgggatccgcgcgggaagacgctgcgggtttggtgccggctccgagacttcttccagccggcgggatggagtttgcagactggtcttggctcggcccccacgaggggcaaagcaggagccactccccggcgctcgcgttgcacgcggggaccacgctggctgtgcgtaagggggacggagcccggctcgagtccccggaccaaagcagacaagggctcccggagcc

SEQ ID NO: 84513 - DNA, 590 bp, Homo Sapiens
gaagatgggaacatgtacaggagacagttctttcaaatcatctgtgtgaaagcgggtaaccctttgggtatttgcaagtctagagctttaggtgttactggttttaaaggtgtcaggggcagctggggctgcgtaaggtaaggtggcagaggaaaggagtaggtgaatggaacttactcacatcctaagcccacaggttgagaacttctgttcagctccctcaggggtttgcgaggctgcctttgcttttctagccccctaaacgggccccccttctctctacaggtgtttcccattaaacactaccaggacaaaatcaggccttacatccagctgccatcgcacagcaacattactggcattgtggaagtgatccttggggaaaccaaggcctatgtcttctttgagaaggactttggggacatgcactcctatgtgcgaagccggaagaggctgcgggaagaggaagccgcccggctcttcaagcagattgtctccgccgtcgcccactgccaccagtcagccatcgtgctgggggacctgaagcttaggaagttcgtcttctccacggaggagaggtgagcggccgc

SEQ ID NO: 84514 - DNA, 415 bp, Homo Sapiens
tttagggagagagggaaacagtcctgtatttcttctgatgccctttgggaagccgacgaccactgggcatttctcactgttactcctgttcaagagagggcttctcagtctgcactgaaaaatgcaaattaaactggatctttatgtcaatgtgtacatagtacaagcttttttactggaattgaggtttaaaaccacacactgcccttttggtggtgtgcctgttgggccaaaaattgggtgataatgtagtgtcactttctcagctcaacgcagtttctactttttcttatgggacaatttttcataaaacctttttgcaccaaaacccaggggtgttttttgcaatatccttgttatcctcgtagtgtgccaagtcagaggctttctcctgcccttttcctgctcatgttgg

SEQ ID NO: 84515 - DNA, 355 bp, Homo Sapiens
  misc_feature (68)..(68): n is a, c, g, or t
  misc_feature (73)..(73): n is a, c, g, or t
  misc_feature (170)..(170): n is a, c, g, or t
  misc_feature (223)..(223): n is a, c, g, or t
  misc_feature (235)..(235): n is a, c, g, or t
  misc_feature (277)..(277): n is a, c, g, or t
tgatggattcatttaatcttcacaagaaccacttgagatgccagaaggtgcagtccatcttgaggatnatgangaaactgcaagagtgctgtcgggtcctctgaggtgaaaccccaaaggaaagcgggatcgggactgggggagggggattcccaagtccctgacacccngcgccgtctcggcctgggcttggtgacctcgtcgagtcccgtctgccgggacntaggccgcgccncaggccgggcacagcggtacccggtccggcgcgtgcgacgcngtgggtcgacgatatcccgggaattccggaccgtaccagcctgcttttttgaaacactgttcatagttcactatgcgt

SEQ ID NO: 84516 - DNA, 596 bp, Homo Sapiens
ctactacattaacaggactcaaattctggaggaacagaaagcagacctatatgtgcaatgctagtatctgtaccattaccataggaaattgctcaacctctttttctgcccattagttttatcatcagttaatacagcaaatcataaaatatgcatttagcatataattctagaattcccctccatttcattattaattttgttgttttattttgttttccacagctattccagctgtggtgaattcaggttgtgagtgaccaaaaaccctatgtgatacagttttgctttgctcttatgtttgtttgtgcagcactccaatctagatgcagcattgttactaatttcagacaattgttctggccttttaaaaagcaggtccttgtaattttagtaacacagcatcagagatgttaaaacatacacaacataattcaacaaggccacaatgagtgccattttcttcatatcttgttcattaacataatgaagtctccatctgaaggggaaaggacaagaaaggatggggtacaggggaattttagcagttatctttctcccaagggctcacctaaaaatcccattaagagaattat

SEQ ID NO: 84517 - DNA, 1299 bp, Homo Sapiens
tacggctaggtacgaggctgggtgttgaatcggcacgaggcctcgtgccgagcgacccgggcaagcgaccgggcgcggcgcggggaggctgaagggacgctcgggtaggcaagcgtttgcctcagcatggaggacggggcctcggcagccacccccacagcactgccttactacgtggccttctcccagctgctgggcctgaccttggtggccatgaccggcgcgtggatcgggctgtaccgaggcggcattgcctgggagagcgacctgcagttcaacgcgcaccccctctgcatggtcataggcctgatcttcctgcagggaaatgccctgctggtttaccgtgtcttcaggaacgaagctaaacgcaccaccaaggtcctgcacgggctgctgcacatctttgcgctcgtcatcgccctggttggcttggtggcggtgttcgactaccacaggaagaagggctacgctgacctgtacagcctacacagctggttgcgggatccttgtctttgtcctgtactttgtgcagtggctggtgggcttcagcttcttcctgttccccggagcttcattctccctgcggagccgctaccgcccacagcacatcttctttggtgctaccatcttcctcctttccgtgggcaccgccctgctgggcctgaaggaggcactgctgttcaacctcgggggcaagtatagcgcatttgagcccgagggtgtcctggccaacgtgctgggcctgctgctggcctgcttcggtggggcggtgctctacatcttgacccgggccgactggaagcggccttcccaggcggaagagcaggccctctccatggacttcaagacgctgacggagggagatagccccggctcccagtgatgcgcccggccggccctgggggttcgcggggtgtcttcttgcctgcccctgctgaggcgtcttcaggactgcaggctccggagagtggctctggcagcaggcgggcgcgtgggtgcagctgcatctgtttgagtgctgctttctggggtcaggtctccgcctcctctgcttctcctttctccgctgctatagaccagtccattgtgtgtggctcccgtgtctctgttgcccccttcagtgcagaaggctttgggtagggacttcgggttgttccggtcctggtcgcagagcacagatctttaaagaacccaagaagaggaggccccaccctcctggcagcagatgcctggggcaaagccaggggaaaaattggggggggcctcaggaaccgggcctggaaagggccacaatggctt

SEQ ID NO: 84518 - DNA, 1097 bp, Homo Sapiens
tcaaccttaacggctaggtacgaggcctgggtgttgaactcggcacgagggagagtactcgggttcgtgaacttcccggaggcgcaatgagctgcattaacctgcccactgtgctgcctggctcccccagcaagacccgggggcagatccaggtgattctcgggccgatgttctcaggaaaaagcacagagttgatgagacgcgtccgtcgcttccagattgctcagtacaagtgcctggtgatcaagtatgccaaagacactcgctacagcagcagcttctgcacacatgaccggaacaccatggaggcactgcccgcctgcctgctccgagacgtggcccaggaggccctgggcgtggctgtcataggcatcgacgaggggcagtttttccctgacatcgtggagttctgcgaggccatggccaacgccgggaagaccgtaattgtggctgcactggatgggaccttccagaggaagccatttggggccatcctgaacctggtgccgctggccgagagcgtggtgaagctgacggcggtgtgcatggagtgcttccgggaagccgcctataccaagaggctcggcacagagaaggaggtcgaggtgattgggggagcagacaagtaccactccgtgtgtcggctctgctacttcaagaaggcctcaggccagcctgccgggccggacaacaaagagaactgcccagtgccaggaaagccaggggaagccgtggctgccaggaagctctttgccccacagcagattctgcaatgcagcctgccaactgagggactgcgagggcgccgtccttctgcatgccgctatggacgtgcctgatgtgccagcatccaggaggaagcgggaggcgtgacggatgacaacctggctctgggactctctataggtggatgacacatgacgaaggccacccgttcaaacatggcagggaaaggtccagaagtgagtggaaaaagcaagagagaagcccgatcgggcacggaaaggaaaacccacatgggagagtagcgcacaagaaaaaagaacccagagagagcgggatcgacccgacaacgacactacaacaaacaaggacag

SEQ ID NO: 84519 - DNA, 1542 bp, Homo Sapiens
  misc_feature (1523)..(1523): n is a, c, g, or t
aaacttaggcttagtacgaggcctggggtgttgaattcggcacgaggggacggcctggagagtactcgggttcgtgaacttcccggaggcgcaatgagctgcattaacctgcccactgtgctgcctggctcccccagcaagacccgggggcagatccaggtgattctcgggccgatgttctcaggaaaaagcacagagttgatgagacgcgtccgtcgcttccagattgctcagtacaagtgcctggtgatcaagtatgccaaagacactcgctacagcagcagcttctgcacacatgaccggaacaccatggaggcactgcccgcctgcctgctccgagacgtggcccaggaggccctgggcgtggctgtcataggcatcgacgaggggcagtttttccctgacatcgtggagttctgcgaggccatggccaacgccgggaagaccgtaattgtggctgcactggatgggaccttccagaggaagccatttggggccatcctgaacctggtgccgctggccgagagcgtggtgaagctgacggcggtgtgcatggagtgcttccgggaagccgcctataccaagaggctcggcacagagaaggaggtcgaggtgattgggggagcagacaagtaccactccgtgtgtcggctctgctacttcaagaaggcctcaggccagcctgccgggccggacaacaaagagaactgcccagtgccaggaaagccaggggaagccgtggctgccaggaagctctttgccccacagcagattctgcaatgcagccctgccaactgagggacctgcgagggccgcccgctcccttcctgccactgccgcctactggacgctgccctgcatgctgcccagccactccaggaggaagtcgggaggcgtggagggtgaccacaccttggccttctgggaactctcctttgtgtggctgccccacctgccgcatgctccctcctctcctacccactggtctgcttaaagcttccctctcagctgctgggacgatcgcccaggctggagctggccccgcttggtggcctgggatctggcacactccctctccttggggtgagggacagagccccacgctgttgacatcagcctgcttcttcccctctgcggctttcactgctgagtttctgttctccctgggaagcctgtgccagcacctttgagccttggcccacactgaggcttaggcctctctgcctgggatgggctcccaccctcccctgaggatggcctggattcacgccctcttgtttccttttgggctcaaagcccttcctacctctggtgatggtttccacaggaacaacagcatctttcaccaagatgggtggcaccaaccttgctgggacttggatcccaggggcttatctcttcaagtgtggagagggcagggtccacgcctctgctgtagcttatgaaattaactaattgaaaattcaaaaaaaacctcgtgccgaattcgccacccaggctcgtacgttagacatgtatgcccnaaggggtgtgcgctgggcc

SEQ ID NO: 84520 - DNA, 1152 bp, Homo Sapiens
  misc_feature (742)..(751): n is a, c, g, or t
ttggctaggtacgaggttgggtggtgaatcggccgaggcccgcgcgctgggggcgcccaggccacttgggctccgcggagccagcgagaggtctgcgcggagtctgagcggcgctcgtcccgtcccaaggccgacgccagcacgccgtcatggcccccgcagcggcgacggggggcagcaccctgcccagtggcttctcggtcttcaccaccttgcccgacttgctcttcatctttgagtttatcttcgggggcctggtgtggatcctggtggcctcctccctggtgccctggcccctggtccagggctgggtgatgttcgtgtctgtgttctgcttcgtggccaccaccaccttgatcatcctgtacataattggagcccacggtggagagacttcctgggtcaccttggacgcagcctaccactgcaccgctgccctcttttacctcagcgcctcagtcctggaggccctggccaccatcacgatgcaagacggcttcacctacaggcactaccatgaaaacattgctgccgtggtgttctcctacatagccactctgctctacgtggtccatgcggtgttctctttaatcagatggaagtcttcataaagccgcagtagaacttgagctgaaaacccagatggtgttaactggccgccccactttccggcataactttttagaaaacagaaatgcccttgatggtggaaaaaagaaaacaaccacccccccactgcccnnnnnnnnnngccctgccctgttgctcgtgggtgctgtgtttactctcccgtgtgccttcgcgtccgggttgggagcttgctgtgtctaacctccaactgctgtgctgtctgctagggtcacctcctgtttgtgaaaggggaccttcttgttcgggggtgggaagtggcgaccgtgacctgagaaggaaagaaagatcctctgctgacccctggagcagctctcgagaactacctgttggtattgtccacaagctctcccgagcgccccatcttgtgccatgttttaagtcttcatggatgttctgcatgtcatggggactaaaactcacccaacagatctttccagaggtccatggtggaagacgataaccctgtgaaatactttataaaatgtcttaatgttcaaaaaa

SEQ ID NO: 84521 - DNA, 407 bp, Homo Sapiens
caacctttctgagggtaataatcatctgccttgccttactgtctacttacaaaccatcaaataggaaattggtaaaggtggtgaaaaaggagcagctagtattctccgttgacctgcacaccatgtttcagcaggcgggcaaggatttacagcagaaccaaactctttttgaatgagtattagtctaatgaggtggaaaagtccccatcaatacataaaaacaactcgagtgagaaaagctttctttcctggttaatccaagccgcagcctggtgtttgccagctgtgtagagataaggtgatccgtctgattgttcagagacgctatcaatgaccttagtcatctctgtatctggatagtctgaatatattacaaaattgcccactgaaaaaatagcacatttctg

SEQ ID NO: 84522 - DNA, 738 bp, Homo Sapiens
gaacacctctgtttaatcctgaagttgcaaaataccttaaggtccctcaagacccattgaaattttataagaagatttacttttgccacagttgccagctttatttgccttctacagaattttctgtatcatccacctcacgccgcatataccggtgtcgtaactgcattaaccttcagaatgaggctcaaaaacgagaatcatttttgaagtacaaatgtttacttcaacagctctactatacagaagctgattatgaagatgattctaaaattgctttcttgatgcagctacaagacattcagtacctgacagagaacatctgggcgtcccagtcagtcctcagtgcttgcgacaatctcagtgatctggtcatgggtcagatgggaataaatccctggagtggtccccctggaactgcattcttcttaccaaagatgaagcagctgctcatctcaagctaacaagtattgaagagggatatgaacgctcatttattcacaagatcaaacacaaacatatcctggctaagaactatttttctcaggttccagtgctggcttcatttatacttgatgatggtgaaattgatgagatcagatggaagtatcactcagacacaacacctaagattatagaatcccagaggcctcctcattaggtgatccaggagtatttgtttgatgatcggcattttgttcactgctaatagggtaatacagaggtcacagagtaaaa

SEQ ID NO: 84523 - DNA, 720 bp, Homo Sapiens
gactcaacttccttccgtgtaccccaggcggcccctgcacgggtctggagagcaccccaggttgcgctggagtctggaaacatatcagcaccggaaaatatgttgggtgaagggtgagtatgaggggactgcaggcccaaggacccccgaaggaacggctgcctccccagcacagcacagccgcgctgcaccagccaccgaggacttccttatgtcagagcagaactcagggagggaggtgtgaggtcgcccatgaccacaggggctcgtgacgatgtgacgaagctacactgggagcactcgggccctttcaaagccagaagagaacctggggcttaatgcagaacggagggtccgtgagatgagtcccgggccatgcaggaccacccaaggccccgacccgaactatgtgtcggctgctgatgctctgccgtcggccgtcgtcccttgtccatcccccttcacagctgcaggatgtggtgttatctcatcccacatggataaccacagactggccaggcccagctggacgtgacgtggagtggctcggaggagaagattcggctgtggaggtttttttaaagctcaagtccccaccacctgaagtgtgcacacatcatcaagtcgaacggtcccccacggctggtatgctctgcggagatgagtctgcctgagttccccggcttcttgaaggaaggactgacaggaacacggaagctt

SEQ ID NO: 84524 - DNA, 1452 bp, Homo Sapiens
cgagtgagctggtccttgcccttggtgcccgggccactggtgggcgacggtttcctgctgcgcctgtgggacgggacacgggggcaggagcggcgggagaacgtctcatccccccaggcccgcactgccctcctgacgggactcacgcctggcacccactaccagctggatgtgcagctctaccactgcaccctcctgggcccggcctcgccccctgcacacgtgcttctgccccccagtgggcctccagccccccgacacctccacgcccaggccctctcagactccgagatccagctgacatggaagcacccggaggctctgcctgggccaatatccaagtacgttgtggaggtgcaggtggctgggggtgcaggagacccactgtggatagacgtggacaggcctgaggagacaagcaccatcatccgtggcctcaacgccagcacgcgctacctcttccgcatgcgggccagcattcaggggctcggggactggagcaacacagtagaagagtccaccctgggcaacgggctgcaggctgagggcccagtccaagagagccgggcagctgaagagggcctggatcagcagctgatcctggcggtggtgggctccgtgtctgccacctgcctcaccatcctggccgccctttaaaccctggtgtgcatccgcagaagctgcctgcatcggagacgcaccttcacctaccagtcaggctcgggcgaggagaccatcctgcagttcagctcagggaccttgacacttacccggcggccaaaactgcagcccgagcccctgagctacccagtgctagagtgggaggacatcacctttgaggacctcatcggggaggggaacttcggccaggtcatccgggccatgatcaagaaggacgggctgaagatgaacgcagccatcaaaatgctgaaagagtatgcctctgaaaatgaccatcgtgactttgcgggagaactggaagttctgtgcaaattggggcatcaccccaacatcatcaacctcctgggggcctgtaagaaccgaggttacttgtatatcgctattgaatatgccccctacgggaacctgctagattttctgcggaaaagccgggtcctagagactgacccagcttttgctcgagagcatgggacagcctctacccttagctcccggcagctgctgcgtttcgccagtgatgcggccaatggcatgcagtacctgagtgagaagcagttcatccacagggacctggctgcccggaatgtgctggtcggagagaacctggcctccaagattgcagacttcggcctttctcggggagaggaggtttatgtgaagaagacgatggggcgtctccctgtgcgctggatggccattgagtccctgaactacagtgtctataccaccaagagtgatgcctggtcctttggagtccttgtggcgtacggt

SEQ ID NO: 84525 - DNA, 757 bp, Homo Sapiens
tgcatccacgcatggggagacgcccctaggagagaatgggtttgaggggctgagtgtggaggaagggcctgtttgaggctcctgtggggcagggccaggcacaagccctaagggtgagggttgaatgagactcaccatcgtcttcttcacataaacctcctctccccgagaaaggccgaagtctgcaatcttggaggctaggttctctccgaccagcacattccgggcagccaggtccctgtggatgaactgcttctcactcaggtactgcatgccattggccgcatcactggcgaaacgcagcagctgccgggagctaagggtagaggctgtcccatgctctcgagcaaaagctgggtcagtctctaggacccggcttttccgcagaaaatctagcaggttcccgtagggggcatattcaatagcgatatacaagtaacctcggttcttacaggcccccaggaggttgatgatgttggggtgatgccccaatttgcacagaacttccagttctcccgcaaagtcacgatggtcattttcagaggcatactctttcagcattttgatggctgcgttcatcttcagcccgtccttcttgatcatggcccggatgacctggccgaagttcccctccccgatgaggtcctcaaaggtgatgtcctcccactctagcactgggtagctcaggggctcgggctgcagttttgccgccgggtaagtgtcaggtcctgagctgcccagtcctgtggcgtgacgg

SEQ ID NO: 84526 - DNA, 1729 bp, Homo Sapiens
  misc_feature (30)..(30): n is a, c, g, or t
  misc_feature (131)..(131): n is a, c, g, or t
  misc_feature (244)..(244): n is a, c, g, or t
ggaccgaacgacgggggtgcgtgatatgancgcacagaacgtggcgttgactcgacacgatgtttcgtgtagggggcgccccgtttgtggggagagcgtgggcatgacaagaggatcagaggtgtgtatanacgggcgacacaacaatgtgtgcaccgcacccgatgtatgtgtggcgttctagcagaggttacctatcgggctgagataacatctagtggttggagggagtatgttgtttaanaagggcatcacaggtcaggtaaccggtctgtgatccacaaaagtaggatattttgtgaaatgtgagtgtgtatggttcgcatgtcggccgggcatgggtatagcgggtaagtggagggtgggacccgtgacaagagtgagcgcctttgtaggagactctgatgagtttatgaaagggattgccaccaaactgcgagtgtgcggcctccgggtgagtccgcccgggagaacgctatatattttgcggggagatccgtgtggcccagtacgccctaaaactcctcaaatcaggcaaggcagactgaagacaagttgtaactccgtgatgcgggttcaaacttctgtagttaaccttagagctctaacccctccttagcgtgcatgtcccaacaacccccctattccattgccggcacctactcagtactttccaactgatcgacaatgatagtcacaacaaagtcgaaaagcggcaagcatcgaaagctacatgaagggcgtgcagcgctgttctaaaacacaaaatgccgagcaccgttttccctgtgcccgtccccgctcggtcctgcgcccaccccgtcccgcgctggccactcaggcaagctgtaaatggatataggtaaagatgcaggaggtgatggagaaggcgatggctgcgtagatgaagatggagaggtgcggaaaatggtcgagatagcagccctcgtccagtggaggcgcctccttcttgggcggggggcagcgatgcggccttcgggggctgcccggcagcaggcccaccctgcgccactcccgcccgcgcgccgaccagccttcttgcccgcggccgacgccgacctgggcccgcgggcagcgggagggtcttccgggggaggcttgtcaaacaggccttcggactcggggtccgggcgaatctgctcgagaccccagggtctgcgccgaaagagcccgtcagccatgggcaggatcgcgggtaggtgggtcagccgggtctgggtcagagcgcagtgggcggtgggcggggctacggctgtatttctagcgacccgggtgggggcggagccagaggggcagggggcctctgcagggtccgccggtcctctcagctgaggcgccgcttcgcctggctcctccttccgcccccagcctgttgcagaggctggctcgccgggttccagctccgctgcctgcggctcggcagtctctgcgcagcaaggtttgtctccatggcaaccagactggcggcgcaagggggaggaaacgcgagccgctggctgggaccccggggcactagtaggcttggcacctaagaagccgaaatgcaaccagccaggctctcagctgcgtggggagcttccccagggcatatttctccttttaaaagaaatatttattgtgtggtctgttttaaattttaatcttaatgcgtgaaaaagctaacacatcatcttgtagaaaactagaaatgagaaaacagatcccgaaa

SEQ ID NO: 84527 - DNA, 392 bp, Homo Sapiens
ctgtctcagctagaaagtgggagactttcatttaaaatggaaattggggcgaggggttggcggctgggcgaagggagcattcaaaagcggagaatgtcactttacccgagaaattcactacgatgggccattggtttctgctcggctcgcaggcgcactgcaccgagtggaggtgtggctagtgcctgtgatgagataaatccatgcatagccttttcattgcgagcttgaaagttcttttctattacagttttagctttaggtttaattggttcgactgccttctccacaatttgggcgagaatttcctttgccttctcagcaaaagttgttctgcggacccgtctgggtcaactttcatgagggacattgagacaaacaaatgaaatatg

SEQ ID NO: 84528 - DNA, 832 bp, Homo Sapiens
gagagagtatgaagtcgacggcgcgccgaattcggcacgaggggacacaacagagggcagaggccccattagctttaaaatgtagccccaggttggagctgggaacactgtactggccacttaccctctggggcctcagctttccctccggaaggctgggaggaggtgggctagatgatctttggagcttaaggagtcccagccctttctctgatgccaccacctgaaccctgctccctcgtgggccagtgaaaatagactgtaggtcctcagagccttcagagatgatccagcccaaaccccattttgcagagaggaaaactgaggcctagaagggaggagtggtccacccacggtcccagcacaaggcagagctgggatgaaaacagggctgaaaagactcagggccaattattggctgagcccacggtcccctcagcagggatgcgatggtctctgaatcagtgtgcagctggggtcccaggcagcgctgcctggggcctggggaggggaggcccagaggagggctggccatgtgagcaccccatgaagggaccgccccctcccaaggatggtccctttgggtgcagcagcagaggtcacctcctgacatgcgctctgggaaaggtggcagagggcaggacacatgagctcagatctgtgtgagggtgggaggtggaaagttaatttttgtttatgctatataataattattattctactatcaatcatactataatatatttcttccttatgtataatttttctatatattatctttacttataatataacttcctatttttatttattctttgattcatttccctcc

SEQ ID NO: 84529 - DNA, 935 bp, Homo Sapiens
aagggcaaacaggttcctgatcgacatccaacctaataaggttcagctcctcaactgtagtgtacacttttgcccatctggaaggtactatagcttcagtgtggtttagtaaacttagcctaggaggccaagatgtctcccttaaaacttagtctctgtcctatttactttgtttataagactgtgacctaacttcccatggccaattcaatcgactaggttatctttactccaatggacccaggccttttcccagtcaatccatggtccaacccttcatctccagcgtgatcactcaactcttcaacatgcctgcttgctgcaggtttaaaccacaccaccatcctgtgcttccccctaatcgcccatgatgcccgcaggtaaaaataaaactaaaccccacttgaggtgctatttcagccaaactttaaaccctctccgaactccagaatccacctaactggagctggacgaacttcactgggatgctggcatgggccctaatgtggttcccttcatttagtttttaaaacaggatacaagataccacaaggaaagaagttaatacacagaagacaccactagtagaaacctgcttgtttctccctcaagatagtcagacatttggagccaagggctcccacagcactgaagccttatccctttggatttaccagcccaccagcagcatttcataccatccctatcgaacatgacttcgctataaaataacatggcctaacacaggtaagaatgaaccggacgcctacacttaatctacatggccaagacatggaaggatagggagctgtcgaacgcgtgggcggacgcgtgggcggacgcgtggcgacgcgtggcgacgcgtggtcgacatatcccgggaatccgagccggtaccagcctgctttttgtagcacggtctatatgcactatcc

SEQ ID NO: 84530 - DNA, 543 bp, Homo Sapiens
gtggagaaggtacagtctgtagaggtccaaaactcctgctgcattcaggttattctaattaagtgaagacaatgggaccatgctggggaccaaagatgaggctaatgtgaaggtataaaccacggaaacctagtactacttgactgttaggagcagtggtgacacaggtgctcccagaaccagcaatgccaggctagggagttttgagtccactccaggaacaatgggaacctccccaggaagccccttatccaagcttaatctgccccagatcactggagacagcctgaagaccaaaaccccagagagattgcaggtggtgattccaactggagattcctccagaccagctcctccgagggaaaccaaggagtactgcattctgagcgcttctccggaggctcaggctctttgggggactagagaacatgagtgaattgaagcagagcccgaaagaagccagcctggtggactttaagaaggtggctggctgcctgaagttctgagttcagagttctgaggcccaacccaagtattttatga

SEQ ID NO: 84531 - DNA, 1342 bp, Homo Sapiens
  misc_feature (1102)..(1102): n is a, c, g, or t
gaattcccgggatggaagctgctaacccgacccggattggcgctgaggtggcccgtggggcagggcagatgattctggaccagatgaagcctgaggagccttccagctctaagatagcaggataggagacttctaagattggagctgcagaagacttgccagcccaccagcacaatgtcaggaagccatacacctgcctgtggccctttctcagccctgactccgagcatatggccccaggagatcttggccaagtacacgcagaaggaagagtcagcagagcaaccagagttctactacgatgagtttggtttccgtgtgtacaaggaagaaggtgatgagcctggctccagtctgctggcgaactcccctctgatggaggatgctccacagaggctgcggtggcaggcccacctggagttcacccataaccacgatgtgggggatctcacctgggacaagattgccgtctccctaccccgctctgagaagctccgctccctggtgctggccggcatcccacatggcatgaggccacagctgtggatgcggctctctggggccctgcagaagaagaggaactctgagctgtcctaccgcgagattgtgaagaacagctccaacgatgagaccatcgctgccaagcagatcgagaaggacctgctccgcaccatgcccagcaacgcctgcttcgccagcatgggtagcatcggggtgccccgcctgcgcagggtgctccgggccctggcctggctctacccagagatcggctactgccagggcaccggcatggtggccgcctgcctcctgctgttcctggaggaggaggacgccttctggatgatgtctgccatcatcgaggacctgctccccgcctcctacttcagcaccaccctgctgggtgtccagactgaccagcgggtcctgcgccacctcattgtccagtacctgcctcgcctggacaagctgctccaggagcatgacattgagctgtccctgatcacactgcactggttcctcacggccttcgccagcgtggtggacatcaagctgctcctgcgcatctgggacctgtttttctacgagggctcccgggtgctgnttccagctcacgctgggcatgctgcacctcaaggaggaagagctgatccagtcagagaactcgggcctccatctttcaacacgctatcgggatatcccgtcgcagatggaggacgcggagctgcttctgggggtgtccatgcggctggccggctccctcaccgatgtggccgtggagactcagcgccgcaagctcctggcctctttggtttataaataaactgtgtctgtctttgaaaaa

SEQ ID NO: 84532 - DNA, 500 bp, Homo Sapiens
cctgccgagccgcacacccaccggacggccgaggcccagagtgacctcctcagccagctcttcgggcagagactaactggcttcaaaatccctttaaagaaagatgcttctgagtaatttctaggagcaagagcctgggaccggagctgggcgttcctgtctcggcctgcctccttggccagctccggctccctgagatggtccactctgtggccacttgacttcttgtgcaactgctcaggccttgatgtcagagctgaggtggtgatgctttgaacagggcccaggtgggaagcaattccctttcttgctggaaggctgggggtgaaagaccggggccactgcagcccttttgaagaccacacaagctgttttctttggtaccaagtactttgaagagacaagcagcccatcccctcagcccacacccctgcgccctgtgggcaccgacaccacagaagccaatgtttggagatttgcacaacctccccgttccccca

SEQ ID NO: 84533 - DNA, 1453 bp, Homo Sapiens
ggtctcggagaactgccagaactcccgttctccgccgctttccccatcacggaggttaagtaggggcctgacaaggaggcctgtgtttcatatggtgaatcctcctaactcatgggccttcttcaggacatcttccacggtggacccggccagaacagagatggactgtctgtacggcggcaagagactaagcacctgcagcgtgacactgatgatctcttgggtctgaggaatggtctcagcagctggttccaacatgactcgtggtgccagacagtctgggaagatcagatcaatgtaggtcttgtggttcagaacgggcagcagctgggaaatcatgagagcattctggaaggctccatcctgcagactggccagcaaagcaaccctcaccttgagacatgctgttcccagttctgccccacgcatgggggaagtcatgaggaactgtaatgccaatggggtgctgtagacattcccaaagtggccctcgggggtctgggccttcaagatctcctctcgcactgttctgatggccatggtgatccgttgtctccgaccagggttgaagtttgagcgcttcagacaggtgaatgccaagcctgccatggctgctgtgtccacagaatggtggccctggtggaaaggttccacagcatacagaagtttgtccaccacgctgtcatggacccgcttctggtggagacacagggccagaatgcccaggccatactggtagtagctagtgtgggggtggcccttgtgatcatgcccaatggctctcttctcatcctccaggaaccatttgagctgtgagaccagcctgtcccccttgtggcccctgacaaactcacagttggctctgagagcgagcaggtagagggccagctggcccatggaaggcttgccctggcagtcaccgtcatcctcgctgaaggcagaccctaggaggcactgctggtaaccaagcttgaggctgtgcaggtagaggtcttccttggtcccagcctgcagactggagaggcgtaggcccacatagatgctggggttcaagtgctccagggaaagccggtccatccaaggtaagaggtgctggcccaacttctctaccagatggctgtccatctctggtatttcacacatctcagtgagggcccccaggacccccagaaggaagaggaaggccccaaggtgcctcatggcagcagcaggtgggtgagcagtgagcaagaatcgggaaagactcctggggctggccctgctgaggctctcctgaaacacagactggtcaccgtctacgcgagagacgcagcttcctgtcactgatttatcctccatgcctgcaatgcacggcataagtctgcagaggggtgggacgggggatagctctgtgctggcggggaacataaggccaaagaacagaggaaggaagggcagagcagccctcctggag

SEQ ID NO: 84534 - DNA, 886 bp, Homo Sapiens
ggggcttaaaaaagcacagggagatcgcgggcagctttgcagtcgctgccttctcgcgcctcgaccatgcacccctgcatcttcctgctgggccacaggcgacgcgctttatttctggagctgagggctaaaacttttttgacttttcttctcctcaacatctgaatcatgccatgtgcccagaggagctggcttgcaaacctttccgtggtggctcagctccttaactttggggcgctttgctatgggagacagcctcagccaggcccggttcgcttcccggacaggaggcaagagcattttatcaagggcctgccagaataccacgtggtgggtccagtccgagtagatgccagtgggcattttttgtcatatggcttgcactatcccatcacgagcagcaggaggaagagagatttggatggctcagaggactgggtgtactacagaatttctcacgaggagaaggacctgttttttaacttgacggtcaatcaaggatttctttccaatagctacatcatggagaagagatatgggaacctctcccatgttaagatgatggcttcctctgcccccctctgccatctcagtggcacggctctacagcagggcacccaaagttgggaccgcagccctcagcggcctgccatgggactgactggatttttccaactaccacatggagactttttcattgaacccgtgaagaagcatccactggttgagggagggtaccacccgcacatcgtttacaggaggcagaaagttccagaaaccaaggagccaacctgtggattaaagggtattgtgactcacatgtcctcctgggttgaagaatctgttttgttcttttggtagttttattaaaacatgacctattctt

SEQ ID NO: 84535 - DNA, 595 bp, Homo Sapiens
ggagaatcgcttttgggcagtggttaaggcctctgatgtgcttacttatcagaaaaatccacatatatacaaaactctgcttaaaagttttgtatccagggaaagtcccgcatccagggaaaccctcaatcccaggcactttagggcagctggtcaccctgagaacactacccactcggttccttaatatcactagagaaaaggtaagaactttcaagggcataacctttaagggcatcagtccccaaaatatttttacatcactagctaatggctagttcctctaagcttgctaaaaggctaggaagtccagaaataccttatttaaacgtgttaactttaagaagagttggtagtaatcaagcaaattagtgagcagtgtataaaagctcactcttgaaatctgttttcagacaaatcttctaaaggttcttctagctttgtccagttatatggtattttactgtattctctttttgcaattaatccagttttgtatgtcttttctttcttttttaggtgaaaatattctatgccaactgttttccaccagtcctgcattatatattaaaacaaaggctacagccgcggccgc

SEQ ID NO: 84536 - DNA, 1440 bp, Homo Sapiens
  misc_feature (762)..(793): n is a, c, g, or t
cttatcgtgaaacccttcaacctcaactatgccttcatagacacacacgttcatgcacatgtaggcacatgtaccatctcacatcttcactttcccgagatgccatatacaattacctacattaataactgtagcactatgccttttgagcccgagagagggaattagtgactctaagtgaaggtcactgacacagagaagcagtatgtgtctggggcttccaggacctgcaggcccactagcgtgcacttaccagaatggcatacacaggacctgatcatgaggaagaccaggtttccagtgtaaactactcttgttcccaccacctctggagcactcagggagccccatacagtacttacaatgtctttaatggacttgattctgtttaattttttgttttatattaggcacactgtattaattttccaaaatgttataccacactatgttcttggtcctgacctattgctctggaggaaagagttgtataagaacgtggctcatgtgaacttttgctagcttcatttgaggacctgagaatcatggggaaagggaaggtaatgttttcattgaaatcatcacagtgatttttattccctgggaacacagcgtgtacctaaaaatacatgagaaaatagcatgtatatgaaagctattctcaaaagtcacctgagctcaccatcttcatagccaaccctaccagttataaagatggcagctctatcacttgattaagtgggaggtggtcaaatattttgnnnnnnnnnnnnnnnnnnnnnnnnnnnnnnnnctgttatgcctggcttactaagagtcttgtgagagactgagaagttgattttgttcatatccaatctgtaaatgcgaagtcaggggaagtaatgtccctgaaataaacgggttcatgccatctagggacaataaatggttttcttgttgtaacttctggttaatatcagtaccttgatgtcatcaccgtgatgacaaagagaagagttattgttgatcttcttggttttggtctgtctcttttcttagggataaagaaaaacttccaaactagaaaaacaggccctggttccccttagtttgcacttgaacccaatatgttgccttgtacatacttggtccctgtcacattgactgcttgggaggcttccagggagaagtatgagaccctgaggggtgagaatgggcagctagcaagaacatggaaattctgcttggcactacagtcataaatagaaaacactgtgtgtgctcaggggagcaggggatgccactgaagaaactcaagggaacgtgtatttgaaggaaatgcaaaaactaagtatttagcaaaatgaaattatgccttgatgactaaaaggcactaggaaaggttgtgtcttactaactttcagccctaatcaggaacagatgcctaggaagggagcc

SEQ ID NO: 84537 - DNA, 1882 bp, Homo Sapiens
  misc_feature (1573)..(1573): n is a, c, g, or t
ggcctgggtggcgaattcggcacgaggcagggactttcctgcagggccagacctgcctgcattctgagacaaagcaatggacggtccgcagaagcagacctcattgattgagtcctttcttccatccccttggcctgctccctgtaggaagtcatcctgacaactgatttaaaagggctctttaaccagttgtagccaaccatatagggatgagtcccctgtgagattttgcttttccactgcctgggatgatgcagtttgaagaggcccttggacctccttgtaacatcagggacctttggagaccattatcagtgtaagccctgcttagctcatcttagagcaaagagccagcaccctgatgtccctggggtggctaggcaggagtggcgtggggccaatacccagaccccttcagccaccagcccctggcctgtgccttccaacccattagccatttcttgttgtgcccctttccaagatacagcctgcaagtggtagcaagaagtgattagaggcagatctggacttggcaacagaagtggtttcccatctccattgtctgagtctgattttcgctgatgctgttttgtggatttttgtggtagtgatggttgtcagtgctgccagtttcccaaaacgtaatcaagcctctggtcacatggctgtcgatgtaggcattctggagtggtgttcagccaagtgaccgggcaaaattgggctgtgaaattgtacttccaggcttggatgtaatttttgctctagagagaagcaagtggtgggaaggaggtagcatgacgtgtggtgtgcgggtttccttgctgccgtcacctctccgctcatacaggaatgaagccttagccaggaggccaggctcagccctgtgccactcaccgaagccactttctacaggccagcaggggcttgttgcaggctgtgggttttggtgtggtttgtcagaggctaattctgcagagtttccaaaaccagaagacatcgtatgcttgggatgggggccgtgccacccgtgggaatgctgcccgctctgcagactgctgctagagccagcaactccactaaggtggattttcatcaggggcctgcagggccctcccttttcccattgttcctgcgctgcaaattgcaggccccagcaatcgtgactgacgtttgctccttgactccaagaaactgagaccaaagaagctgctgttcttagcaagatgcgcactgcattccacaggtgggaggagtcggagaggcaggggcttgctttgcagccccacagacaacagttgcacagtgcctcaagccccagagtggctcaccctgtccagacctttgaggatatcaaaggacaaagtgcccaagtctttcctaccttgggggaacctggaacttggaaaggctccctgtcctagtcttgatctgttctgggccaggtcccagcttgagctgcctctgagatttgggctgtgcggatctctggagtgagctctgtttcggttgacccaggtcatggaatggaaacggtgaggccccagtggctgttctggaagaaacagatctcctnggcaaaggccccagcatctccctcactgaaaccaggtggccggctcctcgggactctgtctttatgttcgcggtgagaactctgcccccaggtgtgcaggtttggcttgtggggctgcttgctgctcatctgaattttgtccccagtagtcccctggcgttcttcattcaaccccttctgggacttcagtcagagaggcaccatcccgggggtagggctcccacaggagccctgcggggtgtacgctggtttgttcaaccaccaagggaggccgagcttaggtacctctgacatggttggaggcccggc

SEQ ID NO: 84538 - DNA, 1317 bp, Homo Sapiens
ccagaatacagatgtgctgtgtgcagacgaagaagaggattgccaggctgccaccctgctgcagaaatacaccgacaacagcgagaagccatccgggaagagactgtgcaaaaccaaacacttgatccctcaggagtccaggcggggattgccactgacaggggaatactacgtggagaatgccgatggcaaggtgactgtccggagattcagaaagcggccggagcccagttcggactatgatctgtcaccagccaagcaggagccaaagcccttcgaccgcttgcagcaactgctaccagcctcccagtccacacagctgccatgctcaagttcccctcaggagaccacccagtctcgccctatgccgccggaagcacggagacttattgtcaataagaacgctggcgagacccttctgcagcgggcagccaggcttggctatgaggaagtggtcctgtactgcttagagaacaagatttgtgatgtaaatcatcgggacaacgcaggttactgcgccctgcatgaagcttgtgctaggggctggctcaacattgtgcgacacctccttgaatatggcgctgatgtcaactgtagtgcccaggatggaaccaggcctctgcacgatgctgttgagaacgatcacttggaaattgtccgactacttctctcttatggtgctgaccccaccttggctacgtactcaggtagaaccatcatgaaaatgacccacagtgaacttatggaaaagttcttaacagattatttaaatgacctccagggtcgcaatgatgatgacgccagtggcactttgggacttctatggcagctctgtttgtgaaccagatgatgaaagtggctatgatgttttagccaaccccccaggaccagaagaccaggatgatgatgacgatgcctatagcgatgtgtttgaatttgaattttcagagacccccctcttaccgtgttataacatccaagtatctgtggctcaggggccacgaaactggctactgctttcggatgtccttaagaaattgaaaatgtcctcccgcatatttcgctgcaattttccaaacgtggaaattgtcaccattgcagaggcagaattttatccggcaggtttctgcaagtctcttgttctcttggctccaaaagacctggaagccttcaaccctgaaagtaaggagctgttagatctggtggaattcacgaacgaaattcagactctgctgggctcctctgtagaggtgggttccaccccagtgatctgggctcagaacaatactggtgagcaaggtggaccaccatgttccg

SEQ ID NO: 84539 - DNA, 1734 bp, Homo Sapiens
gggagagtatgaagtcgacggcgcgccaattcggcacgagggagaaaaagacaaggcgacggacagcctctgtgaaggaaggtatagtagagtgcaatggaggagtggccgaagaggatgaagtggaggtcatccttgcacaggagcctgcggctgatcaggaagtgccaagggatgctgtcttgcctgagcagtccccaggagactttgactttaatgagttctttaaccttgataaggtgccatgcttggcttcgatgatagaagatgttttgggagaagggtcagtctctgccagtcggttcagtaggtggttctctaacccgagcagatcaggaagccgatccagcagtcttgggtcaacaccacatgaagagctagagagacttgcaggtctggagcaagccatcctctctcctggacagaactcggggaattactttgctcctataccattggaagaccatgctgaaaataaagtggatatgttagaaatgctacagaaagccaaagtggatttgaaacctcttctttccagcctttctgcaaataaagaaaaacttaaagaaagctcacattcaggggttgtgctttcagtggaggaggtagaagcaggtctgaagggcttgaaggttgaccagcaagtgaagaattcaactcccttcatggcagaacacctagaagagaccttgagtgccgtaaccaacaatcgacaactgaagaaagacggagacatgactgcgttcaacaagctagtgagcacaatgaaggcaagtgggactttgccttctcagcccaaagtcagccgaaaccttgaaagccatttgatgtcccctgctgagattccaggccagcctgtccctaagaacatcctgcaggaacttctgggtcaaccagttcagagacctgcttcttccaatcttctgagtggccttatggggagcttggagcctacaacatctttactgggccaaagagcaccctctcctcccttgtcacaggtgtttcaaactcgagcagcctcagctgactaccttcgcccaagaataccatcaccaattggtttcacaccaggaccacagcagctactcggagatccattccaaggcatgcgcaaacccatgagccccatcacagcccagatgagccagctggagttgcaacaggcagctttagaagggctggccttgccacatgaccttgctgtacaggcagcaaacttctaccagcctcggttttggcaaaccacaggtggacagaaccagagatggattcagaaacaggcaacagcgagtgaccaagtcaccagcacccgtgcatcgagggaattcctcttcccctgcccctgctgcctccatcacaagcatgctttctccttcctttacccctacctcagtgattcgtaagatgtacgagagcaaagagaaaagcaaggaggagccagcatctggaaaagcagctcttggtgacagtaaagaggatactcagaaggccagtgaagaaaacctcctgtcatccagctctgtacccagtgccgatcgagactcttctcccactacaaattccaaactgtcagcattacagaggtcttcgtgttccacccccactgtcccaggccaaccgttacaccaaagaacaagattatcgaccctaaagcaactgggagaaaaaacacccatcttggatccccagttcctaaaaacacctttctccgccctgtccaccaagttcccc

SEQ ID NO: 84540 - DNA, 190 bp, Homo Sapiens
taccattccaacaaagcgctttactgagggcacccactccacagtcccaaggaggcagacacaggcctgaactgtccaccctctatgtcccgagtggtgactccactccccactgctcagagatcacaccccttctggagagcttgcatcccttctgtcgtcttctcgcagccgtatagtagtagtaggc

SEQ ID NO: 84541 - DNA, 175 bp, Homo Sapiens
cccattccaacaaagcgctttactgagggcacccactccacagtcccaaggaggcagacacaggcctgaactgtccaccctctatgtcccgagtggtgactccactccccactgctcagagatcacaccccttctgtcgtcttctcgaaaccgtatagtagtagtaggcggccgc

SEQ ID NO: 84542 - DNA, 349 bp, Homo Sapiens
ccagtaccaaagccaagcttctgcataaacggagaggccgggatatttatagttggagttgaacataatacagatttctttttttctgataatttgcttggtgtcttgaaattactgatcccttccattgtgaaagccactctcagtccagagtctcaccgcctggaaggaaaggtcggaggtgaaaataagtcgtggccaagtacctcttcaaaattggtcccgagcggcccccagcgagaccctgcagctgcctctagcaccaacacatacgcccggcagctgccgttgcaattcgaaccctcctggctttcaaaaagtcgcgcgctgcgccagcttcggccccccc

SEQ ID NO: 84543 - DNA, 717 bp, Homo Sapiens
  misc_feature (84)..(84): n is a, c, g, or t
  misc_feature (269)..(269): n is a, c, g, or t
cgaaggcctggggctcagaggaagaactgaggcaagaagccccccggtgatccagtcagaggattggcagcctgacctcgggtnggggaccccagcactggacaacaaggagggaggggcacaggagggctccccgagctttgtcgggagggggaggaagactgccccctgccctgtcatctctgcatgtgccgagccccagctcctgactccctcagtgcctttgggcctggatgctcagacagcagatgagacgaagccttgtaccntctatccctccttgaaggcctgcctccccccacttcacagagggaaactgaggcccaagcctctcctctcagcccttgctcagcctcagacatgtgcatggtgccaggactgagacctgcttacccctaaggcctagatggcagaagggaccctgaggacattaataaatatggacgggcggtccctggaggcagctggccgagtccaggtaggaggggaagcctggcctggtctgcctcaggggccgccaccaccctcagcctctctcgtcccgggctcctggggcccacgatccggtagttggttgcatgtccgcccctcttgccccgaaggaggctgggggtgcctgtgccggcagggcccgccccagaccccagctctggttcatagagcccaatcattgtttccaagggtagccctaaactgcgggatcctctagatcacctc

SEQ ID NO: 84544 - DNA, 829 bp, Homo Sapiens
  misc_feature (69)..(277): n is a, c, g, or t
  misc_feature (311)..(324): n is a, c, g, or t
  misc_feature (809)..(809): n is a, c, g, or t
caataataataattaaaagtttattagtcttacctgcagcagggtgacagcggcccccaccccgtccannnnnnnnnnnnnnnnnnnnnnnnnnnnnnnnnnnnnnnnnnnnnnnnnnnnnnnnnnnnnnnnnnnnnnnnnnnnnnnnnnnnnnnnnnnnnnnnnnnnnnnnnnnnnnnnnnnnnnnnnnnnnnnnnnnnnnnnnnnnnnnnnnnnnnnnnnnnnnnnnnnnnnnnnnnnnnnnnnnnnnnnnnnnnnnnnnnnnnnnnnnnnnnnntgggcgacagagccagactcttgtctcgaggggnnnnnnnnnnnnnnttatgtaacaaggaattagcctcaaaaccacatggctttggacgtgctaattcaacttttgtacatctatttgtgagagacctcttgaaattgtttaaatggttacatcaagagtttaatattcactaaactggcatcataaaattgtatgactttctccagccttgtctgatcatgctcgttgttgcccagctcagtaataagctttgcaggatccagcctgttctgacctatccctactgagtccccatagcattttgttccctcctgtggctcttaccttgttctcccttgcagagtatgggcatggagggcttctcttcctaatccttcctaatggtaggatcctaacaggacaaatctgtgtacctatctttctatcctccctgagcctgtaccaactagattcttcatatgtatttgtaacagattaaattggaaagcaaacacagtattgattaagtctgtcttgaaaatagctaganagtgttagacacatgaacac

SEQ ID NO: 84545 - DNA, 998 bp, Homo Sapiens
tttcttccagtcacctcggcccggatcgggaagtgtcaaggcgggcgctcccccatctccgacgctattaccatctgaacccggaccccctacccaggtccagggccagccgccatgacgaacgtgtactccttggatgggattctggtgtttggtttgctctttgtttgcacctgtgcctacttcaagaaagtacctcgtctcaaaacctggctgctatcagagaagaagggtgtttggggtgtgttttacaaagccgctgtgattggaaccaggctgcatgctgctgtggcaattgcttgtgttgtaatggccttttacgtcctgtttataaaatgaattccaaagcacccaagtcatcaactgccaaccaaggggacggggatgaagaacctgttggagacctgaacccagtgtaggagagttcagctgaaatcatcggtccccaggatgacaccacagcatctgcccctgctatatgtggggaaaactcatggtcacgaacattatttatgcttcaggggactacagaaagccagcttcctttgatctatgtgtaaatcagtccttggcagagtgcatataatgtccggataaattacacccctcggtgataagattacatacctccttcataaaaacctgtcatcctgtttagttcttcagctcctcatcaggatcttttcaaacctgaggctcattagcggaaggaactaaggctgtgttcagacttcttatgacagagagcagaacttctcccaagacgctacctaatcaactcctttcttggacttgggactccttgtgcaacactggtgcggaagcaggacttcgagggtggtagatgcaagaaagataactgtcaaactggcccgagcaacaatcatattgtggactgtcagcaaaaattgaagctattgtcactgatatccccaactccgcggtaaccactacaacacgcacaagccatcatgcgtccaatgtcacataaacgcacg

SEQ ID NO: 84546 - DNA, 1027 bp, Homo Sapiens
  misc_feature (41)..(84): n is a, c, g, or t
  misc_feature (87)..(121): n is a, c, g, or t
  misc_feature (174)..(312): n is a, c, g, or t
aaaatgtatagactcactatagggcgctcagcgcgttattnnnnnnnnnnnnnnnnnnnnnnnnnnnnnnnnnnnnnnnnnnnncgnnnnnnnnnnnnnnnnnnnnnnnnnnnnnnnnnnncagtcgacggtaccggacatatgcccgggaattcggccattacggccggggtnnnnnnnnnnnnnnnnnnnnnnnnnnnnnnnnnnnnnnnnnnnnnnnnnnnnnnnnnnnnnnnnnnnnnnnnnnnnnnnnnnnnnnnnnnnnnnnnnnnnnnnnnnnnnnnnnnnnnnnnnnnnnnnnnnnnnnnnnnnttatgacattgtttttcaaccaatgaatgtttataccttttgttttccttgccgcgactgtgaagataaagttcaaaagtatttttaccaaagtgtagctaatatttcaagctgaaaaataatagtacgactgcccggtgtctccagaatgtagaagcccatcaatattttattttaggaggtgtacttgacacccaataaactgcacgtatcaaaagtgtacaatgtgttggccgtatgtataccctgcgtaaaactatcaccacaactgaagtgaggaacggacccatcattcccaagtgcccttgtgccctgttattagtttgcatgtcctagaattctatgtaaatttgaatcatacaatatgtatcccttttttggtcaggcatattttactcagtatagttattttgagattcatccatgtggtagcatgtgtcaagagttaaggtgaagatgtattcattggtgagtactgttcattgaatagattggtcattgaccttattcgaatggggacaaccctgtgggttggttgccagggttgggggggcatggttcatttacactaaaagccggtaatgagactaagaacgaaaacaaacagaaaacacaaaacacaaagagatatgatgagcagatcagcccccacagaaagatgaacaacaaattcgcatggacgcagcgacaccagagaaaagaaccctggcatagc

SEQ ID NO: 84547 - DNA, 485 bp, Homo Sapiens
  misc_feature (61)..(61): n is a, c, g, or t
tcggctcttgactgggaggcccggcgcgaggctctgcgtctctgcgtccctcgtcgccgcnctcgcgcccgcgcggatcccgtcacctgccttccccgccggggatggccggccagtgacggcgccgggtggcccgcgcgtggacacggggccctcgcccaagctgccaccgagccgcggcccccgccctcgacccttctctctcccgtattccgagctctctggaaagagaggaaactccagggaagatgtggctgaagctttttttcttgctcctctatttcctggtcctgttcgtcctggccaggttttttgaggccattgtgtggtatgaaactggcatctttgccacccagctggtggatccggtggcgctgagcttcaagaagctgaagaccattctggagtgccgggggttgggctactcagggttgcccgagaagaaggatgtccgggagctggtgtaaaagttaggtgacttgatg

SEQ ID NO: 84548 - DNA, 1050 bp, Homo Sapiens
  misc_feature (920)..(920): n is a, c, g, or t
ggggtgacacagcgaagatggcgtcgcccggctgcctgtggctcttggctgtggctctcctgccatggacctgcgcttctcgggcgctgcagcatctggacccgccggcgccgctgccgttggtgatctggcatgggatgggagacagctgttgcaatcccttaagcatgggtgctattaaaaaaatggtggagaagaaaatacctggaatttacgtcttatctttagagattgggaagaccctgatggaggacgtggagaacagcttcttcttgaatgtcaattcccaagtaacaacagtgtgtcaggcacttgctaaggatcctaaattgcagcaaggctacaatgctatgggattctcccagggaggccaatttctgagggcagtggctcagagatgcccttcacctcccatgatcaatctgatctcggttgggggacaacatcaaggtgtttttggactccctcgatgcccaggagagagctctcacatctgtgacttcatccgaaaaacactgaatgctggggcgtactccaaagttgttcaggaacgcctcgtgcaagccgaatactggcatgaccccataaaggaggatgtgtatcgcaaccacagcatcttcttggcagatataaatcaggagcggggtatcaatgagtcctacaagaaaaacctgatggccctgaagaagtttgtgatggtgaaattcctcaatgattccattgtggaccctgtagattcggagtgggtttggattttacagaagtggccaagccaaggaaaccattcccttacaggagacctcccctgtacacacaggaccgccctggggctaaaggaaatggaccatgcaggacagctagtgtttctggctacagaagggggacccatcttccatttgtctgaagaaatgggtttatgncccaccatcataaccattcctttgggatgaaaaccccgtaatagtttcaccaataaaaggctccagggggagccccccttaaactccttttcccaaacccccctttggggaaaaaccggtatttcccttc

SEQ ID NO: 84549 - DNA, 1169 bp, Homo Sapiens
  misc_feature (287)..(318): n is a, c, g, or t
cggtccggaattcccgggatatcgtcgacccacgcgtccggggaaattgatttttaaggagcgattcttttcctatataaaagctattgaggcttagctttattcatacatgagtgatttggttataactcaatcaaaatttttatctttaaatctgagacaagtattatatttaaaactagatctattaatacattcatcactgcctgaaaatttgctgttctaatgtttgtgaattttcactcattacctagagtaaacttattgcatattttcataatcagtcnnnnnnnnnnnnnnnnnnnnnnnnnnnnnnnnttagttcccaagtaaatatatcagtgtttcctgtgtttgggcagaagtgcaaagtagttttaatttctcacgttgtagaaaaagaggccaaaaaggtcaccttagtttatttttccaaaacataactttaggtattctaatgtattttgttagttgcttagaaatggaaataaaatatatgtgcttattaaataatgcacagtacactagattatagagtttatttttgcttttatgctttaaagaatgcatgcccaaaacactactaccaacaggaggattttttaaaatcacagaattgatatttatctcaagactatcttaagctaatgtacttctgttacataattaaactatttctgctattatttttaaagcagtattattttataaccaattctaaaattcagctttaaaaatattgaacataccttcctaccacttacgcttcaagtttcatttattgaataccagggtcatatcttagaattgtatataaaacaacatgtaacccattcatgaaaaacgtttttaagtattgctttttgctgctatgttctgcattgagcctagttttgccattgtcccctgaatgtagtattatctatagattatacataactacatctattgcttttggtggtaaatcaagatttagttgtaattttccagctgtgaaaatgttgccttgtatttaaaagggtttcatgaatggaaacctaagtaaaactaagctcattagtgacagacttgttttcttcttgttattcctccagcaactccctcaccaccacgcctccctgcctaccatccccggaagggtgcttattctttaacaaagagaatctaaa

SEQ ID NO: 84550 - DNA, 979 bp, Homo Sapiens
tggtaccggtccggatttcccgggatatcgtcgacccacgcgtccgccacgcgtccgccacgcgtccgggtgcatgttggtatttaaagtagtggattcaaagaacttagattataaataagagttccattaggtgatacatagataagggctttttctccccgcaaacacccctaagaatggttctgtgtatgtgaatgagcgggtggtaattgtggctaaatatttttgttttaccaagaaactgaaataattctggccaggaataaatacttcctgaacatcttaggtcttttcaacaagaaaaagacagaggattgtccttaagtccctgctaaaacattccattgttaaaatttgcactttgaaggtaagctttctaggcctgaccctccaggtgtcaatggacttgtgctactatatttttttattcttggtatcagtttaaaattcagacaaggcccacagaataagattttccatgcatttgcaaatacgtatattctttttccatccacttgcacaatatcattaccatcactttttcatcattcctcagctactactcacattcatttaatggtttctgtaaacatttttaagacagttgggatgtcacttaacattttttttgagctaaagtcagggaatcaagccatgcttaatatttaacaatcaccttatatgtgtgtcgaagagtttgttcgtcgtcatgtattcggctacaaggcagatacagtattaattcaccaacaccgcatttggacattatgcccttttgtgtcaaacttgaaccttccacggatttgcgcggtgggcccattgggtctacttattatatcccggtggagaaggcaccttgcccaaaagtccggttccaagcagcggtacgagaatccccagaagaacaagaacagatcgcaacacacaataacagaaacgcaaaagaacttctacgcatacaaaatggcagcaaaca

SEQ ID NO: 84551 - DNA, 560 bp, Homo Sapiens
  misc_feature (313)..(313): n is a, c, g, or t
cacacaaggacaccattttgtgatgatgatggtgctttatgcagcttccaccatttacaagattttcctgtggtgtggaacctctcatgataaagcaaaggaactagaagcttattccagtcaagatttctgatttatcttgtggtaagcatttgggaaggacatatctgcacatgacctgagactaagtactatacactgaatcagatgaaaattgctcttaggaagcttacaattttccaaatagttaggacaaaaacaaactctccttctctcttcctatatgtacatactgacatcttatatcattacntgtcttccttaggggttatgattcctgtatggtttctttggggtgctgcattaggacctgagactctgattgaaaattcttccacgggctcgctaccattccaaaactttattctccaaatatgaatttccagatgcctcacaaggtctgagctccatctgaaggctttcccatgcttgtcacattcatagggcttttctccactatgaattctatgatgtcgaataaagtgtgaactatgattcca

SEQ ID NO: 84552 - DNA, 885 bp, Homo Sapiens
  misc_feature (479)..(482): n is a, c, g, or t
  misc_feature (484)..(485): n is a, c, g, or t
  misc_feature (488)..(491): n is a, c, g, or t
  misc_feature (545)..(605): n is a, c, g, or t
  misc_feature (637)..(655): n is a, c, g, or t
gggtttccgttcgcggactttggcccaggcgcgtgggcgctgccgagaggctgggagcccgggaaccggttcctggacttgagcggagcgagaaagagcgcgccgcctgcacgactggactggagcggccgggtgccctggaggcccctgggaattgcagtccttgcgcaggtggagagtgagcccttatgagaaaactcaagactcagaaacaataaaggttacagagatgaaattgacagagcctgaatttcaggttatgattctgtatggtttctttggtgctgcattagacctgagctctgattgaaaattcttccacgctcgctacattccaaaactttatctccaatatgaatttccagatgcctcacaaggtctgagctccatctgaaggctttcccatgcttgtcacattcatagggcttttctccactatgaattctatgatgtcgaataaagtgtgagctctgattacnnnnannaannnnagggggaggaaaaagcacggaaaacaggaccgagcccagggagggtcggggcannnnnnnnnnnnnnnnnnnnnnnnnnnnnnnnnnnnnnnnnnnnnnnnnnnnnnnnnnnnnccggaaggaggagcgaggggccgtgtgcgcannnnnnnnnnnnnnnnnnnccctcggggactgataaaattcttccacaccgtcgtcctgggggcggccggcgcgccttccggacaggcgcggctcggggggccctctctgttcccaacaaagaggaccggtggcgcgggcgtctgcgcctgccggaccacaccccaccgaaaaaagactggccccgcgggggggcaccgcccgcgagggtgtcgacgccaccgcgcctctcatgtttatcggcccgccc

SEQ ID NO: 84553 - DNA, 494 bp, Homo Sapiens
acaaatccagcttcagccttaaggtggagtgcagctagagaaggtgttctccagcttctccctgaaatgctttcagtttattatattcacagttgagaaaaccgataaaaatcaatacttaacctccttggatgaaacaggggagctatgtagaaggtaaaggccctgttcctttgtcctcttgaccctgcctcatatccacaattaattaggtcctgaacatacatcactgatgaataaaggaagaaaatagtcaagagagccagtgtggagtggacctgaaggtgggctacagggaataatttagtgatgccaccttaaagtaaaggactgtggaaggtactttgtgaccaggtcacaggccatgcccctcccgcttttctccaccctctccaaccaaagccaaaaggaagcttaaccatgtgcagcaataaacttgacatgtttattaattaaactatcacttaaataaaaaaaagagaatagaaaataaa

SEQ ID NO: 84554 - DNA, 1326 bp, Homo Sapiens
  misc_feature (294)..(422): n is a, c, g, or t
  misc_feature (530)..(556): n is a, c, g, or t
  misc_feature (637)..(658): n is a, c, g, or t
  misc_feature (1312)..(1312): n is a, c, g, or t
ctttctcccccccaccacctcccgggggggattgtctcccccatgttttgaatttaaaacgcgggccacaaaatgggcaaaaatttttttgccccccccggtgtcctccccggggcgaaagaattttttaccgccaagggccccaaggtggggtggaagccccggcggcgggtttccggttttccccacccccggttgggaggggtgtccccctcccggcgcgaaggctttaatggaatcccaacccccacccccaaaaaatgccacgggcgggggggaaattttatatcgggnnnnnnnnnnnnnnnnnnnnnnnnnnnnnnnnnnnnnnnnnnnnnnnnnnnnnnnnnnnnnnnnnnnnnnnnnnnnnnnnnnnnnnnnnnnnnnnnnnnnnnnnnnnnnnnnnnnnnnnnnnnnnnnnngggttcccctgggaacaaagaaggccccggctcccttccttggggggccgcggcccccaaagaaagtgttttaaaaattttttggggccgggggggcccccaaaggcnnnnnnnnnnnnnnnnnnnnnnnnnnnccctctttccctttggtttcgtcgctcctttggtggcgctttcttcgtcttgcgctttttgtcctgtcctctttctcctgnnnnnnnnnnnnnnnnnnnnnnaccgttaaaagatttattgcagtaatacaataaaagtttagaaaacatttgtatgactcaaactggtttggaagttgcagagcaatggggaattcctgcaacatgatactgtgaggagattctcggacactagtcctctaacagcatgccactgaatgctcttccccaaattgagtccttacatgagtcccgtccactctacccaatggtgatatactgtttttcccccttacagatgtgcaaaacttttcttagttatattccataaccaaaaaatgtctttaacagaccattttaagcagcctgtttggtgcctgtgggtttttattagtattactttgtttcagtaaatcattttaaaatggaaaacatgaccaagttctatggctttttgtttaaacaaaataccagcttcaattttttaaaaagctgtttacatatggttctggcacctacatgaaagattttaatgagcagcaaaaagagtagaaaaaacagtggttgaaatgtatacttaagagtatttacagggtggatccagtgcaaaataatgaaacccaaaatatttcagcagtgtaagccagtatgttggtgttcaaaaccacaaaagggttcgatcacttaaccctatgtaaagtgcctctaattgatcantacaacaacaaacc

SEQ ID NO: 84555 - DNA, 604 bp, Homo Sapiens
  misc_feature (31)..(31): n is a, c, g, or t
  misc_feature (37)..(37): n is a, c, g, or t
gggcagggggtccaaagtgctcagccccggnacagtnaggacgtttgggggccctctttcagcaggggacagcccgattggggacaatggcgtctcttggccacatcttggttttctgtgtgggtctcctcaccatggccaaggcagaaagtccaaaggaacacgacccgttcacttacgactaccagtccctgcagatcggaggcctcgtcatcgccgggatcctcttcatcctgggcatcctcatcgtgctgagcagaagatgccggtgcaagttcaaccagcagcagaggactggggaacccgatgaagaggagggaactttccgcagctccatccgccgtctgtccacccgcaggcggtagaaacacctggagcgatggaatccggccaggactcccctggcacctgacatctcccacgctccacctgcgcgccaccgcaccgctcgcgccgccccgtatcccacagggcctggcccccgcagactcccccatgccgccaagagttccaataaaagcgtgcgtacctctcgaaaaacgaagggaataccagcacaaggacataacaaatagaaaaaagaaaatatacaccaagaatcaac

SEQ ID NO: 84556 - DNA, 1125 bp, Homo Sapiens
  misc_feature (19)..(19): n is a, c, g, or t
  misc_feature (1024)..(1060): n is a, c, g, or t
cgggacccacagatgccanttgggggccggggcatgacgggtactgcggagacaactgtagtacgaacttggaggtggcattgtgggtggtcggggcactgaagtgatgggtggagccgagctggggatgttggtggctgaagatggtggcggtggctgttgagggatttcattgggcttgctggggccaatcttctctttagtgtcatcctctggcaccaggcctttggccttgtgaatggcctcaatctgctcctggagggtgatgttggcctgggcagcctgctgggtccgggccatgctgcctgagtggccatcccaggtcaccttttcctctggcttctggatctcctcctcaccgatcttcttaccaatggctgtttcctctacaccgaagatgtcagtacgccgctcagccaactgcttcaagctgctctcaatatccagacctggtgcgtacacctcatcatcgctctgcttctcacggatggagcgatcccgctgctccagccagcgagggtcaagaagtccaatgcgcatgtgttcctgcattttgctggcggggatcttctccccagtaatgggggacacaagatactcatctggagcaggggctggaggcaagggcttggaggctttgggatcataatccttgcggacaatgacttggtctggagttgggggcagaggtggaggcatgggtgtctctgggggtgggggcactttctgcccttcttcttcatcatctgaaccctcatccatatcttgtacttgggtgtcctggtccagctgggaaggaggctcctccgccttctcctgtttgtcatcctcctcatcagactcgacctccatctcaacttcctcactctccccaaacttttcatagcgctcctgaatgaggattcgggcccccagctcctctggcgtggtggggggagggaagttcccttgctcattgggttggaagtccactgtttccaccaccacaaaatcatgccagtcgatctgagcataggccacccgnnnnnnnnnnnnnnnnnnnnnnnnnnnnnnnnnnnnncgttcctggaatttggcccattccactcggtaacacacctgatccaaaacttctcgggggttttc

SEQ ID NO: 84557 - DNA, 1517 bp, Homo Sapiens
  misc_feature (486)..(517): n is a, c, g, or t
  misc_feature (877)..(877): n is a, c, g, or t
  misc_feature (896)..(896): n is a, c, g, or t
  misc_feature (922)..(922): n is a, c, g, or t
  misc_feature (995)..(995): n is a, c, g, or t
  misc_feature (1058)..(1058): n is a, c, g, or t
  misc_feature (1171)..(1171): n is a, c, g, or t
  misc_feature (1251)..(1251): n is a, c, g, or t
  misc_feature (1281)..(1281): n is a, c, g, or t
  misc_feature (1322)..(1322): n is a, c, g, or t
  misc_feature (1325)..(1325): n is a, c, g, or t
  misc_feature (1399)..(1399): n is a, c, g, or t
gtccaaggtagcgaggcctgggtggcgaatcggcacgaggtgcgagctcgtcgtactgaccgagcggggaggctgtcttgaggcggcaccgctcaccgacaccgaggcggactggcagccctgagcgtcgcagtcatgccggccggacccgtgcaggcggtgcccccgccgccgcccgtgcccacggagcccaaacagcccacagaagaagaagcatcttcaaaggaggattctgcaccttctaagccagttgtggggattatttaccctcctccagaggtcagaaatattgttgacaagactgccagctttgtggccagaaacgggcctgaatttgaagctaggatccgacagaacgagatcaacaaccccaagttcaactttctgaaccccaatgacccttaccatgcctactaccgccacaaggtcagcgagttcaaggaagggaaggctcaggagccgtccgccgccatccccaaggtcatnnnnnnnnnnnnnnnnnnnnnnnnnnnnnnnntgccccagaaggtccaagcccaagtaatccaagagaccatcgtgcccaaagagcctcctcctgagtttgagttcattgctgatcctccctctatctcagccttcgacttggatgtggtgaagctgacggctcagtttgtggccaggaatgggcgccagtttctgacccagctgatgcagaaagagcagcgcaactaccagtttgactttctccgcccacagcacagcctcttcaactacttcacgaagctagtggaacagtacaccaagatcttgattccacccaaaggtttattttcaaagctcaagaaagaggctgaaaacccccgagaagtttgggatcaggtgtgttaccgagtgnggatgccccaaattccagnaacgtgagaaaaagaagggaagaganagagaaagagaaagggaccgggtggcctatgctcagatcgactggcatgattttgtggtggtggaacagtagnacttccaacacaatgagcaaggtactttccctccccccaccacgccagaggagctgggggccngaatcctcattcaggagcgctatgaaaagtttggggagagtgaggaagttgagatggaggtcgagtctgatgaggaggatgacatacaggagaaggcggaggagcctccttcncagctggaccaggacacccaagtacaagatatggatgagggttcagatgatgagaagaagggcagaaagtgcccccaccnccagagacacccatgcctccacctctgccnccaactccagaccaagtcattgtccgcaaggattatgatcncanagcctccaagcccttgcctccagcccctgctccagatgagtatcttgtgtcccccattactggggagaagatcnccgccagcaaaatgcaggaacacatgcgcattggacttcttgaccctcgctggctggagcagcgggatcgctccatccgtgagaagcagagcgatgatgaggtgtacgcaccaggtct

SEQ ID NO: 84558 - DNA, 997 bp, Homo Sapiens
  misc_feature (428)..(464): n is a, c, g, or t
  misc_feature (849)..(880): n is a, c, g, or t
tcttgctgcgatcttccgtaagggaccagtatcatcgagcaggctgagcaggctgagcttggatcatatcctgcgacatgactgtctgattggggcagagtgaggcatggtgtctctggggtggggcacttctgcccttcttcttcatcatctgaccctcatccatatcttgtacttgggtgtcctggtccagctgggaaggaggctcctccgccttctcctgtttgtcatcctcctcatcagactcgacctccatctcaacttcctcactctccccaaacttttcatagcgctcctgaatgaggattcgggcccccagctcctctggcgtggtggggggagggaagttcccttgctcattgggttggaagtccactgtttccaccaccacaaaatcatgccagtcgatctgagcataggccacccgnnnnnnnnnnnnnnnnnnnnnnnnnnnnnnnnnnnnncgttcctggaatttggcccattccactcggtaacacacctgatccaaaacttctcgggggttttcagcctctttcttgagcctttgaaaataaacctttgggtggaatcaagatcttggtgtactgttccactagcttcgtgaagtagtagaagaggctgtgctgtggggcggagaaagtcaaactggtagttgcgctgctctttctgcatcagctgggtcagaaactggcgcccattcctggccacaaactgagccgtcagcttcaccacatccaagtcgaaggctgagatagagggaggatcagcaatgaactcaaactcaggaggaggctctttgggcacgatggtctcttggattacttgggcttggaccttctggggcannnnnnnnnnnnnnnnnnnnnnnnnnnnnnnnatgaccttggggatggcggcggacggctcctgagccttcccttccttgaactcgctgaccttgtggcggtagtaggcaaagtaagggtcattgggcctcgtgccgaattcggcgcgc

SEQ ID NO: 84559 - DNA, 1081 bp, Homo Sapiens
ggttttaaacctggcaactcttttaccatccctttgtatttttgcagttcctccctataccagcttccttacagctgttctgatttcctgtcgtaagattttttcttttcattttctccagggagggtaaatcaatataacctcttctctagagaggaggtggttaggttggtcttaagcagtgttagaagatctattttttttcaaaccaggtgtctgagctgggtgaattccagcctggggagaggactttgatcaccagatgtttttttggtgtgcgtgctgtcttatggttgcgtggcgaagtttctgcttcagatgagcactgtccagagcttcctccagtggacaatagcatatttgtcgcaaaggaggtggaaggacagattctggggacttacgtttgtatcaagggctaccacctggtaggaaagaagacccttttttgcaatgcctctaaggagtgggataacaccactactgagtgccgcttgggccactgtcctgatcctgtgctggtgaatggagagttcagttcttcagggcctgtgaatgtaagtgacaaaatcacgtttatgtgcaatgaccactacatcctcaagggcagcaatcggagccagtgtctagaggaccacacctgggcacctccctttcccatctgcaaaagtagggactgtgaccctcctgggaatccagttcatggctattttgaaggaaataacttcaccttaggatccaccattagttattactgtgaagacaggtactacttagtgggcgtgcaggagcagcaatgcgttgatggggagtggagcagtgcacttccagtctgcaagttgatccaggaagctcccaaaccagagtgtgagaaggcacttcttgcctttcaggagagtaagaacctctgcgaagccatggagaactttatgcaacaattaaaggaaagtggcatgacaatggaggagctaaaatattctctggagctgaagaaagctgagtttgaaggcaaaattgttgtaacactacagctgagcagatgtaatagaaataaacctatgaataaattttcttcttggttctg

SEQ ID NO: 84560 - DNA, 818 bp, Homo Sapiens
agatgttctggaccttgatgcctgagttctggtcttaagttttacacgtcattttttagagagacgtgaagcctacgtattccagagtgaacccagggcctggggggaaatgtcttggaacctgagggaacatctggatgctcagatagaacctcttatctgagcatccagataagaccagagctcatctggaatcaagtgtacatgactataaagagtccaccgggatgtcaggcttcttagagaggtgcttgtagagagagacatgtaggaaatgtggacatggccacactgacgctgtttgtcacagattttcattctaatttcttgttgtttctttaaaattgtcaaatgtccctctttctttgtttttctcttagtgcttacaaggaaagctgtcagtcttcataaactttcaaagagttacaaaaatacgtattttttaaactacaattcaagattagcatccaaacctacaaacatgatgtacattcgtcacacaccatacaaccttcacacctggctacagcaatgttgacttacatcaccattgtttatacttgtgaaaactttattgtgcacagtgacatccattccgccagacttaatgttataaagcagctgagcagagcttctcaaagtaaaactagccgtgttgctacaaagggaaattctggctcttgggcccaactgtttccataccaatcagctaagtcagcctcctctctgcttctttccatttcaaatgcctgggcttttggcctttgaggcaattagaaccagatcagtttaattttacaacactgatctcaactgta

SEQ ID NO: 84561 - DNA, 477 bp, Homo Sapiens
actggtaatgctccaggatgcgccagcagtcagctctggaccggctactcaggtggaagagctgatctaccttgaggttccggatggcagaaaccacatctcccccagtggctcctagtgctgtctggcactcctggtgggtgaccccatgcacactcagctccatctccataatcttcctctgcaactcaggatcggacaagaggcctccagagagggcagcggctttacgggctccaggcattcccatggggtgattgtgtgggggttttcttttgggccagggaagcctctccctagagggctggctgggctgaggagagctagaggataaaggtgggcgtggaggcaggcctggaggtccctggggcacagctctggcttgtcgaatttcaggggggcttgaaccaccccctgtgggacgaggaccgagggacagaactgactccagactcctcggaaaggcgtcttgtcacc

SEQ ID NO: 84562 - DNA, 825 bp, Homo Sapiens
  misc_feature (378)..(378): n is a, c, g, or t
  misc_feature (779)..(779): n is a, c, g, or t
  misc_feature (790)..(790): n is a, c, g, or t
ggtggagaacttggcctcttatcgatgaattaagcaacaatgtaactggtcttgacttgtcatattcccccatgcaatcctaggtctgtattgctcaattttaggaagcctttgctactccatcagtaggtttagatttgagcttttgagacctggctatggaaaagaaagacacttgagaatttagtgttggggtctgtacagatgatgctacccaatttggctttgaaggatcaagtaacaggttgaaaactatttttataaaggtaatactttttcagttcccttcttccttccctctcaatccactagctttcatgttgggcaaggaaaagttgaggaaggatggctgatggtgatggaaagctgtgttaatgngtatgaggaatgtgtgaaaagtatacacaaagggctctgaagctcaaagtcagaggagtgggaggtctgatcattgttggtggaaaaacgtaaggttattttgtgtttttaagttggttttacaattctttcctggggaaattatttctggaggggaaaaagatccattctaccgtatccttgtggagaaaagctaaataacctttaagaatgtgggtggtattggagaaagaagatgaattataactcccggagaatcaacgatcttaaagtgaagccctttctggtcagatgtgatcctataaaaaatcataatttgggggaaagtttaagcaaatctggccttgtagtccccgatgttataaagtgactttgtgatcaaactgttcaggctttggggntcttgttatangaatgccttgggtatagaaaaaaccatggccatcc

SEQ ID NO: 84563 - DNA, 475 bp, Homo Sapiens
  misc_feature (61)..(61): n is a, c, g, or t
gttattggtggactttaactcaataatactgagagaacttaacacgtttaatataaatccntcacaaccaccccctgtgaggtaagtattgcttacacccactttacggatgggaaatcagaaagagcaagaagtaacaatctcaagagttataaataaaaaaattttttgttttcttataaggcagactgtgctgagttctgatgatacgctaataagaacaaatactaaaacagtctctatttttctccagaaaacaactgcgtgagatttcaaaagaaggaaaaattttaagctgactcaaggggaaaatgtttagtatctgcctgatacacacgaaagtgcatatgacatttccagtttcaagcttggtaatcattatgcaaactgcactatactattaggatactggctaacagtatagctccattttgtggagatgtagtcaaaaaataaaggttttagctggaagaac

SEQ ID NO: 84564 - DNA, 432 bp, Homo Sapiens
  misc_feature (281)..(371): n is a, c, g, or t
  misc_feature (419)..(419): n is a, c, g, or t
aaaaaaacctctcaagggtctaactttacccatcataaaataattttggtgcaagggtagtggcacattttatttatttgggataccatgcagatgcaacctagccccattctttatgcaaagtagattatccgtgcatttcttctgcattgatagtgaatccttactggggacaactcattccatttggcaacaatctttaatggacaggcaatatataacattgctgaaagtctcttagcactaatttaattttataaaaggatcattaccatcaaagnnnnnnnnnnnnnnnnnnnnnnnnnnnnnnnnnnnnnnnnnnnnnnnnnnnnnnnnnnnnnnnnnnnnnnnnnnnnnnnnnnnnnnnnnnncagttttagtggatgatggtcacagttgctactatcactactaccatntggctaggcgggg

SEQ ID NO: 84565 - DNA, 864 bp, Homo Sapiens
agaaaactgaccagatcctggatctgagctgcctgctccaggcctagaaatccccaaaggctggcactgagctgtgactgctttaacagcccccaagatttggtcagtttgaggtggtggagactcagatttgttgctgaaagttcagtaacacagtcctggtctttggccctagagaaactttttatatgagaagtgttctctatatacatgtttgaggtgactctggaatggattatgaggtcatatctcaaaatgtcagaaaacgttatagagcactcgaacttttgtatttgctgcttaacctcaatattacagccacaaacaaggggtaccaagacaaagtataactgagcataagcagaaaatgttaaccctccaggtttctttcttaagcacaataaaagtgggagcgaacaacacaaggatatttttacatttgacccgtctcaaaagtagcacaccctatccttgtgccattatttgtacaaggaaatatatgattagaaggaatagaacccccagttgtcatcagcttttttagacaccacaggttgtagcagtttgaacaaactgaaaactttatacttctgtgtgagctgaactcaagtttcagaataatcatcgccatgtgggaggctttttgttaaatgcagaagaaatttcaaaatattgtatttatatctgccttccactgctgccaatttagtaagcatctcctatacaatcgacaataaacagcaaatgatgcagttcatagagtattttgcacttggggaaaaatatgtatctgaattgtaaaaagaaatgtttggattttgtatgtcttttttattattattaaaatactaaatgaaactcctc

SEQ ID NO: 84566 - DNA, 1126 bp, Homo Sapiens
ttttaaaaatcttataaacttttattaaccaagttcagaaataattagaggggtgatctccctggatcagaactaaaacaagtgagatcaattaagctcctttgaaataggtctgtccacacttaatattcttttttagaccaatttagctggaaatctattacttaacccacattcattgatatcatagtcttgtcttatatttctttgccttaggaaggatttttctgtgattctgattgtgtctgactacaagctgaagatatcttaattaataacagggcaggaagaattgagtggggaaagaaggccttcggacagtagataagtatccaaagcagtgtgggcaaaaagagtaagcaacatcccctgggatttttcccatgtgggtatcactgagcaaagctgctgtgggaagatatgtagattaatgggaaatgcagggttattatggaggaaataactcacaggatgatttcatagcctggctaaattactacttgattaactcctgataaaactcagagcgcacaaagcgaggcagagaatccttttccatcagggcatggattcttttctgggccatgtcaaagctgctcagggaaggttccaccaggttcttcattgtgatgtccttagtgaagtggtcaatattcacctctttaggagcctccgtttgaatgaattcttcataaatttgctttgccttctcagccatcttggcaggggacttgatcttcttgtaatcctcacaggcaatccagaactcaaggttttcctcactgaattcagacttcaggaaacttttgaaactggcaagtccatagttgttctgcaggagtttgtccagggaatcacgccactgcagggcctcgtccagcgaggttttctgggtcttggctggtttctctggcttctcattgtacggaatgacaaggtcaccaactgagtctggcttctggaggagaattcccaacttgatcttaatctccttggccctttccaggcatgagtggggcaaagctgcaagtcctttgcacattttggcaggtggcttagctcctccgctttaagtacaacttcttaacagcagagccagtctttgaaaacttcaaaactgtctccc

SEQ ID NO: 84567 - DNA, 848 bp, Homo Sapiens
cccgtgtggataaaagtatcccacaaggcaagtgggggggcaaaaaaagagttaaggcaaccttcccccgtgggatgttttccccatggtgggttatccactgagccaaagcctgctggtggggaaggatatgtagatttaatggggaaaagccaggggttattatgagaggaaaataactcccacaggatgatttcaatagcctgggctaaaattactacctgaattaactcctgataaaactcagagcgcacaaagcgaggcagagaatccttttccatcagggcatggattcttttctgggccatgtcaaagctgctcagggaaggttccaccaggttcttcattgtgatgtccttagtgaagtggtcaatattcacctctttaggagcctccgtttgaatgaattcttcataaatttgctttgccttctcagccatcttggcaggggacttgatcttcttgtaatcctcacaggcaatccagaactcaaggttttcctcactgaattcagacttcaggaaacttttgaaactggcaagtccatagttgttctgcaggagtttgtccagggaatcacgccactgcagggcctcgtccagcgaggttttctgggtcttggctggtttctctggcttctcattgtacggaatgacaaggtcaccaactgagtctggcttctggaggagaattcccaacttgatcttaatctccttggccctttccaggcatgagtggggcaaagctgcaagtcctttgcacattttggcaggtggcttagctcctccgctttaagtacaacttcttaacagcagagccagtctttgaaaacttcaaaactgtctccc

SEQ ID NO: 84568 - DNA, 682 bp, Homo Sapiens
  misc_feature (472)..(482): n is a, c, g, or t
agcataggaaaatttggaaaagttaatagagttaaaattctgttggttcttttctttttcttttgcaaaacactaccctccttctccttcagcatctgttgtgtatattctgccctcacatctctgccatgatttcttagggaaacgtgtatattgtaaaataagcagattataacgtggtgccaaacagaacatctgcttctatcctcaaagcatgtatttaacttattcatcctctgcattagaaaataaaagtgcagcttatgttcaaaaagtacaactcatacaaagcaaggtttaaaagttctgtacttagtgtaacctttcaaaggtttgtcttgattagtataaattcagactctgcttacccattgactataagtaactgttttttgttttcaagtctttagatgacagatcatgctggagtagatgtgctcttgcttgcataaagacagctgtgctatggcgnnnnnnnnnnnaatctcaaaagttaacgtgattcaagagagtggttttgctaaacaaactgaagcacactcgtcattacattaaaaggtaagaaaacaattctgagagacagcaagcataaagggcccagaatcactgtgcgaggccacaggtcaactcacccagcggacatatgtacaccagtgttgaatctttaaaattctaccccaga

SEQ ID NO: 84569 - DNA, 1065 bp, Homo Sapiens
cggtccggaattcccgggatctggtggtgagcaggacggtgcaccggacggcgggatcgagcaaatgggtctggccatggagcacggagggtcctacgctcgggcggggggcagctctcggggctgctggtattacctgcgctacttcttcctcttcgtctccctcatccaattcctcatcatcctggggctcgtgctcttcatggtctatggcaacgtgcacgtgagcacagagtccaacctgcaggccaccgagcgccgagccgagggcctatacagtcagctcctagggctcacggcctcccagtccaacttgaccaaggagctcaacttcaccacccgcgccaaggatgccatcatgcagatgtggctgaatgctcgccgcgacctggaccgcatcaatgccagcttccgccagtgccagggtgaccgggtcatctacacgaacaatcagaggtacatggctgccatcatcttgagtgagaagcaatgcagagatcaattcaaggacatgaacaagagctgcgatgccttgctcttcatgctgaatcagaaggtgaagacgctggaggtggagatagccaaggagaagaccatttgcactaaggataaggaaagcgtgctgctgaacaaacgcgtggcggaggaacagctggttgaatgcgtgaaaacccgggagctgcagcaccaagagcgccagctggccaaggagcaactgcaaaaggtgcaagccctctgcctgcccctggacaaggacaagtttgagatggaccttcgtaacctgtggagggactccattatcccacgcagcctggacaacctggggtacaacctctaccatcccctggggctcggaaatggccctccattccgcaaaggcttgcgaccacatgcccagcctcatgagctccaaggtggaggagctggccggagctccgggggaatatcgaacgcgtggcccgcgagaactcagacctccaacgccagaagttggaagcccagcagggcttgcgggcagtcaggaggcgaaacagaaggttgagaaggaggctcaagcccgggagc

SEQ ID NO: 84570 - DNA, 1399 bp, Homo Sapiens
  misc_feature (162)..(176): n is a, c, g, or t
  misc_feature (1244)..(1290): n is a, c, g, or t
  misc_feature (1333)..(1341): n is a, c, g, or t
cagtcgacggtaccggacatatgcccgggaattcggccattacggccggggggccactcggggactgtcccttgctccaggcgctcactttgcgggcggcactttttccaggttgttaatccagctaatggagaaggatagatgcacgctacttggtttagnnnnnnnnnnnnnnntgagcaaacgagacgccccttccgttttatgataactaagctgcagggaaataaatcggctggccctactgcaatctactgcactcgaggtgttgccacatctgcaaacttcctgggagagtaatggggattcgagtgcttcgattatctttggtggtcatcctcgtattattactggtagctggtgctttgactgccttacttcccagtgttaaagaagacaagatgctcatgttgcgtagggaaataaaatcccagggcaagtccaccatggactcctttactctcataatgcagacgtacaacacaacagatctcttattgaaacttttaaatcattatcaagctgtaccaaatctgcacaaagtgatagcggtatggaacaatattggagagaaggcaccagatgaattatggaattctctagggccccaccctatccctgtgatcttcaaacaacagacagcaaacaggatgagaaatcgactccaggtctttcctgaactggaaaccaatgcagtgttgatggtagatgatgacacactcatcagcaccccagaccttgtttttgctttctcagtttggcagcaatttcctgatcaaattgtaggatttgttcctagaaagcacgtctctacttcatcaggtatctacaagttatggaagttttgaaatgcaagcaccagggtctggaaatggtgaccagtactctatggtgctgattggagcctcattcttcaataagcaaatatcttgaattatttcagaggcaacctggcagctgtccatgctttgatagatgatactcaaaactgtgatgatattgccatgaattttatcattgccaagcatattggcaagacttcagggatatttgtgaagccctgtaaacatggacaatttggaaaaagaaaccaacagtggctattctggaatgtggcatcgagctgagcacgctctgcagaggtcttattgtataaataagcttgttaatatctatgatagcatgcccttaagatactccaacattatgatttcccaggtttggtttttccatatgccaactannnnnnnnnnnnnnnnnnnnnnnnnnnnnnnnnnnnnnnnnnnnnnnactgccttggcatttgaagtagccttctccatgcctatgcaannnnnnnnnaagcaaccatcattgaaatttttatcctacttcccagaaaggtcctcctaaccaatag

SEQ ID NO: 84571 - DNA, 826 bp, Homo Sapiens
  misc_feature (694)..(694): n is a, c, g, or t
ggggctttcgcccgctgctgccgccgccgccgccggccgcggctgcactcccaagatggcggctcctccgggcgagtacttcagcgttgggagccaggtgtcgtgccggacgtgccaggagcagcggctgcagggcgaggtggtagcctttgactaccaatccaaaatgctggctttaaaatgtccctcttccagtggaaagcccaaccatgcagacatcttgctcataaacttacagtatgtttcagaagtggaaataattaatgaccgaacagaaacccctcctcccctagcttcactcaatgttagtaagcttgccagcaaagcacggacagagaaggaggagaagctgagccaggcctatgcaatcagtgctggtgtctctctagagggccagcagctcttccagaccattcacaagaccattaaagactgtaaatggcaagaaaaaaacatcgtagtcatggaagaagttgttattacacccccatatcaagtggaaaactgcaaaggcaaagaggggagtgcactgagccatgtacgcaaaatagctgaaaaacattttagagacgtggaaagccaaaagatactgcaacggtcacaagcccatgcaaccacagaaggaggctgccctgacatcctgagtccgtacacatgggagactcttccagcatccagccaaaggagcgctggntggtggcttcagccggaggcaggcccggggggaagggaaggggatcctatatgtccctggttggcctctttaaccaaaggggtcaggccatttccaaaatccttaagactttggaacacaaccaaaccaccc

SEQ ID NO: 84572 - DNA, 1324 bp, Homo Sapiens
  misc_feature (13)..(13): n is a, c, g, or t
  misc_feature (1083)..(1091): n is a, c, g, or t
  misc_feature (1116)..(1127): n is a, c, g, or t
tggtacgctccgngattttcccgggatatcgtcgaccacgcgtgcgcgaatgtccctcttccagtgtgaaagcccaaccgatgcagacatcttgctcgataaacttaacagtatgtttcaagaagtggaaataattaatgaccgaacagaaacccctcctcccctagcttcgactcaatgttagtaagcttgccagcaaagcacggacagagaaggaggagaagctgagccaggcctatgcaatcagtgctggtgtcctctctagagggccagcagctcttccagaccattcacaagaccattaaagactgtaaatggcaagaaaaaaacatcgtagtcatggaagaagttgttattacacccccatatcaagtggaaaactgtaaaggcaaagaggggagtgcactgagccatgtacgcaaaatagttgaaaaacattttagagacgtggaaagccaaaagatactgcaacgttcacaagcccagcaaccacagaaggaggctgccctgtcatcctgagtccgtacacatggaggactcttccagcatccagccaaggaggcgctggtggtggcttcagcggaggcaggccgggggagggaagggatcctatatgtcctgttggctcttaacaaagggtcagcatttccaaatcttagacttgaacaaacaaaacacccaacaaaaaagaacaagagaataatttaaaagttgaatcattacttgactaacagacttcggtccaccatgtccttttcacagccctcttctggaacagtcaccttgttaattttatttttgaaaattattttcccactctgccctttacttctgactttcctttcctagtttgttcctgccattctgtttttataagtggctacacttgccttctgaatgattgaaagaaacttttacatcttttcttccaaaataaaagtaacaagctgaagacaaaaagccaagacgcgtgcgcacagcccagagtcagacacaccttgagcctgaccagttaaattcgacccggaagggtcggccccgcgcccatccaccaacgcacacttttcacccactgtttcccgnnnnnnnnnggttttataacactccctctgttgnnnnnnnnnnnngttctttccccgaagaactctcttataaaccaacacctttctctgaggccgccgccgcggtcccccccttccccctgaaccacgatagccttggcggcccgcctcaactcgcgcggtttctcccccgaccagataacatcccgacgcatgatctacatcatcaccccgcggtatggccaccctcccactccacgcat

SEQ ID NO: 84573 - DNA, 466 bp, Homo Sapiens
cggcctcgatctacttgtctgcatggttgggagcaggtgtcgtgccggacgtccaggagcagcggctgcaggacgaggtggtagcctttgactaccaatccaaaatgctggctttaaaatgtccctcttccagtggaaagcccaaccatgcagacatcttgctcataaacttacagtatgtttcagaagtggaaataattaatgaccgaacagaaacccctcctcccctagcttcactcaatgttagtaagcttgccagcaaagcacggacagagaaggaggagaagctgagccaggcctatgcaatcagtgctggtgtctctctagagggccagcagctcttccagaccattcacaagaccattaaagactgtaaatggcaagaaaaaaacatcgtagtcatggaagaagttgttattacacccccatatcaagtggaaaactgtaaagacaaggtagagccgag

SEQ ID NO: 84574 - DNA, 347 bp, Homo Sapiens
tcttactttctggcactacaagatgctccaggttcatcttggatattccctgccccaaccctagaatccctagaatcaacccctgctccaaagagccctggttccttttgttggagaatcatacttagaaaccaagatctgggcattagatgtgcttgttgctactgggatgtcactgtttgtagcagagttgagaaatatgtatgtatattaatccatgcatatgtacacatctataattatttatgtgtgtacaaagctaaacatgagtttgtactgccgtcttcaactcaaaatttgtcccaaaattttgtggcatatgtttagattttaaagttgatattttc

SEQ ID NO: 84575 - DNA, 910 bp, Homo Sapiens
  misc_feature (655)..(733): n is a, c, g, or t
gctttctcgagcgctcctgcaccgtggggtggcggagccgggggactgcatggaacccgggacgcccccgcggggagaggagcgcgagcggccgcgggaggagggcgcccaaggcggcgggggaggttaaggctggcctgccactcctcctgctatgatgcctgggcagatcccggacccttcggtgaccgcaggctccctgccagggcttggccccctgaccgggctccccagctcggccctgactgtggaggagctgaaatacgctgacatccgcaacctcggggccatgattgcacccttgcacttcctggaggtgaaactgggcaagaggccccagcccgtgaaaagtgagctagatgaggaagaggagcgaaggaaaaggcgccgggagaagaacaaagtcgcagcagcccgatgccggaacaagaagaaggagcgcacggagtttctgcagcgggaatccgagcggctggaactcatgaacgcagagctgaagacccagattgaggagctgaagcaggagcggcagcagctcatcctgatgctgaaccgacaccgccccacctgcatcgtccggaccgacagtgtcaagacccccgagtcagaaggcaacccactgctcgagcagctcgagaagaagtgaccatgggcnnnnnnnnnnnnnnnnnnnnnnnnnnnnnnnnnnnnnnnnnnnnnnnnnnnnnnnnnnnnnnnnnnnnnnnnnnnnnnncccttcctttgggggatgaaaaaactggtacatggagggttccacaacagccggcttcagcccgagccttttttgttgaaaactcacaattaaccccccccagaaagaaaaaagcgggcctgtaagcgaaacccctaaaggggaaccgcggggccggggatgaccacaacgctgccc

SEQ ID NO: 84576 - DNA, 558 bp, Homo Sapiens
gcggccgcgggaggagggcgcccaaggcggcgggggaggttaaggctggcctgccactcctcctgctatgatgcctgggcagatcccggacccttcggtgaccacaggctccctgccagggcttggccccctgaccgggctccccagctcggccctgactgtggaggagctgaaatacgctgacatccgcaacctcggggccatgattgcacccttgcacttcctggaggtgaaactgggcaagaggccccagcccgtgaaaagtgaggtccaccggcaacatggactcagagttgggaaactgagtcctctcctgggtgaggctcatctggctgaacaactatgaagccatttaagtctgttttccttctactgtgcccaaaaggcacaaggcaacctggcctgaggttggagcatggagatctagaggaactcatggatggattcaggcgggatgtgaaagtgctgggagtgagggcctgggcctcctctgggtttagccacccttccaggttgtgtacaacctgccatatgctggggctcattgactgtgctctg

SEQ ID NO: 84577 - DNA, 1037 bp, Homo Sapiens
  misc_feature (932)..(932): n is a, c, g, or t
gaataatctaagcctgaaatagttgagagaaattgtgagcatatcagcatcaagtaccactggtgtggcaatgcacacttcaacctcttcttcagtcacaaagagttacatctcatcacagacaaatgggataacactcattaattggtgggcgatggctcgtgttatttttgaggtgatgcttgttgttgttggaatgatcatcttaatttcttactgtattcgatgactgataaaggttttcatgcctctgggattgagattagaggaagaaagcaaagaaaggacatttttttacttcactgttcatggtgtaattgtgtgcctgacggctgtagctactaacttggcttacgttgactggctactaagggactctaggagtcagaaactaaatgctgagtctctcaaaggcgtagagagaatttcagagggccttacccatgacattgaggattaaactccagttctgcccgattctcatcaccaaaaccttatcccatgcctcattggggtttggtgtccccttgcctaggggacagtcctcctgggtaagatcagcaagataactcttcagtcacattccatttgatactttgaatactctggggtccttacccaccaaatggatggaattcagctgctcaatcactgcctttctcagaactcggttgtccaaccacaattccctttcccttaggatagggctatattggcaaaatgccgcccgaacagactgctgacagtaaaccaaatattagtttctctcaccttcttgaaggcatttacagtctttgtaagcttttctcctagattttccctttcctgttcctgcttagattctaagaatgaagtgcatccttctccttttcttcattaggtgaagtgggatttacccattaccatatattcaccaccaggtcactgacgangagactccaagtgaatcgctttccctctgcattcctctccttgtacagactagagggtcacattggtgtaaaagccctaacataagcctggcaaaagagatctgg

SEQ ID NO: 84578 - DNA, 1157 bp, Homo Sapiens
  misc_feature (590)..(590): n is a, c, g, or t
  misc_feature (1127)..(1127): n is a, c, g, or t
cccgggtgaaatggagaggcctcgtgccgattcggcacgagggaaatattgaaatgtcaggttccactccatttcagatgagattagttcatttagaccttaaaggagctccaccaaaggtctcgtacctctcagagatttttcctctgttccgtgcgctaggtgcaaacggcctcctcattgagtatgaagacatgtttccctacgagggccctctgaggctgctgagggccaagtacgcctacagcccctctgaaatcaaagagatcttgcatctggctggactcaatgagctggaggtgattcccttggtgcagacatttggacacatggagtttgtgctgaagcacacggccttcgcccacctgcgggaggtgggctccttcccctgcacccctgaacccccacgaggcagagtccctggcgctggtgggcgccatgattgaccaggtcctggagctacacccaggcgcccagcggctgcacatcgggtgtgatgaggtctattacctcggagagggggaggcctcgcgccggtggctacagcaagagcagaacagcacggggaaagttgtgcctgtcacacatgncgggcggtggccagcggcgtggaaggcccggcgccccagcgtgacacccctggtgtgggacgacatgctccgagaccttgcctgaggaccagctcgcagcgtccggggtgccgcagctggtggagccggtgctctgggactacacggccgacctggatgtgcacggcaaggtcctcctcatgcagaagtaccggcggtgcggctttccgcaactgtgggcagccagtgccttcaagggtgccacggggcccagccaggccgtgccccctgttgagcaccacctcaggaaccacgtgcagtggctggcagttggcgggcagcgggcccacggactcactgcagggcatcatcctgaccggctggcaaaggtacgaccactactctgtgctgtgcgagctgctgccccgcaggagtcccgtccctggccgcctgcctgcagttgcttctacgcgggaggattttgaatgaagaatgttaaagcggaaaggggaagaacctttctcgggatttccagcctgggaaaaacggacccctgtntttaggggaggggggccggtctcctttcca

SEQ ID NO: 84579 - DNA, 433 bp, Homo Sapiens
cctatctactatgaaagcacaaaggattgggtgagaaaaggaaaggaaagctttgcatgtgagacagactcagttcagtaatccagcccctggttccgtgcaggggttcggaggctgctgaccctaagggctctgtaacacagcactttcagtttgtacatacgaccagttacacacaatttacacccacaggctctgtgcgagcctctctcagcagccccgcatcgccgctgcgggacagccacgctgggaggcgtcgctcgggagcccggccgtccctcttcaggtactggcgcgggggaaacgcttccagccaggagccgcccggcctagcgcgcagagccagagccgcacccgcacctcacctgcgccgccgcggtcccgcgaggtccgggggcgcagccaggcccggccgccccgccctcgcggccgc

SEQ ID NO: 84580 - DNA, 876 bp, Homo Sapiens
gcggccgcgagggcggggcggccgggcctggctgcgcccccggacctcgcgggaccgcggcggcgcaggaagaagtccccaaggagacttcgccataggagttcacaggaaatattgaaatgtcaggttccacgccatttcagatgagattagttcatttagaccttaaaggagctccaccaaaggtctcgtacctctcagaggtaaggactcccttttacctctagagcattactttttgccttggcttcattctttaaagttttgagcagtgttctgtggaaacgggtacctagaacacaaccacaaggttctcggtggagcaagatggtggcagcagcattgattttgaatttcctccatagcctctcacaaaaacagaacaaccaggatgacaaaagggaaagaaagaggagacagagaacaaaagaaactcacagcttctttcttttgggttgaagtgtatctttccaaaaagatatgttcaagtcttaacccctgggacctgtgaatgagaccttatttggaaataggatctttgcagatgtaatcaaaataagatgaagttgtactagaatatggtgaaccctaatccagtgattggcatccttatgaggagagggaaatttagagcctgagacacacggagggaaggcagtgtgaagacccaggaggatgccccgcggtgccagcagccaagatggtcatgacgtgccacgaaccccaggatgccgaggacagctgacgatcaccagaagctagagagaagcaaggaagggtcctcctcttcagccttcagggagagctgggtctgctgacacctggattttggacttagggcctccagaactgtgagagaataaatttctgttgtgt

SEQ ID NO: 84581 - DNA, 598 bp, Homo Sapiens
ttttttaatatgtagcttctgatttattaactcactttttgccgacgctgcctaaatgctaccctggggtataatttgcaattctcacataggtaccttattattattttggcgtggtgtatatacgcctatctttcttttaaaagaatcagttaaatggaatttggaggtggaagtcacatcctctatactagaaaattcaatacatagcttcaagaatttcatttaaaaataaagacaagacaaacaagaaaaagaccaaagggcagaatagaaatagcttacaagcccttagcagagctagctcttgaaccccaaatgggctgtttcctccttccttcccttatcctacctttgagaacataaaaatagaaacacgaaaaatgacatgtgcatacatgtaagtaaaatttgttcaaatggttagaaaatcttaaattactgatttaaaaaacctggttaaattctagagcatctttctcttagtctaaatttgaaacgcatgaaatctaagcggtgtgtacttaagtcaatttgaagagtatataatttgacccccaaagtcacaggtgcgtagaacttgtgggcaggttatgat

SEQ ID NO: 84582 - DNA, 636 bp, Homo Sapiens
  misc_feature (470)..(470): n is a, c, g, or t
tagatgtaatagatgggccaacaagttcatttcaaaatataatctaataattagttaatatttggagagagaattcatatatttttaaaaaatacttgagataatatatttttctgtcactggaaatcttttattttccttgcctgcattggatgttaggctggaatggaagacaacctgcaaaatcattctgaagtcttaaggtttcatgattccaaagatatagtatggtaagctaggtaactctagctcagataattcactacagtgccttaaatgaagattagattctgttgttagtatattagtgatatgactaatctcactgtcacatattaaccaccagttctcatctgttgatcatatgtcttagaacagatttatgatttacctacatgtactagaattctgtgattctttgaaaaaaatacttaaaaggaaatttattatgtaagagtatggccttactnttccatacttgattctcatcaactttaaaagatgttaatgtggcatagaaaaaatacaatttctgttttagaatgtagattctgatagttactacaaatagttctttataataagataacagatgtgaggagtcagtggactattttgaataatgacacttcattt

SEQ ID NO: 84583 - DNA, 470 bp, Homo Sapiens
  misc_feature (30)..(30): n is a, c, g, or t
  misc_feature (43)..(43): n is a, c, g, or t
aggttctcccagagctgcacaactagttangttttgattggtnttggttttttaatttggggtctctttgttttccccaacataatgttcataatgtttctgcattcatctgttcttaaattgaaaaacatataatttacttcttataaattgaagtcttaaatgtgaaaccaagaaatgtaatcaagcagtaaaaacatctgaatgtagaccatgatctcaagttcttccattttctcccccacgagtggaaaatagacttctacataggaaagctaaaatatgttaatatttttaaattaaaggtttaatatcagaatgcagtccaaagagcaaatcatattacataattacattttaattaaatatagaatattctactgaattgcaatttattaaatattcttatcctcttaaataaaactgctcaacagttaatcagcagtgaatcatcttgcagctatgcaatt

SEQ ID NO: 84584 - DNA, 924 bp, Homo Sapiens
  misc_feature (773)..(773): n is a, c, g, or t
  misc_feature (822)..(822): n is a, c, g, or t
  misc_feature (873)..(873): n is a, c, g, or t
  misc_feature (903)..(903): n is a, c, g, or t
cagttttacgagctgttgacaaaggcactggactaaagtctgatgaccttccaatccagatgagcatggatgattggccagaaatgaagaagaagtttgcagatgtatttgcaaagaagacgaagccagagtggtgtcaaatctttgacggcacagatgcctgtgtgactccggttctgacttttgaggaggttgttcatcatgatcacaacaaggaacggggctcgtttatcaccagtgaggagcaggacgtgagcccccgccctgcacctctgctgttaaacaccccagccatcccttctttcaaaagggatcctttcataggagaacacactgaggagatacttgaagaatttggattcagccgcgaagagatttatcagcttaactcagataaaatcattgaaagtaataaggtaaaagctagtctctaacttccaggcccacggctcaaagtgaatttgaatactgcatttacagtgtagagtaacacataacattgtatgcatggaaacatggaggaacagtattacagtgtcctaccactctaatcaagaaaagaattacagactctgattctacagtgatgattgaattctaaaaatggttatcattagggcttttgatttataaaactttgggtacttatactaaattatggtagttattctgccttccagtttgcttgatatatttgttgatattaagattcttgacttatattttgaatgggttctagtgaaaaaggaatgatatattccttgaagacatcngatatacatttatttacactcttggattctacaatggtagaaaatgganggaaatgcccaccaaattggtatgggtggataaaaggtcaccgtggaaacnggaggtgaattggggttggcatcccagggnccttttggtcctgggtggttc

SEQ ID NO: 84585 - DNA, 676 bp, Homo Sapiens
aaaagggatcgttccataggagaccacactgaggagatacttgaagaatttggattcagccgcgcagagatttatcagcttaactcagataaaatcattaaaagtaataaggctggtagcaagttctggatcttatacccaacacacagcaacatccagaaataaagatctcaggaccccccagcaagtcgttttgtgtctccttggactgagttaagttacaagcctttcttatacctgtctttgacaaagaagacgggattgtctttacataaaaccagcctgctcctggagcttccctggactcaacttcctaaaggcatgtgaggaaggggtagattccacaatctaatccgggtgccatcagagtagagggagtagagaatggatgttgggtaggccatcaataaggtccattctgcgcagtatctcaactgccgttcaacaatcgcaagaggaaggtggagcaggtttcttcatcttacagttgagaaaacagagactcagaagggcttcttagttcatgtttcccttagcgcctcagtgattttttcatggtggcttaggccaaaagaaatatctaaccattcaatttataaataattaggtccccaacgaattaaatattatgtcctaccaacttattagctgcttgaaaaatataatacacataaat

SEQ ID NO: 84586 - DNA, 1522 bp, Homo Sapiens
cggctaggtacgaggcatgggatgtagaattcggcacgagggcaggacctgcataacaccctggcagagcgcgtgcactctgtctacatcacctcccggtgtgtgagtgcagtgtggctggaggctgcctgaggccagggcctgtggaggtgccagggcccaccatgtcggggtatggttgtagtgccctcttggagccaggttcacggtggctgtttcctcctcctcccccatgatgtcccccctgtcaccgtggcatgatcaccctcatctcctctgccctagagctgtttgttcaatcactgatgggcaaaggggagatgtagctaactggtggccctcctccccatctcagtttgcaactcaagggcagccatgcactccccctgtggtgtcgctactcccctcctgcaggtcatgcagcttgatcctgatccacactccgcccaggccctccaagctctactcacccctagggcctcagtaaactcagaccatcccaactggggctcctgggggtacaggaatccttatgaatgtatagaatgcatactgcctaggcccccagtcgtctgcagtaattcaaaagctggtatttttcttcctaaatgtcacataggcaaaggctgcccaaatccccaaacttgttcttcaaaggtttgacaggcttaatgtgggcatccagtggcctgtggacccccccctgccaccacgactgctgccacccggagttcccccattgtctttggtgcctgggcttccagagtccctcccatcaggactaccagcttgctcagttagcagcagagggcagttccccagcttgatggtttctgagctaagtctggcatggaggggcaaggggtaggggatggggtgctgtgtaggaatggcctcagctcttgttttgctgctggttttaggggccaaagtaaatgggtggattctggaacctcaggcctagactaagttgcctttgtgggggcgatgaagcagagtcccctggtcaagtctctcggctcctttaatgtaagattgagagctgggcaaacaggtcccactggggactgtgactcttggagattaaaggacagggcattgatggaaggtaagggccaggagaagaggcctttctgctgtgtcccctcacggccttgccctcgaattctgcaggccctgggctcccctgacacctgtcatatttatggaccagacactggggcagcatcaggcacagtctgtctgggtgcaacttcttcagctgtctggccgcaccttaaaaactatttattcaccaaaagccccaggcatttcagaaggtggcactcaggtcaccctgaaaaccccccaggggcttgcaattctggaaaatattttgactagctgcttggctggatgtacaaagaaataggcattattttattgctgtaatattgtatgatactttaactgtacaataatgttgtcacttactgtaaatgtactatggttttattaacaataaacactcattaacaatgaa

SEQ ID NO: 84587 - DNA, 1469 bp, Homo Sapiens
  misc_feature (884)..(926): n is a, c, g, or t
ctttgaatcctctctccatcacgtgacttctgtgagtttcagaaggtcgccttaaacccttcttgaggcttactcaagcctcctcaactgcaaaatgggaaggctaatgcatacttcccttggggcatcaggtgagggccacatagaataatgtatataaagtgcctaacacagctcctggtacgcaggaggggctgggtaaatgtgagtcaagtatgaacatctaaacatcataggccaggtggaaagaacatctaacaaaatctatgaactaaaaccaccttgactggttttcaatagactacaggacaatttcctcactcttatcaatttttttctcttctctctcccgctctgggattctttaaaatgaaatactggcagagttcaaagcaaggtttgccgaagaagacagaggcttagattaggaaagaacagagctcctgggccaatgtctctagaagacgcttcctttctcacctctcctccctgcagctgcccgcctgccctcagatctcctagctcttgaatggatttcttattaggaagccaaagcagataggggaagcacagaaaaagaagtgaattgtctactaaatgaaaagtcttttccatttgctcagagcccgggtgtggaagcactggggaatctggaggtgggttggccatctgtgctggcaagtgaattgcctcaggtctggtatctggggagtggccgaggagaggggaagagggatagagacttaggcttagactctgggggctgggagtgctcttgtccttctaatcccgagaacttggaggtgtgcccaaacaagtatcagctgcaaacgtgggcgtcatggtcctctctcacctacagagcaatgtcaagatatgcatannnnnnnnnnnnnnnnnnnnnnnnnnnnnnnnnnnnnnnnnnnagtcaccgctcccatctcctcctctaacactgcccgtctgaatgtccccccaccccatcactcggcaactttcctcttggacgggggcaggaggtgggcaggcagctcgttgggcagctcgtgcccctccagcttgactttgatgaggtggttggccagtgcaaactcgtcgtcgtccagcatgccatccttgtcaatgtcggccagcttccagatcttgcccagcacactgttgggcaacttggagcgcaccatctccttattggcattagcgcctgtgatcttgccatccaccggtgacagggtgtagaaaatctcgtcgtacatggtcttgtccctggccaccacccactcagcataatcgataccttctacagccacctccccatagccatgcccaaaggggccgtgcagggtgccctcgaacgctccgcccttcaccatctggatgggccggtgtgactcctcctggcggcactagaccatgaggtgggcaatgtcatggggcagcatgttcgtcactaactgcaacagctttgctct

SEQ ID NO: 84588 - DNA, 511 bp, Homo Sapiens
caaacaagatgctttttttaatgaaaagcgtaatatctggagtgttctatttcatggaccaaacagaacggaagagaactttgtgtttgtttcctgttcaggatggctagggcgagaagggcccctttgtgccaacctcttttgttctctttaatcaatgagattcttaaaaagtaaaaaggaagggatacagattctcagtaactaaaacaatctcgtgtgcccttgaggggaaagtccttgatgtttttaagaatgtcactttattgttttttaactgaatgatatagaggtatacaattttcaaactgtttgccattttaatcaagcaatttgaaaattaaaatgtttttgtcaggcattaccaaatggcacagaatgtgataggccagcctggttttggggtcctttctctactggttgatatgcataaaaccttctaaaaatcaagaatattgccagagagcaacaggaataaagaagctaagtaaagaataaaaaagaaaaatag

SEQ ID NO: 84589 - DNA, 314 bp, Homo Sapiens
acacataggattaataatataggcatataggtggcatgattcaattaaaaggctttactttttatgccagaaaaaacccaataaataaaaggtgctaaaattagcattaagaatttggttgtaatatactgacaaatctgggaaggcaaatcctcaaagctcccctgatactgatctgtctcagcaaactacaaagcaaatacataaataatgcaaaatatgattgagaatgtgagatttttaaaaacaaagacaacataattcaggttaactctgttgaacagtcaataaatgaaattcatccctgtgccgaa

SEQ ID NO: 84590 - DNA, 1697 bp, Homo Sapiens
tagggcggagagtatgaagtcgacggcgcgccgaattcggcacgaggggccaggcttgtgttcgcagccttgccggggctggggttccgatgtggtccccggagcgggaggccgaggccccagccgggggagacccggcgggccttctgccccccgagtgggaggaggacgaggagcgcatgtccttcctgttctccgctttcaagaggagtcgcgaggtgaacagcaccgactgggacagcaagatgggcttctgggcgccgttggtgctgagccacagccgccgccagggggtggtgcgcctgcgtctgcgggacttgcaggaggcctttcagcgcaaggggagcgtcccgctggggctggccacggtgctgcaggacctgctgcgtcgaggggagctgcagcgggagtcagacttcatggccagtgtagacagcagctggatctcctggggggttggggtcttcctgctgaagcctctcaagtggactctttctaacatgctgggagataataaggttccagctgaggaggtccttgtcgctgtggagctgttgaaggaaaaggctgaggaggtgtatcgtctgtatcagaactcgcccctctcctcccaccccgtggtggccctgtcagagctcagcaccctctgtgctaactcctgcccagatgagaggaccttctacttggtgttgctgcagctgcagaaggagaagagggtcacagtcctcgagcagaacggggagaagattgtgaagtttgcccgagggccacgtgccaaggtctctccagtcaatgacgtagatgttggggtgtaccagctgatgcagagtgaacagcttctctcacgcaaagtggagtccttatcccaggaagcagagaggtgtaaagaagaagcccgccgggcatgccgagcaggaaagaagcagctggcactgaggtctctcaaggccaagcaacggacagagaagcgcatcgaggccttgcatgccaagctggacactgttcaaggcatcctggaccggatctatgcctcccagacagatcagatggtttttaacgcctaccaggctggggtaggagcactcaaactctccatgaaggatgtcacagtggagaaggcagagagcctcgtggatcagatccaagagctctgtgacacccaggatgaagtttctcagactctggctggtggggtaacaaatggcttagattttgacagtgaagaactggagaaggaattggacatcctccttcaggataccaccaaagaacctttggatctgcctgacaacccccgcaataggcattttaccaacagcgtgcctaaccctaggatctcagatgctgaacttgaagctgaacttgagaaactgtccttatcagaaggaagtttgggtcccaagcaagtaaatctccaaaaaaggcaattggcaaccgactctaaaaccattgtaagaccctcaagtgaaggaccctcatgtaaaagagagaccaggcctgctgggtgtgtacatagttatttaaacaagaaactctcagaatgtgtttggaagaggagaaaggagaaccactgattttatctggatgctactacttactacaggacagatagaatttctggaagcgatgctccaaaggcttgctctcagctgtatcatggacctgccttctcatctttatagtgccacgatttatac

SEQ ID NO: 84591 - DNA, 902 bp, Homo Sapiens
atcttcttggaggtccaatttcgggctgtggttgggtggacaatgcccttccacttctcatggagccaatatggctgatggtcactctgggttaaggacagcttctgtcccagaacaaggctcttagaagacagaatggtgaatccatcccctggcccatcttcagaggtggaatttgaagttccttctttatcgctgtcctttggtttggactttttggacgtccgtggtttggcagccttggatttcttcccccccttcttgcctgacgtggccttcctgcctcttttctctgggggtggggagaggatcgtttccgacttgcctttggtccctcgctttttggccagcagttcggggtgaattctgggcaggacgcctccactggcgatggtcactccttttagcagctggttgagctcctcgtcattggcaactgccagcaagatgtgtctcggggctatccgggccttcttgttgtccctcgcggcattgccggccaattctagaatttccgctgccaggtactcaatgactgccgccatgtagacaggggcgcccacgctgatccggtacttgaacgtccctttcttcagataacgcatcagcctccccactggaaagatgacacctgccctagctgaacgggacagcttggacattttcttcttcccactccggcccgacatcttgcttcagtttccctctcagcttgctgacacagtggcctcccggcactaacacaatgctggtgctgcgccgcctgctcccggcgcccggtgccctctgcgcgcccctccacgggcgcaggtttggcccacgcggcgccggtgccgggcaggactctttgcctttctttgggttctatctgtgcgtgtcaatggcggcaagcggcagttctc

SEQ ID NO: 84592 - DNA, 645 bp, Homo Sapiens
  misc_feature (505)..(505): n is a, c, g, or t
  misc_feature (594)..(594): n is a, c, g, or t
gcttggactgcagctagccagcatgctaggctgctcattctatgaagtgtctgtcagtgaaaattataatgatgtctacagcgccttccacgtcctctgtaaagaggtcagtcacaaacagcagcctagcagtacacccgagaagcgaagaacctccctcattcccaggcccaagtcacccaacatgcaggacctgaagaggaggtttaagcaagccctctctgccaaagtgaggactgtcacctccgtctgaagcaggaggagcactcaagggggtttggtcttcccaaggaagagggcctgaggttctcctagtgcaggaacgttgaatatttggcaatgattcctggttccagaaagggctggagcagaagggccaagagggcctgtggaacttgcttacagaaaaggaagtgttgttctgagcagggggacaggattgatgaggcttgaaagagcccactgagccactctctgaatatgtgaaatgtactctgtgtctttncctttagagtggggagggggcataatcgtttcggtttctgcattcaactaccttgtaaatggtggtccgttgcagtttcaccaaatgtnattggatgtgatttacagtgggaatgaaagaacagattaagcattgatagg

SEQ ID NO: 84593 - DNA, 1085 bp, Homo Sapiens
  misc_feature (81)..(81): n is a, c, g, or t
tgctgagggtggagacccacgagccgaggcctcctgcagtgttctgcacagcaaaccgcacgctatggctgacagccgggntcccgccagcgaccagatgcagcactggaaggagcagcgggccgcgcagaaagctgatgtcctgaccactggagctggtaacccagtaggagacaaacttaatgttattacagtagggccccgtgggccctttcttgttcaggatgtggttttcactgatgaaatggctcattttgaccgagagagaattcctgagagagttgtgcatgctaaaggagcaggggcctttggcttactttgaggtcacacatgacattaccaaatactccaaggcaaaggtatttgagcatattggaaagaagactcccatcgcagttcggttctccactgttgctgggagaatccgggttcagctgacacagttcgggaccctcgtgggttttgcagtgaaattttacacagaagatggtaactgggatctcgttggaaataacacccccattttcttcatcagggatcccatattgtttccatcttttatccacagccaaaagagaaatcctcagacacatctgaaggatccggacatggtctgggacttctggagcctacgtcctgagtctctgcatcaggtttctttcttgttcagtgatcgggggattccagatggacatcgccacatgaatggatatggatcacatactttcaagctggttaatgcaaatggggaggcagtttattgcaaattccattataagactgaccagggcatcaaaaacctttctgttgaagatgcggcgagactttcccaggaagatcctgactatggcatccgggatctttttaacgccattgccacaggaaagtacccctcctggactttttacatccaggtcatgacatttaatcaggcagaaacttttccatttaatccattcgatctcaccaaggtttggcctcacaaggactaccctctcatcccagttggtaaactggtcttaaaccggaatccagttaattactttgctgaggttgaacagatagccttcgacccaagcaacatg

SEQ ID NO: 84594 - DNA, 1736 bp, Homo Sapiens
  misc_feature (33)..(33): n is a, c, g, or t
  misc_feature (46)..(46): n is a, c, g, or t
  misc_feature (110)..(110): n is a, c, g, or t
gtgagcacccaggcccaaagacccagcccaagntggcaaaaggctngatccctaaacaaagcctttgcacccaaagttgcactggtctcaacggatttagacgctcattnagccatatttcccactgccacaagctgcaattatcaacaagctcttaggcccaaagccacatggcagaaagcacgtctagcaaagcagtggggattgtgcccgggccaaacacacaggaaccaggagtggacctgctggggctggaggattatgaaataggaagcagggagctcagatacctctggtggcctccaactgcaggacaactctcagaattgtcaaactgaacccttaagggagtgtcacccaaaaagcccacataggaagtcgacacccacaaaaataaatattgcaaacaaaagttctcacatacacgtcacactcattcatacttttcctctgagaaccgagaaagcctggctccaaagagtctcagattctcatgaaaagtagagatcttagacacagcttgttcaacgacaggggtcatacgcctgggtcaagacaatcaatttgccttgtcaagcaataccaaaataatcatctggcttgttacaaaagtatctccaggctccaagggaagcagaaggggcccggcagcctgcacaggatctgggtgtagcacggcagggagtgggggcggtgagaggagggcggctcggtctcttgcctgctcactggtggaggtgggcccggtcatcagggcgcttgatgtggatcctccgcacgcgctcgatccgctcccgctcctcgtcctcgtccaggtggtgggagcgccccgccgccccgcctgtggcctccaggagcgcattgtcaggtccccggccatcctgggcctcatacagcaaaatgttcagggtctcctcataaatccgggcttcgggaaactccaccttggtctgtttcttctcagtggcatagacgatggaggtacaacagacttcagcaatcttccggccctgaccataaaagggaccagcagcagatttcatccccaataacatcctttatgaacaggacccttccgttaaagcgcagagacagcttatcaaacagttcaatgtttttcaacatattgtcgtcagaattgctggtatatgagtatttgttgttacttctgttgtagagcaacttcacggctggcttatttgaagtccggctataagtttttgttctttcccttggatgaggtgatcacaggggaccttgcagaaaggctcataagtatctttgttttgtagggccgcctggcactcttccaccaggccttggactaggtagtacttggcttctgctagcagctcctcgatctcccggcggctctcgggtaaaggcaccgccccgtctcgaaggtagttgagtatcgtaccaaagtgcttcccacagcggtcaatgaggatccagccttcactgtcggtgagcacttccatgcgcccgctgaacatggccttcagcatggtgtcctgcttggtcagcgtctgcatggtggtatagtagagggctccacccacattcagcttcacgtatttggagctggggctcgtgcccttgaaggaagtggtgcgggtagcagccgctggcaccgctgagctcaccacactttctcctgacatctcttccatgaaaagtcggaggacgcaggagtctccctcgtgccgaattcgccacccaggcctcgcgtcctt

SEQ ID NO: 84595 - DNA, 508 bp, Homo Sapiens
ggccttccaaagtgctgggattacaggcgtgagtcaccgcgcccggccaaataaaataaaatgttaaagcaaattcaggactacccctcctccaagtcttctgttccctttgggcagcccaggtgagcgggggaggggctgggggagtaataacatcaaaagagcgccttttcctcccttattccgaggagacttccctgggcctgactcccggtcctgtccccagcgccccgcgcactctggagccccttcagtgaccaagatacagagatcaggacgcctttgcgccgccccaaggtgcccgcccctaagctggctctgcttgggccgcgagggaaaggtgaggtcgggggcggagccgggagcgtgacagccggggtgtgtgtccgccgggcttggtgcctccggtggccctgcaagcaccgtcccacctctggccaccctccgatggggccgctaactgtgttgcctgccaatcatgctgctcctgctacttgccgtcgctgct

SEQ ID NO: 84596 - DNA, 1212 bp, Homo Sapiens
  misc_feature (50)..(50): n is a, c, g, or t
  misc_feature (54)..(54): n is a, c, g, or t
  misc_feature (176)..(176): n is a, c, g, or t
gccaaagtgcctatagtaaaatttgaacacaggcgaagtgggttagaagncganatcagtttatataatacgttggctcaacataacacaagaatgctagctacttatgcagctattgatcctagagtgcagtatttgggatatactatgaaagtgtttgctaagatctttgatgngaaaacagattccacagagaatggttgatggatggaatgctttcttctttgataaaacagaagaactgaaaaagcgtttaccttcacttggaaagaacacagaatcattaaggggagctttggctgggactgcttcgtttctatactgaagagtttgatttcaaggaatatgtaattagcattcggcagaaaaagctgttgacaacttttgagaagcagtggacttccaagtgcattgcaattgaagacccttttgacttgaatcataaccttggtgctggagtttccagaaaaatgaccaatttcatcatgaaagcatttatcaatggaaggaaactttttggtacccctttttatccactcattggcagagaagctgagtacttctttgattccagagtattaacagatggagaactggctcccaatgatagatgttgccgtgtgtgtggaaaaataggccactacatgaaagactgccctaaaaggaaaagtttactgtttagactaaagaagaaagacagtgaagaagagaaggaagggaatgaagaagagaaagattcccgagatgttcttgacccccgagacctccacgatactcgagactttagagacccgagagacctcagatgttttatatgtggagatgctggacatgtacgaagggagtgcccagaggtcaagctggcccgtcagaggaatagcagtgtggcagcagcccagctggtccgcaaccttgtaaatgctcaacaggtggctggttcagctcagcaacagggtgatcagtccataaggactagacagtcatcagaatgttctgaatcaccatcttattctcctcagcctcagccatttccacagaactcttcccagtcagctgctattactcagccttcatctcagccaggatcccaacctaagcttggcccacctcagcagggagcccaacctccccatcaggtccagatgccactgtataactttccccagtcaccaccagctcagtattctcccatgcacaattatggggattgtt

SEQ ID NO: 84597 - DNA, 480 bp, Homo Sapiens
  misc_feature (25)..(25): n is a, c, g, or t
  misc_feature (135)..(136): n is a, c, g, or t
acaccacagaaatggggaattcacnaatcgaaagaaaatgggccctaggggtcactgtactgacttgagggtgattaacagagagggcaccatcacaatacagataacattaggttgtcctagaaagggtgtggnngggaggaagggggtctaaggtctatcaagtcaatcatttctcactgtgtacataatgcttaatttctaaagataatattactgtttatttctgtttctcatatggtctaccagtttgctgatgtccctagaaaacaatgcaaaacctttgaggtagaccaggatttctaatcaaaagggaaaagaagatgttgaagaatacagttaggcaccagaagaacagtaggtgacactatagtttaaaacacattgcctaactactagtttttacttttatttgcaacatttacagtccttcaaaatccttccaaaggaattcttatacacattggggccttggagctt

SEQ ID NO: 84598 - DNA, 1044 bp, Homo Sapiens
  misc_feature (124)..(441): n is a, c, g, or t
cctggtaacttatgaacagtggttaaaaagcaggcttggttacggtcggaattcccgggatatcgtcgacccacgcgtcgtgtaaatatatacagaataatacacacagttgtgtgtgcatatnnnnnnnnnnnnnnnnnnnnnnnnnnnnnnnnnnnnnnnnnnnnnnnnnnnnnnnnnnnnnnnnnnnnnnnnnnnnnnnnnnnnnnnnnnnnnnnnnnnnnnnnnnnnnnnnnnnnnnnnnnnnnnnnnnnnnnnnnnnnnnnnnnnnnnnnnnnnnnnnnnnnnnnnnnnnnnnnnnnnnnnnnnnnnnnnnnnnnnnnnnnnnnnnnnnnnnnnnnnnnnnnnnnnnnnnnnnnnnnnnnnnnnnnnnnnnnnnnnnnnnnnnnnnnnnnnnnnnnnnnnnnnnnnnnnnnnnnnnnnnnnnnnnnnnnnnnnnnntatctatttacaggcctacaactttttgcctcagactgttccccttttctaagggtatacaagttttcaccttttaagcttcatatcctcagtgcttgtagaatgatgagcttagaggtaccaggtcattgcagttgttagcttaaagaattattgaaatggttactggcgtaaatacttggccaactcaactttattgcccctgatcttttccatttttgtttccaccttaacctatagcagctcctccaaatgaggaatgctgtaagtaagactcatcaaacagattttaaccattttattatcctgtgtgtccttacattgcttctgtgagatgtttttttcttatctgagatgaactttcaggagcctatttgaactccagactggtgttctggggcaaagagctattagccaaactgattctatgcaggtgaaggatgcactaaagttctcactttagtgagaacttttctagctattccaatacagagttctttcttatagggctattgatattgacaccaaatggagtggcttctcagcctcttaatgtcttaagtaagtgcttaatttggaatagagaaaccagtatattttaaa

SEQ ID NO: 84599 - DNA, 669 bp, Homo Sapiens
  misc_feature (212)..(331): n is a, c, g, or t
  misc_feature (655)..(655): n is a, c, g, or t
cccctgccctagaagagttcttcatctgtactcatgaaaagttgataagtcacctaaatcacctttaataagagcccagtaagttgagatgtcacaaaaacagagccagaaaaagaatctataccatctgctacagccaggaccagctacctaatttacaagtctcagcacaaaatgaaaatgtgggcctcagccagatgtggtggctcatnnnnnnnnnnnnnnnnnnnnnnnnnnnnnnnnnnnnnnnnnnnnnnnnnnnnnnnnnnnnnnnnnnnnnnnnnnnnnnnnnnnnnnnnnnnnnnnnnnnnnnnnnnnnnnnnnnnnnnnnagggtgagtgcagaccctcacaggcacagggagggtgaggagtaggaggtgggctgaccgtgactgcatatccatgcacagttcaccagctccaggagtcttcctctggctagaccaccagactgacatgccatatctgtagtcccagctactcaagaggctgaggcgggggaatcacttgagcccaggaatttgagtccagcctgggaagcatagcgagacctcccaccttaaaaacactgaaatccaagaaattggattctgaatcgaggcgagggatcccagggttgggacacgcggtcaccctcgtctcgagaagccacncaggctcgctcctt

SEQ ID NO: 84600 - DNA, 999 bp, Homo Sapiens
gggagactcggagctccatccaaacctccagcgaagacatcccagccatggccatgcagaaaatctttgcccgggaaatcttggactccaggggcaaccccacggtggaggtggacctgcacacggccaagggccaattccgagcagctgtgcccagtggggcttccacgggtatctatgaggctctggaactaagagacggagacaaaggccgctacctggggaaaggagtcctgaaggctgtggagaacatcaacaatactctgggccctgctctgctgcaaaagaaactaagcgttgtggatcaagaaaaagttgacaaatttatgattgagctagatgggaccgagaataagtccaagtttggggccaatgccatcctgggcgtgtccttggccgtgtgtaaggcggggagcagcttgaaaagggggtccccctgtaccgccacatcgcagatctcgctgggaaccctgacctcatactcccagtgccagccttcaatgtgatcaacgggggctcccatgctggaaacaagctggccatgcaggagttcatgattctgcctgtgggagccagctccttcaaggaagccatgcgcattggcgccgaggtctaccacccacctcagggggtcatcaaggccaagtatgggaaggatgccaccaatgtgggtgatgaaggtggcttcgcacccaacatcctggagaacaatgaggccctggagctgctgaaaacggccatccaggcgggctgggtacccagaacaaggggtggatccgcatgggatgtggccaccatctggatttctatcgcaaatgggaaagtccaatccttgacttccaagtcccccctgaaggatccccgcacggggacaattaactggggggaaaaaaactcccgagagaacctggtatataaaaggcttttattccaagaaaacaattccccgggggggccccccccatccgaaagaaacacccctttttgaccacgagaatc

SEQ ID NO: 84601 - DNA, 940 bp, Homo Sapiens
ctatagcgcaggtaacgaggcctgggtgttaaattcggcacgagggcccggctgccaagcgcgcactgggcagccccacgctcaaagtgttcggcaaccacgccaagaccgagagcggcgtgcagagggagaacctgaagctggagatcctgaagaacatcatcaatagctccgagggctctagctcgggctcggggcacaagcacagctcccgcaactggccgccccaccggtcggaagccactgacctgcaccgtcactccttcgcggagtccctgaaggtctaccccacgcagggccgcaggagcccgcaggagggcggctcccacgtgggcaggagactgctggagcagtcacgccgagtccttcctccacgtgtcccacagctcttcggacatccgcaaggtgaccagcgtgaagcccctcaaggccatcccctgcagtagctctgcccctcccctgcctcccaagcccaaaatcgcagccatcgcctccatgaagtcccccgaggccgaccctgtggaaccagcttgtggagtcagccgaagaccctccctccaagcggtctaagtcagacttgaagtgacagatatttccgagtggacgcggacgtggaagaggttcttcaactactgtggactggacccggaagagctggaaaacctgggaatggaaaactttgcaagggctaaattctgacataatatccctcaacttccgcagcgcaagcatgatcagctcagactgtgaacagtctcaggacagtaacagtgaccttagaaatgatgaccgtgccaatgagccgcgtgccgtatggatttctggcatcggaagaaatgctaaatccttcacagtggtatttagcatcaacagctagagtccagaagggtccccgtttagaaaccggtgaaggaggaggcggtttgtggtaacacgtgaa

SEQ ID NO: 84602 - DNA, 298 bp, Homo Sapiens
  misc_feature (41)..(41): n is a, c, g, or t
gtcggaggaagggtaggggacgcgagcctgcttccatctcnacgctggacgcttgtccctgccccgcgttgccttttaaattttagctcattccgagacacctgccgtcagacatttatgcagtgtgtgattctttctaaaacaactccctggaagagaggacatttaattcaacaatttattggccacctactgtgcaccaggcagtgaacttggaactggggctactgggttacagcagtgaccaagacagaggtccctgttcttaaggagcaagtgagggcaacacgaaaagagc

SEQ ID NO: 84603 - DNA, 698 bp, Homo Sapiens
  misc_feature (65)..(293): n is a, c, g, or t
agacaggttctggctctgtcacccaggctgaagtgcaggctgaagtcatggctcattgcagcctnnnnnnnnnnnnnnnnnnnnnnnnnnnnnnnnnnnnnnnnnnnnnnnnnnnnnnnnnnnnnnnnnnnnnnnnnnnnnnnnnnnnnnnnnnnnnnnnnnnnnnnnnnnnnnnnnnnnnnnnnnnnnnnnnnnnnnnnnnnnnnnnnnnnnnnnnnnnnnnnnnnnnnnnnnnnnnnnnnnnnnnnnnnnnnnnnnnnnnnnnnnnnnnnnnnnnnnnnnnnnnnnnnnnnattcctctatttttcacgtgtcctattttctgataataggtaccccggattccatcagtcttaaattatgacttccaaagaggtcttcactggattcagcacctgtcgtaactgactgtatacccagttctcagaaatgacttgtgtttagtctagtttttagtgtaggtaaggaaaaaaactgagatatctctttctaggactgctgtataaataagtactcacatataagtacaatgttcagtagaactgaaaacagaagagtggggcaaaaaggagataggataccaacaggaccacgtctctgtaccttaaagtttttaaaggaaatcttttcaagaagccacatactaaaaaactgatttttcatagtccaacaaattactgcttaaaaatgctggacaa

SEQ ID NO: 84604 - DNA, 459 bp, Homo Sapiens
tttttgttgtttctatgcatagttttatatttgaagtcagttacatacaatatcatgtatactacgtaatatgcattttacacataaaggcacacaagagcctcttttaaatacataaaaacatatctgttgaccaacagctttaacgcaagacagacatcaaatcctctaacatcatatggtgaaatgctatttgtagctgcatttaaaatcacaaattctttcccacatacataaaaacttgcagagagaaaaaagttttgtgtgtaaagtatcaaaaaaatgcattattttaatctactgatttaaactgtttttcaataatcatattttaaaatctttacctattttattacccaaaggaaatcatttaaatctaccaattgaaaagagaaacagaatattgatataaattatttttattgtgtgaaaatgtcaaaattcagaattaagaataaa

SEQ ID NO: 84605 - DNA, 474 bp, Homo Sapiens
  misc_feature (133)..(133): n is a, c, g, or t
caaaaaatttttgtgtttataaatttgtctataaaatgattatgaatatcatatacatgtaaatcatgccttaagtcattgtgggacaaatagtgacaaaatgaaatgaattgccaagcctttgaaaatcaancttcataaaattctaaagtaaaggaaggaaaaataaacacaaattcttggttgttacctctgggggaaaccaaaggagatgcaattaggtagtgacacagaggagccttcaaaggtataaggaatattctattttttaaactggatgataaatacacacgtatttgttttattatttttctccagaacttacacttacatatgcgttccacatattagtttatgtgtatgatatatttctgaattaaaaagcttgaaagaaagaaaatcaatcttcagttaacattctactcataaagtcaactgttccctattctccaggaacaaatgtagctaccgaat

SEQ ID NO: 84606 - DNA, 339 bp, Homo Sapiens
  misc_feature (90)..(98): n is a, c, g, or t
  misc_feature (101)..(195): n is a, c, g, or t
aataacctgggctcgagcaatcctcctagcacaacctctcaagtagctgggactaccagtgtgtaccaccacacccagctaattaaaaannnnnnnnngtnnnnnnnnnnnnnnnnnnnnnnnnnnnnnnnnnnnnnnnnnnnnnnnnnnnnnnnnnnnnnnnnnnnnnnnnnnnnnnnnnnnnnnnnnnnnnnncatgtgagccaccatgtccagccttctattactccttagataaagtcccaattcctgacatggtctattaggtcccatataattagagcccacttccctctcctggctcatctctctacatcccccttcctaccctatgatcac

SEQ ID NO: 84607 - DNA, 460 bp, Homo Sapiens
  misc_feature (11)..(11): n is a, c, g, or t
ggaagttttanaatatcctcttgccttggctgcaccttataccaattaagtcagaatagatggaagtggtaccaacacatggcaatttttttctaatttttcagatgatatccaaatatagccatggttgagagccagtgttctaaatgccttgctccttaccattagtgcttgtatagtctttccatcatccccagtggtgactcagtctctacccaaacacacctagcattagctttgactgtcgatcaagttcttaggtcaattccaaatctgtcacttttctcttcagaataatctctttatttcttttaattgcttctcttatgacatgattttaaatctcctcattatcccagtagcattcttctaactagactagttgtcaatatggtatcttggaaagaatctggattttggagtcatagtacctttcatttacacttcatatctgaagtgt

SEQ ID NO: 84608 - DNA, 617 bp, Homo Sapiens
tatattattattagttgcacaggtgcaggtgtggagtaggcagaaaattggatttaaacaaggttgtagttttgccaagcactataaagggagagaggggagagtgatgataataatgataaatcatggaatgtaatctcgataaagaggagagtgaagggacatcaagagcatgagagtcagtggagattccatgaggttgaacaatgcacagtagttcaggatcaccctagtagaaagaataagctggaaaaataggatgtggagatacagaattgagattatggaggggttatagtttttttgtaatggcaacaaaaagttagctgaagaagaaaagaatacttctgataaacttccttgtagatactgcatgggtaaggaggtaattataatgagaattacaaaatatttagagctgaacgacaatgaaattactccacattagatcttgtaaagtagctaaagagagaaaactataaccttaaatacatgtttaaggttaaaaaattagaaaaagtgaaaataaatgagttaatctttcaactcaagaagttgaaaacagagtaagcccaaagtaagtagaaggaatgaaataaaataaagataaaagcaga

SEQ ID NO: 84609 - DNA, 799 bp, Homo Sapiens
  misc_feature (97)..(228): n is a, c, g, or t
tggctcaagggatccccccaaacccaagcgatcctcccaccttggcctttcaagtagctgacacttcaaatgtgtgccaccatgcccagctaattannnnnnnnnnnnnnnnnnnnnnnnnnnnnnnnnnnnnnnnnnnnnnnnnnnnnnnnnnnnnnnnnnnnnnnnnnnnnnnnnnnnnnnnnnnnnnnnnnnnnnnnnnnnnnnnnnnnnnnnnnnnnnnnnnnnccagtttctgtttctaaatgtgtgggggttctcctgtggatttctaagtctttaggagtataggataatgaacaagagaaatccttacctcaaggacctctcgattcaaaggagaggaaatgagtagataaatgaccacaatgggttgaatcaagtcactgtccctccgggaggggtgtgctcacagcataggacagcactgtggagctgcacagacaggctttgaggggtgttaggtgccagcactctctgcacactgcagtcaggacgagggagtggggagggcagtgacttttaggtgagcatccaggtgtagagcgctgccagcttgccccgagtcccagcacccgctcacagcctcctggcgccagtagtagaaatggttgcacaaagcaaccaatgagaaatactttcagttttccatctgccacacagagaaggtaggagaggcttgcaaagggaatagcatccagtccttttgttacttgggcatggaaagttggggttttccttttgattgagttctgggaagtcagcatgaatcagctttcggttccctgcctccagaccc

SEQ ID NO: 84610 - DNA, 466 bp, Homo Sapiens
ggcagcaaaggcttgcctttcaaagtcccttgcttattttaaaattagtttgccttccatgagcttaaactatttgagctgtagggggtaaatgagctgagatgtttgttgggctaaatttcagggaaaagtcaacccgaattaaaattcgacctcaggtaatgaacaaaataaatattgttagataattaagaattgataatagggctgattctactatgatatagaaaatacctgaacacaatattaacaaacaaaatagaacaattaagagggagaattttaaactttctaaatgccaggggagcaaacatactattagtaaatctcttactgcccattttcttgagagattggaatacctatgctctgtctagcttctggattcctgtgggccttttatgtctgataatctggagatgaaactaagggtcacagcttggcctaatagcatgagaaagtaaag

SEQ ID NO: 84611 - DNA, 432 bp, Homo Sapiens
  misc_feature (131)..(303): n is a, c, g, or t
agatcacctacacagcgttaaattcgcactgcaaattatacaagggtcagctggttgcttaaaattctcagcagtgatcttgcccccatattcactccgacaaggttttagctatacaaataatttttgcnnnnnnnnnnnnnnnnnnnnnnnnnnnnnnnnnnnnnnnnnnnnnnnnnnnnnnnnnnnnnnnnnnnnnnnnnnnnnnnnnnnnnnnnnnnnnnnnnnnnnnnnnnnnnnnnnnnnnnnnnnnnnnnnnnnnnnnnnnnnnnnnnnnnnnnnnnnnnnnnnnnnnnnnnnnnntgcagaaaatcaactttccctgcaatcttgaaggatggtgggattggtggtggtttccagtttagctgagtctcagctttaaggtgaagaggaagaacgtatcagattcatcatcccagaaagaaagac

SEQ ID NO: 84612 - DNA, 283 bp, Homo Sapiens
gagacagagtctcacctgtcacccaggctggagtgcagtggtgctgatacaatgatagaggcagggggcagagaaattctaggcagaaaagggcaggttctgagcaaaaccccactctcaagctgaaaagcctgaaactgtgccccaaagtgagaacttatatccctgttttcccactcaaatgttgccttttcctaaactacccatggccctcccccaccaaatcctgtgcctataaaaatcccagactcagctagtagacaggactatggctgaacgtcag

SEQ ID NO: 84613 - DNA, 475 bp, Homo Sapiens
agcactgccagtgtttaattactgctttggttttcaattttttgtttactttgtgaagtagagttttttttatgtgttaaatgacttatttgggtttacttcttcagtggagaacattcatgtctgtgggccattatttttttaaatgctttgtaggaacattttacatatcgaaatactgatccatgatttttaatctatggtgcacattttttctagaatagtttgtttcaaacaaaaatttaatggtgttttgttacctcttctcatgcaccctatgaatttttcatttgtcttcttgtcaaacagtaccagtaaagccatactaaagcagataagagaaacaccacccattcacggcaggtatatcactaatttttctgttggatgagcagagatttcattcaaggtggatattccccgggtaaaccttgcccgttagaacaactgccaacattcaaggtggatattccct

SEQ ID NO: 84614 - DNA, 638 bp, Homo Sapiens
  misc_feature (496)..(508): n is a, c, g, or t
  misc_feature (544)..(544): n is a, c, g, or t
tattatgatctttcctcaatattccttctttctcacctctttcctctttttccgtcttttattagatatgtctagactgagtttcagccagagttgaggcaggaagtccaccaggaaagcccaggagatgaagcggtgcatagaggttaaaaacgtccttttctgcttccttcaaagttcttctgtctttgatccccactacagtcagggctacccagttatttgaacttctaatttatttagatatatcttaaacaattgcaacttctaactcagctccccaggcaccagggaagttctggagagcaaaagcccaagatctaacttcaaaagcagaaaatgattgctgaattccagctgggtcattgctatttcaactcgcttttgccctggttttcttttgtagaagcttccagcaatatctttaaaaattaaaaaatttgaagggctacatcagaaatgaataattctgaaatttgactttcaatatcttacnnnnnnnnnnnnnggaatgaaaggaattgtggaaaccagtccatgcccngcaaagctcagaagaacaaagaaaatacgagaggaacaatgccttgagatttcaaaacttcagaaacagaagtcattatatgcaagaaaataat

SEQ ID NO: 84615 - DNA, 530 bp, Homo Sapiens
aaataaataactaacagtaaccttaaaatgaaattatggttcttaatgatagtggcttgttacatctcttatagccccacataggttagatttttcaatataaaattagaggataggcacattctttctttttagatgcttaagaaattacctcacataaacattttaccatttaaaaaatgatgtttaccagtccatttcagttcttcaactgaggtccattgtaaaatatactacttttgctgtataccaagctacagttgtagatattgattcaagtaaaggtgatacttcctcttccagttgatttttatactcttaatttgtgtatacatacattttcacacatgaatatgtgtgtgtaagagacagagtgcattcatttgcacccagggttggaggaaagaagagaaagaaatgagaatatgtatattggagatacttggctatttgtacctcacctgcccatgaaggctaaaaatggatggttaaacacctgtctctgtgctcatgatgaaaatgacctttgc

SEQ ID NO: 84616 - DNA, 411 bp, Homo Sapiens
  misc_feature (20)..(20): n is a, c, g, or t
  misc_feature (35)..(35): n is a, c, g, or t
  misc_feature (54)..(54): n is a, c, g, or t
  misc_feature (60)..(60): n is a, c, g, or t
  misc_feature (145)..(145): n is a, c, g, or t
  misc_feature (195)..(258): n is a, c, g, or t
tggaatccctcctggccctnaagcccttcccaaantagctggggaacctaacangccgtntgcccacccaacaccccagcctaattttggtaccccggccaaattttggtatttttaagtaagagatgggggttaacacccatantggccccaggctggtcctcaaactccctgaccctcgtgatcccacttacnnnnnnnnnnnnnnnnnnnnnnnnnnnnnnnnnnnnnnnnnnnnnnnnnnnnnnnnnnnnnnnnagaataatattgttcagaaaaacttttagtgatggaaaacaagtataccttaaattcaaggaaaaactgaatatttgggtgggcttatggaaaacccattttccattttctatcttattatatgatgggttttctgagtttaatgaaacaaga

SEQ ID NO: 84617 - DNA, 225 bp, Homo Sapiens
cggcacgagccacaaccgcctataagacttaattcaaatgtaccctccatgaaactttctctgactgactttattgccatactcatctcatagggttagtggtgcttttttccttctttaaaatatcaagtcctcctttccccctaaaaactccacattcagccttgtatgatgattagatatgcacttgagagccagcttctgtatctcatgtctttttaagga

SEQ ID NO: 84618 - DNA, 806 bp, Homo Sapiens
caaagtgatcatttgaaaaagagatatccacatcttcaagcccatataaaggatagaagctgcacagggcagctttacttactccagcaccttcctctcccaggcaaaatgaaaatacttgtggcatttctggtggtgctgaccatctttgggatacaatctcatggatacgaggtttttaacatcatcagcccaagcaacaatggtgggcaatgttcaggagacagtgacaattgataatggaaaaaaataccgccattcgtttaacatccatggcaggattcatgctcttcttaccacaatttttgactataaacatggctacattgcatccagggtgctctcccgaagagcctgctttatcctgaagatggaccatcagaacatccctcctctgaacaatctccaatggtacatctatgagaaacaggctctggacaacatgttctccaacaaatacacctgggtcaagtacaaccctctggagtctctgatcaaagacgtggattggttcctgcttgggtcacccattgagaaactctgcaaacatatccctttgtataagggggaagtggttgaaaacacacataatgtcggtgctggaggctgtgcaaaggctgggctcctgggcatcttgggaatttcaatctgtgcagacattcatgtttaggatgattagccctcttgttttatcttttcaaagaaatacatccttggtttacactcaaaagtcaaattaaattctttcccaatgccccaactaattttgagattcagtcagaaaatataaatgctgtattaataaa

SEQ ID NO: 84619 - DNA, 494 bp, Homo Sapiens
tgttctttgttatagctacgatgaccgaatttcttgtttgatttatgggtagatattaagtggtggtattctggagctggttcatatgggctgatttttagcatcttttcccagcttcctatgatttcatgttatagtttgaaatgggttgtggggggaaatatttacaccagggaaatcggtaaatatcacaaataatggctcttttggcccaatgattgttagacatttaccagcacaccactggcttttagtgaataatcttttgctttgaatggagtctacacagtcattgactttcctgtaatttccaattcctattaatttcatattctagaaaatccaagtatggcactatataacagcaaataacttctaaagtaatgacagtttcttcaatactactgaagtgatttttagagaaaaaatgggatgatttgaggaaggagaaagaaatgtaaactggaaaaaagcaaataaagtctttatttcaa

SEQ ID NO: 84620 - DNA, 459 bp, Homo Sapiens
  misc_feature (20)..(20): n is a, c, g, or t
ttctgtcagtttcgtgagcncagggcgttctctacttctcccttgagttctattgaattcagtgtggtatccctattcccggaatactttcctagctgtatttttatggggggagtgatttcggggggctcttcattcccaccaaccttgccgactgcaaatggtatttaaaataaaacgataccgaactttattcataagcatcgcataaatcaacctacactgagatacatttcccatgtatcagattggtaaaaattcaaaagatcaacaacacatcctattagcaaggttgtggagaaacagccactctcctacattgctgatgggaaagcacagtggttccaccttgtggagggggatttaccaatatctaataaatatacatattcatttactctttgtcccagcagccccaattttagtaatttaccccaaaaatataccttaacaagtaca

SEQ ID NO: 84621 - DNA, 592 bp, Homo Sapiens
  misc_feature (247)..(247): n is a, c, g, or t
aggggttactaggagtcatggttaggggaaatggggagatgttggtaaaagtttaccaacttgcagttatagggtgaataagttctggaaacctaatgtacagtgtgaaaggaaaaataatctcaggtccccaaaatcactaagccaaagtgatttgggcttacaacaggatggcaactattggtatacttgaaatttactaagagaatagatcttaagtattcctcacccacacacaaaaatattnaactatgtgtccataggatatgttaattagcttgattgtggtaatcatttcacaatatatatgcattttaaaaatcatgttgtacaacttgaatgtatataattcttgtttgtcaattatgcttcaataaagctagggaaaaataaaatacttagaaataaatgtaataaaagaagtacgaaatttatactacaaaaaaaccgacaatatttttacagaaatcaaagaactaaataaataaaaagatgttctatttttatggatcagaagacaatattattaagatggcagtatatcaaaattggtctacaaattcaatgcagttctatcaaaatcccagctgac

SEQ ID NO: 84622 - DNA, 489 bp, Homo Sapiens
tcatcaaagagcataaaaaaagactctcaaaataagtttgagtcagcttattacacagaattagggaaaccgcaggtggcccaagctaaaaatgcaacagtagaggccatactaacagaatttagatataagttgttgcacactataaaggaaatgaagattacatttgagtccaaggaagtataatttcaactattgatagaattaaaatttaaaacatccctcagatgaatatatcagagtcactacattttattatataaactaccccagttttcaaccgaaaattattggacattcaaagaaagaaaaagtcagaaacctgtgacctacactacaaaaaacaattaggtaaacaatagaaactatctatctttagagtttctgggttttggatttaactgaccaaaactttaacgaagttattaaatgcatgttcaaaaactaagaaaaaaacatgctgttttttaaataaacacaaaataccta

SEQ ID NO: 84623 - DNA, 323 bp, Homo Sapiens
ccctgaaacagcatggtactggcataaaaacagacacatagaccagtgaaacaggataaagaacccagaaataaagccccatgcctaaggccagatcttcagcaaggttgacaataacaagcaatggagaaaggactccctgttcaataaacagtgctgggataacaggctggccatatgcagaagattgaaactcaacccctacctttcaccacatacaaaaattaactcaagatggattaaagacttaactgttagacctaaaacttataaaattcctagaagaaaacctaggaaatgccattctagacatcaaccttggc

SEQ ID NO: 84624 - DNA, 552 bp, Homo Sapiens
  misc_feature (100)..(101): n is a, c, g, or t
tctctcccttcgtgcctctgtgacacatgagagtctagtccagggtcaccagtgaattaagtagctgaggcagggccaaaaccagatcccagactctggnngccaatgccctttcaacctcaccacaatggttctttattccaagtgattaagacacagagagaaagatcacagccatcagagcgggattagttaagggcttaacaaggaggtgctgtcctgcctaggctgagaagggtgaatcacccatgggaggttcccagccaagaagcaagggggaaggccctggggagaggggaagaggaataatgccccagggtggcagaagaacaagactacaggctggaaaatgagccacgtccagtggggtgccctgtggggaacctaaaatataagtctctgaatggtgcaaagttaagcttgcctatggaaatactggggaacctatgagccaaaatgattgggactcagtactcatatttatctattcaccaaaacatttgctctggaggcagaattttcttactgaaaacaactactctgacttcagtg

SEQ ID NO: 84625 - DNA, 557 bp, Homo Sapiens
attgttacagcaatcctgctgggcacagactgatgtctcattgtggttttaatttgcatttccctaataacaaatgaatttgagcatttttcatgcttaatatgaattagccacctgtatattttcattggataaatgttctctgaaatactttgcctaatacttttattaatagactttatttttagaatagttttggattcacagaaaaattgagaagatagtacagagttcacatataatttgtacccagtttccctattattaacatcttacattagtatgatacatttgttacaatgaatgaaccaatattaacacattattttaactaaaatctatagttcattcagggcctcttggtttttacctaatgttatttttgttccaggaccccatccaggaggtcaaagtacattttagtcatcatgtctcctaggctcctgttggctgtgatagtttttcagactttccttgtttttgatggctttgacagtttggatgagtactgatcaggtatttcacagaatgtatctctattggaatctttctgatgt

SEQ ID NO: 84626 - DNA, 466 bp, Homo Sapiens
gcctgttcaagcccctagtaataggcccactaacatggtccccattgcagacccagcagcagccacgtaactcggctgcaaccctactcaactgcaatcctggaggcaatcttatcagcttagggacccaaaagaagaaaatctttacctaccaaaaccagtctgtaatgactggaggaagtgtctgctcatccaaatgcacaaacacgaacataaggctatatagttagtgaagaatcaggcaaacatgacactctcaagaaaatgaatacagttccagtaactgactccaaaaaaatggagatctgcaaatcatttgataagtaaatcaaaataattatctttaagaagctcaatgagacgcaagagaacacagatatgcagttgaacaaatcaagaaaaacaatgcattaacaaaattagaagtttaataaagcaatagtaaatgctaggcatggtggcttgt

SEQ ID NO: 84627 - DNA, 467 bp, Homo Sapiens
ccttttttatcctatgaaagactaaaaggattagatttccttgggttaactcttctccagggagggccctacttaaaagttatgggatatgacaaagggagtgttgcaggtcttcaaatgtataaaatgcttattgacctgaaagttacaaatgagattcattcaagcaaatttgccaagcttcataatatccctcctaagcaaatggcgactacctgaagaaaaaggttctcagtcacctgcctggtaaaacataaatctttgcttctcaacataaggtctcaggtaggaaataagaagcagggtctacaaacatctatgtgtggctcaaaacagcagtagttgttgtctctgaccagctaagaccttcagtcccaaataacagagaatctgctggatttgcaccaacaaatttttgtgcaataaaccatcagtcatgggttaaaaatcagactctcacttcttgc

SEQ ID NO: 84628 - DNA, 706 bp, Homo Sapiens
  misc_feature (454)..(577): n is a, c, g, or t
taaataaataaataaaatcagctcaactatttatgtcagtgtcgtaaatacagaaaccaaatccttaagatgccctagaagtggaggttgggtgggagggaatatcctccccaaacttcaaatcacatccatgctctgagagctccattgggttgccaagctccattcagtctcattttcctcttaacaatgcacgtgcgcaaaggcttcctgcctgggaaggcaccaggcatctttttaaagaagtgcaaggattttagatgaggtcaggagttgggcatgggagcgaggtgaagggtgaaaaaagttaagctactctggtgtaaaccaccacaaactccctgttcctgcttttattccttccctaaaacgttttcactttgggagaagaaaattttaacaaatcattattattaataaaaagctgtaaagtgggctgcacatggtgctcatnnnnnnnnnnnnnnnnnnnnnnnnnnnnnnnnnnnnnnnnnnnnnnnnnnnnnnnnnnnnnnnnnnnnnnnnnnnnnnnnnnnnnnnnnnnnnnnnnnnnnnnnnnnnnnnnnnnnnnnnnnnntcctggctcgcactactccagaggttgaggcgggaggattgcttgatcccggcaggtcaaggctgcattgagctgtgatcaccccacttcactacagcctgagcagcaaagggaggactctgtcttccc

SEQ ID NO: 84629 - DNA, 516 bp, Homo Sapiens
  misc_feature (455)..(455): n is a, c, g, or t
cttgtagataagtgttcatgccatcattattcacagtagccaaaaagcagaaacaatccaactgtctatcaacggataaatggatacaatttggtgtattcatattaatattatggaatattttttcacaatggaaatgaagttttgatacatgctacaatgtagatgaaccttgaaaatattattctaagtgaaaggaaccagtcacaaaaggccacattattgtatcattctgtttatataaaatgtccggatttagcgaaatctatgagagacagagggtagatttgtggttgggtaaggctggaagggttggtgggaaatggggagtggctgctaatgaggtatgagattttttgggaggtgatgaaatgttctaaaatagattgttgacctggctcactggctgttgcctgtaatcccaacactttgggaggtcaaagtgggagaatcancttgaggctagaagttcaagacccagcctgggcaataaagtgacaccttctggtctctaca

SEQ ID NO: 84630 - DNA, 401 bp, Homo Sapiens
agtggtacaggcctgtcattccacctacagagatactgagggcaggaggattgatacaggcccacccacagggttcaattgcccatggagtggtaacagaccaaaatgccaaaacagcagaaattgcagcagagaaagggttgaataagtcttgatagctaatggttaataatactgcattatatattgaaaatttgctaagaaaatgggttttatgtcctcttactataaagatcatagcctccaagaaatataggactatgagaaaagaccaaacctacatttgattggtatacctgaaaatgatggggagaatggaaccaagctggaaaacacatttcaggatattatccaggagaacttccccaacctatcaagacagaccaacattcaaattcagg

SEQ ID NO: 84631 - DNA, 140 bp, Homo Sapiens
aataaaaaatttaaatattacatggctcaaataagttcaatggaatctaagtgctataccacatatttttttaaatacctacaataagagttttaacattgcttttcccctaaaattgtatttccattccacttccccca
